United States Patent Application Publication US 2007/0150978 A1 - sequence listing, part 11

SEQ ID NO: 67014 - DNA, 431 bp, Oryza sativa
  unsure (1)..(431): unsure at all n locations
agcttggataggttcgctctctgtctttcttatcgccaccccataaacgcgcatgcgtggtttggggaaaaaaaaagagggtgaagaaagaagttgtggctgacatgtgagtccaatgtttttttttacttcttttgctgattaggatgccagtgctcattctacctaaattagacggttttgcgaaaatgaagggtggtgattggtgaagattcctagtatttatagggatttcaattaaacttgatgtaaagaagaaggatgacaagtggacttatttctaacagaaatcgtccaagcccaccattctcatcaccaccactcaccaccgccggcgccttgcgctctcgcctctcgcttnctcctccctccaactccaacttctccttcgctcatcgcgacctctccatctcgctctctgctcgattccg

SEQ ID NO: 67015 - DNA, 419 bp, Oryza sativa
  unsure (1)..(419): unsure at all n locations
tatatgctcatgtgctttattaaaggaagggtttacnattctctacaggcctacaatgtgcatgctgtctcagaagtcagaacatagaacttttcatgaatgagcacagcaacctttgatagtaccagtattggttgttagtttttgctcaagataagaaaaagggcattttctggaacggcgctgtcgtgctagcttcatgaagaaaaatgtttaaagacttgattcatacatggactgcacaacaggatgtttacattagcaggatgtttcggcagttttaacatggcatagctttttgttacaagtgtggcaataattatcactaanggaaaatagctcannggtttgagtcctttgtttcgtataataatatttttctccaaattgttggttaacttaagtacatgtggagatct

SEQ ID NO: 67016 - DNA, 356 bp, Oryza sativa
atcatttccatccaagaaaaatatcatgcactgatcaaccaccgaagaaatggatggatacctactgagttcgcctgctgaaacttggaagatagatttggtactcatctatcagcctatagtagtaaagaatatctctctttgatttgaaataaatcatgatgaatttggaataaattggcgtgagccaaactgcaatattagctaaatcatgacgaagcacgcctatgttgtcaacacaatgcatcagaattaactataccaatctgtaatcgttgatatataaacccaatttcctccaaatattaactgtaccaatctgaatatcccactagagaaccaattttgttgccaga

SEQ ID NO: 67017 - DNA, 446 bp, Oryza sativa
gctcgtattagcaagcaaaagatatttaagattaggcagtgtaccgatcccaggatggattgttccattgaggttgttatggctgagagcaatttcttgaagaagtgaacaattagcaaggtttgatgggatctcaccttcgatgttgttgctccacatgtcaatgacctcaaggtgggtacacgatgatatggtatccggaatcatccctgtgatggaattcatgcctaggtttaagttcctgagctgggttaagcggccaatctcacgaggtatgtggccactgatttggttatccggcatgtaaattgttgtaaggaagctcaagtcggcaatgcaagggggtatttggccagtgaggctcagtgatttaaggcgaagagcgacgacgcgagctgcaccctggttgctgcatgtcaccccatgccaatcacagaatgcaagtg

SEQ ID NO: 67018 - DNA, 372 bp, Oryza sativa
tacttaaactcgtcataaggaaaccctaagactgcaccccggcagaccaatgcttgtcccaagggagtgtggggagtcttgcaaagtgctatggtaccacgtgcccagtggcactaacgtgctcataacacgtaggctattggcagaaaccctcatttctgggatgacacagagactttcaaccaaatatgtgtgacaataacaagtttaactttaaaggcaccgatttctagtacataccgtttggatctagacgaaagatctgccctggtccggcgttcacacatgccatcttggagctcgcgctcgccgctttgctgtaccactttgactgggagctcccctgccgagttgctccatgggaagtggata

SEQ ID NO: 67019 - DNA, 389 bp, Oryza sativa
  unsure (1)..(389): unsure at all n locations
tctatactaaaaagctggtggcaagctcattctaagtggccatacccaactgtacgtggcaccaacattccatttccgtaactttattattatggtatcaattgtgggtcatgacgagcaattctttctacacatattcaggaagacgacaaggcccgcctggtgcaggaaacggggttacaactgaagcaaatcaacaattggttcattaaccaacgcaaacgaaactggcatagcaacccagcatcctctggtgaaaagaccaagaagaaaaggtaacttataggaaaattatgcctcattgntcatagttccgtaacaagctcgcaacatttgtgttatcaattctaccctgctcatgcatgttaaaaagaaaacgtacaggtgat

SEQ ID NO: 67020 - DNA, 422 bp, Oryza sativa
atagagcccgagccagccgtcctgtacctgtgcagttttctcttcctccatcaaatctttcgcatcccgtgctccggttgcaaaattaattgaggggaaatattcctcttatcctcctctatccttacccccaagaattggactttatcccgaagaaatcaacgcggaatcgaattcgttttcgagtttatctctccaactaaccctcggtttttccggctcaaatcctctcgtttggagtccgatctctctctcccatgcctataaatagaacccccaggctctcctctttcgttttcaacctctagctcgagctcccgtgccctagccgtctcttcccacgctagccatctctctcctcctccggccgccgctccagccagctatagccgtcggctccgccatcaccggtcggcgccgtc

SEQ ID NO: 67021 - DNA, 398 bp, Oryza sativa
  unsure (1)..(398): unsure at all n locations
agcttcagagtgggctctgctgcgacggctttcattattatgattgnttggggtgcaaatttgtggagcctatccagatacagtagcacgaaccgttgaacttgtggataacgaatgttcagttgatttcatagacataaatatggggtgcccaattgatattgttgtcaacaaaggtgctggatcatcattgctaacaaaacctatgaggatcaaaagtattgtacaagcagcatccactgttactgaaaaacctttaactgttaaggtaatggtgcagtagctcaattatactctgttaggagctaattagcacttgaggacaaaagttctggtgatttcatccagatgtcgatctgccaatgcattgtcacatttatggtcaacagggttgaact

SEQ ID NO: 67022 - DNA, 442 bp, Oryza sativa
gtatgatatcaaacgtaattctctttttagataatttgttagagcatgccggcctttgctcaaagagttatagccaattattacaatctcacactaaaataagtgaagttgaaagaaacttatgccagttctttgctgggagttctcaactcctcacccttgttttccgcgcgcatgcttttcaaactattaaacggtgtagtttttaaaaaaaaatctatatacgaaagttgcttaaaaaatcataatgagtccatttaggggggaaaaaatctaatatttaattaattacgtgttaatacaaatattgttttgtgtgccgggatcctatacacagccttaatagatgaaaccaaccatcaaccagaaatatactaatgactgctaacccaagattaaaagttcacaaataatacataatcctatggcaccaatgtcctat

SEQ ID NO: 67023 - DNA, 324 bp, Oryza sativa
  unsure (1)..(324): unsure at all n locations
ttaagtcacctgaggcatgcaagctgaatgagcttgagagcaaacatntgcttattttaatataatgtgttgaaaaggagtagatttccctctctcgaccggttggcttaagtaaagcacccacaatggtcaaaactgacctgtggggcccactatccgttacctcataaagggaggcatccgattgttgcctgtccagttcagccaaacccctggtgggctcaacctgcctcactttacgaccgggtattccaactgacagtgcangcgtggcacagcgaattatcattaaaaatattatttcgtgttgctctgaaaaattca

SEQ ID NO: 67024 - DNA, 411 bp, Oryza sativa
  unsure (1)..(411): unsure at all n locations
aagtatggatctggcggtaactccaaattaagtgactaanaaactggtaaaaatagttacattattgtcatantttgagcaagttagccatacatcttgcctgcatatcaacgtcatatgtccaagtaacatcatggtttcctccctgggctacggttcgagatcaaataccaatcagagagctgctagctatggtacactaaaatgtagcaagcctagcttntcttgtgcttcttggggtggacagaatagcaaagttctcatgttgccgcctcttgtctcaccaggaaaaagggaaatactcagacacgtaatgggataaaaactagaaaatgctccatcctatgaactagtcaactcttcacttgtgaacagggtttgagtgcagcacanaattattcacttgtgaac

SEQ ID NO: 67025 - DNA, 350 bp, Oryza sativa
  unsure (1)..(350): unsure at all n locations
catcgaccttacgtggactatccaacggtcatgctgctgacgttggaccaaaccattacatctgcatctctctctctctctctctctctttcaatttctctatctcattttttctctctcaatttctctatgtttcttgggtagtatattccttgtccatctccgaaattagctgacaagtggcgtgcaagtacatgctatttgttgtaagataaacacttgatagctttccaaagtcaaaaaaanaaattgcatcaagagctatagctagatgccgtgatcaggggagagttttcaactattagacctaattntcanggttaggtagtagagtgagattgctagctagt

SEQ ID NO: 67026 - DNA, 461 bp, Oryza sativa
tatagttagataacccaaaggatttttatccatagtcttcttcataaaactagatacgacaaatcatctaaagaaagctgcttcaagtttcatgcttagttttattatgaagcataaactcgtatcagagtgtaacttatgtcaacattctgagcagaaatactgccatgccttttcaattggatagtgtaaaacatcaaaatgtatacaaaaaaaagaataacatattagtgatgaaattttatattctataaattcttaccttttggtttatgtgttggatatttcagcaaccagcaagggtagtgtaaagtatttaaccttagttatgtattaaatcttaactctctagataagttgtagttggtagatggaaagattccgcaccatacagacaaaaatcagaaacttaaaaatagtatataagtagcacgccgatatgttttaacacgctcaacaat

SEQ ID NO: 67027 - DNA, 426 bp, Oryza sativa
  unsure (1)..(426): unsure at all n locations
gctgcatggagtcatgattcacttcttatttgttcagtnttacaaactaatcacataatgaaaagatgcctgccactgggttacgaaaaggatcagggaaagaagagaacatatgtaacctagtcatccacctttttaacaattgtaatttgtgtgctccaantaaatttaaaaaatgaaatctttgctccaagatactacttctatagctatatattatgatacatgtcaaaatgctactacacacaataatgcccattttttacaggccatatggctttgctttccttcgtatccatgtgcttgctagcgcaatacatgcatgcatgcaagttaaaaagatcaaacaaaaaanaaccttaaagctatacttatatttgcctcattgcataagcacttaagaagctttcaaatggagtggttagc

SEQ ID NO: 67028 - DNA, 369 bp, Oryza sativa
ccctgccacatatagttacatacgctgaatacaggagagcatctttggtattctcactgcacaaaggtatcgcccattaacagatagttcttaaccacatgagactaaacactctacattaactaagaaacacgctgattagtacttcacgtataagggcttattataacttataactactcagtgctattgcattatgaccaagtaacccattcttcttgccatcacctgtctacttactggctcacaaatgaatccagataaaagaagtgctaccggtgtccatagccaaagaatactcctataatctatggcacgatgagaatgttatcctgtgaataaataacacagaacaacatgatacactat

SEQ ID NO: 67029 - DNA, 445 bp, Oryza sativa
gatccttaagtcacctgcagcatgcagcttaaggctaacacccaaagtttatatatcttacaataatacatctcctagagtactccagtactgttcatcgttgtttcgtaatcgtgcgaagccgtggccggatttctaccctaccgccgcaaccgtttcacgggtgcgtgccgctcgccgcccccagctcctttggacgactaccctgtgcaactgcgcatacaattaccacatagctcggtcatggtctactagttgcccaaacctctccaagttccaagactcctgctatgtgaggtcagaaaaactccttgtctctagatctgccattgtatgtgtcatcaagtgatttctttgagtatcttgtgctttggaattcttgccaacgtgttcccacgatttgttcgggtaaaccgaacaacagaacccaaagtactcagtttac

SEQ ID NO: 67030 - DNA, 461 bp, Oryza sativa
  unsure (1)..(461): unsure at all n locations
tattcttggagatgctctaaaagttagatcaaaactattcttaaatccactggtcttatgggcctgngctggtctcctgatcaatgccatcaatagcatccctgcaggagagcttgatggcggccgcatagcatttgccatgtggggaagaaaggtaaagaaatcatgttgctattgtaagtttgtatctatagatgtgactactggctggctacctgaagctggaaagaactgcaatctctcatccttgacttgagacaattgtaatgaatctcaacctgactttgtaacagatatcgtctcgaatcagcagcttggccattggacttcttggaatttcagctctcttcaacgacgtcgcgttctactgggtggtgctgatcttcttcttgcagagaggaccgatttcccctctctcttgagaaataacagaaccttgagaacaatacatcagcattggt

SEQ ID NO: 67031 - DNA, 469 bp, Oryza sativa
  unsure (1)..(469): unsure at all n locations
ggganatggaatctcgtatcagtgtcagtgacgagtcctaatcttgttctttgacgttagtaattctgtcagtccaactgaattgacagtgtcacataacttagctaattctgaacacagtgcaatcagacgcaaaacgaaaactgaacatagatttattaattactgcagctaaagttagccatgagatcgatgagatcagggacttgcttggacaaagcagtcatggaagtgcagcctgagcagtgacgcccccatgcgaggctcgttgttcacggcggccgtcacggcgctcttgatggtggccagcgccctgtggcacgacgtgtcgtataacgtcngcgacagctgcgccgccgcggcggcggcgaggcacatgagcacggccactgaaagagaagaagccatggcgatcgatcgatcgatcaagcagcagtagactaccagagcaccactactactactcttg

SEQ ID NO: 67032 - DNA, 369 bp, Oryza sativa
  unsure (1)..(369): unsure at all n locations
tgagcgtagagggagcgcggcattttttgttggcgaggctacttctttgtaaggcacggtggacggtgagctccgtctaacttgagctccagttctgcccatgtagaagcagtggtggccaagcgagccccgttaagcttgagctcacccacctcacctgtccgcgagaagaggaacatcggtgatgatatctggctaaccccctcaagctccggtgaaagtgcgtatggagagggggggtggggaagatagtgtttaattanatgaactgttgacgaacaatgtgatctcgcgatctttaaatatattctgataatgtttcatggcggtttagtatcttatatgaatactttgattaccaatttttgt

SEQ ID NO: 67033 - DNA, 251 bp, Oryza sativa
tggcctatatttttgtgaagatttgaaccttctatgtggcatgaggaaccctgggcaacttgggaaacgctctgttgcgaacctccgatatctacgggtgttcggaataagttcgtatctttgtgggtaagtgtagctctctgcagaggttaactaactgttcaaacagccgtgcccactgtcatgggcggatgtgaggtggttcccgttgcgtagatatgtttgcctgtgctttgagaaaagttgctgtt

SEQ ID NO: 67034 - DNA, 445 bp, Oryza sativa
  unsure (1)..(445): unsure at all n locations
taatcaggtatgaatgctactaatattggtcttggttctataattctaatcctaagtcccctgctggatttagacccattagcctttgtaatgtttcttataaaatcattgctaagtccttggctaattacattcagaataaacttcctaaccttatttgtgacactcagcaggcttttgtcaaggggagacgcatctctaataatattgtgcttgctcagcaaattgctcactcttttaatctcacctcttttaatcaaaaagcttttcttttaaaaatagacttgtctaaagcttttgacaggattgaatggagattcatagcggacgctctttgtcgtaaagggtttcatgctaatttcgttcgtcttgttctttcctgcatcaactccgctaaattttctgtngttataaatggtcaatcgtacgggtacttttcagctca

SEQ ID NO: 67035 - DNA, 333 bp, Oryza sativa
  unsure (1)..(333): unsure at all n locations
ttttatatactcccctagaaacgtagtcgtcgatatgaatcataatcgaggtcactcatntcgtatgtaacaataccttttctgttacgcactgtcacttaactaagtgaaccctgctgtttgtgtttgcatctccaattttatccatcacatctatcaacacctgggacactggatatcctaaaagtgtaagctgcatattgcatacagaatgacattgcatttactagagagtatatactacaaaggcgtggcgaaagtatggatctatgtattaacaaacacactcatacccaagtaaagcatagcactgctagtcatgaacacatttta

SEQ ID NO: 67036 - DNA, 395 bp, Oryza sativa
ggggaagcatttgctagttaaacatatttaggcttttctttttgtaccaatggtatccacaagggttgtctgaacatgatcaaacaaacctcttttggaatttggacaacttaagcttgatataagacatgctctttttatgaagcatgttgcttatatttgtacatgtaagcttcagcttatattagctaagagttgttgctattcctgattgaacaagttttaaaatatgtcaattcagctcttaagtatggagactgttttcaagtggaaaacaaagaaagattttgtttttccgacaatggtttcgtggacaagatggggcatatagtaagtactaagtctttattatatcacagctttattctaatatactttagatctctactactact

SEQ ID NO: 67037 - DNA, 403 bp, Oryza sativa
gcttctgctcatacattgatgacactgttcttgtttctacatttgcagaatgatccctcgctgacttgcacaaaatacatcagtggactttctcctgtggctgttggttgcaagaatctatctgctctccacctcatcgattgcaataaaatcagtggcgcctttgaatggctgaagtaccttggcagtgatggatcactggaagaacttaaggtgaagaactgtgtatgaatcaaccaatacagccttctaatgtttggtccaagatggatgaagctccagaggtttgtgtttgagttcagaaatatttacagcatatttgaatctaaagatccctcgtatgtggcgaattgccagtatagatatgatttctcctgtgagaatttgaagcaatgagcttgag

SEQ ID NO: 67038 - DNA, 471 bp, Oryza sativa
  unsure (1)..(471): unsure at all n locations
agagcgatcacgacgatgctctcgtctcagtctcgcgcgcgtgctctcaatacgcgcctggcactgtgtttatggaaaacacgaggcctgngagatctgcttaactccagtgcaagtccaaaactcgccttcggatgtacgagcgtgccagttgatttgatcctataattaacaagaaacaaagacaaagaaaccatgattaaatccataaatgatagccgatcggctagatgccgatgacatatcatttatctttgagccgatgtcatatgtgaatcgatcggcaattattaaggaaacaagacggaactaaatctgctcgatcggctgtagatatcaatgatatataatccttatatcgacatatacttaaatcaagtgattgggatagatcggtcaccttgccgagacaatataaatcacttagattgaaatatatattaataatgagaatatacatattcatagcat

SEQ ID NO: 67039 - DNA, 446 bp, Oryza sativa
  unsure (1)..(446): unsure at all n locations
gggagaataatgtccaataatcaacggtagatatggtattttgggctctttgttaacaccgtgaaatattctgttcttaacagaagagggtcaaagtgtagcttcngttttaaaaaagagagtcaaataagcaaagtgacaaaaacagaggtaaattggtagttagacttcaaaataagatcaaatgtgcaattgtccctaatactaatggctagtacatcagtatcacacgtcaggctgacgcgatcagtacacgcgacctactccaaaccggcgattgcatcattagcatttcggtgatgacagtacagattttatctaatttcgttaacacgttttttgaactgctaaaaattgattaaaaaactgctgaaagaattatattacacgacatttttctatanaaaatattctaaaatatcagataaatatattctctaagttta

SEQ ID NO: 67040 - DNA, 376 bp, Oryza sativa
caccgggatatattcttgttctaacagaagacgggcaaagcgtagcttccggtttaaaaaagagagtccaatgagccaagtgaccaccaccgaggtagattggtagttagacttcacaataagatcgaatgcgcgcctgtccctaatactaatggcttatacatctgtatcacacctcaagctgacacgaacagtacacgcgacctactccaaaccggcgattgatcattagcacatcggtgatgacaagtcagatattatcgtatttcgccaacacagtgtttgaactgctaacaattgcataataaacctgtgacagagttatattacaccaaatttctctatagaaaagattctaagaaatcacatacatata

SEQ ID NO: 67041 - DNA, 407 bp, Oryza sativa
ttaagtcacctgaggcatgcaagcttgccatagaagaagacgagagagatgcttttatattgtatgtagaagaaaggagagtgagtgagagagagaggtgactattggcaagtggagtaatgagaagtaatgaggctcctgctgctctgcatgcatggagaggtggaagttcaatatgaaaaggctagcacagagcagcaacaatttgaaaaagtgtagattttttttaattacttggtggattacagtgaggagtgcctactgtcatgaggatgagagagcagagcatgttgcaaatttcttatgatctgatagagctgtcatgagagtatcatgttttggagggcaggttgctttgggtcccccaactatgtggcaccttgtgcttgtctctcactgacatgaat

SEQ ID NO: 67042 - DNA, 475 bp, Oryza sativa
  unsure (1)..(475): unsure at all n locations
agcttagcctaacaaagagggtcgtaatatatcntcccgtttattctctntcttctcttctctcttctttatgtggatgtgaatattttagagtctgctgactaaacttattttacccgctctaacaaatccttctcatttaacagttcgggaaacgtgcgcatgaaaaatgaggtagtagaagataaaaaaaagggaagttccaaacacacagtaaagcaagatgtaatattcagcattcagcaattgttaagtcttccgacattttttagatgaaccgttgtgaaaacacaaagtggaacactaagcaaaaaagtggaaatcaactaggaaattttagcttagtcacaactagctccatcttatctcccctggctctggacaagcacatgtcgctatggcattccaagaatcaattatgttatagtgttcggggctctgcatggttagctctactgaaaatcaagcgaacgta

SEQ ID NO: 67043 - DNA, 427 bp, Oryza sativa
tgaggcgtgcgagcgttatagtcttacctcttgcaggtgtttttttttgtttattgtgaagcttctgagaatagtgcatgatagctcaacggctacaaataattgtatttgtgctggcaagatcagaatttttataaataaactatacgtgatgggtgattttatatgtgttttaaaggagataccccgtgcattttactgcacactttcttgatctcataggaggtacaccaaggaacatttaacaatgtagtacctcacaatatataccttcttaaataccacaaaactgttcatgtgtttgagttggtatatgaaaagtggaaattcattacaaggtaattagtgcatttctggtgatctattcacatcagcaactcttaaaaaatgtataaatatctacaacctaatcatagtaccatatata

SEQ ID NO: 67044 - DNA, 479 bp, Oryza sativa
  unsure (1)..(479): unsure at all n locations
actcagcttgtatggcggtttgcattctcgggattagcgcctacatcttcatgacaatctatttctgttcatgtgaatcgccaagttatcatatatgctatataatctagatcaatatcgttatctgaccccattggctagtctctatcatcaaagacagccgatagggttagataccaacattgaattagattatatagcatatctaccatctaaaaaaggcttttataagcttgtttagatcttgtgtttttcttcgtgcttaatgttgcatcagttaagtttgatctattaagtaacgtgtagaaccataatatctaacttgttttataattgctagtagagatagcatcagagattcagccgatcttacctggtttagtcatcttggttccttgtatacttacttgatatgctaaacctgccctctatattaagatatcgcttggtcagaatatattaagcttggntgtaatcta

SEQ ID NO: 67045 - DNA, 352 bp, Oryza sativa
  unsure (1)..(352): unsure at all n locations
ataataaagaaagcatggggcagccttcatacccatttgttggagtaaatagattcatgccatcataaattgccccttgtgaaaaatgccattacaatcatctaatcggaagattccattgcacatatattaaaattagaaatatgcaactgcttaccatttgtttgcactgaaattcctttntggaccaaactacccttatctctatctctctcccagatccgccgctcattgacaaactcatccgtcaggctcgaagatctgggcgagtaagtaggctttgcgggcacgtagcggagctgaagaacttcatgtcctccgctcccaccaaatgtctgcgaaccgctaaata

SEQ ID NO: 67046 - DNA, 351 bp, Oryza sativa
ctatgacatgtatataaattgaggtagctctgacatgttgaagcggacggccacattttcttcaaatctcctttcaattgttgatgtgaattataaaggtgcacatgaaaagaatatatgcagaagttatgcctaaaaatctctcttaatgtgcataaaaaatatgaacatattcatgaggcaaataagataatatatatcaagtaacatatattttattgatgcacatgacatgtgcagggtactcccatatccatatagataccacttcccgcgctatgaaactcacaacataaaattggtatgactaaacagaacacatctttcttcaagaagtaactattgtgacgt

SEQ ID NO: 67047 - DNA, 420 bp, Oryza sativa
agtgaactgaggcatccagcttactcccttatagaaaagttgttttcttttattatccgcggcccatgaaaccgcactctcgtaagcaaccaatttatcttaccggccgattgatgaattccacatatcccttcatgtactactctcctagcaactttagattgatcattatctaatgaatactccatctatctttcggcgatataatatttgaacgcttgccgccgaatcttccgatcaaccttaagtttatgatctttcaaatatctaatcaaaggaattctccaagctatttctaactcatgggcacaaatgtccgaattcacaattaattccgccttttaatcaattgtaacgtgccccccagctctctgcccgagatcggtcagaccggccacgcaatgccggtcagaccaccct

SEQ ID NO: 67048 - DNA, 374 bp, Oryza sativa
aaattcagcatcgccttcttgccttaccacgaactcttgttggctccattctacctcgtcccggcgttccccaactaaaggcatgcgatgtttccctgaaccgaccagttacttatccagagtgtcccattccacacttgtggtgcacttagttatgcttgatgaatttcccacatgaatcggtccttatatgcgaatacgggaccgcgcctcgcaagcataattctcgtatcgcatgatttcacaaactacttttatttcaaacactccgacaccacatgtcgtggtttcaggcttctcaaacccattcccaaattttcgactatctacggtgtttgtggatatttggcatctcgctcagatacacggatacc

SEQ ID NO: 67049 - DNA, 452 bp, Oryza sativa
  unsure (1)..(452): unsure at all n locations
tctccagctctatttatatgaaaaatcaagatcccctgttgtgttctttgatctagtctatcatgaaaatgcacgcgtgctcctccatgaagagagcatataccggtttgaatgtgtaagcttcattctgctctgcagactactatgagttccttcatgtacttgtagttgtgtgttccctcttgtatgttaataaaatgatgatagtgtttcttatgtgttcaaaagaacaggttcaccttgtactacggtagtgttagtgctttcttgtgctatagaaatatagatgactaaaggctgtnttgtttttcatatcgcagtgctcanatcctacaaaattgtctattcagctgatggaatatggccatgaaaagcctgaagtgactgcagtatcaattgantcccaattttcctcgtatctttttaacgagtattngtcgagtatgtcagac

SEQ ID NO: 67050 - DNA, 425 bp, Oryza sativa
  unsure (1)..(425): unsure at all n locations
taatacanagtanactnttagaattctaatctttaaactttaatatctctcacatcggatattatttgttagaaccgttttcaccataatgctttataacgatgttacaatgagacaatagtcatgttactacacgatgatcgagataaaaatacttttataacattgctactgcagaaagtagtcgtgttactgcacattgatcgtcgtgttactacgccgttccaatgagacgagaacttaaaaaaaaaagtaaatctcaatctttagagagcaatatctctcacgttatatatttttctaatccgtttgcaccatgatgttcataaaaaagtgtttaacaaagatagatccatcatgactatttttcgatgttgttactgcgataaagttgtcatgttacatcacgatgaaccgtatgttac

SEQ ID NO: 67051 - DNA, 396 bp, Oryza sativa
agcttctcaggttcttggtctctgtttgatttatccaagccaaccccgagaagatacgagctatcgagcggatgcgctcccccagcaagcttaaagatgtgcactgcgtcaccggctgcatggccgccttaagtcggttcatatcaaagctgggagagaaggcgctacccctatttaagctcctcaaacgctccgggccgtttacctggatggaggaggctgagagggccttcactcagttgaaagcgtaccttatttctgccccaatcctggtcgccccggagccacatgagccgctgctactctacctggcggcaaccccgcacgtggtcagcgcggcgttggtcgtggagcgcgacgaggagaaccctcactccgctcatcctcaccctgtgt

SEQ ID NO: 67052 - DNA, 461 bp, Oryza sativa
  unsure (1)..(461): unsure at all n locations
ttgcacanaggagagctgcccgacttcgatttcttctctttattaaacattactgccctttctattagtgttaacttcatgtggcattgtgtattttcttcttccgaatacaaactactgaaaacaaatcactatgtccacttcaaaataagacgacaagaaggtgagtgtgcggcaaaatgtctcgtgtaaaatatttagtactttaacctctatttggcctgtatatttagaaattactggagccaatcctaccctttctatatatgcactagtcctatcctaataatttgctacggtagtagatgacatagtacccctcgatagtaagacatccgcggtgactttatcaatttcaaaatataacagtctagttttcggatgaactcataaggataagatgtatatgtgtatgttcaaaggagtgagtgggcatatgtttatatgagccgtctttgttg

SEQ ID NO: 67053 - DNA, 311 bp, Oryza sativa
  unsure (1)..(311): unsure at all n locations
ttagatcacctgcagatgcagcttctaaaaaacaaattagactgtnatanatctggcacccacggcgattagccaattgcagccttggcacccacggtaattctaccgtacctgcccatgctgtcgtcatcccaccgaggggagtcaaacgcccaaaaccatcaaaaccctcttcggctcggcccaaacccctatctaccctaatccatccgacgccgtcgccgccgacgccgccactatatgctcgtctgcctccggcgacgaagcctctcgctcctccggcagcgcccgtcccgtcccttcccccctct

SEQ ID NO: 67054 - DNA, 383 bp, Oryza sativa
  unsure (1)..(383): unsure at all n locations
ntcatccatacttnctttattcattagaaaggagcacttctatattttcgntatagattcgccactgacgactagcttgctcgttattagtggtgctagctgtgtagctgctgtatcaatatgagcagaccttgtactgctagttntataactgcgagccgggggtaccgtcctttcgtcggacgtaccaccggcgccacgtgcttcctgtcggccaagttttaataacctttcactgttctctctgtctattagctcgtcaaaattattctcctcgttagatatagtcttttgtttttgcatatagttttgtcacgtgcataatcataaaagatactccacataattaagcatacacgacggcacgagaagctgagaccgat

SEQ ID NO: 67055 - DNA, 321 bp, Oryza sativa
gcagtgaggtaactttctttcttgcttagaaacagaactagcaatgcatgataatctaaattctaaaaggacagtaactagcatggaaaatggcatggggaaaacatgataactcatacctcaagccaaagagggaagccaaacgatgcccttggaagaatctctgattttgttgcatcctcctttttgcttgactggccttcacacgtgatttcgaaagctgctttgcttgtctcacatatattggtaatccgaaagacaatatcttcttgattgtccagtataatcttcgcttgtgctaactgtggtgtctgcgacaaa

SEQ ID NO: 67056 - DNA, 416 bp, Oryza sativa
  unsure (1)..(416): unsure at all n locations
atcttgcaaaaattttggtttaacctgtttattgaccagacagctaatactttgtatctgtataacttatggccaagaatttccttcagaaaggttatgtatcatttttctggtatacggaccacagccaggctcaatgcagaatgaacaaaaatcttttttcttggcaaagaggtactgactcattaacattgattgcaggcttagcattagtaattcctatgagctctcgttagttgcacaatacaatattatgttgtggcgatgtatttttacactggagaatgcccatgcttcccgaagctattaatggtgcaaattttataacaactcttcatatngaattttcaagtactggttaaatccacttttcaactntatttaattcattcatttgtagtctcgaataattatca

SEQ ID NO: 67057 - DNA, 387 bp, Oryza sativa
  unsure (1)..(387): unsure at all n locations
agattggaacttttgtatgctttttgatactgctacagtatctagtcgatgccataatcagcctctataattatagactgtcaaacttgataggataaaatcaaaacacattatgttctagaacagagagttgctaagaacagcgtntctaagtagagggatcctcgatattctctgattagttaagatacatattttacctcgattttcgctaacatattatttaaactattaaacgggtatgtctcttccaaaactctctatataaaagttacgttaaaatatctaatagatatatatcttaagtttgtaataattaaaacttaattaatcacgtgctaatggttttatgcgttgattatatcttcatcttaatctataatcaaa

SEQ ID NO: 67058 - DNA, 393 bp, Oryza sativa
acagtacaaaacgaggaagatggcaaatcggtgatgcttctgctcaccgaagatgttcattaaaatgctacttagtcaatattttatttcaagatgattattctttgcaaatgagattcttatgtcctcacccccttcatctattttgaatcatatcgtgaacattttcattatattagcttatttatcatactcttacttcaattctcccattattttgtacgtgatatctgattattggattggacacagcctatgcatgttgtagggatatattttgcacgtttgtagcatattgtatattctaaaaaaaagagattgttttttaatttacttatagaatgtctcttagcacagatacatgctcttcatctaatcaactatacatgatag

SEQ ID NO: 67059 - DNA, 374 bp, Oryza sativa
  unsure (1)..(374): unsure at all n locations
gcttctagtttttcatcaaattaggtgtttctgtttatcgtagcattgacatacatacagtgagttgaagnttataggtagtagcaaagtcatcatcaatgtgtgactgcgtatgaacatttgcaggagatggttcataatcggtgtgtgttcaataccaagttctttcaagcacaaaagctgtatgtaatctctgattagtactaatctgatgatccgagattctgaatcatcaaaccaaacctggtctaggtactactacacgtagtctttgtaaggactaatatgtaattaaattcttatccagggtcatttatgaaacttcccacaactttttctcccttcatttatgacattcaacgccagcgcgagcc

SEQ ID NO: 67060 - DNA, 366 bp, Oryza sativa
  unsure (1)..(366): unsure at all n locations
ctcgactgagtctccgctatgattaactcatatcaaactacattggctgtggtctgaggatgctnaatttcacataccgcggggtatctagactgcatctttgcatgaattctttcaccgcatcaggggaaacatagggacacaacactacatacagccagtgaggaccaacaggttacacacacaacaactcatccagtcgtgtaggatgcagcagagtccatcctggcggccctggggttatcatattgtgagcactatagtcctataagacgaggattactgcctttcgctcacataagtgaagaacagccgcgcttatctaacgatcacgtagctgtgagactgagtatacttcttggactg

SEQ ID NO: 67061 - DNA, 413 bp, Oryza sativa
  unsure (1)..(413): unsure at all n locations
agcttataacacaagagttttattttactttttatcgccncacagaatcatataaagcataaaacataatggtagaacaaaccaacagcatacctcaactacagcatgagtaatatcatgttcatcagtttgacctatcggggtgacatctgaaaactcacattcagcatcacttcctgaatgcgagataatacataaaagattatgcataacgtttggatgaacacaaaagagaaatgaacagggcgaattcttaccaccagtcatatcttcatcaccttcatctctatgagcccagccattctcttcatcactctctggtaattaaaaaagcatacatcaaacaaagaacattcttttattgttattaactattaaacttaccacattggatcggggtcaattcacacaat

SEQ ID NO: 67062 - DNA, 373 bp, Oryza sativa
gtacgggcaataccaggtgcttgtttccaacatagttggcaatgtgctgcaaaacagaacatattatcagttggcaaattcataaacgaatagattagagggcaataaattgcacatcttaacatgcagcaaacctggtacagaggaatcttcttgatgatagcttcaccttttgcaatggccagtgacacagccaggattgcattagcaccaagctgcacatattgataaaagacttaatagaatccacttacaaatggtacatctacaattttcatgactaaggcccatgaccagatggattatataataccttctgcttgcccacccccactcatttttgttccatcaagctgctgaaccatgaagtatc

SEQ ID NO: 67063 - DNA, 373 bp, Oryza sativa
  unsure (1)..(373): unsure at all n locations
cccgataatatgcctcatcttgcctggcacgctgagccaaccatattatgattgattccctttattaagctcgcgtgtgaacaatgcatctcttatctgttcattcctaccttttttctttgcctcgggggaacggctccaactgggtcatcatagtagaacctttccaagtagggatttgatcatgaccatttgaaattaagttcttttttaagagaaatgctcagattctgcgatacggttaaaatccattgtatccttaaaatacggccctactatagccaactttgaaccggtggaactgaagagcacacaagcctgaactnttttatctatgaaacagtcttaataaactttagaatactcgtgacac

SEQ ID NO: 67064 - DNA, 388 bp, Oryza sativa
  unsure (1)..(388): unsure at all n locations
gatatcatgagtatatacacttaanaaataaatacacaaaaacatactacgggtgtaaaaatagtgcaatccaagtcagatatatcaaggtagataagtaaagagtagtgtagctctgtccctctaaaacatttcaaaggctggtagacagcataaacttgtagccatggttcagttatgtgtagtcttgctcataatctcgaccaccactgccaggcaggccgttatgttcacatcatctaaagttatcagaataataatcttgagcacacacttaacaaaatagacctagcatatcaattgtccacaagaactctngaatggatctctagtgggagtttgcaaatcacttgcctgaagtcgttagctaaagctataatggctggac

SEQ ID NO: 67065 - DNA, 429 bp, Oryza sativa
  unsure (1)..(429): unsure at all n locations
atcttcaatattatgagtctatattattctctattccaatgtattctacccaaaataattaggcacggccaagtacatagaggttattaccttaatttttacagttcaaggtcaagaccatactttataaccaaacatttggttgtttgatgattaaaaggaaataggaccatcagaccccatgcattaatagaggacagatttgagcaaaactcagcttttaaggatctaatctacctcaagcaaggctgtattctcttttcatgccaagtgaaaactangcaggtgcacttgctccggcacttcattntcttcttcagtccatactcatgcaagtagcttgcttggatgaatttgagtaaatntaggatgttactggagggcacaaaggaattcatgtagatcaagctattgtgcatgtaaaatgtg

SEQ ID NO: 67066 - DNA, 448 bp, Oryza sativa
tgtcttcccctgttggtgcttcgacagtagctatttcttagcaaacaaccttgtgtgtccggacacaccatggaatgtatcacaatccatccaaaccaaattgcgcacggctgctgtatccgggcaccccatagaatgtatcatcataatccatctaaattccttgttcaactcgcgtttaaaccaccggaccttcagtggtcagataggggtgttaagccgaatcgctatccgctggaacggccggagtcacggctaatgagaaagccgagattacgggaagagaagaattgcgtgcttctccttttccttgtgcttcccatgccaaactaaaaaccaaagaggacgaggtggagaaggacttcttctccctctcctgaatcctgatccctcccttcaacgctaaactgaaacaaggatgtctagatggagaatgacaaccactcct

SEQ ID NO: 67067 - DNA, 411 bp, Oryza sativa
atttcagaattaaaacaaatacaggttaaactaagtatattatgcataacaagcgtttcgttcttgtagagtagataattggattttgattgagttatttttctaagggaaaaaggaaaaggaggattcaaaatccttttttcttcggactttcccaaacacaaaatacctccttgtattcgcactctcaaatgagagtggaagaaattcgactttcatataatatcttaatagaattccatgtaatgatcaatgcattttttggattctatattattcgcatgtctagaatcctaccaagagaataccccccatttttatgtaattgaagtaggattgacgaataagaaataaacataatactgtttattagtgtcgcataaaacccgaaatggggcgtggccaagtggt

SEQ ID NO: 67068 - DNA, 446 bp, Oryza sativa
  unsure (1)..(446): unsure at all n locations
atccttgagtcacctgcagctgcagctngactatacctgaattgtatgctgtgttaatagggagcagggagcattccaatcgntcattcattctttcctttctcatttttcagatttctctgcatatgctgcatgcatatgcgcctttcagtcacaacgaggttcattcgaattcattctttctagctctttttctttggctctatctttctatccatgtcctttgattatgataaaaataaaataatcaatttaacaagacaaatttggtactagttgatgtcccatgctttactgcggaatacttacatgatgtactaattaaatatcatataaatggtggattgatatatgttaattcctctgtcctattntaagtgcaactataagtttccgtgctaactttgatcgtctgcttatataaaattttttataatagtatttta

SEQ ID NO: 67069 - DNA, 337 bp, Oryza sativa
  unsure (1)..(337): unsure at all n locations
ngcttctatcctgctcgctttcctgtngacatgcagactaattattagngcctctgaacctggcatatttctttgtgaaaatcgagaaacggtagacgcacttctaatctatttcttaatagctcttcctcctcctctgcgcctataggggctctccatctgaaaacctctggcgagcaagctctttcttcgtacgggcaacaactgctcctagcttctgcagctttgcacttagctcttcattctgctgtttaaagaagatattctcttcctattatgttgggcaaaatacatgaaagagggtcagacaggaaagcataagttcagaaacactgag

SEQ ID NO: 67070 - DNA, 231 bp, Oryza sativa
tggatgatgtgaggatactgctcatcacccggagataactgcaactgataagcatcaacgagccaaattattcatgtcatgatcctataatctcagcagacattgtactgccttctatattgaacatgataaatggttaattactttaggtaattcgtgcctacgcctaatcgatgatgttcttcatccaactgtatctttactaacatgttgacgacacaagcaaccaaa

SEQ ID NO: 67071 - DNA, 368 bp, Oryza sativa
aacatggatgcatttgtaatcaattttgtataatgcacatgccgcacataagattacacgaacgcaacgtcaaccaggctagagaagaatttgtataatagttagtagtaatttcgattgcttgaatgaaataaagcacccaggaggccaggagcgaactacagtatatatctatcagtttgcacctacttgctcagactgctccgtccctctgcatctttcaggtgcgtcatgcgtgcgtgcgtctcgccggctcgccgctgtccatgtgttccccgtgcagttgagcgcgatgacgatgtcgccgtcgacgccgtgggcgatgttctcgagcaccgccgggtgccgcgtcttcttcgatccttcac

SEQ ID NO: 67072 - DNA, 415 bp, Oryza sativa
  unsure (1)..(415): unsure at all n locations
ggttctttatctcccaagaatttttttttattcttgancttgaagcgctgttttccggactattaaacgatgcgttttttgccaaaacttctataggaaagttgattaaaaaatcatattacctcatgttcacaggttttctctattagcctgagtccattataaactaatcattgtgctaaataaaacattctaattttcgtgctaaagagaagatttgaacatgtaagttcgaactcagccttaccaaagcagagttgattgaccaaaagcagtttaattactttcaccgagctctacaaagatctaggggctgatccaaggcccaacgacactaagcttgctagttgatcacacactgcactatgcgattgacatcccctattttaaagttactgtatctttgcactaatac

SEQ ID NO: 67073 - DNA, 421 bp, Oryza sativa
  unsure (1)..(421): unsure at all n locations
agcttgaagccatccgtagcntttttatcatatctatcttcacgtgcagcagctagcaatgcaccatcgatcaaacaagaaaccgttacctacaatgtacatgcctgcacaggttagagagagtccaggtgaaatactacctccgtctcaaaaagacggagcactatctagcatgagatttgatatatatcatatacaaagattcattatattaagatagatcattcaaatgctatcctagataaaaacattttgagaaggaggaaataataattacatgcatatatacaaccacacaggctcattctgcttctaccttgtctttagtctttacaggattattttcttattacaaaacggagttacggaggcatgtccatcaagaacacctgccgcgcgagtgtgtatgtgggctccgggg

SEQ ID NO: 67074 - DNA, 444 bp, Oryza sativa
  unsure (1)..(444): unsure at all n locations
atagatatataattgacgagcatatatatttatttttaattacatatataaagctcacacacattaagctgctgattcgtaatttagccacagcaacgagagctatggaacaaaactctgaacagagtgtcaaactagtcatgcatgcaaaagctagagagcaaaaaggaagtcctcaatgccatgagtatgtatattgtcggtgcaccaacatgtgggctcacatgttaatgtcaggcggcaccactcatgcattagcggtgacactttggattaattaagagatatcaataattcatcagaaattagagactagttatatagttaattctagtcaaaccatgcccaaacaaagaccttctttttagtttgaggaaatcgacgtatgtggacaatatacgtcaatatttaattaatntaatntttacatgtcattgcgcatgc

SEQ ID NO: 67075 - DNA, 390 bp, Oryza sativa
agcttcgacttggatcgatctcaagacaggttatcacttatcatgttgttcaaaatgccggcaaaataaattaaggctgctgcaattcatcatgacaggactcttcctttttttcccctgaaaagtactgaaacaaatgacgactcggccgaactaattagcatcgcaatcgctgcaaccatggcaatacataatgcatctgtgtgcatatgggctggttgagtttgatcgatcgatcgactcagctcgatccaacgacgcatgcacttcattctagcttgcgtacatgcagccacctgtatgatctgtatctgtctatgtagctagtgactcaccacttggacagcatgaacctctgcctcccactaccatccgaatatccagtgtgat

SEQ ID NO: 67076 - DNA, 461 bp, Oryza sativa
  unsure (1)..(461): unsure at all n locations
actagctgaactaaatcaaacttgtagcacaaagaatctcatgcacatangagtagggtattacgctttatagtgggccgaacctgtataattctctggttctcgctttcgccaagggacctagtcttcgactaatccaccgcactcgcatcctaaaaactcctcaagaattcacccgtgcccnccgccgaacttaaaaaaaaaggggggggctcttagttccccgctggagggaatcactcttcgataattttggacttgagattttgtgaagttgtatagatatattgtatgagtgttcttaaatttttttcagaattntttataaacatttagatagtttttttaagcaaacgagggaatatccnctcgaggggatccagatagtttctagccacaatccgttagcagccaatctgcatgggccgtacattgagcccaacgtctgtaaagacgcaatg

SEQ ID NO: 67077 - DNA, 402 bp, Oryza sativa
  unsure (1)..(402): unsure at all n locations
agcttatacttgcttgctcttcggaggnttctattgttctatctttttaaaggaaaagntcagtgtagcacaggcaggaaacaaaatcatggttcggaatctcacggtcgtcttataccgcagcttacacaactttctttggtttatactntattattccacctccatccacagtaacagatgtgtcttctgttaaagtcgacttttatacacgaatctaaaattatcgatggtaccctacctagatatcactattataattcaccttctcatctaatgcaagtcattgtgaggctacccgtgctctgactttctcatctctacgagctagtgtgaagctatcagtgctcttgggaaaggaggatagggatctttgattatcgagtgaatagcttgggtttt

SEQ ID NO: 67078 - DNA, 478 bp, Oryza sativa
  unsure (1)..(478): unsure at all n locations
cagcttgtaacccttagctaccttcctcaattgcattgatatgttgtagtggntgctcttctttctgacatcctatataatcctaggctatggactatggacagtactttatagaaaatcgttctgatcctctccttctaaatgatccaagatagttttccaatgaacacaatatgttcgtgcattttctaaaagatcgtactattttcggctattcagggatcacatctctntacatacctgtacatggttgcacctaaatatccatggttaggcaagagcaatccccttggggaaacataaacagccccatacctaaatcgtgcatcagttcactatggctcaatacgctcagtaacatcacagttcacactttccatataagagaacaccatagaagagtccatagggaggaagagttcaccatgagaaagaaagtccgcgagatgagaatcacgtgcagagatgaacatgaata

SEQ ID NO: 67079 - DNA, 398 bp, Oryza sativa
  unsure (1)..(398): unsure at all n locations
gcgagcagcattttggtttcgttcaacgcgacggcgcgggacacggtggtcttcttccccgccgccgccgccttgtncttgcgcgctgctgccttggcgcgatccatgctcccggtcgtctcttcactcgcgtcctgccaaaatcaaaccacaaaacgaactcttcaaacacttgaaacacagatgaacacaacgaacacataaataaatttcgctcaagtttacatcaaccgaaaacccatagcctcacataaacgaaatcaagaaacaaaatatcatctctgtacagaaagaaacccacgaaactcgagccatcgccgcactgtacgctaaacattntcaaacaaaagcagcaagcggaagaaccaggagatgggactgaaactgcagacagattc

SEQ ID NO: 67080 - DNA, 430 bp, Oryza sativa
  unsure (1)..(430): unsure at all n locations
gatcgaatgtcatcggggtctaatgaccccaatgatagtactgcagcttcacccctggtctagataccagtgaattgtgaaggcacatattgtaatagatcaaaaaaatagtaaaacctataatcggtgaaatggcccnctttgtcttttgagatcattttgctcgttttcggaattttcatgcattcatatgcattgaaactacactactaaaaaagcgtttttcttggcagccaaaatcgattttcggtagcggcacttgtaatagcccgtatattaaaagaatatttagttttttagttngggttgacttgttaaaataaagatgttaacagaaataaataaaagaaaaatatctttagaagtgggccaacatgagaaggcccataaatccagcccattagttcttccttaaaccaagagagagggg

SEQ ID NO: 67081 - DNA, 400 bp, Oryza sativa
  unsure (1)..(400): unsure at all n locations
agtgggggatatctttatattaagatatgatatgngagaatgatcgggtgcagtgtgtgattgggtgaaaagagaaagtatggatgtgtttagtttcacgccaaaattggaagtatgaagaaattggaacgatgtgacaaaaaagttgaaagtttatttgtgtaagaaagttcgatgtgaaggaaatgttgaaagtttgtttgtgtaggaaagttcgatgtgaaggaaatgttgaaagtttgaagaaaaaagttaaaatctaaacaaggcctatgtgaagaanaatggttgtgatggttgagagcacgaggtatatagagaaatagctttattttaagataaaactagctgggtggcccgcgcaattacgcggctatgcacccaacaaaatcatatattt

SEQ ID NO: 67082 - DNA, 463 bp, Oryza sativa
  unsure (1)..(463): unsure at all n locations
tgtaggtcanggcggtgtgcacgggtntgcgtcnatgtctgttgttgatgttattcaacagaatctttcattggaggaaaaatagcaacattagtagagcttggttggttcatgtattccttaacaatcacaagttcagttttgagttccctctctttgttcaattgtaggaagctctaaatgatgagcttctgaacgtaagatatctaagatggtggcaatacagaagaattgtttttcagcaatggaaaaacacacagataccagctgctcagaaatcaaaatgtcatggttatgtcactatatccttttagtatccaatatccgaattacaatattgtcaattaggagaagagagaaaaatgaggaatagacttgatgtattgagttaggtccaaagggcatatgttgactacaagaggcaatctttnttttttgcgatgacaagaggcaatcttaacat

SEQ ID NO: 67083 - DNA, 401 bp, Oryza sativa
agctttttttattatgctcaacaagtgttcttatatttataagtcaataacaattatgctttatttgatagccttggtctgctatgttattctgcgttccttagaaagtaattgcttactataccatttacaagatgatataattagatatatcatgttagtttcgttatctcccttgcattccgatagatatgattgtttcaatcctaatcaattgcttagatattttactttctcatgccagaaattttttactcacttttcagacgacagatagaaaccaatggtttgcagcatggagataatggtacgggtgatgatgaacacttcgttttcttgcttatccactaaaatgtaaatgaccccttgttgacaatgatattttgtgcataccaatatac

SEQ ID NO: 67084 - DNA, 384 bp, Oryza sativa
  unsure (1)..(384): unsure at all n locations
agcttcagagtagcttcagcaatcatcatgtgttcatgtattttcnggaggacttcacgtttaacgcacacaagcaatacctatgggatcaaggtgttaatttaaatattttttatccattccaactcgctacaaagcagcgggcaactttaagcggtcaaggcatgggccaccaataaaaaatactcaaatcataaaagttctaagtttcaaatttttttgaactacgttataaaaatctaattttatcctaaatattaaatatttatgacgggaaagagggaggtatagagtagaacctaacgtctttttccaaaagaaaaatcgttggaggttaattgttcggcatcttaagttagcctcattagtcgctgatagtttatt

SEQ ID NO: 67085 - DNA, 473 bp, Oryza sativa
  unsure (1)..(473): unsure at all n locations
tattaactgcagtcctgcccatcactgatcctgggcgttgttggcgtggagctgctgngcatggtcgccagcgctatgtgcgctagaccgaacaggagcggagcggcgcggcgacgaaaccagtcggccgcctgagcctctggtcattggttgcccttgagttatcgtggctgcacgcggcgcgaatgtttgcgtttgacctgctcgggtgtgcgatcggctagtatagtcggctaccaagtttctgaacgagattgaggcgtatcttcgttaagtccgttcgtcgtggtcgtgtcggttntggtatagatcacttaagaagttgatccatcaaatcctagcctcctataagcagggtttcccaaactgccggggccggtgttacagcgccccggcggtaagcacgggtaccgcgcggtaaccgcagtaaccgtgaaaaaccgtacaaaacagtgcataatttatcaataatt

SEQ ID NO: 67086 - DNA, 247 bp, Oryza sativa
cccagccaaagaaacccccaggaaaacccgaagagaccacgcgaagccaagagaaacgcacggaaagaacacaaaagagagacaccccgaacagcgacgcaaggaagaagaaccccggacaaaccccaaaagcaccacaagcaggcaaagaggaaaagcagcagaaagaaacaacaggacaaacccagggaaaacaagaaaacaccgaaaggacaaaacccaacaccgccaagaagaacggagaaaa

SEQ ID NO: 67087 - DNA, 345 bp, Oryza sativa
  unsure (1)..(345): unsure at all n locations
agcttgtaagagaattgtttttgtgtggctgattatctttccccgncaattgtctttattgacgagaatgatgcacncggaacacagaagtagagtagtgcatacttcacatgggaagtcttctatatgatgaatgttgtttgtgtatagtaaaagattggtggaacttcccatgaaatagtttatatgagtattgatgaacttttttttttctccttatangtatgatgctcattcgggtggagagcgtgaaattcaaagaaccatgttggagttgcttaataacctgatgggttttgatccaaggggagagtgtaaagttattttaacaccaaatccctttga

SEQ ID NO: 67088 - DNA, 407 bp, Oryza sativa
tgaatggataaataccgagcggaacagaacaactgcctataaagtattatgtttcaattctaacatctactgatagcccgacagagtaaattttgtcttcgaactctgcttggttttatttgatatggctcctcaagaggttgagaatataaaggccggatcactgctcatttgtacagctgcttcagtcttctcgcagcttcaataatgttctctctgtgcccaaatgcactgacccttacgaagccttcaccaccgggcccaaatccgctaccaggagtagtaaccacatgtgccttctcaagaatttcggcgaagacatcccaagaattacggccagggaagtgcacccacacatatggagcattcttggcaccgtagacgttgaatccaagtgatgtaaatgt

SEQ ID NO: 67089 - DNA, 395 bp, Oryza sativa
agcttgcaatagagcactcccttttatgactctattgttgaaccgaaataaggtccaagataagctcataaatcacgggcaaactcttgaacagagattgctttcttcccatattctgatagcagcgaaatctgtattacagctctattctaatgagctgtctgcaattatgcatgtatctgcaattattctaacgagctacctgaatctgcagtttgccgctggcaatcatcaggaaaataagaaccacaggtctcttttaacagggtaaccatttatacatttgatatgaacagaaataacatggttcttgttcagagtacatttgggaacagggaaagcagagcatgtgatcatacagacaaccaagcctgactaacagacctctaataacc

SEQ ID NO: 67090 - DNA, 460 bp, Oryza sativa
  unsure (1)..(460): unsure at all n locations
ttgtgaagaccttgagcaangcatgtcattctttgacatatatctcctataattggaaaatcattattattntgtttgcaacttgcattattagaatcacacacttaacttgcttggcctcggtttgcgtgccaaaccgacggacctacccagtagtcgcactatttcctgtaggttgtactaccctgattccttgtcgctctacccttgtggtacttcggtatccgtgctctctgagcgcgtataccaaatatcccacatacaccgttgattgtcgaaaacttgggaaatgggtttgagaagccttgaaacccgacatgtggtgtcggtgtgtttaaaaataaaatgaattgtgaatactcgcgatgcggtgattgtgcctacgtggcactgtcccgtattcgcatataaggaccgattcctgtgggaaactcatcgaacataatcaaagtgcaaccac

SEQ ID NO: 67091 - DNA, 389 bp, Oryza sativa
ttagttcatctctctgtaaaatggatcacgcaaattgtaacagataatgatcaaagatcatcatccagtgcatcatcttgatcaaaaggtattttaatccttcacgtggtaagaaagtaaattcttatgactctcatgcagggcaaaacttttcttgtaagctcataaacaaaaggtgttacaattcagttgagtttttaccaaacagacagagatggctgcatacatggagacaagaggaaagagctaaaatatattcaagcacactgtcatggtttttaatcacacctagctgtgctactgctgttgatttcttgttgcttatcggcaagtgttgcttgcagagattcacaatctgtaaaagttaaagagggatttcattatcagag

SEQ ID NO: 67092 - DNA, 464 bp, Oryza sativa
  unsure (1)..(464): unsure at all n locations
taagcttccatttatcgaaaagaagaatatctcgaaattaagatgatcattcttccacatagaaggcgatggtcgataaatcaatggaatagttcagagaaatcaccttttgctcaaccacatatcctgattgcaggtgcattcccttcgtccatgtgagcaattgagcatatatcgacacgacatgngccgtttctgtcgaaataatgatctgagagcaatctagtagtgagaaacataaagcacgcaaccgatgaacgcactgatcttcagcaaagtgtatagttgaagagcttttcacaactgattcacaaacatactgaaatcaactcaactggatatattgcagaacagtatatngtgagttgggataatacctcccctcattgaagaagaagaagaaggtgcatttctccagtttgggattccttctacaccttcactcgcgttgcaggttcagctga

SEQ ID NO: 67093 - DNA, 395 bp, Oryza sativa
  unsure (1)..(395): unsure at all n locations
agctttcttactctggatgtagagngnatgagtgtctttttctcttcttgactcgatcagacgnttgagttatacactcttcctagcccccagccttgtcatctgagaattcttctcggaagataaggctcttggacctttgacctgcctcggttgaacaagcactgatcctagcccccaaccgtgaagttggaaagaatctttccgattacacgtcttggttgatacccacggtgagaacttttatacgactagatcttacatggtctttcccttaggttcctcggaggccttgtcaaaacggtgtaaagggacatgacgataggtttcaatgctaggtgtcatttgggtaaaggatcatcgcgaacgaacactttgattgtggtcttgacctg

SEQ ID NO: 67094 - DNA, 445 bp, Oryza sativa
  unsure (1)..(445): unsure at all n locations
agctgttactctgaactctgagatggagcagcgggatctttatttgngatttctctcagaagcgccgatgtgcggcatttgaattttcatagccgaacgctcctaagcgatcgattgatagaaacatttagcagcattttaatacataagaagtatattatcacaatatattcaatgcttcattggaggagactaatctacaagtgaatacttcgtgcggtgacgtgcgttctgtatgtggaatctcatcacgtacatcacactaagaagctcggttagagagagagaatggtgtgatgggatctgatctacgaatttcggacacagacacaagcggtcagagttttcgcctgtctatgcataccagaggatattaattaatccatttaactcggtgagtgctggctatcgtaccaatacatgaacacgatttagtaagtgacag

SEQ ID NO: 67095 - DNA, 354 bp, Oryza sativa
atggagcctgtttgcacaccaaccttgagtaaccatctttccttcatgtagctttgtagaagaacaagtgtgctcaaatggaagaaccttaatctgcatgacaagtagtgccacacataagttaacatcatctgaacaagaaaacaaaggaaatttgtgaagaattcacctttgcagtcttcttatcctcaatcagagatgcatgtatatatgccaagggcaaccatcagctgcacattttgcaataaaccttgtaggatctggcttcaccgaacctttagcaaattcaaaacctttcacgatggcataatgccttacagcttttctgagagctatcatgtcagggaacaaagc

SEQ ID NO: 67096 - DNA, 407 bp, Oryza sativa
  unsure (1)..(407): unsure at all n locations
ctcagctgcccgagtcaccgaccacactatgggttatttttatgctggcggagcggagactctcaaaagttttcgctagatctgtgagtaacgtttcctggttgtgcgtctntacaaccaagtcatcgacataagcctcaacattacgtcctaattggctacccaaagaaattcgagtagtacgttgaaaagtaggacctgcattctttaacccgaagggcattgtcgtataacaataggttcctatgggggtaatgaacgcagttttttcctcatcctccctagccatgcgaatctgatggtaaccagagtatgcatctagaatacacaaaaggtcgcaccccgcagtggagtcgacaatctgatctatgcgaggcagggggtatggatccttangacatgccttg

SEQ ID NO: 67097 - DNA, 401 bp, Oryza sativa
  unsure (1)..(401): unsure at all n locations
agcttggcattcatgaggattccttcttctttccaagantgcngagctcctgaggtatcactccaccaagagtggcgatgagttgaccaacctcaaggactacgtaacccggatgaaagagggccatagtgagatctattacatcactggcgagagcaaaaaagctgttgaaaacttcccctttctccataagctgaagaagaagggttatgaggtcctgtacatggttgatgccattgatgaatacgctgttggtcagcttaatgagtttgaaggcaagaagcttgtctctgccaccaaggaaggtctgaagcttgatgagagtgaggactagaagaagcggcatgaggaactcaatgagaagttcgagggtctgtgcaaagtgatcaacgaggtgctcg

SEQ ID NO: 67098 - DNA, 450 bp, Oryza sativa
  unsure (1)..(450): unsure at all n locations
tgcatgaggcccatgctgntcgctcttcttcaaccattgttttatcataagagtacgcaaaccaaaagtgaaatcgttttttccgaattcgtaatcccgtagcaaaaacgtattcctgagagaaacgtgcttctaggccttgtgggtcatactgggccttcctcttcctcgttggtagatatttctaatatttttatccatctcacacatattccaatataaaaaaatatattcctattttatcgaatcacaatacaactatttcttactttgttatctatttccaatacaattaattttttactttcacaaattttgatgtaataattactntaaaaataaaattatttcagaacaaatgttaagaattataaatgaatttattattggacaanggagtatacacttctttgcttttccctactaaaataattaaaaaaataagatctc

SEQ ID NO: 67099 - DNA, 404 bp, Oryza sativa
  unsure (1)..(404): unsure at all n locations
agcttgaactcagtgtcagtgagcgcttccgctagtttccagataagggtttcgaacgcgtggtggagataattgggacaagaaaactagcaaatgagtgttcagcacaagaaaccttatgtggcttcatcaatcttcaactgtaagaggtgctactatttgatagaaggtcaagaatacatgaatcaggttcaacgcatcattggctcattgcattgttgaaatttcacgaaaccggcgatcattgacgaacgtttgtgtcaaattgcatgcatcaatcaaatcgcctcatccattctggcagctcaaaggaagctttaaagttatcgtcgtccgttcttcttgactntgcttttccaaaaggaaacatgatatgatttgcaccaagataatggatggattgg

SEQ ID NO: 67100 - DNA, 475 bp, Oryza sativa
  unsure (1)..(475): unsure at all n locations
ngaagcatntactctctntgtaattcttgcactntcactttctgctgaccatatgccttctcattnttctccatgtcttccatcatgatatcatgcatgtcatgtactgatgtgcatattttcccccaaataaaacatgaacatttcaaagtttacacaaggttttgctagcttccacttatgtttagtaattagtacaatttgaaagtttccttggcgcagcataagtcaattgaagttcgctgtcagcaagcttttactccatatcgatttcagtcaatttatatcttccatgtattatggtagagaagaatagtatccatataacttgctcctgtaagttcataaccaataactcttgctaatgacattntgaaaggttgtttttaactgtatatgcaacaatttgcggtcacagtttgttgtcacctatatgggtatatgatagcagaccacatattcggaaatatagctg

SEQ ID NO: 67101 - DNA, 402 bp, Oryza sativa
agcttggagtaaatcttggtcgagttcggattttctaacggggctgagacctagtccttccctgactggattgaatccgagtcaaggagagagatcttgccgaagtcgttggtgatgaagtcgaggctgccgaaccgaaacgcctgcccgggagagaagacgaggtcgtcgatgccggagacggaacccatcgcactaatcggcgaagaacttgacgctacccctacctggcgcgccaactgtcaaaacaagatttcggcaatacttaaagggggtggctatcaagctagaaaagtggatgggtttgaagacaagggaatttatacaggttcaggccttcttattcaagaagtaataccctactcctgtccgaggatgattccgccgagtatatattgatcg

SEQ ID NO: 67102 - DNA, 460 bp, Oryza sativa
  unsure (1)..(460): unsure at all n locations
ggaatgaactcaagagcaaactttggagagggaatgattatatgttgaagtggggtggaattccctctctcggccggctggcttttatagggtacccacaacggtcagaaattacatgtgggacccgctagccattaccttgccaaaagtggcaggtaaccgttgcctggccggttcgaccgaaccagtgggttcgaccgaacccttggtgggcccaaccggccccactttcggccattgtgttctaacggtcagtgtggtcatggcacagtgaattttcgttaaaaattntattttggtttgctctaaaaaattcatttgaagaattntcctcaaattcaaaaaaaaaatcctaaatgcaattttaaaaaccaaacatgcattgatgcaaggaatntaaattggtgaaaataaacatgcggatacatatcaatntaccagttggcgaaggtcgcgtcat

SEQ ID NO: 67103 - DNA, 423 bp, Oryza sativa
  unsure (1)..(423): unsure at all n locations
ntggataccggcggttgctacgattttctatatacccttctctcggcgagatttttctaggcaggttcgcctcgcgagcagcagcagcagaaaaaaatgggagctcctatataaacaagcggtagaggtggccagctgtttctatttttaccacttcattctccattcagtttgcttagcgagttatgggggaaaaaagctacgaggttttcttggatcatccgacgaactcgagtgattgattgatttacccaagtctgttattgtagtgatttacccgaggttttttgttttcgttttcgttcttgcgaggggtgggtgagagattacaggggggattttctccgacttggaaggagcagagaaaggtacacattcctcgcgatctctgttttntttcatctctatttgattagttctgat

SEQ ID NO: 67104 - DNA, 374 bp, Oryza sativa
  unsure (1)..(374): unsure at all n locations
tagcttatagccatgcctaagggttctaaatttatttagcgcccnnccaacctgtgattgtgaatatggagcatctgataaaaacaccaatctgattagaatatctattcaatattgagtattgtgatacaaaaagaaatataattgactgtttgaatagaccgtatcaaaagtaataatccgttgggagatatagatcaaagaaatattttcaatgaggatggagcttttgctaattttcctataaaatccctataagatcacccattctatagttattacaagagcaagaaagtatatgcttcactcctttatataaaaaaccttgattgaaattttttctgtagtattgaaaccctctcaatttatatgtt

SEQ ID NO: 67105 - DNA, 399 bp, Oryza sativa
  unsure (1)..(399): unsure at all n locations
agtttatgtgggtatatatgtcatgtttttgtttttanagaatttaccattccatatttcttatattaagtaccggctttcgattgatactggtatttttcatatgtatagtttcgggttggattctttatacgctttttggttctggctctactattctcgatttcgtttaaaaaaagaaacaaaatggttacgaaaatgaatgagggctgttttttttttaccatatccaaccgtgttcctgatatagagattttagttgaactaatatgatcagaccttttttaaacgtagttctacttacaagcttgcaaatatcttgcccacacaatggcagcaactatagccaaaatcaatctangaacacatcgagcaccagtatcagtgagagtgattact

SEQ ID NO: 67106 - DNA, 404 bp, Oryza sativa
  unsure (1)..(404): unsure at all n locations
nnagcttgacttttaattattattatggttactgtttatagtatttcttgagcgcctcccctgcatttttcacgctctccggcaccggcagattgcaaagaaaagtcaccctggattcagagatctgagcccccttctccttcgtggatggatccaatttccacagctttaccggccacaccttcagaagttcagaacttcagatccattttatgattccaacacaattaattattcttttaattactgccaatcatcaggctgaaagctcctaaaaaaatactagacatgtgaaatgtacggaggagaagacttaatttttattgctacatgttgaattggctagcctggagataaattattttgtctatgaggctgtgcttgtctgggacaagttgcagcct

SEQ ID NO: 67107 - DNA, 470 bp, Oryza sativa
agctcttctcgtatggcttggttttgatctggtgcatatctcttgcagttttgctttatttggcttggcgtcaggtcgcaccatgagtttgtgctcaatcacctccctgggtacccccggcatgtcggacggctaccaagcgaacacgtcagcattgtcgcggaggaaggtgatgagcgcgagttcctatttctcgcctagtgatgccccgatcttgacggtcttgtcggggttggcactgaagagtggaacgatcttgattgcgccgtccggtttcggtgtcttggttggtttgctcactttcttgggtggctcagctgtggtaggtgggctgggcgtgtgctcgaccatgtcgaggctccgcttgtcgcattgcactggcagcttagcattcccttgaataagtgattgttcccttcagtcccgcatcttgagcacttgatacgcgtagtgagatgcggccataaact

SEQ ID NO: 67108 - DNA, 406 bp, Oryza sativa
  unsure (1)..(406): unsure at all n locations
agcttccttttgaggataacacannngangttataactttcgcggttctatnncntttacatgataagttcagccttgataaatgaacaattttttattatttcaaaatgctatagcccatatggcacaagtagccaactaatattatattttggcgcctatcggattgcttctatgatctgacagcatagtttgtgtgtgtgggttataggttagtgtagactacttgacaaaaccaattgatgttttcaaggaaatgagacgaatacttaaaccaagtggattggccataatgaggtaatacatatagtaacttcattatcatgattaatgtgatttactagtatcccttgtttcttttatataatcctctttactagatgtttatatgaaacaatcctgaact

SEQ ID NO: 67109 - DNA, 471 bp, Oryza sativa
  unsure (1)..(471): unsure at all n locations
aacaacttcacccataaatgggcgctgatccacctcatgttttacgcacatttaatcaatagctgctacttttgcaatgctatcgaataggatgctatttccaagtgatggatcaattattggttccaagccatctctgctagtaagaaaaggacaagcccatgcaactaaattttcttgccctggaggtctcaaaatatccaccggtttccttccggtaagaagctcaaggaggacgacaccatagctgtagacatcactctttactagaagatgcccagtcattgcgtattcatgagcaacatacctaataagagttcataatctttntaaggtgaggatgttaaccaactacaggtagtaagataataatttcagatcaaaacttacccgaaagttcccataacacgagttgaaatatgctcattccnctcacctatggctgttcttgctangccaaagtctgacacc

SEQ ID NO: 67110 - DNA, 324 bp, Oryza sativa
  unsure (1)..(324): unsure at all n locations
gcttttgcccttgcactgtttgtgtttattacacgcctgtgntaaccaccggattctattccgtaaagagtacgaggatttgaacagatggtcaacatgcaagagtagttgatacaaaacaagccgttacctgtccgagggcttggatgttgcccttgacgatgtagaagagtccgatccatgcaaagatagtaacaaaaagaagattcctcagcttgtcatgtggtaccttccggtgaaagatcgtntgaagcgtttgttctcaaacccgaaggatgccgaattgatgcgctggcatcatgaaaagcgaaaaaaggatgggat

SEQ ID NO: 67111 - DNA, 440 bp, Oryza sativa
  unsure (1)..(440): unsure at all n locations
taagagaaaaaaaacgttgaacaagcatgctaagtgtattaatgtaaactactatacagaanatgggagctcctgaaagcattagtatacttttttaatgtaactgatttcatatgtttaacagatgaaagttggcattgacttttgtacaacctgaacgctggatagcatcccacataatgtcttcgtgctcttggatgccaaagagacacaagggtgcagcttggatgccaaatacttgccatagtaactttccggtattgttttggcgcanaaagtcctgcaacaatagagtattagagatactggcatacccagaagatagaacagaacatgaaattcaacatatacccctttgaagagaccttcggatgcatatatagccagaatctaattccctgccatagattgcaagaaccaagcttcgcacacatacaatc

SEQ ID NO: 67112 - DNA, 431 bp, Oryza sativa
  unsure (1)..(431): unsure at all n locations
tggaagtgtgtgttgaagtgagtgagatgatgtctccatcatgtggatgtatgacggctggcgaaggggaaatgtccgaagtgccctccaaccgtcatcagggatgcatctgggacgtccacgccaaaccccacatgcaacggtggaagtggtggttcnctttntntatttttttnataaatattttttatttttttatgttaatacatatactttctaagtttaatattttgttttagatattctcatatattatatttgttttatttgttatttatatactgtacgaacatggttttattaaatatttttcgttattatttttacgtatattacttccttctttttttttttttttttctttctttctatttttctcgttatattttcttcttattttcgttgtttctgttttattatttttctattat

SEQ ID NO: 67113 - DNA, 398 bp, Oryza sativa
  unsure (1)..(398): unsure at all n locations
agcttatcatggaagaccttggttattaaatttttcaatacttgccgatgaatctagtgatgtgtaccaaaaagaacagttggctttttgtttgagatatgttgataaaaaaggaagggtagttgaaaggctccttggtgttgttcatgttgaaaatactacttccttgacacttaaagctgcaattgaatcattgcttatggagcattccttgagcttgtctaatgtctcggggcaaagctatgacggtgctagtaacatgaagggtcatgctaatggactaaagaaattgattatggatgagtgcccttctgcctattatgtccattgctttgcacatcaactccaattaacacttgtggctgttgctaagganaacccaaattgtgtgtgtgtct

SEQ ID NO: 67114 - DNA, 466 bp, Oryza sativa
  unsure (1)..(466): unsure at all n locations
acacttaaatactcagcttgattanagtgttgctaagccttccgacttatcattgttagtgtcaagatgccagagcggttgtgcgaagaatatgaacaactcgtccggaatttctggtgggggcatgaaaaaggggagaagaaggttcattggattgcctgngagaaacttacaagcccaaaacttttgggtggactgggctttcgggatatccgatgttttaatcaggctctccttgctcggcaagcgtggagattaatcgaatcgcctgatagcttatgcgcacgagttctgaaggcaaagtactatccaaatgggacaataactgatacagcgttcccgtcagtttcatcgccgacatggaaaggaattgtgcatgggctagagttgctaaagaaggggctgatatggaggataggagatggaagtaagacaaagatatggaggaaccactgggttgcacatg

SEQ ID NO: 67115 - DNA, 414 bp, Oryza sativa
gaccttaagcaccgcggctgcagcttgctttgctgagatcgtatcattttgtggatatattagaagatgttcaaagcaatatctttatacatgtgacaaaagatacatgcggttgaatgcagaaacagtgcactagtctagaatgctacctacaattggaattactacttactcccttcgtcccgcgaaaaacaaatatataattgaataacacattctaatataatgaatctgaagttctggatcgaggtatgtccagattcgtactactaagatgtgtctcatccagtactaggctaactttttataaggtggagggagtattataagctaggcaattaatgttgctactatatatacaacaggaaaactgctctcctcaaacctttgcctcctcaacgggcctagactcgt

SEQ ID NO: 67116 - DNA, 463 bp, Oryza sativa
  unsure (1)..(463): unsure at all n locations
tgagcagttgagccctagatatcctatgatatgcccttgtctcgcaacagtagattctatatgccttagcttttgaaacataaaaaggaaaaaaagttttacacataaatgttccttggttgattatgttattttctacgtcttatcatccataactcaaccgattatagccatttaaaataaaatgaattccatcaaccagactaaaatatctcaaaaccagataaaattatccatcaaccaaaaagaatagatataattcacagctttcatccctgtttaatcatggttttaacttcatatggttcgctttatttttccgtgatgttngctgtcttatttggactacactcgatatgaagtgctaaattgtaataatgggttgtagctctcttgagcaaaggccggatgttatttcttataaaaaaatggtgtaagatagatggagatggacttgcaacac

SEQ ID NO: 67117 - DNA, 437 bp, Oryza sativa
  unsure (1)..(437): unsure at all n locations
aactcagctatgaattggatgatttttttttagaatctttctcttgtttgctgttcagaatgatcgaggatgcagaagagaaagggctgattactcctggtgtcacaactctagtcgagccgacgagtggcaatctgggtttaagattggtgcttgntgctcttcgcaaaggttacaggttcgttgcagttatgccgggccagtattcgtttgataagcagatcttgctgaaatacatgggagctgaattgtttctatcaggtaaaaaaataagaagcaggaagttgtagccatcaattgtttgcttccttgtttcatggagaaaaaataacaactctcttgctttcttcagcataatgtcagtgaaatgaaaaattcagtggaactgtntctgttaccttctttctttggtgtaaccatatggcagatccaacact

SEQ ID NO: 67118 - DNA, 230 bp, Oryza sativa
acctcaactttgtcacaaggagttattgcccacaaagtgatgctatcaatttggtagccacaagcgtggcctaagttggtaagaatttgaatctataacgcataggcccaaagactaggtaagtgaggcatgacacatgtgtgacaaccaaccaaacaatatactaactaattgtgacatgtctaaagtttggcatggcaaccttcgaaaacacaccaaacagccccata

SEQ ID NO: 67119 - DNA, 420 bp, Oryza sativa
  unsure (1)..(420): unsure at all n locations
ctaagcttctgtactatatatagaccgtatctattgngctcactcatgatgtaatcngagcagaaaggaagttagttaatttaagggtttntattttattaacgcattagagactgagntgacactggttattttataattgagagtaaaatatttgaaaatatgaaaaatataattgcaatgcaataacatgattatcaaaaatagaatatgagatataacaaaggtaaaagataggaggatcaaaattatattgaataaaagaagaaaaatatatatatattcaagtaaattatgattcacatggaaaaacatgattaaatttgtaatcttaatgcccatggtaaattacctacggtaagagataatttatatgcgagtttctaatttatgaaagataattaccactctagacagatt

SEQ ID NO: 67120 - DNA, 391 bp, Oryza sativa
ctttaatactcttgaaataggtgtccggagcgactctcagcttgtcaaacacttctgaagcatcaaatctactcggaccattgttattatagaacattgcctggacaagcggagtagcggcatttgcgacctcatccctggctccttcaagtcttttaatcttgccgaccaggacgtcgaactgggcttgcgacttgatcttgcgttctacgacaacaaagccatgtcaataatttgctacaacaaagaaaggaactcaggttgttggctaacaataccttcaacctcctttaaagccgagtccctttgtgcagctaattctgccttgtgactttctaaggtctggatccgcttctccagttgagctatcttggcagcttgcactggtttg

SEQ ID NO: 67121 - DNA, 461 bp, Oryza sativa
  unsure (1)..(461): unsure at all n locations
actcagcttgaacatttgtcaacttcccaatacatgagtntgatttgacatactatattgcttacaagaagagctcagaacgccagatatatgagttgtatgctgtgagcaatcattatggcagcatggcaagtggacattatacagcatacataaaggttcatcctataatctgaatctgcgtgcaattntattttaccgtaaaaaaatgttgtttgttagagattccaaagggttatttgtgtttatagctagtgtatctgaattttattttgctgtctgtacatgtgcaaagaacttaatttgtgccataaaaatcctgcttgctgtgctctcctagaattctaacttgaaatttctttatgtagctnttggacgaggaaagatggtataattntgatgatagccatgtttctgccatcaatgaagaagatgtataatcatgtgcagcctatgtgctc

SEQ ID NO: 67122 - DNA, 357 bp, Oryza sativa
atatcgaaaatcttcagtcctttgatataactcaaggttttcggaagactcccactcaattgattatctagtagatagagctcctccaacttggtgcagttgccaattgaatctggtagaactccagataatttattgccatgcagccacaggtacctaaggctagtcatttctccaactgtcaaggggatagaaccactgagtttattgtaatggaggtacacttgctccagaaactgattcttgaacaacccctctggtatttcaccagtgagggagttactgtacaaagagagagacgaaagctttttgatgtcaccaagggatgctggtatctcaccagaaaaactgttactg

SEQ ID NO: 67123 - DNA, 360 bp, Oryza sativa
  unsure (1)..(360): unsure at all n locations
ctcagctgaatagctnatctgatgctacgattggcatcttttagtggaatctggagattaattaatcagactagacactggtttagaatgtctgtttattgcagacatctgaatactgctcatattctaagtctaatgatctcaaagtaaagacattggacactatttgtagatgtgtggatattataagattattcaattaacttatncaccatagggagcaatacctggaaagcttaaatatcttactgctatcacatgcagtaatttaagctgttatgatatatatttcaactaaagggaatagcctataccactcaaaggtaccctcatttagggtatatttgccttgaccagttt

SEQ ID NO: 67124 - DNA, 405 bp, Oryza sativa
  unsure (1)..(405): unsure at all n locations
gcttcatggttctgatccaacgaaccagaagaaggatttattaagtactagnatggatcatcacatggctagcggggacgatgcgatagccaaggacggagtggcaatggcatcaccaagtgcagttcaaactacgattggcggtagggtttcgaaccggctctctcatcaggagcgaagggtggacacagcgtttcatctggactacgctggccctagaacccatcccccctctcacaactgatgagtatgtcgttctgtggcattctctgactctgtctgatgatcttaattactaatatgcaacttaagtgatttatgtatatgagtgttcaatctctaattctggtgcatattcttgcttgtttgctcttatatatgctcaatttgctaataaattaatat

SEQ ID NO: 67125 - DNA, 466 bp, Oryza sativa
  unsure (1)..(466): unsure at all n locations
atgtgcgtgcatataccaaccagacatctctttccaatttatgattctcacaaatgaaataaattaacctttggcaactttaattattttcgatgaagcagcttattgcaacctaacctcatcattctgcaagtagtactgatgatgaagaaaaactatcagcagatccagttttatatcctctctggatcttcatgtcaacacctcgatgccgctgtcctatgagtacccaagaacagtattcccactgatcatccaacctactaaaatagtgcaaatctgtcggcaganagggccactcctctccagcaactccaagaaccggttggttacaacgccgcggcattgtcgtctcctgcatccatcggtcgcttcgacgtcttaacagaagttcccattaccatcataaactagcttatcaaccggcaagggcagactaataagatcagaggcatctgttcttcac

SEQ ID NO: 67126 - DNA, 382 bp, Oryza sativa
agctggagctctgataccatctcttgacattttttatttagtttttttcggaactagcccgcgacgctttctaattacctgttaaccgataccagtcccaggaaatagtgctggtatctcaggaagacagaatatcactgcaacagacgtctctttattatagagtagaggttcagtcatgttgggctgtggacagatcccgagctcacaactggattacaaaagggaaacggaagccagtgcttagaccaaacatcacaggcgcgacttgtgaactaggccgataccctaaaactcaacgtagccggctttgctctggaagaacttctcattagccggattctgcttatcttcttcatcaactggggtggaatcattatat

SEQ ID NO: 67127 - DNA, 440 bp, Oryza sativa
accagcttagtaaagcgaggcctgaaaacaatgctgatagatccggagttttcgcacgcatggtcaacccgtgcatgcaaacgtaactgctgcctgtactgtactgtacgctggagactgtacccgaaacttgcagcagctatataccagaagtccagaattccggaccatgcatctgcggcatgtttggcttcatgactaataacgtgggaaagatccctatgttttaaggccctcatctaacagtctactaaacggtgtgtgggctcttatagcctacttacaatgttctagaaattatataattatttttaagtgtaaataataatattcaatcaatcatacgttaatcgttcatttcattttatatatcttttcaatcttatattggacagcttaggacttcttatgaacatatgaatttcacaggtactgttcat

SEQ ID NO: 67128 - DNA, 412 bp, Oryza sativa
actgagctgcagctttagagttaaaaaccttttttttttagtaatcccgcctgcagaacgtggcaggtcagagtttacatcatgagccagcggtctcaaatcctatactgctattacaattcaaatactgaaagcttattctttgctaatcgacaacaaaaacttagtcaaaaaaagtaaagaactgaagaggcacccaacttcatccactgtaaatagaaaccaaaaggattgcatattttatggaccttgggaagatattatgattgtgtcactaacaactaatctttaatttatccccctgagacatgaccacatgaataaatatatatactcacaagtaccatcgtagaatagaagaaaagggaggcaagcaagaatggctcacattctgctataggctaagcatagt

SEQ ID NO: 67129 - DNA, 267 bp, Oryza sativa
cggcgagatcaactgataagtgaaacgggcttcaaatataaatgtgaaagaaagttctggttattctacaatggaatctcgaaccgtatgcgaacaagaaatgtgagtcttgtgtttacatgcaaaatacatgacatgagtttaagtgtactgaactcacacactgatcatccgagggtactgacagggattaccttaccattttcttttactatgcacatgcgcgaagtctctaatctagagaacgagcgacaacatcttcaaact

SEQ ID NO: 67130 - DNA, 407 bp, Oryza sativa
  unsure (1)..(407): unsure at all n locations
agcttgtaagctaaagagctgccaagaacatatatgaactatttggnttgctctagctccattttttctgaagctagagtccaaccaaataattntagctttattcaaaaagaagtgaagctgacaaaaatgctctataaatgaactaaaaaggtggagctaggtttagacagctccactctaaaccccaactcatagagttaaatttgagagttggagccctaccaaacacgcattctatttggtaggcctctaacttataaatttaacttctcatttgatagggctcaatatcttaaatttaactttaggagttagggtttgaaatggagttgtggaggtggagctgcctaaacccagtttcacatctctagttcattttgtaaaagtatttcaaccaactccgc

SEQ ID NO: 67131 - DNA, 407 bp, Oryza sativa
ttcctcatcaacaacgatggggacgcatatgctcataccacattttatgggtgaaaacggatgggttcgatcggatcacaccattcctatataacctatacttttcttcaatttcgaaattgtgtacgggtagtgtcggataacatatcactcatctggtattttatctcatattatttctcctaaatcagattaagaataaatatttatttgtatctctaattcgtagatattaaatataaggagacaattaaagtgttcaaagagacacatcaatgaaaaacttatacaatattacacgtgagctcgtaaaatagtgattaacctatcttttaccatgtttggtggtgggtttcataatatggggcataaacagatgatataactccttcttatcctaacccata

SEQ ID NO: 67132 - DNA, 396 bp, Oryza sativa
agcttgtatgaacctatggagaaaatgcttatattacagctgccacagacatgatcatatatagcctaaagaaaaaaagaacattgagatgattgtgctgtgcacagtgggagcagacctgcaaaggcatgtttaacttatataggtcaaaccaaagtttgcacttttagtttgggccgaaattttggtgtcactgaaattatacgaattttggtgtttccagtacttctttgctcagaattattttaaatcttaacaaattttgattgaatttgaataaatcttgaccacatgcacaaaatatttggagaagttcaaaaatttcgagcgagatatatagttgcttgctggtggggtccaaaatttcgaaccaaaattttaatcactatgcgaaac

SEQ ID NO: 67133 - DNA, 445 bp, Oryza sativa
  unsure (1)..(445): unsure at all n locations
actcagctgagaatagatgctgacatgtatttgaacttattgtattatatgatgcaacttagagtggcaagttcatgcttcattgctcatantacacttctcttgcgggttcttaataatcttggtccagaattatgacattttggtagccccctaaacgctttggctctctgaaatttaaaatcctgttcttcatagcttcatgctggacagcttggctacttgcaagtatttaccaatgctaccttgatttttgtattcctacatatggtgtgatctctataaatntaaattacttgcttattgtgatcgtaagtatatattatggtttacgctccgtcagatatctgaatatgctgggatgaaatggacctatgtcacgaacactcctcaatctggcgtggtgccagctttatgggtgatcagattggggtagaatcgagag

SEQ ID NO: 67134 - DNA, 398 bp, Oryza sativa
  unsure (1)..(398): unsure at all n locations
agcttcacattataaaagncaaaacgtcttattttctataacagatggagtagtaacttgaaatggatgggacgtattctattaatatgaatataaataagatatatgtctaaattagtattagtatacttcttatcctactctaggttactatattttagaatggagggagtactccctccgtccctgaaaaaatgaatataggacagagggaatctggacagaggttctccctccgttcaaaaaaaaacttaacttctagagtttgaattttgtcccataaaaaaccaacttctgcatcataactaccctcaacacgtagaacgagaagtttattccttcaataccctctgtctacctatcactctttattattttttaatgattaagggattata

SEQ ID NO: 67135 - DNA, 401 bp, Oryza sativa
agcttcccttcattcatgagattcttgatcattgttctgatcgaaacagccatatgacacatagatatcagcgacacaatcagatcagcagcagttggaacaataaaaacagctaccagaaaccaggactggactagttaagcagttgttaattacccttgttcagtatcatattttgcttcttcacgaaggagatcaccagcactcagatgtgtaaagccaaactgcttaacaattttggcacattgagtgcctttgccactgccagggccacctgcaaattaaatgattcagcaaaagctcaatggagtatgaagtcacatagtactatgaaaagctgaagcttgtagtagtgtgagcactacttattcagcacagtgggttagtttaaaaacagatag

SEQ ID NO: 67136 - DNA, 477 bp, Oryza sativa
  unsure (1)..(477): unsure at all n locations
tgacatagcggaagttgtcatgaagagagcggcccttgttttaagcgctctggttagacgccacaagctcgtccaggcgaggggagagacgagaggccaagatcttggagaacagcttcccaaagctgtggataaggctaatcagcctaaaatccttaatgtcaacagcctcgtccttcttcggcaagagggagatcagggcgttcttaaattactgtatgactataggtgtaatgtcttcaaataaattctcattgtaattcaataagttaatgaatctgcaaatagttcacgtaaatggaacataatgcttgatctcaaatgacaaagaaacatatatagtatgggcatcttatccctgatcaacatcacaaagaaggattcatcantttacagtgttaaatgaaaacatgcagcatcaaatctattgcagccggattatgagccacccctgcaacatgaaaattcacatttata

SEQ ID NO: 67137 - DNA, 402 bp, Oryza sativa
  unsure (1)..(402): unsure at all n locations
agcttgttactttcgaaatggcctttcatgtttgtttatttggngctctgtgtaaagccaaaccatatgcatttattttaatatgcaacataaccatgcttaatcatgccattaacttgttttaattttgtgtttcagtaagttgcagagtgatgctcttagggaggcaatctcacaaattactagtgaatcccgcgagaagcagcgcaagttcgtggaaaccattgaactgcagattggactgaagaactatgaccctcaaaaggataagcgtttcagtggatctgttaagttgcctcacatcccccgccctaagatgaaggtgtgcatgcttggtgatgcccancatgttgaagaggtattgtactcttttatcagttttgcatcaacttccttgtgtac

SEQ ID NO: 67138 - DNA, 393 bp, Oryza sativa
agcttcatataaagaatataatgcatacaagttttcatagcaacaaatagacctcaattattttgctagcatgcacaagaatatactagaggtataaaacaaagctcttctttttcttatttttattaattttcagaattagagcaaatgcataaaaataaacatgaatgcatgaaaaagcacaaactccccctcaaattaacctccaattctccccgaagaaaaatcaagaagaaattaaagatttcgagaaagacatccaattgccaatgatatcaccaaggttatcatgaatcgacatatatccacttgtattaagaaaaactactacctcaaacactagcatatgaaaagctaataatcgagagagtagaaccaaaaaatatgtcaatc

SEQ ID NO: 67139 - DNA, 392 bp, Oryza sativa
  unsure (1)..(392): unsure at all n locations
tttgtcccaagctccaccaaaatctttatcgcaagctcttttcatatcttccaagaattgattgactcgctcggtctgaccatctgtctgcggatggtaagcggtactgaaatttaaacgggtccccaattcttcttgcagtttctgccaaaactttgaggtgaactgactacctcggtcagatactatcttcttgggtaccccatgcaaacacatgatccttgcgaggtacaattctgccaatctctttcccgtataggtggtatgtactggtataaagtgagccaccttggtgagtcaatccacgactacccagattgaatcatgacccgatgacgtnctgggcagtccttgtataaagtccattccaatctccttccatttccattctg

SEQ ID NO: 67140 - DNA, 363 bp, Oryza sativa
  unsure (1)..(363): unsure at all n locations
caactgaaacaactctcatcggctaatctcaggacttcgaagccgatgctgactctaagccgttgactactccgggcttaccaaatttcactgttaacactaatctatgtaattgatatgtgtgatatggttatgacaaaagaaattattgtccaactgtcatgatacttgggattttgtctttgcgaaaattttaaaaaaattcttttagagcaatactcctcagtgactatgttattacctaccaaggccatatatgattctcattgcaaaatcctgatatatgtttaggctgcttggcattacattgagctttgtcaaattattgtgacccgtgtgagatngctttcatactntaatgat

SEQ ID NO: 67141 - DNA, 363 bp, Oryza sativa
  unsure (1)..(363): unsure at all n locations
agctgcagcttcatgagtcaaaacccaatttctaaccttttttagagatatcgccgntttactaatggtcggttgagctgaaaagtgacctgcggtctgaccgtgggccttaagtcggtctgaccgggtctgttagcccgtctgaccggcgtggttaggcccggctgaccagccccactggtctgttgcactggtctggtttttggtggcgatacagatccgccagatcctcatcctggcagaccgagccgactgcggtctgaccgaaccgtggactggctgaccggccactacttcccggtcatgaccggccaagttgatgggcttaatgattgtgtaacggcttttttctagccgttcaaa

SEQ ID NO: 67142 - DNA, 390 bp, Oryza sativa
  unsure (1)..(390): unsure at all n locations
tggtgaagatttgaccggctgtttttttttgagtgacacagaaagaacaccatctgcttcacccaagcaaacgcctccaactccttctgcccncgttcattntacaagagtaagtatctctctttgacttcttctgaagatacttccctcttcggctaattactcatagactttgtggttgcagaaaaagataactgctgtgaagaaaaagccagcagcaacgattgtcaagtcagccccaccagtaagatgtctntaattcttttacttaatcaaactcaacctgctctatataacacttgtctattctacagcctcctcctccttctccttctgtacagcaatggtcaagtgaccagactgcatcagctgtgtggtgtcatcacatcg

SEQ ID NO: 67143 - DNA, 407 bp, Oryza sativa
  unsure (1)..(407): unsure at all n locations
agctntagctaccactgctactactagtcattttatcatttagtcttccaaaaaaaaaaatgggtcagcaaatcaaagggaaacacaaaccgccagtcctacacgtcttgagttgctgcacgctgtttttcctcgccttctttgctccaccacacaatgctgctactgctagtcctgtttctggtgcacccagccacccctgcccacacctatagaaaaccatgcatgtcttacatgatcatgataactttaaacgatgtattttttataaaaaaaattctatctacaaaaattttctataggaaagttgctttgaaaaatcatattaatctatttttaaaatttaaaatagttaatactcaattaatcatgcactaatggctcacttcgttttgtgtatctttcta

SEQ ID NO: 67144 - DNA, 412 bp, Oryza sativa
  unsure (1)..(412): unsure at all n locations
tgattcaattgtgtaccttcttcatagctgaacactgaatncattgttttgaaggaacgacattgaatttcatcacttgtataaaactataaccaaatgaaaggaaagcatataaactgacaatgacttcttgctgttctcagtgcaacctgatgcaacccgtgatgcttcaatacaaaaataattgaatttatgcatatgactatatgacagctataaagatttagtatatttttgtactgttacattgatcatcatgatcggtgcaaacttcgtcatgacatcaagaattgagatctactatagttaaactttacaccaccaccaacagaatcagcccaatcttatgtatctctacgatcatctgcccttggagctcgtcctcgcgctatcgctcctcggagaattccct

SEQ ID NO: 67145 - DNA, 401 bp, Oryza sativa
  unsure (1)..(401): unsure at all n locations
agcttggcacacggntacaatggaagaagggtttgattctctttatctggagggaatgacacaattatgttagtggtggacaacgtttccaaatttgctaagatcatacctttaactcatcctttcactgcatacacagtagccttggctttcattcaacatgtttatgatgtgtttggcatgccccaagtgattatctctgacagggataggatattcactagcgctttatggcaagaattgtttcggttggctgatgtgaagttaaacatgagctcttcttatcatccccaaaccaatggtcaaacggagcgactcaaccaatgtttggaagcatttcttcggtgtactgttcatgctataccaagcaaatggtctggatggctatcacaagctcagca

SEQ ID NO: 67146 - DNA, 406 bp, Oryza sativa
  unsure (1)..(406): unsure at all n locations
taagcttgcgacgacatggaccgagcacggcgaacatggcgtgctttcttttgtctccgcacttggagncagagtactatgtgttctggaatatgaaccagccgattcatgcgagcttggtggccttgttgcaatggcccatgagccttaaccggccggcggtggtcctggagaatgcgccgtcgtcggcgcccgacgagcgcgccatggacgacaccttcttgcgcatgagctcgacgaggagcatccataggatgactaagaggacgctggggcggtgcacggtgtcccgcgacatggatgagatgagcggtaggatgatgactattgtggagcggatgatgaatcgcaccatggataatagcgtgaaccggtcgcgtatcagactcttcatctcaccaccgac

SEQ ID NO: 67147 - DNA, 340 bp, Oryza sativa
gtatgtgtttcccaaccttttattctttaaggaggatgttattgagaagaactattagtggattctgaaattctgtcacgtttctgtaggcaaaaaaaggttggaggatctgttacacctggaagaaagaacgttagaataaatcggggtaatggctctatccaaccaaaggtgagtacaaagatgtgctccttcttttcctaatttcctgtaaataacttttattccttcttaatacaaagatgcgctccttgcgtattccaaaaaaaataaaaggtgagtacaagaatattttcttgatgatcattgttatatgcagaaactttgataagatgtgctg

SEQ ID NO: 67148 - DNA, 402 bp, Oryza sativa
  unsure (1)..(402): unsure at all n locations
actcaagcttgaccncaagatggatggcgcanggcaaagggataatgtttcttagaatgttttcttagtcttttcccggtcttggtattaggtgtagaccggatttgctagataggcgtcgtactatcaagaggggtctatgaagtgagcttgtggatgatcttgtgccatattagttcatatgcatataggtgcactttgtgggctngtctaaccaagtgtgatgagttttctcaagtcctaaaccaggagagaagtgggcatgtctaataggagtgagtgacatcttgtgcgtatgtccggtggatatcctttggagtgtgagccctttatccttgacctaagctgtgtttcttggatggatatttcatgggttggatggccctttgataagccttcata

SEQ ID NO: 67149 - DNA, 316 bp, Oryza sativa
  unsure (1)..(316): unsure at all n locations
aaagatataaaagaaagggggaaagagaaagaaaaaaaaaataagaaaaaaggaaaagggaaggaaaaaaaaagagaatgaaaaaaaaaaggaaagaaaagagaaaaaaagggaagagaggaaagagaagatgaaaaaaaaaaagaaaagaanagaaaagagaaaaaaaaagaaggggagaagaaaaatatataaaaaagaaaaaaatagaaggaaaaaaagagaaaaaaaaagaggaagaaaaaagagaaaaaaggaagaaaaataaagagagaaaaaaagaggagaaaagaaaggaaaaaaagaagaagaaaaa

SEQ ID NO: 67150 - DNA, 399 bp, Oryza sativa
agcttaatatacttaaatgtaataagatcctgtcatatatggcggatttaacatgtcattgaagcatatagatcgaatatggttaaatcagataagatcggctgaaactccgatactaccctaatcggcaaccagaggataggctagagattgatattctaagcatgacttaatagatcaaactcaagtgatgcagcattaagtatgaaaagaagaacaatatctagacaatcaagccgctgggtgtttcataaagtggtagatatcttatataatctaggacaacgtcgctatttaacctaatcggctgccttctattaacagatagccgattgtaggttagatgacgatattgccaaagattatgtaagatatatgataactcgacgaattatatag

SEQ ID NO: 67151 - DNA, 442 bp, Oryza sativa
  unsure (1)..(442): unsure at all n locations
tctgcctgacgatgtgcttacaatcatcctccgttgtcttttttccacatgaccttgccatgtctcgctgtgtctgcaaactctggtgcaccatcatcgacactcatcgcatgctgcgtgtggacctcctcccacactcagtaggcggcatattcatcaactttcatgatctaggcttgtcagaattcttcgcccgcccctcgacaggccccacaatatctggcaacatcaactatttgcctctcacatccatagttaggggccactgcaatgggctcctcttgctttacagccatatcagtcgtcccggcatgaagcagttttatgtggttaacccggctacaagacagtgggtgcaattgcctccacctccaaggcctgatattgggatcatgcacttagacaatntgtaccttgcctttgaccccaccttgtcgtcaca

SEQ ID NO: 67152 - DNA, 399 bp, Oryza sativa
agcttatattcaatactcccctctctttcttattataccaacctcatatatatcacgtacgatgctggtttatattgggacgttgggagcatatattatcacaatgatgaatctcaccctcttcatattttttgtaatggctggctactataccatcgatttattacatgaactgtcagggatattcattaatcggcagggataattgacccggtaatgttacaagtagcacacccggtgtattcctagattatggttgttttgggtggatcccattatcttggctacttcatgccgaaccggcaatgatgggccaatagttataggggtttctactgtacttcctccgtttcattttataacactttctagcattgcccatattcatatatatagtat

SEQ ID NO: 67153 - DNA, 377 bp, Oryza sativa
  unsure (1)..(377): unsure at all n locations
ttaacangnnatctgccatcctatggaccctgatgactcggtgttgtattacattctagagtaacacattttgttagctntagctatagtattttactagccaaaagtcaaaaccgatgattttcaaaactgaatcattcttagctttcttttattgctggattggatccaacattcagttggtcatgttagtggtttagttccaagtttaattaatcactagaaatttatctaccattcaatttggatattttagtggtcgaattgatgaaattgaaggtggctgtggcatcaataccactctttacaatcactatcaaattccattaaatccgttcagcttatttatcctcttcttgctattccccttatttcag

SEQ ID NO: 67154 - DNA, 392 bp, Oryza sativa
acctgaggcatgctagcttgttcagcaaccaagcccaactagaaaattatgagtcttttttcaaacttctactttatacgaatggaaattagtttaggtaagtagtgaactcaccagtttctgatagacgacggcatcactttttgtctcaaatgtgacaaagccgtccgggttgaccttaccccttgcccgcgcctagttgcgacctttttgttcagtgatgtctaaatacgaggcagggacattcgctgctgcagcggctgcatcttcttgggcccatattgcctccttgccgatgtaccctgcgtggccagccgatgtgggtgctcattccgctgttgcagttggcgatgtgcctcgcttgattccctaaactcttgggtgttcttgag

SEQ ID NO: 67155 - DNA, 414 bp, Oryza sativa
  unsure (1)..(414): unsure at all n locations
cttacactgtagtgatcgagagaatcacttgattttngaacaccatccggaatgaaaactaagcaagtagataaaatgtactttatgatctggtctgtctcttaatatcccaaggtggtgagaagcgtgtgttccacatattttatgcgtaagggtaagtcaccgtgcatatttacttaacatgagagagagtacccaaactatgcacttgtacattctagatatacagcatggtagcaactcctgatcaacaaccaagttntgtttccctttcgtcctttacttcggacaagcaaaggttcatacttgangnngtttgttgatggtcgttacagacaaatntcgaccgtcaatataactaaataatggagaaatagctatgcttgcaacgcatatatattttcaaataatata

SEQ ID NO: 67156 - DNA, 364 bp, Oryza sativa
  unsure (1)..(364): unsure at all n locations
atacaagttgctttggtgaaactaaccgacgggttaaactcttgtcatttctaacccncgccgagttagcctgttcttgctccattgtgcagtatgaggaggcgactgtcttgtctgttcaaggggtcaggctctccatcaagtcgtcatgatgagtctagtactcgttcatcagccgatgtctcgatggaagatgccgacgctccgcgacaactcctgagcgacgctgaccttgaccttgtcagtgatcgagagagacaagcctactacatgctgagcgaccgggagtacgttcacacgcgagaatactcaccggaattgctgaaaaaatatgtatggatgcctgaatttgttctatttggaa

SEQ ID NO: 67157 - DNA, 412 bp, Oryza sativa
  unsure (1)..(412): unsure at all n locations
tgactacagcaccacccaagagaaacatgtngtgaaggcttaccatcagtactgctcatgtgaggagtggcagcacactgaaagccctggcagcatgcattggctttgataacctctcaacaaaatagggatgtcaacattgaggactttgtgaatccctatttttcagttgagctgttcaggaaggcttataggagaatnatagagccattgggtgacaagtcttactggccacaggttgaattgccatgggtgttgggtgcacctttgccatagaagacaaatggaagatacatanagcttatgatcaaaagttgcctggagggtggtggaagtctaaagccaatactactccaactgataatgactcatggaagaaggtgctggtaatgggcaagagaagatgcaaggg

SEQ ID NO: 67158 - DNA, 326 bp, Oryza sativa
cggagtgcgggttaagtgtacatccactgcagcgcgagataaccaaatctattcgaatagcccggctcgtggttattgaacaccgagacatgtattacacttggctagactctaaaatccttaacttgtgtgggatgggatattgcatgacaatttttatgctgatggagccactttctgagaggcgggaatgtggaccgtctcaaaaaaccataacgactccatggcgggaagctattcttgggatcacaatggatggtggacagaaactgcattgtttaatattaacacttgtattaaaacttgaacaagctatgctatgtctt

SEQ ID NO: 67159 - DNA, 469 bp, Oryza sativa
  unsure (1)..(469): unsure at all n locations
tactaagcttctagtattgctctgcactattcctccgtaaaggctcttttctngtgntncntgnacagnccggcgccacctccaccccaccatgggcttccttcgcactcgcccagccccgctatttctccacaagagctaccagggtaaaattactgctctaattgccttgcctatctgctacctctgtccccaatccaaatatgagggagtttggctctgcattcgcattgccaaaatcccttgtatttcttttcggagacggatgaaatcgattctgcatttgcatccacgattcctaactggatgagagaggagtgacctggagaagctacctgtgatgcttggaagtttaccccctcgttgagacttgagaaggatntattgttttgtgctgaccaagcaacatttgatgcttttctggtgcaaaaggttatgatgaagcgccttgagcagcgcattatgaaac

SEQ ID NO: 67160 - DNA, 302 bp, Oryza sativa
  unsure (1)..(302): unsure at all n locations
acctgaagcatgcaagctttggcttcntcagctgacataaaaacatttctttttatttctattgggacaacccaaaaaggcttgcctgtgtttagagcacaaacccttgtgaacatttcgcgaactttgggttactcttacacttgtagataaaaatctggagttcttgcccgattataagaactatccagttggtgaagcataatcctcccgcgggggaatgctatacgcctggagggttctcctcctaggcgaatgaatgacgccatagacaccggtatttcgaggcatattggatatat

SEQ ID NO: 67161 - DNA, 401 bp, Oryza sativa
  unsure (1)..(401): unsure at all n locations
agcttccaatctcttttgggttaagcccaaattgttccctcattacgncagcaatcacatcggcccacggttgttgctaagctaccccttgtgactgttgctgcatgggctcaaactgaccatactgagacgcaaactgaggttgagccaatccccctggctgatattgggcttgcggggaagcaggctgatattggaaattcaagttacccccttggtaattatgaaggttcggctggatattacgtaccaaatgctcaggaacaacttgaggtattactgtgccatccggctgtacgtggtgaaccaagtgttctgggacaacttgattaaaaaatgttgtacaagctgaccaccaggcgttgcaaacccggccgatgcgcctattgaaccttggtgct

SEQ ID NO: 67162 - DNA, 423 bp, Oryza sativa
  unsure (1)..(423): unsure at all n locations
taatacaatgtcaagcaactatatgcataataaagttgatttgtaatgtacttgcatatggccttggtaagtataagatgaagtaaattggaggattgaggttttaaaacaattntattttgaaaacatattcccaagagtcataacacgagttgcaagaattcctttcatcttcaatcatctcacataaagctattaattagatgcaaaaggttccctaaacatggaaggtttttcacaagcacaagttcagctaagaatgatagatatacaagatcaatcatatgaagaatttcattagttggaaattntatctttcttatgcttgaaccgattgttttctgaattttcagctctagtactataccatggtggagatatacagatacaagacgtgctcacctgcttacctatgaaaactga

SEQ ID NO: 67163 - DNA, 419 bp, Oryza sativa
  unsure (1)..(419): unsure at all n locations
agctttactatacagnccggggacttatgntantgtttctatatgctcgcacaggcaaagtggtggtgttgtatcttaacctatattacccacaacagcgccggtgacaagattttgtcagaactgaaagaataatatggtctcttttggaaagcgttgctaaaagctcgccatcttactatttaatcatgacagaacttgaagagttgagtttccccattccaatcacaagcatgcaaatttcatgattgagcttgattcattttatgaaaatcttcaagcattttcccttgagtcattgcagtgtcctcggtgtaacaggtctgtaactgataagcatggcatctgttgcaattgtcattaaaatgcataccaatgtagacaatgcagaaatattaactatgaagaccttgattctt

SEQ ID NO: 67164 - DNA, 474 bp, Oryza sativa
  unsure (1)..(474): unsure at all n locations
agcaaagaccgattgatacttcatcggtcactcgntatactatttcggntacatctatgcctaagaccggaattgttagtgatcctctccctgttagttntattgatgttggcaaaaagaaagggaaaagtgttattattggggatcctcggcccaagaatatgataaaaaatgcgaatgccgaagatcataaatgttgcaagggtgagtcatctagttcccataagaccaaaaagccgaagctcactcttgagatgcttatggctaagtacaataaaggattagccggtcaatgatttgataatcaaactagtgattcaaaaagaccaagatcatcttgtagaataagatctggtcaaacaccaaagcaatcggagccatcaactataccaactccatacaaaccttcggtagtgatgccatggtatccatatccaatgtcaccattctgttatacctttatgtatgatatgc

SEQ ID NO: 67165 - DNA, 410 bp, Oryza sativa
gacctgcagcatgcaagcttggtgacaaaccactagctatctcctctgtgtagctcctcgagcaaggcattgcatgcctcccggatggaagcaagccgctttctcgtctttttccccgcgacgacatgcttcttcttgctgaaccccttcttggagcagacaaacctcagcatgatgatggactcgttacacttggaccgccgcgaccgagcaatgcgggcggagaaccccacgcgccccgcgtatgcaatgaataaggtcttggcggtctcgccggactcgaactccatcccaacccggggctcaaggcaggggtcggagtcgaccgggaacaggtccttgcggaccgactgcgactgcgattgcgcctgctcctgcggcggcggcgacagctggtcgacgatctggac

SEQ ID NO: 67166 - DNA, 377 bp, Oryza sativa
  unsure (1)..(377): unsure at all n locations
actaagctttgctgggctgcgctgcgatgggctgngttgttctcttttatgtctcggcctgtcacgccgggcgtgggaggcggcctcccccgagaggacttgtggggagagaagttggaattcactttcacctgatcatcgacaaggagaagcttgcttggaggttaagaaatggagcaagggaaatctgatctggctactacccatgcaccacattgtgcatggcgccgccctttcgcaccacgggctactatgtccgcccgccttgatgctgctcttttggatgctttattggtgcacaccttttttttttttgcgtgcatgacactgtcaggctgactgagaaggacttgaacagagggctctatggattgcat

SEQ ID NO: 67167 - DNA, 396 bp, Oryza sativa
agcttgagaatttgcatatgctctatgtaattttctacccaataagattgctgccagaaagtgtatttatctaaagagactgatgcgccttgttggcaatgaactcatactgtcagatgggtttgctaacatggaatctctttaagagttgggggttcttgatgcttgcaactgctccataaattttgggaaagatcttgaacttctgagcaatctgagggtgcttcgaataatgtttaggtgtgaagaaattactagtgatccagatgctagaaagaaatctttgatgtcatccctttgcaaacttgggggtaacagccttctgtctctgtattatcagagctctaccaccggtgtcgattgttcagcagattcatggtgccctcctcctattct

SEQ ID NO: 67168 - DNA, 369 bp, Oryza sativa
  unsure (1)..(369): unsure at all n locations
aactgaccaaaacaataacccaaagcagattcatatgntgccaccaagtccacaagaaataaggcgatcatatgacaagtaagcttcaaggctatttcgaattcgagccaaagaaaaagtctattagtcacaatttatttttaaaactgaaattagtcataatgtcttgtaccttggtccctgaaggcatgtctgtcaagtcatagctgcagaagaaagtatgaagtggagtcttctcagggttgctcacgacctattgatgttattacttgagtaaatagcatgtttataaatgtatagttacttcaaaaacaagagcagaactgcacacagataggtgttatgtacagcacactaaaacaactgcag

SEQ ID NO: 67169 - DNA, 343 bp, Oryza sativa
  unsure (1)..(343): unsure at all n locations
ctcaccccccttnccccttcttcttcttcttctccttcacctccgcgaggcagggcccctccggcggcgccgctggttcgctgccgccgaggcggtcgccggaatatttttttccctcctctttctacgacagaaaagggtgggaaattaaagggcaaataaaaggattattttcttttttcctttcgggtagtagttttgttcttggttcccggtggtccgttctgcaagagagagagagagagagagagagaggcnacggaacggaaggtaaccgacgagtcgaaccaccgaagcccggaaggaggaggactgcgtggcgtaaaacatgagccggaatcga

SEQ ID NO: 67170 - DNA, 477 bp, Oryza sativa
  unsure (1)..(477): unsure at all n locations
tctagcttctcgaacgcgtgattttaccaggcccgtttttttgtccagatggagccgntcttttgcttggctatntttgtgaattatggagcgggcaagtgggtcatcctgaaggacgacgagagtgagacggcaacatcgatggacgccgattgccgacgtctccgtgaccggagcaccacgcggcgcgcggcagaccgtcggttgcccgactgtgctggtgcctgcccgtgccgtgccagctttggttcaccgtgcggcgcgggtggcgtggtgagcgcgccgcgccatcggagaaggatggcggttcggcgtcgagctgacatagtgacgctgctgcactgctagtgcgcctttggagncgcaaaatttaaaaacacagtgataaanaaaacatagaaataagatgccacgctctataaaatcctacagaaatntaaaatacatgaatactatagagtagttgcctttggatga

SEQ ID NO: 67171 - DNA, 407 bp, Oryza sativa
  unsure (1)..(407): unsure at all n locations
tcaagctttttacttcatcaaaatcaacaacggtttcactctatatcgnntcttgcagaccgacattcttgcaccctcttttgtaaccactctaaataagcctctttactcattatacaaatatacatggcttagccatgctacactagctggctctacagagataaagacaaatttgccatcggagatactaataaaatcataactagaaagatcccttcccgattagcattggatattcccatgacgccactcaaaagtatcatcggccattgcaacctcggccgatgtattcggttgaacaatttcaacatcatcaccgtgccattgaataaaacattgatggcaggtagaaggcacacaacaattggcatggattcaacaacgacccaaaataacatttgagt

SEQ ID NO: 67172 - DNA, 457 bp, Oryza sativa
  unsure (1)..(457): unsure at all n locations
tgccgacctccccaggccatcgaaagcagaggctatactaatatttccatcaaacacctctcgaatctgagcaagtcatggaaggtgattcctagtaccgacgcgctcgatgcccaagccataaaagaggtagagcaaattatgcagcgagccgtatcggctataaacgatctttngtctaggtgaacataaatgagagagttaataccatacctaattcagatttggctggcttagaacttgatagtcttctaatggctaaattggatgaagataatcaagccaagctcatttactttgaattgaggaaggcgctacagaaattgcagatactacgttctcccgccttgatagatagttctggtagaaagcgctcattagaagtcgagataacatggtttctggctctttctttgtcattccttgaatccgctgtaactgatagaatcttgaaaag

SEQ ID NO: 67173 - DNA, 392 bp, Oryza sativa
  unsure (1)..(392): unsure at all n locations
agcttcgnttcttagatgagcttctttcttttttctcctcttgcacggagccgtgggccgtcgtaagcaattttaacctcattctcgaagctcaagataaaaacaaccttaatctcaatcgtcgtatgatgggtcattttcgtcggcttgtcgacgagttggaactccgggagctgccacctcacggacgtcgcttcacttggagcaatgagcgcgagtcgcccacgcttgttaagctcgaccgcgtcctcttctctgcggattgggaggagcttttcccctcttgccttctccaagcggcctcttctatcgcctctgatcactgtgctcttctccttcatacctgcgtcaccctccccgaagcgcaatgtttttcgttttgaggccttttg

SEQ ID NO: 67174 - DNA, 447 bp, Oryza sativa
actcagcttatattgacttccctatcttgactatcaacatcttttttcttcttgacgttgtcagtcgggggctatcatcataataatggagtgtgattctttatcaatttaatttgcttacttggtctatcattgccttgtttggttttttctacttagtctgcgaggactgaaagtttttaatagcttctttgggttttaggctcaacaaagctcgataaaagcatttaagagatcaaagacttggctagaactatcaagcacagcatatatacaccagtattgtacaaattaagcctccatttgttacattcatactcagtcagaatcagttctttcatcgtcagagttattggtgctcggctgaagggtcgtgttgcggaattgatctacaacgtcacttgcaatcttgtcagccgcattttgagcatttactgatagatcaag

SEQ ID NO: 67175 - DNA, 331 bp, Oryza sativa
atttttttttgtttcaccacggaccgagtgtattactgcgtcattcacaaaatacctgtgcgatcgagatataaatgcgaacataaatccatggcagtgtcaaatttaccctgtaaactatgacagattttctttatcaactccgagcgaagctctgtctcttttacacccaactgaacgaagtgtgactttgacctgaatgattttagagccgtgatttaatgataaagtaataaacatctggaatatctaaatcaagtatttttaaccaacccatatatcattgagccatgaagttttgagagcactgcgatcttctatctggtcactc

SEQ ID NO: 67176 - DNA, 399 bp, Oryza sativa
  unsure (1)..(399): unsure at all n locations
agcttcagaagncacccaagtgcagtgtactgtannattactaagcaagcagaaagcacccagaagtaaagcaatggccacattctgctggaaaggcaaggattgatcaactgcaccctgtttacacaagaaaccaagtcagcttctgagtgatgtgaaaaccagaaacttaaaattattgatacaagcaaactgaaaaccacaaaattatgtgcaattgaacctactggaattagaattgtcagaaaaaaagcgcaaatcctttatattcttatcagccatgcacatggtaaactggaaaattgcaatccagcatttcaaatggcacaatactctggagggtattgattggcggaaacaaaggaattcaattgtaccacttgattttatctaagtatg

SEQ ID NO: 67177 - DNA, 157 bp, Oryza sativa
tttttttttttttttaacgaagagtgattttgtggatatacctcacccccttcactttagattttatatttattataattttgtattgatcaaatatgtattgcgcttcaatctcatataacttaatttcatattattttattatttaatcaaattg

SEQ ID NO: 67178 - DNA, 338 bp, Oryza sativa
  unsure (1)..(338): unsure at all n locations
tattggtacattttaccatttattggtataataagtgggtttgattaattaaggcacatgtactcggagaaaactacacgtcgggcgctcgatctgggggtggggaaatcgggcagcatgccaaactaatttaaaattgtntttctcttaaattatttatccaaattatgatccgattacaccattaaattcgttgcaattaaatctttgaaacaagatcacacatggatgtatttcgacaaaatttttttagcttattattgaattatttttaaatgttgcacgttgttccaccaagtatatcggaatttgtttactaagtagatcgaaaatgtttc

SEQ ID NO: 67179 - DNA, 424 bp, Oryza sativa
  unsure (1)..(424): unsure at all n locations
ctatgtggagatatacattcgaatgtggcaatggtttattttgtaattccacaacaagctacagntagatgatcaccttatngataagcccatcgtcgatcacagaaccattaatgctctngaacagctcgaacaaagcctccacctcactaacgctaactacacatccaagacaactaattcagaattntcagtacgcccatcgagataatcagaccggcggccggcgggcttcgtaaagctttaggcacattacctgaaagggtttgaggcacattacctgaaatccgtcttcggtgggcagggggcgacgggcggatggctatgggaggttggaaggggaggcggccggtgatggttatgggagggatgagagcgcgcggaggagaattgcgagggcggcagcgatggagcgtctggagag

SEQ ID NO: 67180 - DNA, 298 bp, Oryza sativa
gctcttgtgatttgcgctgatgttcaaaagggacaatcgaagtcttgctttgtttctgtgatgcatttggcaaccgatgttgtgaaaactgtggaagccaagctgctgtgtcgctaggcgacaagccccgcaacgataacatttgcttcaccaaatccaagcctttgtattgcttacaacaagctctttatcgatagctgttttgggctcccccatttttccttttttcatggtgtcgggagcttatgttaaagtgttgtggttttcgcccacttttcccctaataactgtgccttga

SEQ ID NO: 67181 - DNA, 379 bp, Oryza sativa
  unsure (1)..(379): unsure at all n locations
ctatttgctgaaaaaccctcttcgatatttattctctttagtactcgtttcaggaatggcatgctgattgtatcagcatatttattgtccatttagcttaataaagtacacagacaacattatgttgctaagcactaatttctgcatcaataaatcatcaagtgtatctgcccaaggctactgcagtctcaaccaacaagccttctttctgccagatcacatcattgcaaacaagaagctgcacaggcgtgccatttggtgtatctgtcggttntgcttatcgattacattgcactgtcaaacctctcccgatctggatgaaacanagagaccaaagtttactacgatctgcatgagaaatggagaaaattcgttatac

SEQ ID NO: 67182 - DNA, 404 bp, Oryza sativa
agctttctcaaaccatcgcacatcgtgtcgattgttgcttatggtgaagagaccactgtgtttaaggtctggaactgctgctcaattgtggtatcatttgagcaagggctggaaggcacgcttgcagacctttgatggcaaaccatgtccggaatgaagctttggtgttattttcttctgtgggaatgggaagagataagcaaggaagagagaagatgcactttgctggtactcaaacactttggctcctctcttatttataactgaagaagcagaaccaaaaacgtgattgggtttgaacagagcaatcgacagaaagaatctcatctactaacctccctgcattgtgcgttgtcataataagtgatctgttctgaaacatagccattcaagcctagacatgt

SEQ ID NO: 67183 - DNA, 423 bp, Oryza sativa
  unsure (1)..(423): unsure at all n locations
tactcagcttcgcgaaagagaaccgtgacaaccaacgtgtctctctccgttgatttgacaaatcaaaaaccanaaactaaaaataaaaatgtttttcgagtttttttttttttgccgattcaacaagagagcccaccctttnttccccatttcggataaggctcacctcgccgttctatggtgggggtctntctgacccacaccctcactcacaccttacccaccaacccaccatcacccactcncatgtcacctgggacccacccttcctctggagcaagtcgagcaacggtaaagaaagtgcatgtaccaccctacttaatcaacacttgatactcacttagattaattattatgatcttctgcttatagacagtaattattcttagaggttagaaaataatacacgtatatatatcttac

SEQ ID NO: 67184 - DNA, 392 bp, Oryza sativa
agcaaacaaaagactttttaaaatatgggagtgttatgtccacaactctattgaatttattttggtgactacatacaaatcggaggtgccctaaaagtttgcaacttcatcctccaatgtcttgtctgtcatactacatttgcacctatgttttgcacactttttttgtctccaaaatctaattgtaagttgatgaaaaaaaaaatgtgtgtggggaagaaagaatatatataaatatagttcatttgctaaacaaggtcttataaaatagttgataaagaaaactctagtgaaagttaatcttaaataatagaaaacaaactaaaatgaaattaaaagaagaaaacacattataattagtttacaactttacaaatagtctttaaaattat

SEQ ID NO: 67185 - DNA, 444 bp, Oryza sativa
tggtcagcatccaagctcactattatttttatagtcttttatatcgaactgtactctatacgaacggaaattagttaagctaagtagtgaactcaccagttcctgatagacgacggcatcacttttgttctcaaatgtgacagagccatccgggttgaccttaccccttgcccgcgcccagttgcgagctctttgttcagggatgtctgtaaacggggcatggacattcgctgctgcagcggctgcatcttcttgggcccatattgcctccttgccgatgtaccctgcggtgcccagccgatgcgggtgctcatttccgtgttgcagtacgcgatgtgcctcgcttgattccctaaactctcgggtggtctagagagagcagaaattctcccacaccgcttctgttatttgaaggtatcatcgaacagcgtatgattgcgggcg

SEQ ID NO: 67186 - DNA, 381 bp, Oryza sativa
  unsure (1)..(381): unsure at all n locations
agctttgaatggaagagaagcgatttttatttattccacnatanggcaaggagcttgatatggttatggccggtgtattgttcgcaacatcatcctcagaaaaatattagttatggtgcttctggtgaaatttataatatattaccaaaaacaggggggcatgtgttaataatgttatttggccgattaggtagttcacatggccagattatttttaatgagtagttagatgatttgaatatattctttagaagtttggttttgctttctaagcgcaggtatgatgctattatctggagagcagcagcatcagattgatggcttggaagattcatgcatgatggtctgcttcacaaggctgtgtgtgtgctgatatctgca

SEQ ID NO: 67187 - DNA, 132 bp, Oryza sativa
ctgagctgcaactacacgaaggggtttaactattgaagaggcacccagtcttacagccatacgggatgccataatgaaaggaaacaagggatattaatgggtatgtttgcgggaaaactttaaagtactatt

SEQ ID NO: 67188 - DNA, 431 bp, Oryza sativa
  unsure (1)..(431): unsure at all n locations
agaatactaagctttgttatagctaaantnatgcttatctntggcacttagtcttccagatattgtattgcatgagaagcatcatttgttccttcatcctatttttatctgtggtaatagtttccatcaaaaaattgccaaaaaaanaagaggaacgatgaatattgttgttcatatgcacgtgcacatgttcggatcttacagtttagatgcaactaatttaacaaaatgtaaaggagaatatatcgggatcttacagcttctaattgatttcttcccaggccatcagagggatatgtggactcagcaggatttgatgatgatgatgatggggcagaagtatcatccaagaatgcgaacgtaccgcatgttactgtattctgcatgtgtgatggcattggcctaggaatcggcatgttatctagcatggt

SEQ ID NO: 67189 - DNA, 396 bp, Oryza sativa
  unsure (1)..(396): unsure at all n locations
agcttttnttttctgttaccacattcatattatcggaatactnttcctgttctgtatatttcattgacaaagaaggcatgaacctctgaattgtagagttttatactaattcttaaggtaattgtgattgagggttatattgcaaattgtgactattcaagattatacatattcattttaaactttaaataagtgaattgggtttgggatgggtaaagggttgctgatccctgtctattgaaccaatttctgattacagatccttgtttactgtggttgatgttccctagagaaaaatgtcttcattgctttgtgtactaacaattatctgcttatctcaagttccttaatgtccaactatacttccgaaccgtctactatgagatggttggcacc

SEQ ID NO: 67190 - DNA, 460 bp, Oryza sativa
  unsure (1)..(460): unsure at all n locations
gtgactcacgacaacctggtacttgagttaaagctttttctttgctntgntagtaggctgggtttagttcagcataaaatttagattttggttaaaattagagataatgtgactgaaaagttgtgtgtatgacaggttgatgtgatgaaaaatgattgaagtttggatctttatatctaaacacagccctagttgattcatgaacttctttcttcttcttttcttttgctgattacacagcacatgcatacgtatacgtacgctcactctttacggatgtaatgtaagagatggaagcctgacaataataaatccgtgaccctctggttcttcctctattctcttggacttgcgtgttttacgcgtgtcaattctctgcacgggttacaacttctgtttcagtcttatctttcgctcattggtttataagccatcgtcaagatttatatttaattttaat

SEQ ID NO: 67191 - DNA, 262 bp, Oryza sativa
  unsure (1)..(262): unsure at all n locations
aacattccaataccaccataccaaatgcagtgacacactgttagcctgttacataattcaatcaaaaacagaataaaatcctaaattcagtaaaattcttgaaacactggaggatgncaaataattggtctttcaagccttttgcgagacagagtgcaattcctcataaaagaaacttccatagttccaaacggaagatgggatgcatctgcatggttttgtcaatcaaacaagagaaggtaccaagaaagatatcacaaac

SEQ ID NO: 67192 - DNA, 440 bp, Oryza sativa
  unsure (1)..(440): unsure at all n locations
gactacccaagctaagtctctctgtaactgctcattactaattagagatgtgtctatactangctagaattcacaattgtgaagagggatgcattggtgaatgcagcaatgtgcatccacagtagagacagagagaagcaaaaagctcaccaacctctgcagggacagcactccaacagccaaggccatgcttgacaatgtagtccctcagcctctggtcctcctcaagagaccacagccgcctcctgtagttcatcttccgcttgtcgcaagaccggcaccccattgctctcttcttttcttctctgaatatcatcctctgttcttcctcctgcaacccgtatgttggtcttgtctcaatatgagctgttgcagtagcagagttgtgtcagtccttttagcaccatgtgaccacttgtcatttaaaggggggtctcaca

SEQ ID NO: 67193 - DNA, 348 bp, Oryza sativa
  unsure (1)..(348): unsure at all n locations
cgacgatctctatcttatatgcaagngcttctcctgctcgtcccttcaattggttctaatctagcctcgtacgtgaccattatttcatccccatttccttgttctgatttccaccgtggagtttctcccgtacagcaagatnttgatgttaatggtggtggtgtttgcagcagcggatctagagctcatcacctcgtggagcacacttcaagctcgagcgttccaagctcggtcatggacgttcaatcactggcttcccaagccatgaccatgagtatctccacgcctgagctgctcttgcccctcggcgaggggactctggacgacgtcgacgaccttctcacgcgc

SEQ ID NO: 67194 - DNA, 465 bp, Oryza sativa
  unsure (1)..(465): unsure at all n locations
tgctgatgcttcataatcatttacgtatgatcttatcttattctttgttgnacctttcctgtgttttgtttaaccacatactggaaaaataatatgattgtggtggatctttgtatgcagttatggatcccatggatgatcatgacagtgacgaagtgccgtcaggggtggcgtcagatgaagctcacgttgccttcagagcgagaactaagaaaaggtccaaggtgtgggatgagtacaagcctatctatgtaaacggagtggttcaaagcgcggaatgccgctactgtcatattctgatgagttgcatagggtctgatggacattccaatggaacgagtcatttgtggcggatcagaaaatttgctcggcgaaagaagacttggatctggctcagattcatgatactaggtttccatatgggatgcctgctttgtttccttggggatcatcttcagtttaatt

SEQ ID NO: 67195 - DNA, 343 bp, Oryza sativa
  unsure (1)..(343): unsure at all n locations
agcttaaccaaacttccgaacaaactaactgtttcttttgtttgacctttggtggtattatgcagagaaattctgccatattcttaatcttctatttggctggttatgatttgacaggtggtagtgattagagagaagcttgcagaactgtatgagtctgaacaacaatggtcaaaagctgcacagatgcttagtgggattgacttggactcaaggatcaggtaaaaactgacttacttttctttctgaacatgtgtatggctttttcttcangacatgaagcatctgattcaaatttaaattatcaggatgctggatgacacaaacaaattatccaaatgtg

SEQ ID NO: 67196 - DNA, 468 bp, Oryza sativa
  unsure (1)..(468): unsure at all n locations
ttggagaaaagnttttctatgataggtatctattaattgtcaaagctttgacagcctttccttcacacaaggtttttaatccatctcccccgcttaggacagtaaggggaagtagcgatattccgattccttcgtggggaatcaacgaaggcagccgctcccgcagctttagtacttaagttagccccagcccttatcccgcgatgagaaggtagatgcggtaagccaactcctatccttcttgcagaaagggcattcaatgccatcttcatcccttccttgtccaatttaacgcaaatgagctttattttattatttttattcaatttaagttatagaagcctatcaagttctaagcgagccacatctgaattagacatggtacccactctctcatttaagaatttagcnaaatatggacagtctatngccgtctgttgcatactagcagtaataagctccaactta

SEQ ID NO: 67197 - DNA, 442 bp, Oryza sativa
  unsure (1)..(442): unsure at all n locations
agcttgcttcgccttggaaaaacattgacaattgataatgaaacttttgaagatcttgatgaggttggtacacatgatctctttttgttaccattgttactctagttcagtatcagtaagtggtgactcttnttctgtgtttgtttgcacgccaacatggntctgtgtttctttctgcttgctgttatcacttagcagtagattgtcattctgttatttttggctaactactggtgctttattttggcaaataggttatagacaggtacgtggatccattggtaggccacctgaagagcatgcttttgtaccgcaaattcaagaaaggatcaaaaagtgaggttgatgagatgttaagggctgagaaatcagagaatcctatgagaatagtgtattggttcggcatatctcatgagcatccaggcacatttattntatctta

SEQ ID NO: 67198 - DNA, 353 bp, Oryza sativa
  unsure (1)..(353): unsure at all n locations
tcagccctatggacgaacgggcagtggcgcacatctctctctccgagctctagcggtgtctacggggagcanaacccgcgccgtctggcttgcaccccaccgtccccctctcgctgaaatcttgggcggagggaggcgctcgacggggtcgaaagatccgcgacttctccgcccgcgggcgacgggggaggacggagagacaaggcgcgtcgctcgctcttctacggtgatggcgtgacgccccagtgcgcgctccatgctgcgggcgcgctcctgcgtcacccgcccgtcgttcccgatccagagactccaacccgacgttggctggatgacgtggccgacttggtcatgac

SEQ ID NO: 67199 - DNA, 287 bp, Oryza sativa
gatttatctccttccatgttcgggcgaaaagagacttgcgtcttgattcaacttttagagaatgcttttcaacagcttatttagttatgtatcgacctcccgggtcagatcattacttctcgggtcccagagccattcccttgaatagtcggctcccagagcctttttcattttctcggactcccagagtccaagtgcccagcagcacaacaatccgcttccactcgggaaggctagtctatgatgcccgcagacatcccgaatcacacagattccgttctgacacc

SEQ ID NO: 67200 - DNA, 326 bp, Oryza sativa
  unsure (1)..(326): unsure at all n locations
agctntcatgacaaggcatttcgaaagccgtcacangtttaccatatgccgacgagaggggtcccagaccaacaacaggttaggtcccagaccatactgtgccaggaagcccaggggtcctccccgacaccaccccggcgaatccacatgtctctcggcatcaaagctcccccgattagcaatttactcagccaggggcgtcccattccacccatgtggtcgtacttgtcttatgttcggatgaaattccaaggaaacggtccttaagtgcaagagcgggaaaccgtacacccggtatgatccccggtccgcggttatggaaatca

SEQ ID NO: 67201 - DNA, 447 bp, Oryza sativa
caggtcccaactcacaagattcaccatcctgcgttgcacatttgcccaaacatgtaagtatgtaacacgacaccagtctgacgacgcagtcgaccgcctcgcatcgtgagctccaccaactccgtagctagatagtcagcaccgtgcctggaacgcacacgcgatgagctgcttcgcctcgcctccacacccgcgattccatcgatctctgccgcccgcgtcgctacacgttcatcatcgccccagcgatataccaagatatggttaactatgctcctcagggagaggagattagttacggttggtttgatgcagcgctgcacggcgccgtcggcgaataactagtaaaaaagacggcgtctttagcgggtgcacacgcctgttaaaagttaataatctcagcgatcggtgatcagctggtcttttgacgtaccgtccagcttttgc

SEQ ID NO: 67202 - DNA, 450 bp, Oryza sativa
agctagagttgttttaagcatttaatgtcttatgtccatgtccacaatgtatttagaataaaaaaatccacaatgtatatagcataaaaaaaagtcataaggctaattcttatggcctcattgtggatgcccttagttgtattggtgttgtagttggtcgaggtgcttgtcgagcaagacgacgcatgacggtgaggctgccgtatggtggagctcatccttcagttcccttttatatatacagtggagaacaggagatcatcaccagtgtacggagattttctttccttatatatgcgtatgggctaaggagattagaggtaagtaggtggcgtgcaatgttcacgtagtaaaggattgcgactgcgaagccacggtccttgcctttaagcaatagcaatgcaagccacgctatacgtgtctctagcccatgtgacactgcgaaatcag

SEQ ID NO: 67203 - DNA, 465 bp, Oryza sativa
  unsure (1)..(465): unsure at all n locations
acactatgaatactcagcttctgaacggactgtanattgatagagcangaaatatttatatcacttcaattcctcgtagaattaagtgtaacatcgcaataaaaagtgccagcaaaatatacattacctgctgtttggatcataataatacccgctaatggaaccgtcgctacatgaaaagcagacatagtagaaaccagctatggtcaacccacagtccactccaacattgacaaagtactgctctttccatctctacatgtagcatcagaataatgctaagttgttatggctttgtaattcaataaatggtgcacatacatgaaaggtcagatggtgcagtaccatgaatatgtaagcatagttgctgaggtccacggacttgccaccatctgtctcaatctgactctgtggaaaaacataagtgagaaatgtattcacaaaaatcgtggctactaacaacac

SEQ ID NO: 67204 - DNA, 343 bp, Oryza sativa
  unsure (1)..(343): unsure at all n locations
agctntgttcagtgaggccgtacaagcatggtatatagtagtggcagcggcagagacaaggactgcacttcttaccagaaccaaaccgaagtgtacaatccctccagggtttttgtcggatgcagcaacaaacattacgctaaacacttgattaggagtacttgaattcttgaaacatcttgcccacgattccacaaaccacattgacttaacattagcagattactgagaatgtcagacgactgtccaaggtatacgtaatttttggatgcaattttggcgtttgatggtaaccacacagtcacgccttcttcgaggtttcaaaagcgaggtttcaaaagct

SEQ ID NO: 67205 - DNA, 453 bp, Oryza sativa
  unsure (1)..(453): unsure at all n locations
taacgtncacttcaatcccagcatcatgatgcaaaggttgtaattagatgggtgcaccatcatgctgttgagggttggcggccgcagcttgacgcctctgacgctctcgcaaatataggacagttacaaggcaagcgaagagagtaaatattgttgcgttcccctcatccataagaacatcctccacccattcctcaactacaggatatacctccggcagtgaatcaataaaatgaacctgaaagtaaataaggatttagttgcccatggcaaactagtaaaacagtgatgttgattatacagcaagatggcaataccaaatgtgacaagcagaacattatggaaatatgaaatatagcatgcatagcananactggtagcactaatcattacgtgactgagactacacagcctttcaaattcaatatgcacaacatgaactggtatcacact

SEQ ID NO: 67206 - DNA, 374 bp, Oryza sativa
  unsure (1)..(374): unsure at all n locations
gcttattaaaccgatggttagaagataattcatttttactgtctctaaacatgttatgcaggagtatactaatctactccaatggcatgctcagattagcatgatggtaatattgttaaaattttgacatgatatttatgtatttactaaatttgacgatgaactaaatatatgtatctttataactttattagaaaatggtatgattgaaaatgacactaatcatatgccctaaatttactgacgtcttgtttggcaacttgagggaaggtgatcgtgagtntacccggaaatgatggtgagataagatgtgaatttgatttttatcctatctcttgatgagaaaacgtggggaattgatacgcagttattaa

SEQ ID NO: 67207 - DNA, 402 bp, Oryza sativa
  unsure (1)..(402): unsure at all n locations
attgagataaaatgagaggacaaatagagtaaatttgtaagtttatttctgtgttttgaaacgcatatcaattaaatntcaatgctctagaacatatcaatattctaagtttaatgaattagaagaaagtagcatctgggaaatgaagttgtaagatgatgacccactgcaatagtaacttgagatcggtatgacatgacactaaagggacagcattatagttttgtttatagacgacaaatcatggttatgaacaaatttggtctacagaacctaaaagttactgaccaggaagtctcccctcatgtgggcattcttcaccatcagcaacatcagcccttccatagatcatggngatcttggggccaccggctttctgaaatgcgaaagccaaagcagtca

SEQ ID NO: 67208 - DNA, 360 bp, Oryza sativa
  unsure (1)..(360): unsure at all n locations
agcttgcacagtagatgtggcagctgcacctgcacgtatctctcatcaaccgaggtgatntttgcaaggtttcatgaggatttttacaaccctctctactcgagcggcaggacatgtactactcctgggctgcaatgatcctgtgatgctctgccacgctctctagctactcgttagcatgcatgtatgtatcgtcgtcgtcttaccccccaaattccagccgtgaaaccagacgatggaccaccggcgaaactagctnttctatacgttggaagtgtatgagacacaattctcttggcttgaaacgatatcgtaagcttttaagatgaattgattggttagtggttaccttcacagatc

SEQ ID NO: 67209 - DNA, 462 bp, Oryza sativa
  unsure (1)..(462): unsure at all n locations
tctacatctgtagccactatagcttgcaacacttataagctgaatgaaaaacatcatattccgcttgactgatttgtacaacaatatgccatacgaaccgatgtctcaaagcataaaccactgagcgaaaacaaaactacagctataccttgtccttccttaccagaagaaccattaaactaaaccttgcaaggtcaaacactaagcaagtaaacctcattatcataagcaacatccacatgatgatctactataaaatcaactgcagtttggcctttgatatattntaattgttcataagccaaatcatgttctccccctcaaaattggcctttgcaacatatgtttaataacatcggcttgacaagcaactatgcaagtagtagataacaagttatgttgccacgtcgaaaaacatagtatagacataaacgaaggctgtctataaagtcagtcctcgtt

SEQ ID NO: 67210 - DNA, 463 bp, Oryza sativa
  unsure (1)..(463): unsure at all n locations
acacatgaacgagataagcttgctttggatcctactacagctnggatggaccatatatatgcatgcatcgatcatacagtccacaactttacagaanataaacttctttctgttaattcacagctaaaatataatctttcgactattacataggattaatatatagcaaaaaagaaaagtgtatacaatatactccatctgtcctaaaatataaggaattttgaagggatataatatttattagtactataaatctagataagctctttatccagattcatagtactagaaaatgttacatccctttaaaatcccttatattaattatgagacgganggagtataattatatatatacataanatgaactactgatcnnaaagtgatcatgaattcgcatatagcactatctgtgtcgacatttatatgcagaatctttcttcttttcagctatatgggacat

SEQ ID NO: 67211 - DNA, 412 bp, Oryza sativa
  unsure (1)..(412): unsure at all n locations
agcttaacananagtgtaacagctttcgcatgtatttcttgagatgttagagaaaaccanataatatgcggtgatgctctcattagcatgtgtgttaaaatgtcaatttgtgagtaaagccttcctgatcaagttgtaaatactatgaagcatcattttgattggattctggaaacagaagaagagatctgggacatcctttatataggcttgggaggaagagattggatcagattcgagaggaaacgacgacggaagaatcggattcgagagaaaactacaacggaaattagggtttatcccgagttcatcggatctcgaatcctacaacggngtttatcccgagttcatcggaataagaactgagacganattcatgggaataagcacgaatntgatggatatttcgtgg

SEQ ID NO: 67212 - DNA, 440 bp, Oryza sativa
  unsure (1)..(440): unsure at all n locations
tgctactatgtatctttgtatggacaaatagaagnacttttagcacttttgggttaaacttgggaccatgcacatatacttttttagcactttgtatttgcacaagattgagatttaaaaattgagctatgcacaagcagtggtactatagtagtaccggtactaccatatgttctctgttactgcaatttcatcatgatgttgctgtaaaaagtgcagtaacaacctataaatttcgcagtaacgcatcgtgttattgcagttctgcggtaatgttactactgaatcatagtaacaaagtatgatttctacagtaaacataactgatgtgttctcacaaaatttgaacaaacatacaaaactagtaaacaatgacctctaatcacttagtgtcatagtgtgaattggtttaaagagtttgccttataccatgagatcat

SEQ ID NO: 67213 - DNA, 323 bp, Oryza sativa
  unsure (1)..(323): unsure at all n locations
agcttgagctgctgcagnttagtcatttcattggctcacgcgttggatnttcgncggggctagaagagctcgaaaatctcagggaattcatgctgagtggtangcagaggcagtacagggacgactttgtgaaagacgtggaggagcagcttgccaaccacccaaacccaaacaagccccttctcaggttcagtctatataactaacaccgatggatcgatcgatcgatcgagggtgtattgctcgctcgaggttggacggtacgctgcaatcccactataagctctgagctntgagctaatctcttaatcttatatatctac

SEQ ID NO: 67214 - DNA, 462 bp, Oryza sativa
  unsure (1)..(462): unsure at all n locations
taatccttccctgagaaaaaggatatgtaaattaatgtgtnctggatagcagcaagctggcttataactacgagtaaatatgggtttaaatataagcgcgtaatgcaatgaatggccagtcaacctctctttttttttttgactgaagcagctcaaccatatcatgtgtcacgtattgggaagaaatacacatcaattagatgtagatgatcacttacgtatacttgcggcaacctttatgaaacttcagacatctctccctgagaatttcaacactttcttccagtgactgtatctgctgttcagaatgccaaaaaaatgcatacattgttcatgaatgaagcatatccaacatggataaaaaatgtcacatataagaagttctgctacaaatatgtgttgaattgattatacccaaacaattgcatctctttaatgaggaaatctcccattctataatca

SEQ ID NO: 67215 - DNA, 293 bp, Oryza sativa
gcttgcattaggaccactgggtctagtttcttgggtaccgccccgggtggaccactcggtcaggatgatccgagcggtcaaacttaattgcaatctctgaccatcgaagatactggggcgtgtcgggctgaacagcattgatctcccgttcagtcaacttctgcttccgtttaaactcataagccagggggccgccgaagatatggttgagctccttgcggtgatcttgaaaaccttgccgggtgtcgccgtcgtccttcttccttgacgtgctttgttcttcgtcagagttc

SEQ ID NO: 67216 - DNA, 363 bp, Oryza sativa
  unsure (1)..(363): unsure at all n locations
caacaagctgctagctattctgagtgcacattgttagttaataatacacttgacattcttagcangcaaattgaagagcacctcagtggatgagctagtacttcagatcaaagtgcaacccacaaggaggttatgcccccaaataaccttgttgagtaaatgcancgcctaaaagaaaaaaggaggtttcgtgttagaggttcaaagcgaaaaagaatttggcttgacaaataacgagacacttcacaaaaacgacaaagttaaaaagggtaaaaagccaaaggtatgttctaagaagatattgcaataccatgttactattcagtcatgtgttcacttcatcctcttacattatttggttcg

SEQ ID NO: 67217 - DNA, 276 bp, Oryza sativa
  unsure (1)..(276): unsure at all n locations
ggtgacagctgctgaacgtgctggtctgaccggttatgtntcagcggttgatgagatcattcgggagtatgtgacagcttaggccttataagtcgcggacctttacagaatagagtctgtattccctcagaatcgtcatctaagcggagactgattnttctgatggaagacagaanaccttcatcatctcatctgcatctgcttcattccattcatgcgcgtgagaaaattcagcattttctcgaaaggaaagcatcggacattcagttgaactta

SEQ ID NO: 67218 - DNA, 238 bp, Oryza sativa
  unsure (1)..(238): unsure at all n locations
tcanatatgtataatcagagggggtaacttttctttctttgtgagtcanagaatagaatgaataagtattatctcatgaactgtggaaatcctatatcacattcccaaagaataagatcacttctgagggactccaagtcgacttatacgaattccaacaagcttactaaacccatggtgagtttacagatgggccatatcccgcaagagattgacagctctgctatgtgaggtggag

SEQ ID NO: 67219 - DNA, 430 bp, Oryza sativa
  unsure (1)..(430): unsure at all n locations
agcttcgaagactctctgatttagtgctcctcatcgtcatggagtcagctaggtcattggaatctctcacagctagtggagagtcatagtcatcagatgttgttatgacggccattcgtccttcattagcagtatcataacttgctgaagaagatgcatcctcagcttccatcataatgaacttcccaatgttcataactaacatgttctcaaaattgtcatcatctctctgaacatctttgtaaccatacctaacaatgcagcggtacatccgatatgctctaggtccaatcctgcccacaaggtatcgttcatctggcgacacatatggtactggtactgacttgacacaaagaaagactaggacttcatgaaaggcanggagattagtagtgaaatgtgtgaagatgttgggtacaccagtcaccag

SEQ ID NO: 67220 - DNA, 442 bp, Oryza sativa
tacctcctgttgaagatcgataccgatgcagctcaaccttagagcacgaactcgtcgaaataaaagtaaagcataaagggtggcgatgcgccgagattgtattggatgtctcttttttttacataggactcgggtctatttatacccgagaattacaagatacgttcataacagacacgactattatctctaacaaactctaagatatcataagtctttacggcagacttttgcccaaacatatctctaaggaaattaaatagaatatcctaattaatagatacaattgccttcccaggactctatccatgcatggcaatcatcttgaagcacatcaacttgaacccgatgacgtacaccgagtcatattatcagaatcggctgtataggctaaccccgtccgactcgaactctgccgacctgaccttagccgatttggact

SEQ ID NO: 67221 - DNA, 388 bp, Oryza sativa
agcttgaagatgtgtcgcatcttgttgaatactagtcaaataagggtctggccttattttcaaattgtgaggaagctcaagaaaccatggaagaagctgaaactatgctctcatctcttgtgaaggccaatgaggagctaaaacttgaaaaagacagttgcaagcaagcagtggaaatgttgtttgctgagagaacttctttgatcaatgatttgcaggagcttgaagcgtcaaattcatttacagcacagaggtatgacaaattgcatgaacaggtaaatggatgtgtagcaaagatgacaaaccttgctactataattaaagaatcttttcatcaagtacaaagagttactacagtagaactatttgcattctgctcggaggtatc

SEQ ID NO: 67222 - DNA, 400 bp, Oryza sativa
agcttatgccgtaatgcggatagttctatgttgactatattttgatgcaattttcattggacttttttctcacatgacagtgttaaaatcatttttgtatatatgtgctgcatgatgaacttaattgttcatagatatcaaacatggcagatgaccatttataaatatgagaattttgtctagtctctatcagtatacttaatggtgttagtttatgtatactatgaatgatatgttgcagatacttaaggttcaaactgggtattgggccataggactaatgtagggcacttgccctcaactagccattggcaggggctattccttcatgtggtataaggttaaagaaaaagggggatattgaaacttcttttactagctatatgcccgtgctttgcta

SEQ ID NO: 67223 - DNA, 412 bp, Oryza sativa
  unsure (1)..(412): unsure at all n locations
ttaagtcacctgaggcatgcaagcttcacctgagaaggcttaaaacattattcacagtggcatttgtctccatacacaacatgtacaggtctcattcataacagcaagagcgatattatagcttagtgtaaactgctgcaactagaatatggcaaaatatagtacaccattatagtttgtttgtgccgggcatttctctcatgccgaggacgccaaaagcttattattattcactgtcatctagcaatacctgaagcgaagcctatttcaagttcaaaggtagcagacgactgactntgcattcttacaaacttacaccaaggtccgaacaagaccaccgcaaaaggctagggaaatngcgtcatatgcttgccaccagtcttatgcgtcatttagaacaaagacttctggg

SEQ ID NO: 67224 - DNA, 456 bp, Oryza sativa
  unsure (1)..(456): unsure at all n locations
tggctgaaaatgtatatatggattntaaatttgtaattaagtgtttcagagatagtctagatagttcatggtttcgaccatgcatgcagaagcaggaatgaacagtcaatacacggcagtatggtttgctagtttggcagcctgccacctaatgcatgtttccaaaacaaaaacttctagggaatactacatatatggaagatggattctttaagtaaaatacgtctgcatttgtccatagctttttcctatctctctacatgaatggaatacaggatatacaccaagatgtatacatgctaaaaattcagacagatgtccaacgaaaatgcacattatatatatgcaattaagtgatattatttgaggcgtagcttccagtgaggggaaaggcacctgtctctgtgtaatcacgttggagttccatggaagaagagccctctggtttgttccaat

SEQ ID NO: 67225 - DNA, 428 bp, Oryza sativa
  unsure (1)..(428): unsure at all n locations
agcttgatgataatntagcatactactgtacattattgaaaaaagaaagaatacgaggtgcttanggtccttagacatcttagtcagttatgtgaaagcactaattcgaccaaaccaacatgggaccataaacacctcctattgtgtgatgatttgataaccaaggaacaatctacaaataacctactaagtatgtattctattaaactaactcaaataataataaaaaagacatgttacaagctgttgagcgaccctggttgtattacatgattaatccatgcactaatccaaccaaaccacccaggatcgcatagcacctcctattatatgatatttccaagaaactatcttcaaattacttactgatggcgtctgtaaatgtttttggctttccaaaatcgtgggtgattccctactaaggatgc

SEQ ID NO: 67226 - DNA, 427 bp, Oryza sativa
  unsure (1)..(427): unsure at all n locations
gtggctataactgattttttntatttctataaaaacaagagtgatattttaatctacagcatcaattaccagttctggaccatgatggntgcgatgggcttcagcgaagcaatcaggtacatacacaataatggccattaactcgtattatatatttgcacatgctatcgatattacatacaaaagtttagcagattattatatatataaggatatcatagttctccttttttaagatattacttaatcgaactattcatgcacagatgaatggtgatactcttaattgcttaaataatatattntaatttcacaataagtcantttaagtctattaacagttgcatactttcgaattactttatggcttccccgcanaanaagacaattagtttatggcttcaaaattacctattaaatcattctg

SEQ ID NO: 67227 - DNA, 455 bp, Oryza sativa
  unsure (1)..(455): unsure at all n locations
agcttcaaaaatagccatatacnttgctttattagttgataagtcaacagttgcttgtaaacttgcattccaactaacagcacatcatccaatagtgaaaacataatatgtgagcgatcttctcctatccaaatctccagcaaaatttgaatccagataaccaacaagtccatctctagatcttccaaactgcaaacaagcactagatgtaccacgtaggtatctgaaaatccattgaacagctttccaatgctctttgccaggattagccatgtatctactgacaatactcaatgcacgtgataagtcaggacgagaacataccatggtatacataagtgaaccaactgcacttgaatatgaaactcgagacatgtactcaacatcataatctgactgtggacataaatctgaagataatcagaaatatgcagcagctaaaggagtacacactg

SEQ ID NO: 67228 - DNA, 409 bp, Oryza sativa
  unsure (1)..(409): unsure at all n locations
nntaattttagataatccgtatgggcatttttgctagttttgggtgtgtaatatttggatttcctacttcaattgtgcaactatttaagaaattgccttgcaacaatataagttggtcgatgttaattactaaaacatatttaagttggtagataactgattatctaccaagtttccccgcttttttattctttatatgtatagaattttttcttgtagattgtcgacaaatcaaaacattacttaaggtctgaatttcatgttaatttcacagaaatttgacaggcaaccaactgaatggaacaattccagactccttgtgcaaactaaatgcagggtcattcattttcaggtctggatattcttggtgggattgttctccccaataatattatctgaagtttggaaa

SEQ ID NO: 67229 - DNA, 393 bp, Oryza sativa
  unsure (1)..(393): unsure at all n locations
agctggcgaaaccggtcggctgtagcgaaattatctaaatttcaatcggtaaaaaaaaatgtaaactgaaattattttcttttttaatttgttattcttttctttcataaatntgagtaaatacacagaatacatcatttttttcaaaaatttatatcccaataggttctattaatatcatactatttataaaaatttttttgatttttttcctttttttatcaattcaaatttttgaatttggatgaaactcatcgaaatctcaaatggcttctactttcgagcctcatcgaaacctcgaaatttcgtggaatttgactagttttcgtcggaattgaaagcctgataccgatccaatattaattgcaccggccattcagttcatccattgga

SEQ ID NO: 67230 - DNA, 439 bp, Oryza sativa
  unsure (1)..(439): unsure at all n locations
gagcctcataacatacactaactaatcttactttaccaactgataattaatttaataatgctaatatttggtactaacaagctagcttggtaatgtatttttcaacaaaataaaaaaagcccataattgaaatggaatggcaaagaagaaaatcatttttttatataaataagtaaaacaaatagtttgtatggcaaataaggtgtttcatatatctgattatttttctctagaactctttcgtaaaagaaatctactaagcgcttctttcaagtactagatcaacctttctaaaaaaactaaatgatcaaccttaaatattcacatagttttaaggtgaaacaaagaaattcaagatataaatttaaattatgttatgctgtagaactntgcaatactaaaagaagaaataatacatgagcacttcttcattttcaat

SEQ ID NO: 67231 - DNA, 429 bp, Oryza sativa
aaccagctgagcaaccgtcgaagtacaagagatcgatcttgcatgcaccagtctactgttgcagcagagatgactacagcccacctactcctactactatgtgtattactactcgaaggatccaagatctactcctgcttttaaagaagaaaacttcgagcagagagagagagagagtatgaacctttttgttaacacatggggaagaaagtaccgtgtattgttaccaatctctccaaaaaaaaggaaaacgagagataaaagcacaaggatggaaacaaaatagacaagaaataaatagtggcacatggtgtcaccagccatgtgtgatgtgttgtagtacttctcaagatttcctttcttttattctcttaaaaagaaaaaatggacagcatggctgctggagatgggttgtgtatgaaccatgca

SEQ ID NO: 67232 - DNA, 466 bp, Oryza sativa
  unsure (1)..(466): unsure at all n locations
gcttatttcccgagtaagttgttttgacatgtatgaaatgatcaactntagtaagtctgtcaactactacccaaatagaatgatgtcctgccgacgttctgggtagaccagtgattaaaaccattcctatttcctcccatttccactctggaatcttcaacggttgcagcagaccagctggcttctcatgctccgccttaactcgctgacacacatcacatagagccacatattccgctatttctcgtcgcatgctagcccaccagaattggtgctttaggtcttgatacatcttagtgctccctgaatgaatggaatacaatggttcatgagcttctttcatgatagtatcctcatctccttattggtgggcacgcanattctatctcctagccacacagttccttgctcatcttctatataatcgatggcttatcctcttctcatgtttattctgattcttgga

SEQ ID NO: 67233 - DNA, 395 bp, Oryza sativa
gcttaatactaaagagtagattaggtccatcaactttatactaacatgtattcttaccacttcaaataggtaaacatctcagtttgcaaaattgtctttgtttaggaggttacactatagaagggaaaaaaaatgcactggacaatattttgaatatacatactgtctctattcacatttgttacatattggaataagaggtaacacgttgaaaagtcttgaagagaaaatgatcatagctgtagcaagagtaaacaaggaacggcgccgacatggtggtaatgaatctgcaagacttacaaaaagaaaagttaggcatcctcattcatttacaacatgggaccaagttttcatgacgcatggaacactgcatttcaatttactattagtgctac

SEQ ID NO: 67234 - DNA, 457 bp, Oryza sativa
  unsure (1)..(457): unsure at all n locations
attagcattaaatttattaatatctgaaaaatatatcatattgttcaagttagttgcaaattttgtttgcgattacgtgaaatacccatatgcacaaacaccatgctatgtaaataggaaccctctattttcagagtttagcagatacttcaagttcagccacggttntatgctctctttttctcaacgatantttagaaaattaaaaaaaaacagatgaagaatcttacagaaaatgtttgacattagctcgtctcggctgttgagtgccaaaagaaaaaaaaaaggtggtgcgcataataaaataaattgcttacagctggttcaagactttactttctgaaattggttggcataataagcatacaattttgagaccaaaacagtttcagaatcatccctcattcttccttttttttttggatattttcagagttgtcacgcaaatttgcgtatt

SEQ ID NO: 67235 - DNA, 348 bp, Oryza sativa
  unsure (1)..(348): unsure at all n locations
ttacagtcacctgcngcatgcaagcttctactctacgcctcgatcaatctggacaagctttctatctatgaaagatcattagggtaaacggatgcgattatgtatttaagagaggagaggaggagacctgttgatggtctgtgcaatggcggcgcgcggccgggcggacgtctccgtcggtgatggggcggcggcgggttcgccggcgacacggatgagagaggtactcactcgtgggtggcggcagcgcggcgcggcaaattccggtctattaatatatcaagggaggatttcgcgaaatctgtggctggagtgcacgcgtggcgtccgtccgtgatgtggatcgga

SEQ ID NO: 67236 - DNA, 403 bp, Oryza sativa
  unsure (1)..(403): unsure at all n locations
cctggcttntttctcatggtctaagggcctattatgtacagcttctttttctaaatttatctccaggagttgggccttggagtgtatttgtgagaacgttccatctagctccactcccattntaagtggagctaaaacagtttgattgggctccaactctaagataagtggagctggagctggagctgtgccaaagaaagcctaagcagatgtggaaggcgctcaattgattgttgatgataattatgaaggtaaaatcagaagccattttcctaaacatgtggatgacaaagttctaaacaaaaatgtcgcacattttgtaccagttaggtgctgctccaaatctctaataccgattttaaggtccaggcccctggtacctattgggccacgtggcgctact

SEQ ID NO: 67237 - DNA, 369 bp, Oryza sativa
  unsure (1)..(369): unsure at all n locations
agctntgcttcaattacctcaatattaatatatatcgccatacatatatatcaaaagttggctcatgcatgaatccactccatgctaattaactatagccaacagtagtatatgagcgaatccagacaaccgaacaaacaaaagtctgtctgctcgccatttatgaagatcagatactgatctgctgcggcaagcaactatttttgttgcgctagaaattacgcaacttacttatatatataaaataaaagagctgtatacgtagtttatgtacacaccacgtgattcccaatctctaggagattatatatgatgccacgatcggtgtgggtgcgacnatatcagtgtatatatataaatctagcgatt

SEQ ID NO: 67238 - DNA, 304 bp, Oryza sativa
  unsure (1)..(304): unsure at all n locations
ttcaaccactgtccacctcctatagtatccatctcacacctgtgcaccttctatcaggttgtgggtctcgccccactcatgttaggagagaaggtatccacttacccactgtggcagaanaataaatattgattttcttattttgcaaaatatgttcactgcgcggtcttcgtggcgctattgtctgcatgccaggcccatttgaaagttctgcatgcaaggcttgctaatctgcacgcatgcaanggccgtttgattagggaagttgttagtattgacgttgttaccgggatatctatctaat

SEQ ID NO: 67239 - DNA, 371 bp, Oryza sativa
  unsure (1)..(371): unsure at all n locations
agctntccctactgtacttaacaatgcatgctaaattattgctgccaaactgatgaatggtaactgcagcggcaaaaacaaaatggacctttgaatagaaaggacaaaacaaaatgccattctttgggtatcaaaactgaaattgcacttattttcagtacaaaaacaaattttaccaagtgtgaaagttgataatacaagtgcttatgagccttcaacaatagttaatgttcattagaagcaaagttatcaatgaaagaactccatacatcctgaaggaacctgttcaagggaagcatgccagtgtacaggggctccacaaagcttgctaactgtccttgttttatcgccaatgggctcatcttcacatt

SEQ ID NO: 67240 - DNA, 434 bp, Oryza sativa
  unsure (1)..(434): unsure at all n locations
tgacaatngaattatatccatacatgtcaatgagtaaatataagtgaaatatatgccaatgacatgcttatgcatatgatgcatatgtaatggtatgatgtgggatcctagaatatttcccccttttgtagctatgatcataaggagatcataaatattctctccctttaagatcaaatgtgggatcctcaaatattctcccccttttggcattaatcacccaaaaatgaaaagggctagaaaataggcaattacaaaagcccaaaaaggaataaagactaacaaggccaaataatatttttgtgcaagcacaaagcaacaagtttagaaatgacccatttatgaaaactcccncttactcatagagtcttgtctttgaatatggaatttggaatagaattcatatgtagaaagggttagtttgagcacttgaa

SEQ ID NO: 67241 - DNA, 440 bp, Oryza sativa
agcttagcatatgtactctgcatcatagatatgcatcacaacattcagcatacacaaaatgagatgtgccacaagacttgccctacagaaacgagaagaacctgatttgttagctggttcttgaacttctcgggatttctcttcctctcagagtgaaattcgtaagacacttgtgcatccatccctgcagtatgtgaagtcatgatgaccatgtttctattactgccttattaatcatgatatgcttaaaagatactaaaatatgttctacgataatattgttaacaagtcctgattaaaaggtactggataacaacggtgactgtttgatatctggtagagcaagaactatcataaaccaataaaagaaaaaaacatcatgctgtgccttggataccagaggaactcttaccctactatagtaattccaaatcctcacg

SEQ ID NO: 67242 - DNA, 423 bp, Oryza sativa
  unsure (1)..(423): unsure at all n locations
tttgttgccaaatattcaaaaattagaagcntttcatctccatgaatacagcagccaagaagcctaactagatttttgtgctgcaatttgtcaataagaacaacctcatttgtaaaatgctctattccttgtgtgcaacctgtgttgagccttttgacagcaacttctctcccgccttccaatttcccctgtgtaatacaatcattttaaatttataaaatattgtaggattctccagtgtttgtgattgtcagcctgaattgtttaccttataaaccttaccgaaacctccttttccaagaatgttggaatcgctgacattgtttgctgccgcgacaacgtattcataattaacatgtgaaaattctaaatcctgctcaattagttcttgagatctaaagtttcctagcagcattctgttct

SEQ ID NO: 67243 - DNA, 473 bp, Oryza sativa
  unsure (1)..(473): unsure at all n locations
cgtgatccttagagncacctgangcatcaagcttgtaaataaaggatagcaactttcttattatcatagngcnggctgcagatgtcctatgctgctggtgctaaccaaagggctattccacttggtgggatggccacatattcagcgggcatggacagaggaaaccatggcgctacaaggaccgaataaaaaactctatgtggaaagactaccttcgaactgcacaaagagagaggttgcacatatcctttntatgcctgtaaactaatatcacattttcctagctataattagtctaggtatctattgcgatgtaattcatgttacaccttctaggtgcttttgcccttaaccctgtcatctcagatatatctcgcccctttctggtttctttgaagtgagaatgcccacaaggagcctagatatgtaagttaaatgctacttatgaaccaaaacttncctgtatcatattt

SEQ ID NO: 67244 - DNA, 310 bp, Oryza sativa
cacttcgctctagatgttgattcaagtcgacagaccacaagaaaacgaaaccgaccctgcatgtttctgtcgatttgcctgcaccgacccaaatataaacattgtccgcgttgttccaaactgctctaaaattttaaagactagacgaactcgattctagtcaagattattactaacttcagctgtagagccttcagtcatctgatgctcagacaatatacacgcacagggccctgcatcaatcttcagtctccggtccaagtcgatcgccatgtcgctgtcccggacggtcggtcatttcggacaccaa

SEQ ID NO: 67245 - DNA, 450 bp, Oryza sativa
  unsure (1)..(450): unsure at all n locations
tacagcaactcaagtggagacacttcagcgctagatttttattttccacgggcaccatcagagaaaagctgggaggttgctaatgacgatgatcagctgaagaatccgtggagtcctcccaagagcacatttacactggaggagcttatgatgcttagccgcaaattgtgctgcgggcaatggatgccagttgatgtcaagaagaagaacctctccctctcatcaacggtaacgcctccaaaattttcattgaagtttgttttttgcatctgcaaatattcataccaaacatttttcgttcagaaatcagaatgaacatcgcaattctcaatttgcaagcatggtatctctattcttcttgacaacttanagtttttttttgcattacgatttagaacactaaaaaaatcatatcactgcagcatattgaagatataactcctatcctta

SEQ ID NO: 67246 - DNA, 347 bp, Oryza sativa
agcttgcgagtctaggactatcggtttggtttgaagtcaacttcctcaattctaaggttaacttccgggcatatttgagttgcccttatattcctcccaggggaatgtactatcattggtacacgtaaattttgggttttccaaccatttcttttcacaaaagcttgtgatatgaaagaatgagaagctcctgaatcaaacagaactattgcgggtacggaattgacagagaacatacccatcacaacgtctggagcatcctgagcggtctcagcttgaatgtggttcactcggcctcgaccaaagttgttggaagcacgtgaaccttgtccacttgcctgagagct

SEQ ID NO: 67247 - DNA, 439 bp, Oryza sativa
  unsure (1)..(439): unsure at all n locations
tcaagggaaggctgttatttttcaatcaattntatttgcatagtttcaacaatctaagtgtgtgctttccacaaccagagcgagacaagtctcagcttggtcggggaggggggtgagaagtgaccaaatttatttatcaagatttgcacaactcccagagttggcctcgaagctggtttcccaaaccaaaccaattttccaaactttcagagttaggtcgtctccaaacaaccaatcactttcaaggactccctgtcccgctgtctccctgacagccacttgctttccaaaaatcaagtttcccagaccttaacaccttttcacaaagcagggtaaaacgaaaactacgctaaggaatcacctcacatctgcccatgaccgtgggcacggctgttcgaacagtttgataacctctgcagagggggacactttacccaca

SEQ ID NO: 67248 - DNA, 458 bp, Oryza sativa
  unsure (1)..(458): unsure at all n locations
agcttgttaacggatcggctttgttcaattatcgcctaccgctatgttgaatcctatcattaaaccatggccgttccgaggttgggctttggatttcattggtcaaatttatccttcgtcatcaaaggggcatcggttcgtgctaattgcgacgaatacttctccaagtgggccgaagcagtgccgttcatgaatacttacacggaggtaattgactttattttgaagcatattattcatagatttggtattccttaaatnttgatcaaggatcttcttttgtgtcaaacaggtgagaagttttgctgaaacttatgatattaagttgttgagttcttctctttactacgctcaggcaaatggataagccgagtcgagtaataaaacattgttgaaattggccgtttgccaattgaagtaaatcttggctctcttcgatatttcaagcaagacgactt

SEQ ID NO: 67249 - DNA, 379 bp, Oryza sativa
aaggaaccattgttttacaattgatacagttttgacttcagacacatcttattaagtgcgtgtcacgacacggatgagaaagagcgactcattcggacggagcagagaaaaatgcatcctatgattcttgtcggcaccagaggctccctgccaattcgttaccgacccggctggtccaacatgcacacgcgagaagctccctgccaatcgctcaccacaccggcttgaccaacagccactaaccaagcaccgctgaacgagtgggtccctgccaatcgttcaccgacaccggctggttcaacagccttataccaagcacagaaaggaataccttacacaccaacagcaggtttccaaagtgctcattataactattgct

SEQ ID NO: 67250 - DNA, 471 bp, Oryza sativa
  unsure (1)..(471): unsure at all n locations
agtcacccgccgcatgcaagcttagtaaattgggtttcacttatttataatttatcgttatattttagcctttgattaaatgtcttgtactgaatcacgtaattttaatgtgtaagttttgcaagaatctctccaacaccttaaatgatgttgtttggaaatcagatgatcttcaaagtcaacattcctagagtaacttgngagagtaggattgtgaactattagcataccattcttttgaatcaatattcctacttctagaggcgagaaaaggagaaagcatgtctattgcacttgtacatgtgaatgaccctgtaaattatgtttggtctccactcctgttgtatgtgttgctattatcttttagagaacctttctgaaagcttaagtgaagctgatcatgcaatgagntttatttgttagtaagtttatgtgtaaacagtatgttgcgaggaacaagtatactttatt

SEQ ID NO: 67251 - DNA, 415 bp, Oryza sativa
tcagcattcattggtagcataaagcatcttccaaaggcttggagcaagccatcttaacaaattcatctttggtataagctgcccaaaaaagattaggaaacttagttccccattacacagatccccaaaagagcagtgaggttcctgtttgcactgtgcaatgagcatccctctaaaaacatctaccagggaaacaatatttttccaccaaaaggagcctctatttgaaactaagtgaagagactttgaagtgcaataagatttccatatgagatccacccaaggaagatcaacatttctatagaacttatctaagtgtttcaataaaagaacaacattctggtttcttagaattatcacccctaaaccacccttgtgctttagcctgcacactagctcccaggaagctaaatat

SEQ ID NO: 67252 - DNA, 416 bp, Oryza sativa
  unsure (1)..(416): unsure at all n locations
gcttatggcaaagtggcagcaacaagcggcttatgatatcatgattntggacgaaggcatangtaggttaaagggcactcttctncttttctttgcaggcctcccttcccatttgccccttcttttaaagctggtggttgagggagctttcttccctttgttctcttaagcgtgtgcgtgcgtgggctcctgtcttatcatccccctaagaatctttgtccgttacaaaacgtcggtggggttgtacctccacttgtctctttacattctaactagcatgatggcccgcgcagatagcgcggctagcatcattatattttctctcatataatagcatatatgttttctcattatattattcaaaatattaaaactaccacatcattttaaaattttgcataactttacaaaactac

SEQ ID NO: 67253 - DNA, 469 bp, Oryza sativa
  unsure (1)..(469): unsure at all n locations
gggacgcagagaagctcgcctcgtctgccgcatgtcctcttaacgggaaaagctaatatcccctttccactgcctcgtcctcccttnttcctttccgagctcgaccgctctacctctgtcctcgtctctttgcacgtggaggcagagagccgctgacgccggtgcgccagctcgcggcccccactttgaccgcgccggcccgcgctccgcgttcaaattcgaccgctcgatccaccgaccccgtcgcccaacgcatcctcgccgtcgccattttcgggtcgcctacgaaaccgtcgccccaccgccagccgagcgccagctcgtgtgcgatctcccccttgcctataaatcctacccaccgagccccaaatcctccctcaacctcggtcgccgtcgcgcggtcaaccccggagcaccgactgcttcttcgtagtccggacaagaacgccgcgccgacaccaagccgttc

SEQ ID NO: 67254 - DNA, 289 bp, Oryza sativa
ccagaacaacaaatgctataactctaatccaaagaacttccattagcttttaatgctcttgagacttcaagggattcctcaagtgaaatggctgctcaacatctgaatcgagtccacttatagcctccactcctctagccgtttcttaccgttccatagagtatgccagattttcatatggccgaacagttcggtcctttatacttttccaacagccattgaactagaagccattgtgccatataaggacggccaacccagtagctcccacattattcgatagtgcttg

SEQ ID NO: 67255 - DNA, 444 bp, Oryza sativa
  unsure (1)..(444): unsure at all n locations
tatgctcaccaaaggagtggcatccattctaacctgngatttatcggcaggaggattgtcganaagtgcaaagggttaccattggcaatcaaaactctagggagcatattgcgcttctaaaccaatgaaaagaaatggagagatgtcttaaacagtgagctatggaacttggagcagccacataaagaggttttgccagccctagagttgagctacaagcacatgccaatatacttgacacattgctttgtctccctctttctatatccaaaagactcttcctttaatgtatttatggtatctcggttgcggaaactactcagattacttcactgtgacggatctggcaaccgtgaagatattgcaagcctctatctcccttgaatttctcaccgatcattcgcttcacacattatgcatggctcacctcttgcttgcatgacc

SEQ ID NO: 67256 - DNA, 411 bp, Oryza sativa
  unsure (1)..(411): unsure at all n locations
agtcacctgcngcatgcaagcttcttcccttggatcattgaaagctatatctgtttttctgaagagccctgctatgaacatacctgtctgtgacttcaagcttgggccagtccttcggaaagatgtcatgaaggccagatttatggtcagaaagaagacacaatatgctactattttggctttcaacgtaaaagtatctcctgatgcccaaaaattggccagtcaagatggtgtgaagatcattcttgcagatgtaatcgatcatttattcgagcaattcagaaaatacattntcccaagaaatgagaaaactgaagaagttgtattcccctgtgttctgaagatcattccagactgcgtattcaacagaaaaggcccaattggtctaggtgtcgacatgctgtatggagt

SEQ ID NO: 67257 - DNA, 448 bp, Oryza sativa
attcttgtcatgtgaccaatattcccaatttgggaatcgatttaccatctgaaggtatagtaggctacacacaagacaaatatgatgtaaggtgattattacatccaaaattaccacagactgttaacaacttaccccagtagactctgttgacaaagaagaaagtttttccgcggcaagaattttaccaacaatgtcacagtcattaagaacatgctcaacaagttcagttcttttacccttcaagcaagagacaataatattctcaacatgatggtgcaaaaaattgttatatgggtacctgcagttcagaattgtatgaaagggccattataccaatgaaacaaacgaattttcttgaaaaaaaatattggacttactcgaagaataaatcaacagatcgctttattgccgattgcctgataagctctttctcagcagtttcact

SEQ ID NO: 67258 - DNA, 239 bp, Oryza sativa
  unsure (1)..(239): unsure at all n locations
agcttcgtcatcagagacanccgggttgtgtgtctatgaacaacacgacgctgtgcttggccttgaaggcccaggagtaggagtcccagccgctgctggtgtacaccgtctggatggggatctcgccggactcgggggtgatcgtgatgtgaagagctcggactgggcgcaagtgcgcgccgcgctgaatgtgatggagtagtgcattccccgcgtcaaggtaagccgctgctggatgg

SEQ ID NO: 67259 - DNA, 338 bp, Oryza sativa
  unsure (1)..(338): unsure at all n locations
accttaaggttattggtggagntataccttcacttcacataagccaaaaaagctactccaacctagcttttggctttggcttaacagtgtaagagtggcttatggcttttaaaaaggccagacgaaaaagctacttatttgttcaagcttagactttttggctcataaactgtcttataagcctaaacaaagagggggtgataacatgagccgtttctctctcttttggttatgtacagtgaaactagaggcatgttcttttgctgattcaacctgcactgattgatctagtacacgttcctaacttgataaacctttacttttggttaccccacatg

SEQ ID NO: 67260 - DNA, 399 bp, Oryza sativa
  unsure (1)..(399): unsure at all n locations
agcttagcaatactgcaagagcaaatgtcattgtgaaaacaaagatggataaaggatttgatactaatgcggtactcaatatttaaaagtgtactggtaactcctcaatttaaactaagggcatgcgtattattcagaatagtcattatctaaatgaaaccaatggtatcctacacattattatgtctaaagatgaggaagatgcaactgtattattcaacaatggcattattttgcacttcaagttgcaagcgactgctgtactacttcagaatggtgtatatgccacaaatgttgtattgtactttcgactccatgtatgtaatacaactggttcagcaaaagcataatcagtaatattttgccgatagtaagtttaagcagtangttccatcattt

SEQ ID NO: 67261 - DNA, 438 bp, Oryza sativa
  unsure (1)..(438): unsure at all n locations
tgntagctatctgctaacatattatagtaatanagtagtttgtacgtggagtataagntatatagctaggaccacaatatacattacatgatctatacatggcaatgcatgtgaaccatgcacttactgcaagcggcaatccagagtatatgcgtggacaaccttggtattatgtagctaattaccaaaataagatagctgcttgcgttacacaatttacaaaagacatgctagaatttaaagtaaaatacaaagaggtctagcaggaaaggagccgaaagttgcttagtttgctagcaagggatcaagtacttatctaccattccattgacccatgcatatgttaattagtattggctggaagcaagctagtatatatagtattagcatgccttgacgatgaacgcctatattaaagtaaataaaagcaaaacaaat

SEQ ID NO: 67262 - DNA, 420 bp, Oryza sativa
  unsure (1)..(420): unsure at all n locations
agctntgtggcatggggtgccatacaatttttttccattgcgctgccgccgnctgccgcctgccgcctcctccccgtggggagggtgccaccgcctcccctcccgccagatctggctgaggggaaggcgccgccatcaccgctaggccgagaaagaggagtgcgcgtgcgtgagagaaagaggaatgtgcgaaatatagagcgagagatagagatagagatagagatatacagagagaggagagagtggagtgcgagagagagagcgagagactctcggtcttatctacgcgagagagaggggcaccgagccctctcagncttatccgctcaagaccatcggtctgctcttgttttagtgccgaatttaaaaccgagtgtcggtttaatanagaaaataatggtgtagtttttgttaaaa

SEQ ID NO: 67263 - DNA, 445 bp, Oryza sativa
  unsure (1)..(445): unsure at all n locations
tagctggttgcttgttcgcaaacattctcttcatgcgcttcgcaattgtgagataccacaccacctttgctgggcctcccctctttgacttactttcttcaccttcactctttgctcgtttgtatcttgatgccccacagatagggcagacatccaagtcagcgtattccttgtaatacaaaatgcagtcgttcggacatgcatgaattcttctgacctccaggcccaacggacataatacttgcttcgcttcatatgtcgtctgaggtaaattgttcccctctggcaacagatcctttaacagctcaaggagttctgttaaactcttgtccgaccagccattactagccttaagcttcatgagttccaacacgcatgacaactngctgtgcttcgacttgcatccatcatacaacggcatctggcaatcttccaccaacttact

SEQ ID NO: 67264 - DNA, 362 bp, Oryza sativa
  unsure (1)..(362): unsure at all n locations
agcttatgttgatgatgtagtcgtcatgactcttcttattgatgacctggatgcggatttagaagaaacttttacaagcatttgtgctttcaagatgaaactaaacccggaaaagtgcatcttcggagtaccgttagggaaattgctcggatttatggtatctcaaagaggcatacaggccaacccggagaaaatcaacgccatcctcaacatgaaaccgccaagctcccaaaaaggcgtccaatagctgactggatgcatggcggcgcttaaccggttcgtctcacgacttggcgagcggnggatgcctttcttcaagctgctgaagaaaactgacaatttccagtggggacccgaagcac

SEQ ID NO: 67265 - DNA, 412 bp, Oryza sativa
atagaatcttattgccctcattctcttaagacgctcttttcatcatctgcgcaacacaagcaattgctcactgggatctcccttcaatctttattcctagcaacttctacaagaaaaacatgtgactgacttcaagagcactagctagctgttgcacacactgtccatgcacaatggggttgcttttttgactcgtacatatttccaagcaagctgacacttaataactctctcattgttcttgaacacatttcaaccaccagacagctgttttgttcagagggcctaccatggtgtacattttcttagagaatagtatttttttatccggcctctacatacaaccagatatatacagtcctttaatatttagccccttaaattacccacattgatatcgctcctatggaga

SEQ ID NO: 67266 - DNA, 383 bp, Oryza sativa
  unsure (1)..(383): unsure at all n locations
agcntggggcgacgatgacaagacgccgactatggactgcgaggaggaggcggcgacttggcaccggctgtcggggggacgcggtgctggtgccccggtggagccccaccccgagcggctccctcccgctatcctccatcgacaacgacgacaagaccactgccgttcgcgtctccatcaacttcatccaagtattcccctctgtctccgctgaagccgtcgaggaccaggccgcatcggtcgtccactacaaccctgtcgccggccgaatcacgaagccagtcgtcggggagcctgagatcgacagtaccggcgaaggggtgtggttcatcggggccgaggtgagctacactgtctgcgtggactccgtgctcaccaccgac

SEQ ID NO: 67267 - DNA, 448 bp, Oryza sativa
ctatacaaactcaagcctgggtgctctgtctcttcctttaagaagaatataatggttctccatgaatgttacatgatgtgttatggattggcaaatatggtgatcaaagttttgatccataaaaaaaattactatcctactctcaggctaccagaagtgacagagattcggagtactatagtcatgaagcagtattgttttttttttgagaaaagcaaatagagtattgttaattgtggctgcaacattatatatttatgcaagagggaatagatcaatctttgtatgtacatgtgctgcgcctaccagatgttaatttggaactccaaactaaatcatttatttgacaatgctggcatttatcaggaattatttataatggtggacttttccgtagtgaattataatggcggacttctctacttctctcaaatttatgaacaataaa

SEQ ID NO: 67268 - DNA, 426 bp, Oryza sativa
  unsure (1)..(426): unsure at all n locations
tggtggctattccgattcggattatgccggttgcaaagtttatagaaagagcacatctggtagatgccaaatgcttggtagatcccttgtgtcatggtcatccaagaaacaaaactccgtagccctctctaccgccgaggcagaatatgtntcgacgggtagctgttgtgcccaattgctttggatgaaataaacattgttggactatggcatatccttcaccaaaaccccactcctatgtgacaatgatagtgtcataaagataacaaataacccggtccaacattctagaaccaagcatattgacatatgccatcacttcctaagagaccatgttgtcaagtgtgacatagtcattagacacataagaaccgaggatcaactagccgatatctttaccaagcctcttgatgaaacccgctttgc

SEQ ID NO: 67269 - DNA, 469 bp, Oryza sativa
  unsure (1)..(469): unsure at all n locations
agcttggaagtgtgtgtgtgaagtgagggagtgatgtctttatatagaggtaggtatgacggttagagaaggggaaatgtccaaagtgccccgcaaccgccatcagggaatgatctggagcgtccacgccaaaccccagtatcaacggtgatcaagggggttcggccgaacctgggctgggcccatctggcctggcctttggcccatgtcctcccctagccctcctctatccattcttcggtattttgggctgattctctggtgtttcgatgaagttcacaacccatccttgtatggatacataattctcctcgctttagtctagatttccttccaacctcggggtttattacctgcatacaaatagagatgagctcatcccactatacanataaaatatgccttatttaaataagtntaanatgatatttaagttattaaanatcatttataattaacttatacccga

SEQ ID NO: 67270 - DNA, 295 bp, Oryza sativa
  unsure (1)..(295): unsure at all n locations
cagctctttttctgctcgagcggccgcttncattgtcttgttctcactctgcttcttcttcctttccagtgccagccttgttcttttctatcctcttctgtctcttccatctcctcaattttgcttcatctaccttaagttttgtcttctcctttgggggctcatcatcatggacatctggaatatcatctatatcaaaaggttgttttgcctcttcagctttggcaagagctttggcaccaatctcattctttggagtacatttcacctggagcaggagccttcttctcctgct

SEQ ID NO: 67271 - DNA, 404 bp, Oryza sativa
  unsure (1)..(404): unsure at all n locations
actcactcggataagctgtattattgaaccagtctttacaacatgcgataaaaccaaagacagataaagcgcctaaactataagacaagttagcttcttcagaccatacaaatgcacggcgagcccatgcgaagggtttggttaagatatgccaaattccgccaaatacacaaatgaaacccaaccatacatgtcccccaattatatcttctaaatcatccacactaacaatccaaccctctcccgcaaaaggggagtttagtaaataaccaaatataacaccggggctaagggtcaaattggtaattnttcttacatctcctcccccaggagcccaagtatcatatataccgccaaaataaagagctttgagtactagaagaaaagcacctatacctaacaaa

SEQ ID NO: 67272 - DNA, 401 bp, Oryza sativa
  unsure (1)..(401): unsure at all n locations
agcttagcattggctacatgatgattatcaattcctttaattaccatgaattggtcatgtaaacccccaagcccagctatccagtagcataaacagtgttgtttactctggaaaaatataaaggccattctctcctaagttccaatgagaacttcagccctacaagtgtcttcagaacagagaacagcatgattcatgatcctcctatagtctagtctatctaggtactttggtgaatcctgaaacatttcgaacagtcaaacatgcatggttgcggcaatttttgagatacgccatcaaaatatagtaatcaactcacttagttttcataaagaactagtaaccgtagactatgcttccaaaagagaacanacctttgctcatggtgatagtggtagcga

SEQ ID NO: 67273 - DNA, 401 bp, Oryza sativa
tcatttctgtgactagttgtgttcattgcttactcttcacctgaatcctcattgtaggtcgaagtgcaccataaagacgcttgtgtcatagggtctttgagagaatatcatttaaatcataacatggctgctgtcgtcgtcgagaacttacctgatcttcgccctgtgcctttcacaatgttcagaaatttgtaccacatagcatggtagtagctctaggccgtgatatctctggaaaataaatggccacaggtgggttgctgattggtggttcaagcggatcatacaatcctaagcttatgtcgtcgacttgtaaattctctgaggtacacctgttctttatcacttgaagacacacttgcataatacaatacaatagttaatctggtcgtttatacata

SEQ ID NO: 67274 - DNA, 320 bp, Oryza sativa
  unsure (1)..(320): unsure at all n locations
cacttatcatttgttgattttcagattatgctatttttatgaatgatatatgcatttcaaataacgatnttacttttaagcaaacttttgctactttcaacatagatctgactgttaacattttctttatttaatttaccacactgttatcataagcaaaatgcaaaaacttaccaaggaagggttgcaaaggactgacaggagaatcagtctaatgaatgaaatattaactgcaatggatacggtcaagtatgctttacatttacttgtgtttttactagaagtagtactaaaattttggtataaactgttccanacat

SEQ ID NO: 67275 - DNA, 459 bp, Oryza sativa
  unsure (1)..(459): unsure at all n locations
tatcaccttcgctattatttctatccgattcaactatatgttcataagatatgccagcatctgcaaccaatgcaagtatatcccttggcatgaaaccagacgtntgtactgctaaatcttttacgaacttgtcatttatactctgaaattgaaatagaataagcatcaaatgtaacgtaaaagcacaaaacttcacttttggatcaatagcgagaaaattctacctcatcagctgacgttgaaacacaatggagtgtttcagatatcaagttcctcctctgttcttcatttatacttttcatgtttatctcatggcggaaacatcgcctaattgattgtggcattccttcagcacgatctgcaggtgcaactagtataacttgaagtgggcttacacattcaggttccacaaggtactgaaataaaggagggttgtgatacgaacatgatggcttatac

SEQ ID NO: 67276 - DNA, 409 bp, Oryza sativa
  unsure (1)..(409): unsure at all n locations
agcttaaccagctctcggctaagccagaagatgtcctatgttgcttggagatgtggcggcgataatggcgactaacgacaaagaggacgatgacacaacgatggcttgatctggtaggtggatgccgaaagcattacattcagcgggtggaacactgtctaaggtttctattgctgcaagaaatcgacaaatggctcaccggttgaacgggaattgaccatagaggcgctaggcccgagtccgagaagatggtggccgatctctcttctcgctgcaccgatctactcttagggattctctgngcgtattggaaaggatgatgatgtgatgctggtgacgaaacaacctcatcggactcgctcctaagcagccggaacagcgacgcaatcttgcggctacacaatgacga

SEQ ID NO: 67277 - DNA, 441 bp, Oryza sativa
  unsure (1)..(441): unsure at all n locations
agcttgagtgaagtagagaggtgcttactatctgactacaacgatacccatattgcacatgaaaataatattcatatattataacaatacactctgataaataaattattgtaataacatagagtgtatataaagccacacttacatgtattttatatatacatatagttgcatctaaccatttaaaacttcgattttgtttaacaatagaattacaaaacccacgacaatgcgtggggtgccaactagtacaataaaaggatcgatccanattcaattatgcacacaacatgcaaagaccaatttgttaaacaccaaacttcattggttangccagaagtcccatccagtacttatatgtaaattcgtatgcatgtatatataatgggccacagtatggcaatcatcatacagatatagcatcattttagagtctcatct

SEQ ID NO: 67278 - DNA, 381 bp, Oryza sativa
  unsure (1)..(381): unsure at all n locations
actaagctttctaccaccaagcaggttatcaatgaaattttttatattgtccattcttcaaatggatgcaatggatctagaataacactggacaaaagtaataaccgctacatatatatatcggagggattactcccctccgttcacaatctaatagtctagattcattaacatcaatatgaacgtagaaaatgctaaaatgacttacattgtaaaacgaaggaagtagcactaatatgagcgaccgctcggtggcgcgctccgncgnaccacaacgcgccgactcggtgacggtgaacagcatctctgatgcctggatgggcgtggcggggatcttgggccgtgngatgcgctccacaccgtgggacctgttggcgacca

SEQ ID NO: 67279 - DNA, 385 bp, Oryza sativa
  unsure (1)..(385): unsure at all n locations
agcttctacactagaagatagcatccgtattatccactatatccatgntatcattatccacgaataagctctccatccatgtttcctttccaaagaanaatcctttgcaaaaaaaaagaaaaaaaaagagggaaatgtatggctatgagaaaaataataaattcatattttggaggaaaagcataagcacaaaggagaaaggagaagcattttctttatccacattttattttccatcatagttttccaccatattattcacacacactttgcacgatcttgatcttgagtatgatttatcatctattttagtcaaagtntttaacttagtaataaatgtgaatacaagtatgccatgtttgatccctaccgagctccatatatc

SEQ ID NO: 67280 - DNA, 451 bp, Oryza sativa
  unsure (1)..(451): unsure at all n locations
tactaagcttgagaattttccaagtttatgcgaataggtccgttcttctcgtttaaataacagaatttgcaagaggaatttggcgatnttaaatttgatgaacccggcanagcgggggagaatcggatgtaactctttttgtagatgtccgtggatatattataagcctaatttcgagtccgtatgaaaaaagatatgactgttttaaggaaggtcactcgaatcagggttctatttcctttctagtggcggcaggatacaaggcaactcacaaaagctatcggcaatagatcaaacacaaatagaaagtgatttggtgggtgactgcgacngcggtgacngtggtgatgacggcaaaattgatgaatgtggcgatgtgcggtggggcaagaactcgaaactctaatcgctaacacttagaccagcataattacacaaccgatgcaatcga

SEQ ID NO: 67281 - DNA, 446 bp, Oryza sativa
  unsure (1)..(446): unsure at all n locations
agcttgnntattttctgagagtgtctgtatattatatggacggnaaagatgcatatagatatccattcgtgtcaccagctacacaaatcatccattgttttgatgattttgatctatatgcatgcaaggacacaaccgaataaatgtcgaaataattcaggatgtttaatttttcactgatttcaattgtaagaagaagtcctttcctttaattttaccattgttgttgattaatgaactacaagaccacacaggcaaagcccctgccgcatcaaaatttttagagtgcangggtgtgtgtgtgtgtgtgtgtgtgtgtgtgtataggaatttgagttatatatatatattccaagttaattcaattgattggtggaggtgtcttcctctgttttttagaactttttagaggtccactaccactactctttaaagtatgaagatgc

SEQ ID NO: 67282 - DNA, 412 bp, Oryza sativa
  unsure (1)..(412): unsure at all n locations
atccttaagtcacctgcngcatgcagctangcctgacggactattgaaagtttttgctcggctngntgctaagggctatactcagaaagaaggcgaagaattctttgacacttactcacctgttgctagattgaccacaattcgtgtgctactttccctagcagcctcacatggtcttctcgttcatcaaatggacgttaagacagcttttcttaatggagagctggatgaggagatctatatggatcaacctgatgggtttgtacttgaaggtcaagaacgcaaagtgtgcaaattgttgaagtctttgtatggtctgaaacaagctcctaagcaatggcatgagaaattcngacaaacattgacatctgcaggctttgcagtcaatgaaggcagataattgtgtgtacta

SEQ ID NO: 67283 - DNA, 383 bp, Oryza sativa
aaattctatctgccagcccatagagttgcaataccattcccgttgtctctggccagttttgcggtctggtggagcttgacataggtcgtgcccggtttaaatagggcatgtcgtgcggttatcacgccatctctttgtgactaatcgacaatattcttcaaagtggattgaggctaaaccggtcatcacgatcacagcagataaagctagagatttctttcataacatcgtgcatcggtttggggtacctaatttgatcatcactgataatggcactcaattcactggcggagcatttatagacttttgtgaagacttcagcattaaaatttgttacgcctccgtgcacaccccatgattaacggacaagttcaacgcgctaa

SEQ ID NO: 67284 - DNA, 370 bp, Oryza sativa
  unsure (1)..(370): unsure at all n locations
agcttgcctgtactatgaaaccaacatgtgttctatctctatctnggccatgttgcgatagcatttgattgtgtgaaatagtataattctttctttggagcaagatgcaaagattgtgtttaatacaaggcaacttcctgggtcttactctctacgttccaaaatataattacagtatgtactgatatagtgtaaaaacacgatcactatgcggtagaaaaagaaaaaacatgctattcttccctctctggtctagatcaaatataatcttacatctttttgcttcatgagtttttttacgacacttctgctctatgattaatgaacaatcaagtggggaagcttcctccccatgacctgtcaaaaaaaa

SEQ ID NO: 67285 - DNA, 180 bp, Oryza sativa
tagcactgggatgttaagttttgctttcacgcatcgggtgagacccccatttctggacaggttaccaaatcacatgcacgctcaacatccgaactaacgaagcctggtgttaactacctgaaaaagcactgatcggtatgaaatggacagtatcacagctgcacaattctaaaccagact

SEQ ID NO: 67286 - DNA, 352 bp, Oryza sativa
  unsure (1)..(352): unsure at all n locations
agcttcgggagcaaagttcataccaaaggctttttttcgattgggtcaatggtgctcttgttgagatcggcgagaacaccttgctaagtacattcccatggagcaaagcacactcaagaacatggatggacgcctcctctcctgcattgnggatagaagtctggagcatcctgaaagattggatttacggggcacggatgttcgtggtgagcaggagagataatgctgggatcatgatagagagagttgtgaagcacgaggttgaaggaacatgctgggtgaaaacgatgaggacgcagttgtgtgacatcaccgagcanattgagggtggagtctgggaggagctcgtggg

SEQ ID NO: 67287 - DNA, 397 bp, Oryza sativa
  unsure (1)..(397): unsure at all n locations
ntacatgggtcacaacatactcgagggtcacattccagtttccttaagcaatgcctcaatgctagaagatattgttctacaatccaacaatttcacaggccggatccctacttccttggttaagcttttacgactgtctaaactagaccttcagctaaacatgcttgaagcaaaagatacagaaggatggaaattcctggatgtgttgacaaactgcacggcgctaaaaatgctcgcactatatgcaaatcaactacagggagttataccgaattcaattggttgcctacctagcactcttcaatatctcattttgggtggaaacanattatctggtataattccacctagcatagggaacctctctgggttgattctactggcacttgatgaaaac

SEQ ID NO: 67288 - DNA, 397 bp, Oryza sativa
  unsure (1)..(397): unsure at all n locations
agcttncaagatatccgagctggttaagcgtatccaagctctggagaaagacaaggccgaattggcaaaaaagagggactcggctctaaaagatgtcgaaggtactagtagtcgaaacttcaaaaaccactctcatcttcatgcccagtcgttaatgtgaatttatttgcgcagatcgcaaaatcaaatcccaggctcagttcgacgtcttagttaacaaaatcaagaagcttgaaggagccagagatgaagtcgccaatgttgctacgccactcgtccaggcaatgtttntcaataacaacggtctgagttcacttgatgctgtcaaaagcttcgataagctgagagctgctccggatacatatttaagaacatcaaaaaactggaatatggagca

SEQ ID NO: 67289 - DNA, 403 bp, Oryza sativa
  unsure (1)..(403): unsure at all n locations
ntgatatagctcaagtctgtagcacttgcgatgtaaaaatattccaggaggaggaaatgaaacgtacatagctcaggtttacagcacttgcaaattgcaatataaaaaaaatgaagtttttggatcttgtgttagcaagtaaaaaaaatgaaaagtgaaatttgctggggaaaagaaaataatcttatagtacatgcagtataaaaaacgaagttatgggatcttgtgttagcgaaaaataaatgaagagtgaaaaattgccggtgaaagaaaataaccttttagcgaggggaaaaaaggaagaataatgaaatttgcagggaaaagaagagaaattagaaaagagaaggaaaaaggatagtgaaatttcatgaaaaaaggaaagatntttgagatgctgcac

SEQ ID NO: 67290 - DNA, 221 bp, Oryza sativa
  unsure (1)..(221): unsure at all n locations
agcttcagttgctagcagggttgcatatactgttgtataccgtgcggttaccgcggttaccgcgcttaccgcggnggtacggtaaggggtaaaccgcggtaaccgcgtcaaattcaaataaatttaaaaaataatntgaatttttgataaattttgtacggtttgtcgcggtttgtcacggttaccgcggttactgtgcggtaaccgtgcttaccgccggg

SEQ ID NO: 67291 - DNA, 336 bp, Oryza sativa
atatataaaccagcttgatgtatatattaaaaaagggatttatcattcttgttaatgtatcagaagaaaaagtgaagataccaacaagaaacggaacttacgcttaacttcgtcatttaaaattattaggaaaatagacaaaatatgatacatttcagcaccttccgaggagccagagctgtcagagtcatggtctcatggagcctagttgatttgccaagcaccaacttgttaaattagcagagggagatctcgactggtctctctgagtggcgactggccacctgctgatttgaatactactagtagttttccggttttggcattggcagtatt

SEQ ID NO: 67292 - DNA, 345 bp, Oryza sativa
  unsure (1)..(345): unsure at all n locations
agcttgaagaatgttggcgatggcacaagttatcttttatcactntatgctnttaaaagcagcttatctgcaggcatggtgtttctacattctgggatttattaggttgctggtgagtacagtgtttatgttactttccctgagctgttaaagctagttctgctttcaagtgctgcttctcttggaggaaacaacagcaaaatataatgcanatgacatctcaacttttagagttgaagatggctccattttctgatgcgtaacagcgtaaggaatagacatcactgacttgctatttgtcacctccatttatgtaaccgttgtctattttgatggtcttaccga

SEQ ID NO: 67293 - DNA, 416 bp, Oryza sativa
  unsure (1)..(416): unsure at all n locations
tgactctggccatcacttcctccactgctccagcctatagatggagagattgttcgagccgacgcgtggccgcaacgtgtcgtcgatctcgggttcccttttctcactctctactcctcccagacgcgttgccattctccattcaccactcagagccgaagaaaccgagggaggaggttctctgcctctccatcgccccaaaccttgccgccggccgtggaaacgacgaccatcgccatcgctgattgggtaaagttcatctcccaggttttcgcgttcccttctctccacacaatgccgaaccatttctcttttgaccacgtcccattntgtgcattacagccaccggaacgcgaccacgccgacgacgccctggagcacgcaccggagcgccgccgcttcaaccatcgtcgtcg

SEQ ID NO: 67294 - DNA, 345 bp, Oryza sativa
  unsure (1)..(345): unsure at all n locations
ctgcagcatgcaacttgtcatgacctgaagatctccttctttgatatgcatctcgcaacaaccagtgtgtttcttgatgataaacaataacaacagtctgaggattatagggacaaggcttaagctttatcgacggcgatgacagtcgttcaatttcatgaagatggacaatgggttcagaagaaacgaacgaagatacaaatatcacctcctcgaacgtcttatgcttgggacgaagcttctttttgctggaataattcagggtgtcttcataatcttcataaagatcatccctgaatgcaggagtgcaacccggagcttgantctctttggtattcggagatg

SEQ ID NO: 67295 - DNA, 441 bp, Oryza sativa
tgacactctgcttacaatgtgcaggggaccttttcatttatccaccgtgagtgatgtcatatcaaaggtttggtaaaacgacaaccgcatacctcgaaagacgtggttactcaacagtggttgaaacagaagtaaagtgtattaatttgagaatatttacttgggatccccccattacatggccctataaggactaattatagcccctattataggttcttactactaaggttttggttatacaggggaatttacatggatacccttatgaaagggacgattacatgggtatatagtgtaatagaagtttatggactcctgatgggccgttaggcgatcgccgggccaatggcctctatgcttgatgggccggaaaaggcttctctggacctctcggggcgcgcttgctttggcgaagacgtctcccttcggcatggactc

SEQ ID NO: 67296 - DNA, 392 bp, Oryza sativa
  unsure (1)..(392): unsure at all n locations
ctgcagctttactanactntttaaaacataacttcttaaaactctacccaaattggaaacatgcatcgatttcaatattctttgaaactttctaactcgattctaatttgtgtagctttcaacttaaaattttaaactttcaactcatatttaaaaacttttaaatcatctctttttattattttatttaaaatataaaactttcaacttaaattatgaaactgttctactcagttttttgaatctttcaacttatattttacaacttttaactcaattatgtatttattattatactagcaattataaccgtgcattgcagtggggagaaaaatcgagaaagttagagagtattggtggcagaaagctgaagtaaataggttgatacagta

SEQ ID NO: 67297 - DNA, 446 bp, Oryza sativa
  unsure (1)..(446): unsure at all n locations
acacttgaaactcaagctgtatggcggnttgcattcttgggattaatgcttacatctttatggcactctaatcatgtctttgtgaattgtcgagttatcatatatactatataatctagaccgatcttgctatctaacatcatcggctagcctctatcatcgaaaacagccaataggattagatactgataattgaattaaattatatagtatatctaccatctcaagaagactctcaatgacttgtttagttcttatgtttctctttatacttaatgctgtatcagttaagttaatttgatctactaagtaatatctagaaccataatattgttaacggtgaaatttggtaagcccctatgagaattatcacgtcgccaatagtcggattcctgctataatcggttaagggaaataatctattaaatgaagcttatccaaatgtg

SEQ ID NO: 67298 - DNA, 453 bp, Oryza sativa
  unsure (1)..(453): unsure at all n locations
agcttccacttcccttccactcgtacagcatattattcttccagttccatgcatatgtaactgtgcagaagatattcagttctctcatgaacaaaaaggataaggagcaaaactacaaacagatttgtgcaacttttctccaccgagaatacgttggtacagattcacacagaaaggcaatgctactgagtaatgctcaaattggcaccaaggaatgaatcggttgctaaaatnttaactgtcacactgagacatgattttgtcttggtctgaaatctgaggaattggctggtcttgagatgcaatacgagggtggcgcatcggatggcggcaaaggaccagcatctgggacacctcacacatcagacccaagcatgtaattgatctctgctggagctggctactacaatatgttttttttttttatgatacaaggccattcctattaaaaaa

SEQ ID NO: 67299 - DNA, 220 bp, Oryza sativa
gccacctttgcatggcttcccttgccggagacgggaaaagcctaccggtgaaccgccctgactgcgagccggagacgactgtgagccgggtatggcgtgtcgtcgtgtttcggtccaggcgccgccggctatggccaatgaggcaatgtgtacaccgacactgtcgctagtcatggtaacttggccggcgggtggctgacgcagctgctgtggttggatt

SEQ ID NO: 67300 - DNA, 342 bp, Oryza sativa
  unsure (1)..(342): unsure at all n locations
tcttacggcacgtgatatctgctataggagttgctgtggatcccataacagtgaccgccgtcattgattggaagcaacccaagacagttactcangttcgcagctttttgggtttggcaggatactaccggatgttcatcgagaacttctccaaaatcgctcatcccatgacacagttgttgaagaaagaagaataatttgtgtggagcccgcaatgcgagaaggcgttccaaactctcaaagagaagctggtttcctcgccaagtttaatcttaccggatactcgcaaggactttctggtgtactgtgacgcttcacgccaaagattggggctcgtgctca

SEQ ID NO: 67301 - DNA, 343 bp, Oryza sativa
  unsure (1)..(343): unsure at all n locations
ctgcagctggctaataaccagactctgattctattatcaccgaacctcntgtccatctgtgtcgcgaggctgtacacctttcttttctgctgatgctcttccccttgcttgagccataacactctcacgcttctgatgaagattctcatggtgaaagctacccgcttgttttgaaactttgacagcgtagtgtaccagtcatgacaaatcacgaccaaaggtggagcactggacctatcatgagcaatcgacgatatccctcgagaataacggatggtatccgctaagatacacttggagagccagccatcaagagcttcaatgtatgctttctgagcactga

SEQ ID NO: 67302 - DNA, 420 bp, Oryza sativa
  unsure (1)..(420): unsure at all n locations
tcacttacatgtatgtccacatcttgtatcaccaaattattgcccaaacttggattacaaaagcaagagcaagataacaagataatgaagatgacatgccctccaaagaatacgattgagcgtgatgacgtcagctcggacgatgagatcagtatagtgctaagacgctgatagcgtagtttcattgccctccaaagaaaacaattgagcttgatgatgtcagctcggacgatgcgatcagaatagttgctgagacgctgatagcgtagtttcactgccgagtggtatacagtggatcacactggctgtacatgtagtcaagctacaaattattaaacatatgcttnttgtaatggtcctgttgaaccatgtgatgcagccagcagccatctgttctacatgggacatggtttactgaat

SEQ ID NO: 67303 - DNA, 389 bp, Oryza sativa
  unsure (1)..(389): unsure at all n locations
agcttaatatacttagatgcgataatatctttacatanaggacatattaaacgtgtcaatgaagcatatagagcaaatatagttaaatcagataagatcagctgaaactccgatactaccctaatcggcaaccagcaggcaggctagagattgatattctaagcacgacttaatagatcaaactgaactgatgcaatattaagtatgaaaagaagaaaaatatctagacaatcaagccgctggaagtttcatagagtggtagatatcttatataatctaaaccaacgtcggtatctaacctaatcggatggcctctgttaacagatgttagccgattgtgggttaaatgacgatattgctagagattatgtaagatatatgattactcg

SEQ ID NO: 67304 - DNA, 443 bp, Oryza sativa
  unsure (1)..(443): unsure at all n locations
ttggagaagaattcttaggtggttttctggcttatacctctattgagcgcctgtgaagatggagccgtatgcccgctagtccgctgctgtttattnttgattgtcacgccttaagtgcctttgtaataatgtaaatattatcgatataataaagatgtgtcttttatatcatgtttgtgtggtgtaccctggcttttactgggatggggattaatacactatcgttcgggaaaatgtattattctcggtcgcgacaaatacaagtcaaggtgcgcctaattggttgccaccgattcagccgggcctgagagtttcgctgtggattcagggaccgcagttcgacttcatcaacgctgctcatgcgccaaccgttcggcagcaagctccaacttcagtgctttgaacaaaccaagcaccaatccaagctgccatgatgtggtcac

SEQ ID NO: 67305 - DNA, 376 bp, Oryza sativa
ctcacctgcttcaaatctaaacgggaaaatgggactaagtttttattaatcttgtccgtcaagattcggctgaaagcaagaaacctttccccccgctcccaatccctccgattcaagaaccgatggcgcgagcgagagcgcgagcaatttcccgccaaatcgaatcgcatgagccgcaagggctgggaagcaaatctggagtggcggctagggcttgccttgcttcttcggtcgcgtggacgacagggcagccatggacgaatcttcccgaaccggggtggttttatccttttcccgaaccgggtgggattccgatttccggatgcgtgggggattcgcaatcccgtgtccgtacgccaaaccggatgaagcgagc

SEQ ID NO: 67306 - DNA, 338 bp, Oryza sativa
  unsure (1)..(338): unsure at all n locations
agcttctcaaagtcctcatagactcctgatattagctggnnggncaattcatcgtcgagcccaaacaaatacttctcctgcttctcagcatcggtgcgcacgttctcaggagcgtagtgcgcgaggctgttgaactcgtgcaggtactctgtaaccgttctggttccttgatgcaatgcacggaactccctcttctgttgtgccataatcccttcaggaatctgtgccttcctaaagttgtgacaaaactctacccaagtaaccttcgttgcatctggacgggtcaccacgtagntatcccaccaggcagaagcatgaccttgcaattgatgtgtagc

SEQ ID NO: 67307 - DNA, 297 bp, Oryza sativa
  unsure (1)..(297): unsure at all n locations
tgaactccatggtgcacctgatggtgggcatgaagccttgtatgacgtatcgtgcgccgcccgagcagcggacgatggcgaccgcgtcgctgcttgaaggggaggcgtgcgggttgggcatcagccggagcgacgggcgggggctggccgtgtatacgaagtattcgtaggatctgatgccgcggtagagctcgtcgttggggtgcgggacgaggaggagggctacgtcngcgtgcgtgctgatgactcggggatcgacggtgaaccggtaggcctcgccgtggccggcgcctgggc

SEQ ID NO: 67308 - DNA, 433 bp, Oryza sativa
  unsure (1)..(433): unsure at all n locations
agcttctntgctgccatgttgggagttgagacttgagagagtacagcgtgattactgattacaccaataattgagcctgtccgtacgcgactgaccagcgtgcagcgttttagtatttgtccctaagaccctaacaaccacaaaatattgtcacgcggcacgcgccaaatgcgcacagaaggacctggctagctagctaactgaatcaggcgaacgagctagctaggaaacctcgtcatgcacttccccatacaagttctatcgggcggaggagcacatttcaattcctttagaagcatggctaccaatagaaaatggaagtaacacatacggcgtggctagaaatcaaactactcaaatataagaagggatctaagttgtactccttcgttctaaaatataaatattttaagcatagtgacaaagtcaatat

SEQ ID NO: 67309 - DNA, 381 bp, Oryza sativa
  unsure (1)..(381): unsure at all n locations
ntacagccatactgcctcacctctctgagatgaatccttattagatattggatgctaaggaccatgcatcgctctctacgctaggtaggctcatttctatagactataagttgtatccccatttggtagggagaaagggaatatcggatggttgttatccttatcggaagatttcctgtggagtactattggaaccccatggttttattttctgaattcctatgtaatggaccattccaaatggattatggtggaaatttcagtgatgatatacatcatatgaaacaccatgcttcttgcaacctaagtttttcttctgtcgcatncaattccaaacactntctttgtacagcttcatcgcttttttcatattagcatact

SEQ ID NO: 67310 - DNA, 434 bp, Oryza sativa
  unsure (1)..(434): unsure at all n locations
agcttctaacatatggctgagataaactctttaaatgttgcatctaanaaggctaatacacagcgacttctacagcatgaaaaggtggtccatntcatgagagcatgtttctttcacaaccatatttaanaagtagatatttcatgagatcttagtaatattctaccaaactaaggcggttaacataaataaagcaaaggggaactgatggctgtgaattcctgcaaaaattcagatgcatcatgaaaacaacaatgggaaggttcctagaaatgctgcaagggaatatagatcagaaacagcactcagtgaatctgtgatacaactatntcagagatngtgaaaaatgcacatgcttaaccataaatctatcattccttgtaaagtatagaactaatgtatgtcctgaaaaccatatgttgctttactttaca

SEQ ID NO: 67311 - DNA, 406 bp, Oryza sativa
  unsure (1)..(406): unsure at all n locations
cttgacaccttgtactgttccgcgcttcgtcttcccgactgtgtgtggccgcgtgtttntcctcccctggtgtgcctttacacgtgtttcgcatgaggagacaccagccttcgtagaggcggaggcgcgcaacaatacgcgcatcaccctgagagccaccgcaatgtacggcctacggcgagtgaggaggttatcattttctcccaacttttttttcggcatcttgttttttttttctctgagagggagtgatgaaggagtacagttgtgtgtgttttctttaatttatttcagcgacagggacgaagtccgcttgctctgtagcgaccggcctattctcataaatagtcttttgttatggtattgagtggcatactgtaaataatattatttgatacaactgctt

SEQ ID NO: 67312 - DNA, 444 bp, Oryza sativa
agctcgccaagtgacttcagtaagttaatctacctattgacatatgaatcagtgggatttgcatactatcgaatgaagaacctactgcctgttgcaggtaacgatcgaaatgttagattgatgaagaatttgaaccaattctgtggggatttggacatatatcctaggggatttagtaaggatcttgcaattgaaattgatcttaaaaacaagaaagatctcagaagactgaccctgaattggttgttcagttcatgtaaggacaatgaaatagtgcttcaagtcctgcaacctcccaccaatctgaaatgtctagaagtcgctggttatggaggtgaatctcttccatgctggagcaataaccgcagcatttctgttttccaatcctgaccaactagcatttcttctgtgaaagtatcagcctcgacacttctacagcagata

SEQ ID NO: 67313 - DNA, 397 bp, Oryza sativa
  unsure (1)..(397): unsure at all n locations
tgagagaggagtatagagaatacatgggtatggtatggttggtacctataaagacaatttgtcacttataaacctgcgctcatacaatatctcttccatggatgtgtccacgcgatgggcattgcacgactgtgccagttgttatgaaacgatcggcaaataaatgattaataatgatagatcaatcacagaagaaatgagatttaacgtggaaaaccattatatagcaggagaagaaaaaccatgtgtgctagccagcanatatcttcactatatctgcagtggcggacgcaagattttagtgatggaggtacgaagttataagaaaatatcgctcaacataaatgatgaatgcctatgtataaaagaactaacatgaacatagttaaaagttaag

SEQ ID NO: 67314 - DNA, 376 bp, Oryza sativa
  unsure (1)..(376): unsure at all n locations
agctntatgaatgtaatagtatgccttcaatgtagatcatttggggaaaaaaatataaaaagtgctcaagacctgttcgctgagggcttctcttagtttattgattaaggttattctaaccatgttgacactttcaagttgctcaatgcactgcttaaggacttgttcctgcccttgaaggtcagaaatcaacgatgatccttgctgaatacctatgaaatagaaaaggagtaaggtgtgcatagattattttgatccaagaatcgaagtgaaaggatgaaagcattatagtgtcaaaggatgatcatctcttcatatccaactttgtaaatataaaaagtcanggtacaggtttccgattagagtgaaatgcatg

SEQ ID NO: 67315 - DNA, 443 bp, Oryza sativa
  unsure (1)..(443): unsure at all n locations
tcgatagtgttagagctcangagggaatcgaagctatagcatctttaaataggcgtgcgatgctcatgctatgaacaagacaagtgtgagctgagctacatcataacgtgacatctgtagcctgagccacggacgcaataatgcaagcgcctctactgagtatgtgcaccgttggatcttgatcgagcggttggaaaggcagaacgggcaaccgcttgatcggcaattcagttgcttctcgggctagacatgtcctgttgcgacaagcaactgaacaggatcgacaaaagaggacagcatttccaatttccatgtacaaattaacacaaagcaaatcatgcaaagtttttttttcttactatgcgtgcattgaattatnggtcctatntatgtaaataaaatatcttcatcgaatgaatntcactggcaagcacgcaaacaca

SEQ ID NO: 67316 - DNA, 441 bp, Oryza sativa
  unsure (1)..(441): unsure at all n locations
agctttggaagctgacttaagcactagtaagtgcattttgcatgtgtaaacagtaagcgcaatcatgtgactgcatgcactccaaatcccggcacattcttgccttcttggtgctctctggtcacgatttgacaaacacataagtgtggttgcttattgtttttggatgaggaaggtaagattactctagtaatagtactagtactaccatcaatactattatgttaccccgttccaagctgcagctagcgacctaatcatatttttaattntaacagaaaagctcaacaactccaccaccagccactgactagtgggagcagtggtatgctgtgtacaaaagttgcgttacaagggtgaatctacctgcaggtgtcacgtacgtctctatttctgggctgtttaaaatcatactcattaataattaataattaatatttt

SEQ ID NO: 67317 - DNA, 462 bp, Oryza sativa
  unsure (1)..(462): unsure at all n locations
gtaagactctctcatcagccaacgagttctatggaatctactgtgggagttattttttcgtcttcacttcagagcagacgttctatttcagcaactcttattatttcaccagcaattttggcttctggatgccgccacaatctactccaaaattttcaagtatcaagtctgagattctatctacatgttcgggagtttagagttattaaccaatcagctcagtttcgatgagttggacaacatcatttactgttctctacttcatcggccctgacatctctgtcatgctaatggatgactaccgtctcgcctccgattgcttccgtcattgccagcttgttatttacgcttcacgggtgacctactacacacatgctgatgagcatcttcgcattatcatagtctgctacactgctatngactggatcaccgacatcgtcttctttataacattatgtcaac

SEQ ID NO: 67318 - DNA, 453 bp, Oryza sativa
  unsure (1)..(453): unsure at all n locations
agcttctctagatatgcctcctgtgatcctgtcacatgtggattggcactcacggatcagacagttgtggtgtctcgaggtacaccgtgaggaggaacgaggagttgatgcccacgttgcccctattttcctccgccatactaactagctctgcccttgttgttgttgccatccttgagggcttctcctttcccgttgccacacttaaggaccataggacaaggaggagaatgttggtcccattggacagaagttacagaacatatctatcgtcgtcggaaataaagaataaagagagagagagagtgatctatagtgtaaaaaanaaaccagagaacatcgaagtaggtagattaaaataaacgaacatgttcctaactcctaactgtaatatactcaaaacanaattcgggagctcgatcctttttntctctcattccccttctctctcta

SEQ ID NO: 67319 - DNA, 445 bp, Oryza sativa
  unsure (1)..(445): unsure at all n locations
tcacatgttgctgcaccccacgatggtagtggacacacttgtacgcactgaaacgttgtacctgctccaatgagggagtactttgccgatggttagctatggcaacctacctttccatcttgggaggtctaccaccggacgaccagtaactgcaacttacatccaagaaatatcatgaatatgtacccaaataacttatgtgattgaaaaaatatgtattgatgtatgttacagtatttaagttcattccaaaaacaatattcatcgctgtattatacattctgaanaacaaatgcttctataatgtagttattgaaatcaacctcaaagtcatcatccttgttaaccacatcattggttntatcagctttaccacttgaggctctctcttaattagcanaattatctcattatcttgctgcaacatttcagaataatacataac

SEQ ID NO: 67320 - DNA, 392 bp, Oryza sativa
agcttggagagcatcagcacgcgatattattctctcttacatgatgatcgatcagaggactgtgttggatcacagaaacaaatatttttggcttatctttggatgaagctgtgtgaaggtgcgacccatcaacaaatgctgttgcaattgagctcgcataagctcccattgatcgacggcgacgtgccaatggtttcacgtgggttatgaccagaacaagctcgtgggttcttatccgtagtcgtcgcgacacactgcctttttttttctcggtgttcaatggagtaatggaccatgagctatagcttctttgtctttaacatattatacaccttttcggggctccttggaatatatgagctcacgcgaaaattctacaaaattcattgtgt

SEQ ID NO: 67321 - DNA, 392 bp, Oryza sativa
gaagacgcccctcgggcctctgtatttgcattctctgtgccctcatcagacgtcgaatagctcatgcttgtaccgctatgactcttagatacctcgtcaataccctcacaggcatcacgtgtttcatgctccatttctgcaccagattgatccactcccgtatcttgctcgtcaccctcttccatgcagaatccaccaccggtgaagagatagtctttcggcgcagtgtctcgatggcaatcctcgggtaactcaaagcccgaaggatcttcgttcatatcagagggatctgtatgcgtttgatcgatgttaaatcactctgatcttgaggacagattaattgtgtgtaagtcagccatggaccatgtctctccaagacctggcctgattta

SEQ ID NO: 67322 - DNA, 449 bp, Oryza sativa
  unsure (1)..(449): unsure at all n locations
agcttgtggtctcgacttcctgcttactcattctctctgctgaggatcttgtaaatgagaccaagctcgatagcgagattaagtcatggcttgctcttgctgcccaaaaagtggttgaggtgaatgcccttgctaaggcattggctggacagaaggatgaggtatggtactctttnttgccctttatctattctcacctcttaattagagcctgagcatagtactcattactcaatagcattngaagaaacttctgctcatttatacatttgtgaacaatattgtacaggcttactttgcagcatacactgctgctcatgcctncaggaggtcatcacctcgtgtgacaaacgaggaagtccaaaaggctgcaagtaccttctgttttaggctgcatgcttgattctattaacataacttgccctgttttttaatatatgtatattgtt

SEQ ID NO: 67323 - DNA, 454 bp, Oryza sativa
  unsure (1)..(454): unsure at all n locations
actcaagctttccgagacgcgtctcatgtgttgagacgaggctcatgtgtctggcagttccggagcgcgggtaaagtgtacatccactgcagtgtgagtaaaccaaatctattcgaatagccgtgctcgcgggtattgagcaccgggacgagtattacacttggctagactcttaattcttaacttgtgtgggatgggttattgcatgatgatttntatgctgttggagccactttctgagaggcgggaaagtggacgtcctcataaaaccatgacgactcaatggcgggaagctatccttgggatcacaatggatggtggacagaaccgtcattggttaatggtgacactgtgactaaaattcagtcagtctatgctaggtcttaagattgtgaaagaattcaaaacttgctttgcgcaaaagaccatacgcattcttgaaatctcctatcat

SEQ ID NO: 67324 - DNA, 344 bp, Oryza sativa
agcttgcctaatgtaaggtttgactatgtttatcgtctaccaaacatcccctaatgtaaggtttgaccatgttaatcgtcgaccaaacatcccctaaatttccagttcgctcgtcgatgatgttgacacaactagtaatacattttacagcaaacatcaattaaacggacggctataaagcccataatgcttccaggatacaccatttggatctgacgataaagaggcatccaactttgtaatgctacaagcaatacatcgggcaactacatgacctaaatcaaaaatggaatggttttgctcatattaaccactgtatcttaacaatctccaggactacaact

SEQ ID NO: 67325 - DNA, 412 bp, Oryza sativa
  unsure (1)..(412): unsure at all n locations
tcctcatatgccactgaaatttcacccattccattatttattccttgtttntactttcggcatatatgtggcaactgcagtatatgagtgaaaaccggtgtaataaaaataaatcagtgtggaaagatctgactgtttgctctaaatttaactaaaagaaagcttctaaaaattatgtatggtaatgtccatccacaggagagaagcacttgatgcctactcccaccaccccaaaagtaacacttttttttttgccaagataatcttgtgaactatttattaccattaatataacactatatgttagcgaagacatcaaattataatttgaaaagactgatgataaactatgtcgtgtgcttctataaacatggtacaaactccaattatgtgacctatatgttattcttta

SEQ ID NO: 67326 - DNA, 417 bp, Oryza sativa
  unsure (1)..(417): unsure at all n locations
agcttcaatatcaatatcattgcatctcacttatggttcattgctngngacaattttggaacaagatggctcgctagggagagagacactattctttaaggttacgaagttctcttcaagagtgaggtatgctttgtccaagccatccactctctcttaaagttgagcgttcgccacctcaagattagcatgagactctntgatttgcttgtaaagccgtaccaatgcctcatttttctctctctccttagcaagctcactcttgagttcatgagaccgctctttctcacgaatgagcaaagtctcttgcctctcaagagttgcatattggtcctcaattctctcaagcaactcactcaagtgtggtagggattccttagttatggacttgaacaattcgtcatctataaccctcat

SEQ ID NO: 67327 - DNA, 428 bp, Oryza sativa
  unsure (1)..(428): unsure at all n locations
tgtctcaattaagttcaaaagcatcacatgtagnttaattttagaaacaaaaagcaaaggacgtttgctctgaaaaataaatctgaagcaaaggatgttaggaaaaagaagaaaaggagagagctatcacgccgtgtgccgtcgtactatcagatccacttgcgtaataacctatgattaaccccaccattagcaccatttcgccgcatacaagcagctgctaaaagttgggttagccgcacgcactacaccacaccaccgctcatgcatgcatgcccctacttgcaccatatatataattaattatattgatggattatctcctctaatcaaagtgaaaaatatgtactccctctatattataaatgtacgataccaatggcaatttaacagcgttggatcattcatcttattcaaaatctttacaa

SEQ ID NO: 67328 - DNA, 454 bp, Oryza sativa
  unsure (1)..(454): unsure at all n locations
agctnttacttaattgatggttcattctgtacttaattagctactattcacttcgtagtacagcccaggctgcccatcgaattattactttataggcaagtcaccacaccgacgaactcactactactccttacaacaaggtcacaatccacgagattgtgtagaaaacaaaagtctgaaatatcgccaacaacaggcaaacataagccttcagagttcagagcagccggtgatagcacgccgtgctgagcaaagtcaaaatcgataagagctaaaaaacgctgcaaagctagctcttgaggcctggtttagtaccaaagttttttttcaaactttcaactnttttatcacatcaaaacttttatacacacaaatttctaactttntcatcacatcgnttcaattntaatcaaaccttttaatttgacgtgaactaaacacnacctgagtcttg

SEQ ID NO: 67329 - DNA, 416 bp, Oryza sativa
  unsure (1)..(416): unsure at all n locations
gcttatgccgctacttcacttattcaggccatgttcttcaataacgctgggtcgagtacacttgatgctgccgaaatcttcgaccagctgagagtcgcttcagatacttacttcaagaacatcaaagaagctggaagtatgggagcgagtctggcgttggcgatgaccaaatccctttatccaagagttgacattgatgccattgatggctttgcagatgggacgagcgaagaagctgctctcgacctcatcagtgatgcgcagaaagcggctgacaagattgctgctgatgtagttgagagattccaagatgtcgaccttcngccgactgggtctgataagtctaatgatgaataaactgatactgattgatataacaatgattntgatgatcaatgacagtggaggctcaattt

SEQ ID NO: 67330 - DNA, 369 bp, Oryza sativa
agcttctcgaagatgtctttgatgaatatacatatatcttgtctccacgctcctctcacagaggactccagaattccgatgtaggcagagatgagcatgggacccgggatagggctgggcccaaggtcggtctttgcttattccccaagctgcgtatcttgtatgtgtttctacactcctctcgctgaagatcgtaggacgtacaacgatagagtgagcctgggacccacgacaggggtgggtaccaagccgacctctatttacattcttaagatgtagatcttatacgtctctacgcttctctcactaaggatcgatcgactcacctcgacatatgcaagctccgcacctacgacagggctgggtccg

SEQ ID NO: 67331 - DNA, 402 bp, Oryza sativa
  unsure (1)..(402): unsure at all n locations
accaatgatcattaggtcaaaagatacatgcattaataaaaaaacacanatggctaaacatatgagaatttctgtatgtttctagtgtctcatcttagacactgatacaaatagagaggggcctaagataatgaagaatttaaacaggaggctccaatttcttttataaacatatattacttaaaaaagacaatagctgactaggccaattgattttctataaataaattaacttatgtcagaacctttttaaaagctaagctgaactaataaactatatacataagttctttaacataattaatagtcgcacaaagcacgacgatgtggctagtaatattctgaaaataaatgtcccatcgatattgttttatacataggacattatttaactcgttactt

SEQ ID NO: 67332 - DNA, 161 bp, Oryza sativa
  unsure (1)..(161): unsure at all n locations
agcttgaggcagaggcggagggggaagagtgtctgttttatcctttctcgcgtcgccacggtggggacgccaccaangatggagaacagatggtgggtgaccaggatgacattttgngaaatctttgcgcggtaggatatgcgcgacattccttctatcca

SEQ ID NO: 67333 - DNA, 374 bp, Oryza sativa
  unsure (1)..(374): unsure at all n locations
atccaccccattgattangattntgtggcggatcagctggcgagggctagctagagagcctttggccagccactaactagttgagttcagcatnttgattgatatatcgatctctagtcgattagtcaagttacgcttttcttccttgtaattctgcttgatttgcctgaatttgcttgaattctggagtatctgttntaccaacaaccagctgcctagttggggcatggagggtgtatcaacgttctatttgagacgccctctggctttgcaatattcgcttatgatgggatcaagctccttaaaccaaatgccatgcagggacctgcattggttctttgattatcttctttcagttcgattatgtttaagat

SEQ ID NO: 67334 - DNA, 401 bp, Oryza sativa
  unsure (1)..(401): unsure at all n locations
agctngattacggatganaagaaaatccagcgatcatctcacagtattctagtttcttacttcgcatgtttaattaattccctacaagctaggaaagaacttttgcactttacttcacatttcctttatttttctcagcttgactttccattatcaatattgataattgatttcatttcaggtcataataaggaaaatttgtattttagcatgtcacagttcatgaattagataatatgagtgtgtgagaaaagggaagacaatgtgcatattaaatttccttttttttggtgattggaatatactcatataatcgataatatgagtgatgttgcaatgcacagatggccaattggaaaaactaaagggttatcattgcaaatcatattgatagaggatat

SEQ ID NO: 67335 - DNA, 461 bp, Oryza sativa
  unsure (1)..(461): unsure at all n locations
tgttcctgagcaacaataggtttgaaggggtacttcctgtttcaatctcaaacctttcagtttatcttgaatacctctatcttgattttaatgcaatatctggaagcttgcctgaagagattggtaacctcgttaggttagaagctcttctactccataacaactctttcacgggaattcttccgtcatcgttgggcaggcttaaaaatctgcaagttttatatatagacaataataaaataagtggatcaatcccattagccatagggaatcttacagaactaaattatttccgccttgatgtgaatgccttcactggtaggataccaagtgcacttggaaacctgacaaacctagtggaactaggtctttcaagcaataatttcacaggttctattcctgttgaaatatttaagattcacancgttgtcgtaactgtggatatatccaataacaacttg

SEQ ID NO: 67336 - DNA, 358 bp, Oryza sativa
  unsure (1)..(358): unsure at all n locations
agcttcatcatatttctttntttttgtcatggacatgtgtggatccatctttatttgtatacgggcgtatcccaaaatttatagtttagaaaataaaatttgtataggtgtatctccgtatccatgttttctgaaaaataccgtatccccgtatctgggtaacataggatagacgtagtcccaacatagacattagcattcaggtccaacttgacgtcaatcccattcacttgcttaccgaataaaacagccttagattgtgtacacgcacgtaggaggcctcccaaaaggcagcgaagatggaaatcgtagagtcatcgcgcccgtgctgtgtgtacatggagatgaccgagcccca

SEQ ID NO: 67337 - DNA, 453 bp, Oryza sativa
  unsure (1)..(453): unsure at all n locations
tctncacttcatcaaaatcttcaatagtttcaccaatatctttctttgtagaccgatattcttgcaccctcttttgtaaccactctaaattagcctctttactcattatacaaatttatatggcttagccgtgctacactagctggctttacatagataggtacaaatttgccatcggagatactaataaaatcatagctagaaagatccctccccgataagcattgaatattcccatgacgccactcaaaagtagcatcggccattgcaacctcggccgatgtatccgcttgaacaatttcaacatcatcgccgtcccattgaattaaacattgatgcaaggtagaaggcacacaacaattggcatgaatccaacaacgacccaaaataacattgtagttacattgcacatcgacgatgaagaaagcngttagtaacgtcttgttccccatg

SEQ ID NO: 67338 - DNA, 386 bp, Oryza sativa
  unsure (1)..(386): unsure at all n locations
agcttcggcttcatacaactgcaggtacatctaccattcgccttcaagacacattcctgcacggcttgcttgcgatagataccacgcctgctcctatcaacacacattatttcataccgatgcacttgtgtgccttgagcaacaactctatgtctccgtgcctttttgattntatcttccatgtactttgtcactacgttgccaaacactatgttgttatcggccatggacggaccaattttcttgtatcgatccctaaagtaggcttgcgtgccgtgaaggatgaattcaacaatagcaaccaatggaagtacccgaactcctcgcattacccagttgtacacctctgccaaattggttgtcattatgccataccgagatccatc

SEQ ID NO: 67339 - DNA, 442 bp, Oryza sativa
gcttttcattgggttatgtgcatctatatagtgaatgaaacaatcataatcattactaacctgtatttcactatctgtcctttgatgtcagccagctcaaccctatgagttctgctggataatagttcttcaacagaaaagtgtgccttgggatcatcaaacttctccctccctttctgaccttgtatctcggaactaacaggcatattttttcgagggggttggaatcccttgacatcgttccttttgtcacgaggagatgttccagaagcaggttgcccatgtaatgttggacctgctggataaggcatcggtacgccaaagtaaggtgaggcagtctcataattcccaatgggctttccacctttgatgggagtagaggcattagcagctacagtagtaaccggtatctgaaacttctgctctgatgggtcaaatgatg

SEQ ID NO: 67340 - DNA, 459 bp, Oryza sativa
  unsure (1)..(459): unsure at all n locations
agcttatacagtaaagtgtgaanagatgtattatgaaatangggtgcaagtgggtttacccgcgaacccgcttataggcaaaaatagtgtgtaacccgccggtttgactagcaggttaactatgaatttgacttataaatgggtttataaattgatccacttgtatatttagatgcggcaagccgggccgcgacgcgaaaacccataaattattatttatttaaactcgcgggtcggcccgcttgcacccctaggatgaaaaaactgaagccctacttggaacacaggaattttggaggtaacagttcaagaaattgagaaaatttcctgtcttctaaacagggacaatggaagtcacgaagagggggggggagagagagacagagatgtatatatcatatattattgtgcatggcctgctgcaacattaaatgacagatgacagctgcagaacttatc

SEQ ID NO: 67341 - DNA, 251 bp, Oryza sativa
  unsure (1)..(251): unsure at all n locations
agcttaaacagattagagaaggtatacatattactcatcanggtcaaaccaacatggtctgcgtttattactcagtctgttcacgaatataagaacatatggagttttttttaagagattatggtttaggtgagaaatggttgtgatagaaaatagttgaggaaattaaataagtgaaagttgtaattggttaagataacgataactatattaggtgaggatatcttgtactcactccgtttcaggttata

SEQ ID NO: 67342 - DNA, 468 bp, Oryza sativa
  unsure (1)..(468): unsure at all n locations
ctataaatactcagcttgaccgttctagtttactaccttgtcttggtaaatttttagaagggttgcagtcaataattctcagtgacaagagattgtacttctctttgagtaaaaaacaaagaagggcttagcagtcaatggagtagttttcagtgataaagatataacaagctttcacttgcataatgtttttccttttttttgcaagtataatagtttttatgtactgtacatacatacgtcaaatgacaagggaaaatcttttttcccgctgacacccctgactaacgaaagaattgttggtctgcttctacaaaaatntacataattaaaggctcttggaagaagacgtcaatctcgtcgtctcacgaggaggggctcgcgacggcgcagttcccgtacgccatgctcctggcgacgttcaccggcgccgatgggtcgacgccgagctcccgggcgcggttcacg

SEQ ID NO: 67343 - DNA, 382 bp, Oryza sativa
  unsure (1)..(382): unsure at all n locations
acgcttgcaaataatatattntcatggatactttttcagggtaatcaaaaccaaaatactgctccatcttcaagtgccagagcatcttctcagccttcaactgaagaagagtgaagtaacaaatttacaatggcaactacatcattccatactacttgctgcattaggattgtttttagttaacttcttaagaacctactatttcagtgttatcagaaagaatgtttaaacattttcattggacacaatgtatggatattactttgttgcattaatgcgaagtactggtgctaaaagtcttcttggtctgatctcatggtaatccaatctggtgatattggtttatgaattttctaaataaaggtgtattaataaattggta

SEQ ID NO: 67344 - DNA, 442 bp, Oryza sativa
  unsure (1)..(442): unsure at all n locations
tggctttctgtgtgtcatttttcttttgggataagaggctataatgcccagcttttatagaaagctagataatgattacggcatcagttcaacagctgggagaaccagcttttacaagaagcattctagccaaaaaatggccttacacagtatctaaagagccaaacaggagaagaaaaccagtgagcaaaaggcaatatctatgactacttgcttttttcatcccacgccagtcctgtactcctgtgttgaggtccttgaggagatangaagtgcacagcttctaagatcttgcctgccatcaactcagcttctgcttcttcattttccttcatcagttagaccactgtcttagataaaacatcacactaaaagcaacagttagaggagtggataaaatctgcttcctgaanatcatatcatntctattcaaccacaacac

SEQ ID NO: 67345 - DNA, 441 bp, Oryza sativa
  unsure (1)..(441): unsure at all n locations
agcttaaatatagcacactttgggtaccatatgccaatagtagaggaatgctntaaatatcttagaatccttttcacggccactaagtgacactccttaggagcggcttgaaatcgtgcacacatgcaaacactaaacatgatatccggcctagatgcggtaaggtaaagcaagctaccaatcatggaacgataaagctttaaatctaccggtttacctccctcatcaaggtcgagatgcccgttggttgccataggtgtcttgatgggcttcacatcttccaagccaaacctcttgagtagatccttgatgtacttggtttggctcacgaacgtcccatccttaagttgcttgatttgaagtccaaggaagaagctcaactctncaatcatggacatctcatattccctagacatcatatcaccaaatttcttgcaaata

SEQ ID NO: 67346 - DNA, 428 bp, Oryza sativa
  unsure (1)..(428): unsure at all n locations
ctgtctgataagatggtgtctgacgggattcgattagctttcgctaccataggagtttaggaatatcacagaagaacaggttgatagaacaagttaaaaaaagaggcctgatagatngacagcggcagcttgacctgttgcaaccagtgatttcatcttttgctatctactgtggaaaggaagaaccatgtgccttttcaaaagagattttgcccttcttcaagacaagatcatctcatatgcttacagcgccattgattttcaacatatgtttaactatttgttttattaagaaaatatgtactcattatttattttggtgatattatntttggcatatctgtaattctctgtaaatagatgaatggtcaaacgtatatctaaaaagcaatgatatcgtgcataaaaactgnggaagatattttttt

SEQ ID NO: 67347 - DNA, 379 bp, Oryza sativa
agcttcgcagaaccctcatcgactgtggcagtgcactcaatatcctcttcgccaagaccttggatgatatgcagattcctcgctccgagctaaaaccaagcaatgcgccttttcacggcgtaattccaggattatccgcaactccactcggccagatcactctcccggtcacctttggcacccgggaaaacttccgcacagagaatatcagctttgaagtcccgatttcgagacagcataccatgccatactcggacgcccggcgttagccaagtttatggccgttccgcactacacttacatgatgatgaagatgcctggtccccgaggagtcctatccctacggagcgacatcaaacaagccgtcacatgcgacaag

SEQ ID NO: 67348 - DNA, 423 bp, Oryza sativa
  unsure (1)..(423): unsure at all n locations
tcaacgcaaccttgtggtttaagtactccactaaaatagttatgtgtaaaaacattacaaaagttatttctaaaggtagcccatgagtccgaggcaaaagggtcatcacacaagaggctgcacatttgaggaacatgtgaaaagtattatcgcggaaatcatttgtttagaagtgtgatgaacataattgtacattcaattaataaagttggaaaagtggcttaaagttgtcatttcacattgattggatatgaaaataatggtttatacaaatctttgtgcccatatcattgtttgccaacaatcaatagaacttgatagttacttttggtgttccttttggtatgtactaaaatggctacatatnttacaactngccgtatcctttgctgagatatancctgcttttttctcttgatactg

SEQ ID NO: 67349 - DNA, 394 bp, Oryza sativa
  unsure (1)..(394): unsure at all n locations
tcttaagtcaccgcggctgcagcttgagcttgtagctggtggctgttaaaganngtttttactcatcncattggcataatgagccgagctagcataaaatctcatgaagcttaacgagctatggtagacatctcatcatgataggtgggttgcttctgcttgtgggctatcgtcccaattaaagagaaacaaaaacttatctgtgtgtgataccttttcacgctcaccctagccgcgccacgtgcttgcactgttcttgcgcactcgcccacgcgggtgcgccaccggcatgtctagccctctcacagataccagcgacgctagcccgctgcgcgcctccatgtcgcgttgaactctcgcgctgcgcccctctcttttttttaaccctagccac

SEQ ID NO: 67350 - DNA, 459 bp, Oryza sativa
catgcaagcttcaagggtgacttgatctttttaattaataaaaggaattttcttagagatgcgtatgggagagatcagaatgaacacataaatttaacggagacctagagtatgcaagatcaaactgaaatctcgaagatatagaaggaatataatcgagtaaaacttgaaaattaattttgagaggcacaaatagaatttcctcgttacctttcctcccctcttctttttttcttcaattttcacctttaatttctccagccttttttcatatgtattgtaccatcttttgcattttaaatttgtttcgttgaaaagtaatttcctcctcccttttacactggaggcgcttagctcgcgcaaacgcgtgagcagagtatatatgggtgattcgatccatgccactggaaatgtggctattaaagaacatcaattacaattcgtctattcgtaagcaca

SEQ ID NO: 67351 - DNA, 459 bp, Oryza sativa
  unsure (1)..(459): unsure at all n locations
agctttgaagtccaggaatggcttatgacacctgaacagcaagtgctttatatctcggaatgccatgcccgtaccggagaagatgactctttcttctgggcacactagaagcctcaagtcgaggtgaacaagggaaggtaaacatgcaagaatagtaacaccatcatccatgggcaatgccttcctaatcgtaagctttaagctgtgaaggtcacgaagctgtacgatccatgagggtatcctggaaaacaagcaacgttccagatggagcttccagagatggcgcggtggaggggacagtgtgctcaagccatcaacctgcaaccatgaaggaaaatgtttcagcagaacgatgttcctgaggctgccggaagatcgcgagagtcgttcaagggaacagcgcanggcttcaatacggctagtcacatactccaagggctcactactgctgcagtcaag

SEQ ID NO: 67352 - DNA, 418 bp, Oryza sativa
  unsure (1)..(418): unsure at all n locations
agctngagcatactatgacttcttattntgataagaggattgtatcttttatgaattccaaattcggttctcatgcgatcaatttgccgtctacttctgttgcgagtactagccaagctcctattcatcacatattagcaaaatcgatgggcgaccatgcaacatgccgggagtgaagattctagcgctgcggccgatctacccggacatcatgcatgtccgaccgcctagttgcacggtctgaccagtggctctctcgccggtcagaccacacctctgatgaccggttagatcgggccttgggccggtcagaccggtggaattgttcctgtccatgaggtagatccaaccactaataattctattgaaatttcttaggattgccttaaccaaaaaaaaaaagaatggttctcaatat

SEQ ID NO: 67353 - DNA, 457 bp, Oryza sativa
  unsure (1)..(457): unsure at all n locations
tgtttagcggggaggtaagtgcgtggcgtcaaccgtggggtgattgttctgcatcaatccaaatgttagccatagtgttaggtttaaaggttgatggatcctgcatgatgaattgattatggtctaacatgatatttctttgatggtacgtagttttcttgttaagaattttttgagagatcgcacacatgatatttggaggttcaacgtcatgcattaaaaaattgtgttatgtgctatggatgcttagttctcactggtggagaaacctcaattgtcccagtttacaaccccctatatcccgggttgcaaaccgggacccccaaattctagactaaagatggtatctttagttccggatcaaatntgatcaagtttatagacaaattagttttattaaatttataattgaatattttttcataatatatttgntttggattgaaaatgttaatat

SEQ ID NO: 67354 - DNA, 446 bp, Oryza sativa
  unsure (1)..(446): unsure at all n locations
agctntggtccaatggtgagcttgaagactgtgtttangaccttacagctgattactacgattccaagtatatctgggggctcgggctcagggttcaatgtccagcagctcagcaaagggcacagtggtctgtgctgtcactctggtgcactccaggtagtggttgcttgagtctagtgcacagtacagagcaccagaacacacagatgatggtgcaaggtggacaatagtgaaagcacaggaaccatgcttcctaatcattctccttgcctccaccattgatcaaggaggaagctagatggagtttgataagaataggaatggagaagggtggtcaaagttcaacagcaaggaaacattacctagtccaaagtgaaacttctgtaatatgtggcccaatatccaactcactctcatataaatcttcatanaggcttacaatgcac

SEQ ID NO: 67355 - DNA, 418 bp, Oryza sativa
tcggcaatactacgtgcgaacaaacggttagcggcttagctaatggctgctggatgaccggtagaattaacacagtttgcgtcaatgacccgatacgacaaatgataggccggtagcgacttgggtttacggctgcggcaaggaaacttggctaccgtgcgacgaacaatgactatgcagtgacagcggcgcgggtgtggcaacggcgactgcgaggcagcaacagcagtggctcggctgcagcggcggcgactgcgaggtagcggcggtgcggtagcggcggctagcgcgacaatggctggggcggctcggcacggcggcaaaggtagggcttggcgacggtgatgcgattatggttacaacaacaacgctaagaaaatcaacacctaaaccaagaaatcacggataagttcctcac

SEQ ID NO: 67356 - DNA, 287 bp, Oryza sativa
  unsure (1)..(287): unsure at all n locations
tcttctgcccttcagcgacagccatctctcactcaccggcgggtcgagcgccgagcatcacgacgggctccgtntccgaaccaaacccccgtcgctcccaatgcgaccgcagacccgtgccaccatacaagtgccacccaaccccgctcaccctgctccgcctgcgccgcggcgaagaggaggaggagccancgaggaagagagtagccgccggcgaggaagcgattgccctcgacatatgatccgccgccgccgncgctcctnctncttctactactactactaga

SEQ ID NO: 67357 - DNA, 430 bp, Oryza sativa
agcttcaactccatcccactataaccacctccacactattgtttcttatccttcctgaggggagctcgagcttcatcacagcgcccttcccaagtggcattaagccctaccactggacgtcatctctagtgcaatcaccgagctcgctgaatgtcggatgtcgcctccagccctctccaaagatatcaaaagtttcgctggttgccgcctctagcaccttgcggcatctcgtctgccacattcggactcgaggtaagcccctgataaagatatgaatacggatagagatatatagagaggagagggaaatgagataaatagctgggagagaatatatatgtggtcccaccgattcttttataaaaaaaatattttatggactgtcacatgtttgtccatatgacaaccttaatagagtggtggtatttgt

SEQ ID NO: 67358 - DNA, 445 bp, Oryza sativa
  unsure (1)..(445): unsure at all n locations
ncaagctttagtattttagctgtaggcctatttgtgaattcagggttntgggggtacttagcaacatcatatgcaccatttttttagcaagtagtcctacatggacacatattagcccacaaaaaattcacacaagcaaatatatacatttcttagatgcaccttgcaaaaagaaaaggtaatatataatgtgttggttgctcactgctcactccaaaacacttacagttactttattatctttctagagtgcgtgggtgttatttattaataggtaaacatacagttactttagcatatctgatcctataatagcagcagtgattttaataaccatatggttgttaatagataaacatatagtttttccaggtattattaattaggtggtgaagtgcagcatttcccctttttggtttcgttttggtntatgtgtaccaattac

SEQ ID NO: 67359 - DNA, 447 bp, Oryza sativa
  unsure (1)..(447): unsure at all n locations
ggaaggaatatgttaataatgtccaatcactaanaagaatgatgaataataaatgtaaaagaatttgctaacatgagagtaggcaagtagccatgaagcaaacaaatactgaggtgcgaaagaaaataggtgtgctaaatatcaaattatattcacaaaacaaactaataatgtattacattcacagaacaaatttcattcttataattttagtgaatgttaccaatccacaatgaatttgatgttgtgtttggggcccactgtcaccttctttgatgagaaatagaaaagttccaagtgataatcagccaaatataactagtctcctgaatgcaaactggtgaagtcacaaggtttttaaaaccacttttggggaggaggtttgtaagacctggtactacaaataatgcttaattntnttgggtcgctaatactgaagtcatttat

SEQ ID NO: 67360 - DNA, 386 bp, Oryza sativa
agcttgtaaaattaggatacggttgtactataaaaagataaagtgagaaataattgtattgagatttaataaagtagagatattttagttttcttatttttattggcatgtgtaaaattgataaaaaataaacttattttaaaacgaaaatagtaccactagcgtgagttgctggtgaatccgtgacagtgccgaactggctgttttccactcggcgcgagttcagacgatcggataactatactttcatgttgatgaggtgacatcttcttgtacagagtcaaataaagaagacatcgtcatcatgatgctctcgtagagtcaagagaaacctaacatttcttagaaaagaaaaagggggaaaaatcctaagaatgtgtgatatt

SEQ ID NO: 67361 - DNA, 447 bp, Oryza sativa
  unsure (1)..(447): unsure at all n locations
nntctttgcagattcatgtgttcgtggattccaatatagttcattaccaatggtttcaatgtgatagtggtattgagctaatggtcccaaaatatctaggagactttcttgcagaagctgtatttaagtttattgaagatgagtttgatttaactcatgtgtacgtatatttcatttcagttcaattagtttaacttttttttgtgtaggttagtttgaactaatttaatataaaaatttcttctgtaggttaaggacttgttttgctttggggtcctatgttactgactcattgtcagacagtagctccgatgaatcgtcgtcagagagcagctcgtatagtccctctcccagganaagaaagagaaggaattcagttagtcacagaaagagaaaatctcggaggtgttcaagttcttccagcagcagcatgtctgattatccacc

SEQ ID NO: 67362 - DNA, 415 bp, Oryza sativa
  unsure (1)..(415): unsure at all n locations
agcttagctattcatcattttccgntaacatgcttttcaaactactaaacagtttatttcgtgcgaaaactttctatataaaagatgctttaaaaaaatcaaataaattcatttttcaaatttgtaataattaatacttaattaatcatatgctaatcgtatttctcgttttatgtgtagctaatcatccaaacccaatagccgaaaagaacgcggcctaaaaacttaattaactcatgtcacaaactccaaagtccatatccattactcggtgtcctttgctatcangttaaaggcagggcaggggcggagctagaataaaatgaagagggtttcactcgcttgctttactctggtttgaaataaatttagcttgatacaagtgccttagtttaaactgacaagaaatatatat

SEQ ID NO: 67363 - DNA, 457 bp, Oryza sativa
tcatgtggtggacattttaaactggcttgataactattattatattagaattctgcgtaaggtaaacatttgtcccaactagcagcaaaatctagggcacaggctcttaacatatcttctaatgtctgatttagtctttccgtttgttctccgggttgtggatgaaatgttgtactaaaatccaaataacttcccaaatcataatgcaatttctgccaaaaatgtgaagtaaattgggtaccacgatcggaaataattctttttggtactccatgtaagcatactattcttgtcatataaagttctgcgagttgtgctccagtgtaagttgttttcacaggaatgaatcgtgcagttttagtaagtctatcaatgattacccatatagaatcatatccagtggaagtcttgactaatccaataataaaatccactcttatttcgtcccatttccact

SEQ ID NO: 67364 - DNA, 449 bp, Oryza sativa
agcttatcctttcagatgtgctgtcgctgtattttataaaagtccatccaagcctggacttaattatcctgaactggaggaacaagctcttcagtttatcttggactgttgtgagtctaacatagcaaaatacacaaagttcctaaaggtgagatcctttccatggaagatcttgcagaacttctagttaatttatcgtgatatttaaacagtacattatgcaaactagttctctgatgatcctatggatacttttgtgagtgctaacaaactaatgtacgccaatcaataatgtttcagggtagcagtgggtctctgcaactttcaaccaattcaaagcaagccaaccggacgttactgctaaaacaactagcaagagatctttgcattattgaacggagaatcctgtatcgtacacaatatgtaagtcaataatgcatgctatattg

SEQ ID NO: 67365 - DNA, 459 bp, Oryza sativa
  unsure (1)..(459): unsure at all n locations
ngacttcagcagcgggcgactccactccacaggctatctttgactgcagcgacgaaaccaactttgacaaaacagctccaactaggaagatcttcagctctggtgtgggggaaaagagagcaagactgagtactacccactgtactcagcaagtcataccggaagaggaggtatgatgcaggatataaccaaaggaggctagaagttcttttgcataaggctagcatttaaaagcagtagttgaaagcagtaaaacagctgtagtaattaatcaatattaaccaatcactgtccaacgctacaccacgttgcaacaggcccaaccaaccacctgaactacaccaattcattaagctaaactaggggtgagactaatcacggtgaatctggttgatcgcccataaccgcgggcacggctattcgaatagttttactctggccagaggtgtacaactgtac

SEQ ID NO: 67366 - DNA, 423 bp, Oryza sativa
agctttgtattatttcaatcaagtgtatttttttagataagggaatgaaatattcaagcaagtgtataccctgtggtcaacaactattctctatttacatgtactattcacatatatggctgacactaggggtctcatacttgccaaacctactgcctgcattgtgctaagtattgcatgagagagaattgctggttccttaataatatactttgataaggattctgtttttcttttttaggaaaatgatgaagaagaaagcactgactatggcttcattcagacaaagggcaaaaaaaagcgttctacctgataacttctccaatcaagacagcctacttttgctatctatagtccaagatggacacttttgttatcctctcatctactagccaaaataactttggtgtatctagctctgac

SEQ ID NO: 67367 - DNA, 460 bp, Oryza sativa
  unsure (1)..(460): unsure at all n locations
tccttagaanttgacttgagtcacaatttatgctacagaataggaatattccaacttccaagttctcgcacacagttaaatgcaggcaggttttgtatatcagttgagacttgagaggacttgcccacccaaatagggaccatatttgtcagagaattaagaagctgtaatttgtgcacatatccaaaataaaacaagaaagcagtctactcgaagattgaaccattactgaaacaaacaaaattgctaaggtaagtaggtaactaccaacaacacaaagcgtaacaacaggcaaatatacaaacaaattcttacctcctgatttggcacagagtatttgccagagagcattccatgagccaactttgtcctgaaaatgtcaagtgatgagtataagagcggaaatattntntactaaaacttcttccataaaaatagattctttctagatttcttttat

SEQ ID NO: 67368 - DNA, 408 bp, Oryza sativa
  unsure (1)..(408): unsure at all n locations
ttcttgactaatgaatcaaatactttattaaatgntagccacgacatcttatcaacctagaaaatctatgagtcaaggttttcgacgggcacatcttcaccaaattggaaatatatttgggaatgcagagctccgctaaaaaataacatcttcgcctggcttttcgtcaggaatcgattgtccacaaagaaaaatctcatgaagaagaaaatcgtccagacagcaatctgtgaaatctgtaaccttgctgatgaaacagcggaacatctaagcttacctgcccttttgcaatccgcttcttgcaaactattcgtgntcagccgatcatcactgaactacaattctgttccactagaatcgccacgaacattccgccagacactttcaaggttttccttcgttgctttg

SEQ ID NO: 67369 - DNA, 448 bp, Oryza sativa
  unsure (1)..(448): unsure at all n locations
ttctattgaattgattgaagaatgtgatcttatttaccttttgtcttgaactgactagtaagaactaaataagctntatgttgaactagttcatgcatgcaactcagttagcctcgcttctctactcgcaggaatgtgaaaaaaaccccagaaggaatagaaaaaaaaagacaggattctaacggaaacaaaagtgtaaaataaagaattgtaaaacacataaacgaccgtttgattggaccgtagaaaaatcacaagaattcgagtagagataaagatttaaatgatattttttccatgaggttctaccttatgttaaatttcctccaaaacttccatggaaagaggcatttcataggaactttataggattctataggattcattcttttgatttaaaggctacagagaanaaaaatttatgaatgaaatactctaaaattcttac

SEQ ID NO: 67370 - DNA, 439 bp, Oryza sativa
  unsure (1)..(439): unsure at all n locations
agcttcttcgtaagtcaagatacctcgttgttttcggtcgtatgaacatttatgtctcttgacaaaagactgactctcaacaaaatatatggactacttcccgttttttaaatgtacgacgccgttgatttttcaaaatacatttgaccattcgtcttattaaaaaaaattatgtaattattaattattttattgtgacttgatttatcattaaatgttctttaagcatgctttaagtatttttatatttgcacaaaaattctaaataatataaatgtttaaacgttaataaaaaaaagtcaacggtgttatacaattaaaaaaaggaccccgcanaaaaatacattaaaaaaaggagggtgtacatatgttatctactccctccatttaggttatcagacattntgactntgatcaaagtcaaactacttttaagttg

SEQ ID NO: 67371 - DNA, 465 bp, Oryza sativa
  unsure (1)..(465): unsure at all n locations
tctagataatggcagtcgatcccgtgtctctatggggtttgtgctatagagtgagtgatgatgtgtgggattctatggttatatatattgaatttttcttgagtgtgttctctaggaaattcggttttatgtgcaagataaaaggcaaagagacgagattggtggctgtggatgaggaggcttagctctcgagaaaaggatcgattgacaagaacatgaggtgagttcaacatattgtttgatgatgtgtcaaatgatctcgagttatttcgctgaaatttgatgtagtattgaatcaggagtttcatgagacgttttgggggataaattcagtttgctcttgagcttgaatctttcaacaacagagtgcaatttttatttccaaaagaattcctcaagtactaggttggatcatcttctctttnnttttttggcttacttggattttacttcctccatcctaaa

SEQ ID NO: 67372 - DNA, 454 bp, Oryza sativa
  unsure (1)..(454): unsure at all n locations
agctntttccattttttgttcatctacgtttacacataataatttatgctttgatttcaaattatctcctgaagtcaagctgtctggagaacatcttgaaacggtattcaaatacaaaaatggcgatgatgtccgggagatagccaaaattaacattactctccaaaaagaagagggtggtttatataatttacgtggattggattttaaggagtgcttcttttctggacagaacttcagcaactatgatattcaatatgtgaactgaggaacgtcattgtttgatgttgatactccgcggattgttaatgcgcctgcttacaacaagtagtatgaanaatcattaagacctgtgagcgaaaacggcttaagtggagtattgactgatcgtaataataaaatanaactcatcacgggcgtggcaccattcgatgatatttaattatggatgatg

SEQ ID NO: 67373 - DNA, 415 bp, Oryza sativa
agcttatgattagcacatagttactggtgtatgcatgataccacttgaagatgcactaggaacccctgaaactgatgattttatagctgtactcactcatgagccccaggtgccccaggtgatatctcaccaataaaaatactcggtagtatattttatttttctgctaactaactatgatgtctttctccacagttcgaggtctcttacctgattttgcaagtgaggaatgagtttgaaatttactctcttagatccatggtgaatcccaatgtacaaattattactcgaggtactactatttttcagtcaactattattattgggtattgatagggaaaatgttttaaactctcgaggggaaatcctctcgtgtgtcaaacatcatttaaaaatatatacacactactccaca

SEQ ID NO: 67374 - DNA, 450 bp, Oryza sativa
  unsure (1)..(450): unsure at all n locations
agataccacatcatcattcactaacaagatacactattttattcactaattaacaagatgccacatcatcatccactaataatcatcacatttaaacatcatgcaaacatgctatatctttatagttttcataatttaacagcttttcaaatacaaatatattaaattatcatccaacataattcacataatatttcaatgtatatctttattatgttttataatatcctatatacttatatagttcatcctcacttagttagtgtttaaatgattaatctatggtccaaattatttttttccttttattcttctaactaagccatatcacatcaattattnttagcctttagatgattaatctgcggtacaaactatcttcctacttttcttctttcataaagtcataccaccttactatttatgtttgaatcaccattctacatacta

SEQ ID NO: 67375 - DNA, 445 bp, Oryza sativa
  unsure (1)..(445): unsure at all n locations
agctntagaataatcaagacccattgcatctctattggtatgttagcagcctccacaacctccaactttttatgaggatcaagtaccaaagcaaaacaataaaggtgtggaatagcagtgaagtatttgagaaatttttcttccatgggttgaacaacataagctaaaactctgtcatgtcggttttcttgaaacacaaaggacaatttccaaatacattcaagcaccttacaaagaagtaggatagtaaattctagatagtaggactgtagttttataaaaaggctttagaaatatatgcagacgtgttgctatgtcccattctcccttagtaagaaacaaaatctcaccatcaccatcctcatcagtatcattacttctaaagtgcaatgaatcgatgaaaacagaannatatttctcataccctnttcagtgatgtagcatg

SEQ ID NO: 67376 - DNA, 457 bp, Oryza sativa
  unsure (1)..(457): unsure at all n locations
tcaagtgctagctattattgtttgtttaatcatgaaacaatagatttgaataatgggactgcatcggcggtaagatgaaagttttcccctttttgactaactatcatcaattgcatattcttttgtgtgtagaaattacatttttttttcgatcatagagattagatcagctccaatagtgccaaatctgtccggtagcatttgtctagattattgtgtctataagcagtatacctatgcaccataaatttcatttttggtaacatataagttagactgactatatgactgattcttgtagtactctgttttggcgcaaatagcatttgtgcagcgactaattgtactctatcttcttgatttgcttgcattctccgattgtttgctgaggccatcagtactctnttggggatgatggttcaattgagcaattaggaactgcgtcactggacgaaag

SEQ ID NO: 67377 - DNA, 433 bp, Oryza sativa
  unsure (1)..(433): unsure at all n locations
ctgccgcatgcaagcttgcaccttctagggtttagggntacttgtgtatttacatttttgcccttatgaaagggacatttacatgggtatgcagggtcatttgcacatatgggcctttaatgggctgataggctgggcctggtctatggcaaatgggcctaaaaggctaggggcggcctgttgggcctccttgatgccgaactcgtcatggcgaagtctttgtagttcgcccgagatgccttcgcccgagatgcctttactttcggaatatcgacgtggctttccagccttcgccatcttcgcttatggctttcgccatagggcttcgcctgaatggccttgacgtctttggcttgaatccttgctggtactatagtttcgacaggtccggccgaagggcttcatggcataccttcaacaagcccctcacggg

SEQ ID NO: 67378 - DNA, 457 bp, Oryza sativa
  unsure (1)..(457): unsure at all n locations
ntntcgaaatcaatcttaanaagaatgccactttggttctttttttgtatagaattcagaatttcatgtagaattaccaccccctccaatgtaaacttattcttaagaaaggcagtttggtttctggagataatataagctattacacattcaatcctattcatcaaaacttttgtcaagattttgaagctcacattcagagacaaataggtctaaacttttgaatttgcacagcatccttagttttaggaaccaaagtgataatgccaaagttgagcctctctacatccaaaattcctttatgaaagtcattcaataaatctaagagatcaagttttatcaagtcccagaatttggcataaaactccccaggggctntattgtgtttaaggtcaaataccacagtcttaatttcttccaaactaaaaggctgaatgagccttgctttgtcttcctc

SEQ ID NO: 67379 - DNA, 418 bp, Oryza sativa
actgggctgactctttgtatagagctctaccgagccatgctcgagctggacccaaacaaactggatggttggatctcgatccaaccgtttaagcctcgctcgtcagtgttgttcgttatcatcggaacaattgaaaaggtaacatatgctgacttgcactttagtgctaacattttcctgttcttgtttgttcaaagaaaaattatgaaactgtttcaaaaaaaagaagaattatgaaacagtaacatgttagtagtagtagtagtattatgagcaaaagcatgggcagaaatagcctgagagattgtgtgtgtgtgtttgttattacaaggaggagcagtgtctgacgttaattggagaccatgatggtgcgggcctgctaatgggctggatggcaatgggctaaatcgactggttt

SEQ ID NO: 67380 - DNA, 469 bp, Oryza sativa
acacataaaactaagcttattatataatccgcacatcttcatataacagctattattacttctgatgatcatattctggtcatacgaactccgaatcgacccgttcaagtctcttaatgtttgttataacctatagaacccggcgctttctttttatgtactgttattgcttctttataggcttgtagacttgcttgagtgcttcgcgtaacttctgtcgttccggaggttcccgaagcgtggttcgcggtcgtcgccgaatgttcggaagtccgttctctctgagcaaggcaagtcacatcatccttgagcatattgaatcccagcttataaaattatgttgatttaaattaatgcattaccgctgtatttaaattcccgcgttatcactggtttatatagccatgcctatttacctctgttatgaccttattattgctatttgtagtattattcccttgttcaccct

SEQ ID NO: 67381 - DNA, 425 bp, Oryza sativa
  unsure (1)..(425): unsure at all n locations
agcttgtgcctgtttggagagatcatcatttattattatattatgccgntcgcggtacataaaatactcagccagggctgctcccgtataaggagcgaggtattgtaatgtagcangggaatccgccatttcagctactacaatagtgtattccatggccccctcttcatggaaagtagttactacttgagctacggaggatgctctttgaccgatagctacataaacacatattacatcttgccctttttgattgagaattgtatctgtagctactgctgttttgccggtttgtctgtccccaataattaactctcgctgaccgcgcccaataggaatcatcgaatcgatagcaataagccccgtttgaaggggttcatatacagaacgcctggaaatatacccggagcaggagattcaattaa

SEQ ID NO: 67382 - DNA, 453 bp, Oryza sativa
  unsure (1)..(453): unsure at all n locations
tgtggctggtagaaaacatcgattnttcttttgagatagagttcgatcctcaactatttctcgcgatatcttcttacgaagttttgttagggcatctataacagcctctggtttaggtgggcaacccggcaagtagacgtccacaggaattaacttatcaactccccgaacagtactataggaatccgtactgaacattccaccagtaatagtacaagctcccatagcaatgacgtattttggttcaggcatttgctcatataatctcactaaagagggagccattttcattgttactgtaccggctgttaaaattaggtccgcttgcctaggacttgatcttggtaccaatccataacgatcaaagtcgaatcgtgagcctattaatgaagcaaattcaatgaaacaacaactggtaccatatagaaggggccataaactagagagtcttga

SEQ ID NO: 67383 - DNA, 374 bp, Oryza sativa
  unsure (1)..(374): unsure at all n locations
agcttgcatacgcatgatttattntaccactttcagataagtcccaatggccaaaagtgaatattggttttaagttgttgccacctcttactaagagggaagttgggaggcaaaggaagaaccaaatagtcgggtgccttgataagggcaaggctaggagcaaaggcaagtggcaagttcaatgtaagagatgtcttgccatgggccataggtcgacgtcgccaaaatgttctttgaatggaacgaagaaaaagtaagtgtataaattgtcatttgttttagttctagcatatntatttgtttcagatctagcaaatttatttgttttacttttgcaggccaagtcgggccanaaaagggagaccacttagtga

SEQ ID NO: 67384 - DNA, 460 bp, Oryza sativa
  unsure (1)..(460): unsure at all n locations
cctnggcctgctggagttcacaactttatatcaagtcattgcttatttatgcaacaccagaccagacaaataatattctttttttttctttatactagcataatgtacaggtccaactgatatttgttaagtaggaaaaaattaacaaatgattacatttatgttgatacatcgagtcatcaactgcttgatacattactgtgcaagaaactacactgttttacaatgaaataattaaattcagcaagctggagtatgacggtttgtctacattcctgtgccactcgagctcttgaaatgcggtcggagcttgagctacttgtttagcttccagcatatccatcatgaatgcctcattagctgctacaagactttccanagcagtaacacaaaacatgggataggaaaaaaaaaggaaacatataaagtgcgaattatagacaaatcatgaattacagct

SEQ ID NO: 67385 - DNA, 419 bp, Oryza sativa
agcttatcttagcaagtgtactgaagaatttctctagttgattgtctaaaaaaatcccttacgtaaattctccattcttttcgtggaacagattgaataggaacgtgatgcacaaatactgctgaacttaatttgactgatctaaaagataactgcatcatagagaaattgttacctttattgtgcctccagctacaccgaggcttgaaagtttaggaatggcatgaaatgggaactctgctttctcccagtactgcagtagcaaatttacgaaatggttatgtcatcttctaaaggcaggttattatatgaccaataaagtttgtcaagggcatattatctagttaatcaaattatagtagattagtgcttctgcgctcttacagggttctgaaaaagtttgttatgagcaatatatt

SEQ ID NO: 67386 - DNA, 456 bp, Oryza sativa
  unsure (1)..(456): unsure at all n locations
ntgcgagtctaggactatcggttnggctaggaagtcaactttctcaattctaagggtaacttccgggcatatttgagttgcccttatattccttccaggggaatgtactatcattggcacacgcaaattttgggttttccaaccatttcttttcacaaaagcttgcgatatgaaagaatgggaagctcccgaatcaaacagaactattgcgggtacggagttgacagagaacatacccatcacaacttctggagcatcctgagcggtttcagcttgaatgtgattcacacggcctcgaccgaagttgttggaagcacgtgaaccttgtccacttgcctgagagctaggacgagactgagctgccgctggagtaggagttctggcattgctgccattagcatgccctgagttggtgttggtaggattctgagggcactgtctagcatagtgacccat

SEQ ID NO: 67387 - DNA, 444 bp, Oryza sativa
  unsure (1)..(444): unsure at all n locations
agctntgttggaatattttcggcaaacagtttgtcataaacagctgcaggtggcaccgggtagcacagtacgagctttgaagcgcttcaggaaggatgcaggccggggaggccgctaacgtggatgacatggaagcaaccagccctggggctgctggtcaactgacgggtcctgtgatagggtcccgtcaggagaaatgaattgtttagcgtggaactatcgcggagcagggaatgctgcgacagttcgtgatctatgtgccttagccaaagaggcacgttcccagctggttttcctatgtgagacgagacagagtgtggaaaagatcagtgagttacgtaggagattggggcttagtggttntgtgggaataagtagtgaagggatgagtagtggtcttgctttgttctggcatgaatctatctatgttgatattaaagagat

SEQ ID NO: 67388 - DNA, 454 bp, Oryza sativa
  unsure (1)..(454): unsure at all n locations
tggttaanaagcctaatgtccttgaaccctaacctactttctgtttaggctttgtcaggcattcccaggctctccagtgcgttttccggcgaccgttatccgcaccccaccagaaatttcttgtaagcctcgttaagtcttcgcataccgagtctggaagtttgaaaatccccatcacataaacaggaatagcttgcatgacagctttaatcagaatttctttgccaccactagaaaggtaattctcaccccactggatcactctcttgcaaatttttgcttgcaaggtctgaaatcgtcctttatgcattcttccttctggtgtagggaagcctaaatatttatcttcaaatttatctttctctattcacggagtgtttcggatggatagattctgcactaaaggagtagccgccccaagaatgattgagcatttatctgggttgacaagctg

SEQ ID NO: 67389 - DNA, 426 bp, Oryza sativa
  unsure (1)..(426): unsure at all n locations
agctgcaagcaacttcattgactcttcatacagacaaaatataatagatcagtgggattgtacacttagcaatgtctatatcctctttaaacgaaccagagcaaatcacttgattgcacaaatcggtatagtcaaattggaaggagacagctggtaacgacgtgtagaccttgatgatagaacaacaatcataaattactcacggtgagaagttgacaattttcaatgtgacatggtattcaaaggtcaacgacaattaagataagtatttaactaagtattgcacaaatcagctcacagtatagaaatgtttgcaagcattgcgtctcctctatacataatatattaatctgagctgtttgctaaagaacatatggnttacccacatttatgataatnttttngtgcaatatggttgatataact

SEQ ID NO: 67390 - DNA, 463 bp, Oryza sativa
  unsure (1)..(463): unsure at all n locations
acctatgaaactcagcttcgagatcccttgcctactaccaggaggagatgatacatggcgctcgtaggtcttagtacggtcgttgcctgtggcaatggtatgccgctgcctgaattccgctgccttatctatttttgcttttggatgtattccggaccgctcggtccgatgatttaagacaatgcctacgggcttatgatgtaataattagcactagactctcgtgtatgtgcttttggtatttcagctatgaactcgtgtaccagactacttgatccagggaaatggtactgtttacacgaatgattcctgttataaaaacaggggtccacagataattagctacggcagtttatcattaaatcgattcaaaagtcatgtgaccttaatccatcatttatttaaatttcgatgaatgggttttaagatacgtgtgactntgagttgcccttaattataatac

SEQ ID NO: 67391 - DNA, 357 bp, Oryza sativa
agcttcaaaaccatacgcatgtggcgcggttcgagacgaacgaaatgggagataacgcgcgattttcgccggcccgtccacgtggcagccgcccccacgtaacacgagacggtgtctcggtctagatggctacacgcacccttgtcttggtgacgtggattccatcgagccaacgcactggtgcgactagcgggggctgggcgccaacgcgctggagggggcagaaaatacacagagcggacaaggagaccacatgacagaacagtgaaagcaactcaacttggtactagtaattttgtagttttgtgtgatttttcttgaaagaaaattttagcacggttcacctaaaagtgttct

SEQ ID NO: 67392 - DNA, 433 bp, Oryza sativa
  unsure (1)..(433): unsure at all n locations
gtcgcatagcctanaatctcaacaaatccaaccatcttatatgtgtgtaatatcacgctgcggccttcctactctagtagcccaaccaccaactacattgcagacaagggactaatatgaacttagctaaaagttcctgaatctaaacctagcgaaagctaaaccgatcaacccctcggaacaacccatcgatctcggaatccacgcccaaagctcacgggaaaaacacgagaccaaatccgcacagatccaaccacggagaagcaggaatccacgcggccgacgggaacggcgggggccccctaacaggagcagcacgggcgcgcgattatgcccccaatgcagccgcccctcgccgcgaggcgcaacacgacgagcgcgtgggttggngggggtagatccaaaccttgcgggtggaggtggtgggcgagct

SEQ ID NO: 67393 - DNA, 431 bp, Oryza sativa
  unsure (1)..(431): unsure at all n locations
agctntagagttaatcgactatatctgttatttggggaataatttaacactggtctattgatttttttgtgagaatttaatcaaatcgctattatagaggaaatgcataaaaaaattaagtttcctcggaagtcataaccattaatttaaggagttaatttattaggtgaaattgatgaggaatgatctcagctgtaggaaacaatggatggcacggatttagccaacttcacccggtagagttatactcaactccaggggatccagacccaggctatactgattgaaaaccataactttcatgattcttaccaagaaatccagcgtataatccaatatcttgttcctttnttgccacatgcagatcttctatctagtgtgaagaaaagtaaataattgtaggaatataaaatgtgacttagtgaaacatg

SEQ ID NO: 67394 - DNA, 453 bp, Oryza sativa
tggacccgagaatgaggacgtagagttgggaatcaaatcatgttgtatatactctgccatgcgtcgtcatcgtcatgcacgttacaacgttgcacacgatcatcatcttccagtggagtacggtacacgtacatgtagggggagtatacgttttctgctcgttccgccgaccgcgtaccgtacgagacagggaggaaggcagcacgcaacgcgatgctgcaagactggagaggtagctgaacgagagtgacgcaatgagttgcaatgcaccacagcagcagcacaaactctgcacatgtgctgctgcgcaatgcagagttggccgtagagcaatgttgtgctgtactactagtctactggagtactactgcagactggactggccgtcgccattctactagcaaatatcacatttgtaacaacgatacactggagtatgcacagtggtgtacc

SEQ ID NO: 67395 - DNA, 342 bp, Oryza sativa
  unsure (1)..(342): unsure at all n locations
agcttgttcactgcccangctttacaaaatttctggctcggccacttattgttgtctcggngacgatgctcctgtaatacttccccattctgtatctgctggattaacacagttggctgttcaaaaagatccatcttctcaagatgagtgaggttctcaataccttggggtatttcagttatctgaacgcatctgccaagcatcagctcacgtagatccacaagactccctttctgaaactctatgtgagaaagattatgcatgccatgcaagcttattttcttaagcgctggaaaagaaccatctataaaggtcaagctccttccgttgtatgcattgatg

SEQ ID NO: 67396 - DNA, 438 bp, Oryza sativa
cctataaaactcagcttttgcgctctatccgtggtgtctcacgttagaggttgtttgtattatggtgactgccgtgctagcggcggtggttctctgtgtggtggtgcatgtgtgcatggaggtcgtttataagcgaatgcatagcatgcctgaggtcttcaagactacaaggtgctcaccgtgggtcaagctatggttgtcgaggtctttggcacagcgtcgacttgcggaacggctcggcgacagcgctcctcctcatgtgaacggcgacggctctaacggtacgacgagctgctaaaagtaggcatgcacgagggctgtgaagtcatagagatggtgtctgcgcgaggaatcgaacaatggctcaccggagcggcatgaatcgaagatcgacgttggcggtcggagttgtggaagaaatctgtgatctcagtgtac

SEQ ID NO: 67397 - DNA, 353 bp, Oryza sativa
  unsure (1)..(353): unsure at all n locations
agctntccttcagcaactcaaccaaccccacatacatttcatgttcaacccgttcggcccaaccggtggggaacaaaagtcatggtgcacccggttggctgttgtcaaaccaacttggtccgggggcttcgccaaggagtcaaggaccacagctcgacttcagcaatgccactcaagcaccaaccattcgaccacaggcaccgacactaggcttcagaacaaatcaggcaccgaaccaggtcgccatggcatggacccagccttcgttcgacccatccatgacggcacaccaagcgtcaccgttcggggccaggcagccgaacactgtggcccaaccacacgcgcaagccatg

SEQ ID NO: 67398 - DNA, 455 bp, Oryza sativa
  unsure (1)..(455): unsure at all n locations
ntactgtttgacaccttttaagatgcattgtaccaactctctaattagttaagtaactgcggtataaaaggagtttaaggtattgggcacttgatcacgcgcactttggcctaagcaaaaagtgcctaagtccctaaaagaacgtgacaggccacacctgaaaatatgggctgcagacatattaggcctaggccaaaaaatatgccttcgacaccctttaaaggatgacgcatgtgacatgctcccgagtaacaaatcttctgggtaatatagaccaagtgtagctcatatgaatagcttctgatctgaatgattatcccttatgggatactccaaaataaatataataattgaatcccgactggcgcaagtattcggttgatagcctttacggggaataataattggtccagtctttgagcatagaaaatagactcatgactatgaatccatgt

SEQ ID NO: 67399 - DNA, 409 bp, Oryza sativa
  unsure (1)..(409): unsure at all n locations
catgcaagcttnataatgcaactccagcacatggatttgctgacagctttattaccatagacaangcgccggggcgaaaactatctgaaatatatgagactcttgaggaggaacctgtagcttctggaagtattgcacaaggacatcgggctacattaagagatcaacatactgatgagcctgctgctgtttaggcgaggcatactgctgtgggtgaatcaatcaagaaagactttttactcataaatcttctggcgaaagctgtgaatgttgaccctgtgatgagctggctgaggctggatgagagtgtccgtccattcgctgttttcatgatgtctcaaggtgacctttcaacggatactgctcacttgaagtcgtttatctacaatttccgcagatggagacatgt

SEQ ID NO: 67400 - DNA, 382 bp, Oryza sativa
agcttctcgggttcttgttctctgcccgtattatcgaggccaaccccgagaagatacgagctatatagcggatgcgcccccccagcaagcttagagatgtgcaatgcgtcaccggctgcatggccgccctaagtcggttcatatcgaggctgggagagaaggcgctacccctatttaagctcctcaaacgttccgggccgtttacctagacggaggaggctgagcgggccctcactcagttgaaggcgtacctcagttctcccccagtcctggtcgccccggagccagatgagccgttgctactctacctagcggcaaccccgcaggtggtcagcgcggcgttggtcgtggagcgtgacgaggacaaccctcactccgcgca

SEQ ID NO: 67401 - DNA, 401 bp, Oryza sativa
cccgcaaaaaatgtatgttgtattttcgttctgaatgcctcaaataaatgcttcatattacaacacatgagctgtgacatatgaactctcgtatgatatgctcttcgcataaacatcacacactaatccttgtatgaaagcttcattgtaaatgcagatacaaaatgctttctatgtcccacaatataagatgtattttgcttttgaaggtcccaaatcaatgcttcatattacataacaggactgtgacaataatttagtatcatgacatgaatcatcacaatgaaactatatacatcatgatagtgtttcgctagacatatcccattatactgttgcatatatcaagccattgcttacatgctaacgatcacttataaatatcatcgatatgtgatatt

SEQ ID NO: 67402 - DNA, 415 bp, Oryza sativa
  unsure (1)..(415): unsure at all n locations
agctngccagccatggtggagtgcactggttcatacacatatgaaggtagnggnttcaaggccactgctgctcagcagtacgacagctctcctttcctcagtgggttgaagtcgatttcttctaagcccttccatcaagtctgctctcatttcatccgaacagtagccgggttccaggtaagcattttgaataatctgtgtcacttgagtcatgttaccatcctctttattctttcatatacataactatcaaaattcttgggttataactcatttgatctcctacagttatgttatgccgcgaagacatggtttggtgggtttgtgggcatgatgatctttggcgcaagcgaggtcagccggaatgttgatcttggcgatgacaccgccacaatgatctgcaaattcgtcgtgc

SEQ ID NO: 67403 - DNA, 461 bp, Oryza sativa
  unsure (1)..(461): unsure at all n locations
tcctgaagttcttgattntaacaaggacctcacatatttttatatctgcatcaaaggtaacttagatatattaattaacgctagatccacgttggctttgttttgcttgcttatagtgtggtggtgaatcacagattcaattgaaagagttggcggaagaaatgcaagcgataacaaagggactggaaaaggttgagcaggaattgacaacatctgaaaaggatggtccagggtctgagatattttacaaggtcggttgcctgagattttattgttagtcatatgagcagaaatttctcatttattttcgctgattacaatcgagaaaatggtgcatggtatttggttctccaacttcccccattgattctctgttgcctccttgtggatgtagntgttggaactggaaattattaaatataattcatgtttctcanagtattcttcttatgtaaaactca

SEQ ID NO: 67404 - DNA, 413 bp, Oryza sativa
  unsure (1)..(413): unsure at all n locations
agctnggctccaataaagaccacaagaatttctgtttgctccccaccacttgtcaagggccaaaagcgtgaacgcggcaaggggaaggtcggggagttggcgccggagccaaaaaggggcaaggctgcgacgtcgatgccggtgagcaaatcggggaaggtcgtgagggcgccagcccaatttgagctaagcatgccattggtggaggacaatgtgttagctgtgatgggtattgcttgccgagagctacataagcaatacatggagctaagcaatgccaagcggaaaatgagggagtcatccatagttggacatcacgaccaccagccgttcctatcgtcgcctgcctatataactataggctttgatgacctcttcgaccttttcaggatccnngaagtggacactggtct

SEQ ID NO: 67405 - DNA, 455 bp, Oryza sativa
  unsure (1)..(455): unsure at all n locations
tgtgactngatcgaagttcgtggcttgaacgatatgtcttaatacatcaattctaaagcccatttcgcgatccatccgtttgcttcgcggttataaagtatatccctgagtggaaacgatgtgactaccgtgaccgggtgactttgaaagtagtgagataatttcctgacggtaattaagacaccatatagtaacttttgaacctgaggatatcttgtcttggagtgggctaaaacctcgctaacgaaataaattggacgttggactntntgaatatggccttcctcttcacgctcgacaaccaggaccgtactcacaacctgggaggtcgccgacacatataacagtagcggctcttgcggatgtggcgaggccaaaactggtggagtggtgagaagtttcttgaagtcttcaaaggctttctgtgcttcgggtccccactggaaattgttagt

SEQ ID NO: 67406 - DNA, 364 bp, Oryza sativa
agcttagcacagaaatggaagatgattggttcatgtttccctccccaagagctaaaaataatccaaccactgaaggtgagtttctcagatgtccaagacggttcggaaaacaatatcgctagaacattcaggctccatcggttggcctaaactaaagtcaaagctataatttaaattttcaaacttaatttagaagttaattgtaagatattttcaagattagttctttcatattggtttttaagtcactaatgacacacatacaatagtttacctataaattagtgtttattttctaataaatcattttagcttattaaagaacatagataacccgtcagcaaaataccagccagtagccaca

SEQ ID NO: 67407 - DNA, 449 bp, Oryza sativa
  unsure (1)..(449): unsure at all n locations
ntggtgactaatatatacgaaaagttcgaacattntgtttcgtttaaatgatatcattagattagattgtcatgataaaatatttcagctttttatatagttgtacgttgaaaagatttgatggacacataggatatgacagaggaaatgtcaaaagtaaacactggagaccatatcatgagcatcctaaatgccaaggtgtattattaggagccctcttttattcctcagcatttggaagttcataattctcaactggttagttttcttattgtgaaattaactatccgtagaaatttaacatagatgcttgtatttatagctaattattcatttaatgataggcatcaaagtatatttgtggtgacttcgaaaaaaattctaaactttgataacaacaaaatatcaagtttacagaggaaacgaattcatatgcttccgacgaccac

SEQ ID NO: 67408 - DNA, 438 bp, Oryza sativa
  unsure (1)..(438): unsure at all n locations
agcttgaggagaaaggttcttgttctgtggacacaagttgagcctttttctgtaacgcgaacaccaaaataacagactgaattatggagcagtagcaactctgatgtattcaagtttaatttgtggtgttgctgcagtgaaagtgtgtaaaacaagagtgatgctgttgctccatggtctcttaatgtagtttgcttggtgttactaaattactatatagggagaagtcaatataccctcagtaaaagtccatctaacacctcatactttgaagtcggataaccaactctatcaacttcataatactgttcgtataaccgctaaagtgctntttatctaattattttattcgngtttatctaattntacatgtacaatagatgattttagtgacgccacacttccgctatttcaaaataactctanttttagtctttg

SEQ ID NO: 67409 - DNA, 410 bp, Oryza sativa
  unsure (1)..(410): unsure at all n locations
tcttggacacagaanaccgcgtaattagccaataatctacttctactactaacttaataataatcaaacattttcactcgcctagtccaacgcattacaacgactaatcattcccctccttaaccataaataaataaataaataaataaacaaacgtacgctccctcctgtctttcttccaaccaaatcatttcgtgtcgcgtaatataaccctcccaaaaaaaaattaaattcaaacccccccaacctgccttcactcgaagcaaacctcacctcacctcgcgtggtatataaccaccactccaccaacgagtcagaaagagagagaacagaagagggcaagaattccacganaagatcaatcaaaaagccaaagcgaagcgagagaaggagagagagatccaaaaagc

SEQ ID NO: 67410 - DNA, 420 bp, Oryza sativa
agctttatgtctgtatctatgttgcactattatattacacacttttagattcaaatggaggatctaaaaatggagagagagggtgagttggtatagtagagggaatggtgaggggacacttgctgtaaggaactcgcattgcggcagtggaatagaaaaaaaaaggaagaaaggtaaacatgatgcataatagaaatagtataatggtgcacgcgaagtgcaaaagaagaaaaaagaatgttgttggagttgtcatccatggcatgtgatggcatatttcaaggcttatctataatgagagaagacaaccggatgtgcagagtgtgataccaaatactcaccatggcttacatatatgattagagaatggagatggtcagatcaatgtaatatgtaatatagcaagactcaaccgccatg

SEQ ID NO: 67411 - DNA, 350 bp, Oryza sativa
  unsure (1)..(350): unsure at all n locations
agcttcttacaaactaagtcatgtgataattccatcgatttattcacaaattaaatatctgccatactctatantttttaattgtgttgaaggaattggcatgaacgacttataagtttgctaactttatgtggagtatcactttccgaataagaacatattttcattatattacactctttttctttgtagaaggtttttcctttagattttctcattcaaagtttttaatgaggtaatatcaacataaactatttatgtgtatgcaagccatcgatgaataagatttccattaatctctcgtttaatctttctcgctatcnggttgagtttcaacaggaatgaagctc

SEQ ID NO: 67412 - DNA, 447 bp, Oryza sativa
  unsure (1)..(447): unsure at all n locations
ggccgtcggtcgtggaccatgtcgccactactacttcgttggcttaatttctaggggttgaggaaaggagttggagattcggaggcgtgagagaggaccgggtcttggttcgaaccagacccaattagttgtaggccaaacaaaggcaggagcataatcgtactctcgcatctgtttctctctcatattcctccggaaataataaaataataccgtgaatttctagcagctaattaccaatttttttacagtgtcttatggtgttctccagcgaattacacgtcttttttatatcctatagcaaattctgtaaaagaaattatgggggtgatattttacactaatattggacctgatattttgttattgttntggacctataacgagtcttccaaacatgccctcaacgaanaaaagaattgtacagaacagacacagaaaagagtg

SEQ ID NO: 67413 - DNA, 422 bp, Oryza sativa
  unsure (1)..(422): unsure at all n locations
agcttngataaattgccttcaagccggcgttatgcacgagaggaggaatccttctcctttggagtagtggagattttgatgtccaggaggttcgaatcggccgcttctcgatctccgcgcaaataacagatattcgctcaggagttacgttcctcctcactggtgtctacgggccaacaaggcaccacctcaaagattcgttcctccggcacattaggagattaaggcccagccctgnggaaggatggctcatccttggagacttcaacatgatctaccgtgctagggacaaaaacaatagcaacctcaacctcgcacgcatgagacgttttcgcgcagtcattgatcgatgtgagctgcatgagatccccctgcaaaacaggaagttcacttggagtaatgagcgtcgaaaggcaaccctt

SEQ ID NO: 67414 - DNA, 450 bp, Oryza sativa
  unsure (1)..(450): unsure at all n locations
tanggtttgtgttccattcccggatatactcaagaagtactcgatttcctttctttggaagaccaataagggctntttctattgtgtcctccagatcagactccctgcacactcatgtgatatatcaatttgttatcaaagaaaaactagtgagcttcaataaaggattatgagtacctgcaaagctgtgtgaataactcaagaagcctgtggggtcttctaagctcaaatgcaagttgtattgcttttgcatagtcataatctgatactgcattttctaattcctgacctctcaacagttcctcctcctgcaacaatggtgaatgtaatgagtattgcaagtgtggaaattaaataaaaatatttctatatagattccaagagccacctttgtaaaagatacaagtgtagctgatctgganaacaagggaaaagctaaacccacataga

SEQ ID NO: 67415 - DNA, 372 bp, Oryza sativa
  unsure (1)..(372): unsure at all n locations
nagcttctagcagctaccgaaccacctttacttttgctttgcatgtctgtgtgtaactctggccgnctgaagactgaagccactgcgctgttgctttgacagtttcacctaccgcatgagacgcttcagaggaaagggttagaacaagaggaacagaacagggggatgtgaacactgtacggcaatggcatttttaatatagctagcattcgagccgtgggggtgcatacagtgaccaaatcccccaagcgatcgcattgttagctcacatgcaaaaaggaatcccgttgtggctgccatcttgttttcaaatgagacaactatgtgttctattaagcaagctctaacactgtgctatcacacattcacact

SEQ ID NO: 67416 - DNA, 461 bp, Oryza sativa
  unsure (1)..(461): unsure at all n locations
tcagaggacatctagcttcactttatgcatatggtttccatcttttgtttataatagtaaaagtacaaatagattgttgtgttacaaacttacaattgcttacaaatatgtaagatcatacgtactccctccataaaaagaaagctaatctatatggggatgtaacaccacttatgactacatgtgaaaaaaaaccccacaaagctaattatgaaatcgactgcatttttcatagcctatttattaattntgattttccatttgtagattgagtatgttctcacatgaatcaaaaatatattacatgaattagattgacttatagagtattccttaaattaatggaaaatattctagcctagacttcagagaagctatgatcaattattactgagtttgcaggacaaataattacaaattacagcttgattaataccaatagaactgctaagaaaatcacc

SEQ ID NO: 67417 - DNA, 386 bp, Oryza sativa
  unsure (1)..(386): unsure at all n locations
agctntgtacttntattagaatactcttctttatacatttatggtattgaaatactttccgagaatatgagcacctactttacattatgttcatgttatactaaatatacggctagcttatctgggagatgctctggtgtggatataatgtttgcttatgcaattactctatgtcataacgatgatattagagtagtatctggtagtttagacgtattgtctagattacgggatatcattatttggggttatatattgcggatgagaggtgggccactgatggtgacagctcagtacgggtattcctccgcgccggtatataatcctaagttaattccatggggagggtattccttcgtatttagccccgattgtatggtcatgac

SEQ ID NO: 67418 - DNA, 474 bp, Oryza sativa
  unsure (1)..(474): unsure at all n locations
gccttcaaactcagctgctggggggcgcatncgctctatagctcgtatcttctttgtgttggcctcgatgcctcgggcagagaccaaaaacccgagaagcttgcccgcatgcacgcggaacacgcacttatcggggttcagctntatgcgggcagagtggagactttcgaaagtttccgctagatccgagagtaaggtctcttggttgcgcgtcttcacaaccaagtcatcaacataggcctcaacgttgcgtcctatctggctacccaaagaaattcgagtagtacgttgaatagtaggacctgcattctttaacccgaaaggcattgtcgtataacaataagttcctatggcggtaatgaatgcagttttttcctcatcctccctagccatgcgaatctgatgataaccagagtatgcatctagaanacacaaaaggtcgcaccccgcggtggagtcgacaatctgatctat

SEQ ID NO: 67419 - DNA, 437 bp, Oryza sativa
  unsure (1)..(437): unsure at all n locations
gcttggcagccttaggtagcaaaattatctatttcctccttattttcagctatatttcttacatggttataacatctgttacatgtcttagcagggtgccatgagaacattgttggatatttcacttcttggtttgagaacaaacagctttttattcaaatggaactgtgtgaccgctgcctgtccatggatagaaatcagccgctgaaatgtggggaagccctggaactgctgtaccaggtacgcaatagttactcttattgtttactggttcattttgtttcttctttgtcattggatcagtacgcgtagctaagttatgttgcagttatgatataataacaatattatgtcggaattcatccaaacaagtttctgcaacatatattaaatactntctgaaggctcannatattcatggataaatgttattctct

SEQ ID NO: 67420 - DNA, 448 bp, Oryza sativa
  unsure (1)..(448): unsure at all n locations
tcgacaaagattatgcataatatcaagatcggtataatccatattgtttataacaacttagtatcattatttatcatcgtccgatttttcaaagatctattgacatttgctcaatgaacagtatatatgcacaaatacataaaaagcatatgcaaaaagagcataccttgacttttacaccaatgtacttctcaattctcccttcacgatctggttcacgaggcccatcctcatcattatcatcatcatctgcatcaccatcctatcagggaggaaagcataagcattaattttcagaagagatcttaccttcgagacatcaatacatggaaggaaaattcagataactccaggcatatacataggtcataaaatcgaagttcaaaattcanaaatgtgtcatcttgaattggagatcaaacttaacatcatctttgcattgaagaat

SEQ ID NO: 67421 - DNA, 371 bp, Oryza sativa
  unsure (1)..(371): unsure at all n locations
agcttcacaagtgcantttgngcctgtaattttatagattcaatttgtagtgttttgaggaaaggtttgtttcattaaataaagaaagttgatgcaatgtaacaaaaatgcaaatagaaatataagtgaagggtggttctcttaattgttttttttttgtttcagatggtccaaattttttttttggcaaagaattgttccagaattattgctacaagtcagtaattttcgtgtgttcgcgcacgttaactacaagttgtatgttgtacttttggcatatttaccacaaatgaagtaaataaaataagtgttaggttgaggtattgaatgaaaaacaaaggtgaaatttgtttgacttttttcttgacatc

SEQ ID NO: 67422 - DNA, 456 bp, Oryza sativa
  unsure (1)..(456): unsure at all n locations
ntattacgcataaatttctagaacacaaatctttgtgcttataaacttctagtcaaaaagtttatacaagaaataaacattactatgcataaactttctataacaatacaaaaaactttctgcttaaaaacctttttgaaaccgcactgcctagaaacttcctacagggataaaaaaaaattccagcgatggtagctaataaaatagaaataagaatatgatcgagtagaaaagagagagaaaattgataatcactgaattgtttgccaatgtaaacaccacaaacctaaagtctccttgagaaagctacagtcctatcattacactttcttgaagatttagccccactgttgggcctattacggtagttgttcaataaatctctaagaatattatgctgctctcagatgagaaagctacacatggacagataactcaagatggattaaaagaata

SEQ ID NO: 67423 - DNA, 438 bp, Oryza sativa
  unsure (1)..(438): unsure at all n locations
agcttctaagtgatgctattattgtgctgttttatggtcatatacacatgcatgcatacatggtaacatgatcaaaataactatatatggtgtgcttgctagtacttggtgataaatcccatatactttctagagagaaaaaatctaacaattatcgattaaaatagcattcacccgttgcaatgcatgggtgtttttctagtaatatcttatttggaagaattattggtttatttgatgtagtatttaatagagaaaatttaacataataacaaaaggttttatggttaaattaataaaagttgtagaaaaccttggttattatggcattggcgtttgcttcttccattttttaattgatgatgtncgtgagttttagacgttgcgtctaaccatttgtcttatttagtgtanatagaannataaattgttatactt

SEQ ID NO: 67424 - DNA, 440 bp, Oryza sativa
  unsure (1)..(440): unsure at all n locations
tctcgatcagtattctgaactaaagatctctctcttgattcttttctttggctgggcttggtcattccacaccttttttttttctaattcagtaatctgggtaagaacaactaatgttgtttcctacaccttgcagcttcaactntagctcttatttcaagatgcagtcgtctttcctcgtccctagattatgcagttccattgctgcatcctccctagataaatgaaaaagaataactgaactggagctgtaattttgttgctgaaatgatgtatgatgtgttacaagcctgaaaatataagtaatagatagatgaatacctttaagcgccaactggttagggttttcgtcttctgatttgattgcattgtggatcaggcgttcacgtaggtattcaggaccgtcccatcctctcccttgtgcttataagccaaaactt

SEQ ID NO: 67425 - DNA, 397 bp, Oryza sativa
  unsure (1)..(397): unsure at all n locations
agcttctccattcaccgttacctctccactagagctctttctcaccttgctatcacaatcgttagcttcagaaactctcctttagcatcgtcttcaccaaccttgaagacccctggagccaggtccgtccataagggcacaccaagtgagcgaccgaacagggtctccaaaaattacaagagagttgatggtcattgccttcttttaaaggagtatagattaggctctaaaactatatcccttccatctatactagctatttgtcagcttcgcgctgcacaattcttagggcatgttcactttgataccattttcaagcatactatnttttagcaaagttgtaaaaaaaatgtctacgtttangttgttgccaaatttagtaaatacataagaaatc

SEQ ID NO: 67426 - DNA, 456 bp, Oryza sativa
  unsure (1)..(456): unsure at all n locations
tgatttttaaaattttaaaccttgttaatatttaattttaaatataaacccatccaaaacttattttcaagatatgaacctttttggccacgttggccaaactggcgtggcaaaacaatattgtcacgccgctcctgctggcgtgacaacgttatttggccacgccgctctcgctggagtgacaggacaaaactgtcacgcccgctacaggcggcgtggcagtgttgttttgccacgccaggcgggctggcaaggccatatggttcagattttgaaaataagttttgcatgagtttatttttaaaatttaaaatagaaaaggttcaaaaaattaaaaaaaaatctctaagcttttaactttttgtgctcacagcaacaaattattctcaggaattcagntgatgccatgtagtatagacaaaaaaaataccgatggtactttgatatcttccagta

SEQ ID NO: 67427 - DNA, 321 bp, Oryza sativa
agcttcggatgtgtatttactacatcgacctttacaaggcatgtcctaaggatccttaccccctgcctcgcatagatcagattgtcgactccactgcggggtgcgaccttttgtgttttctagatgcatactctggttaccatcagattcgcatggctagggaggatgaggaaaaaactgcgttcattacccccataggaacctattgttatacgacaatgcccttcgggttaaagaatgcaggtcctacttttcaacatactactcgaatttctttgggtaaccaattatgacgtaatgttgaggcttatgtcgatgact

SEQ ID NO: 67428 - DNA, 450 bp, Oryza sativa
  unsure (1)..(450): unsure at all n locations
ntactagacgaagcanaggatctcgcttccctgctttctttttctgctccctcctctgtcacgaaaggggagcgaggggatcgactactggcgaaatcagcggactttgcaccgatctcggcgtctgcggcggaagaactctgactcaagctttaactgcgcgcatcaaatggtgtctccatggggagtagtaaacgggagcagtcagacagtatcagtacgaggagaagaagacgacgactttgagagaattgtataatcttttttagatgctcttgccgttggcgaatggaagatgaaactcttatcaaccaaagcgctgatgtaaaaaaatgtcacagtccgacctatcagctcatactcgacttcatcctaagaatctgtaagggaaaacaacaggagagtaaaaacaggggaacacgaacacgaacgagatagccactctagcat

SEQ ID NO: 67429 - DNA, 398 bp, Oryza sativa
  unsure (1)..(398): unsure at all n locations
agcttgtcagtgggggtatcctggncaaattgtatctgctgattttgctccccattgccaccgattttggtccccattgtcgctaattcaaaatccttgacaccagtgcagcccanaacagagcaagttctgtgggagtgaacacacattatgtttggttcctggaggtttaagttcccttaaaagacagtacatgttctggattntttattcagtaatatgtgtttcagcattaacaccttaatctattctccccccatacatgctactaaaaagtgcaattattagtggtgacatatcctgtaaagatgtagaagtatatgcgatcacaatacccaagtcaccaggcaataatgcctcagagctagggagaccaacctgcatgcactgcttttgaa

SEQ ID NO: 67430 - DNA, 372 bp, Oryza sativa
  unsure (1)..(372): unsure at all n locations
cattacggaccttagaaactaagctatctaagacaccaaaaaagctgcatccggtattatttttagtttaatattacaacggaatttgattattgatctttgaaaactttgcataaaagatntggaaactgcatatttaggaaaatgctcaccatggtagtaccaaccgataacacttagactcaacttaatttactacaaaatatgatataatatttttttcataggaaagagccaaatataaattgcatatcctactaattctatgacatagtacatatcaacatgccacaatataagtcatattacttacagctcggctcagcactaatataaggattatagcatggtataatccgatagaacatctat

SEQ ID NO: 67431 - DNA, 426 bp, Oryza sativa
  unsure (1)..(426): unsure at all n locations
agcttagttatgatcaattagaatatgctgcttacaaattttctaagaaacttcaaacatattctattgtgcttgatgagaaagatcacactattgagattctaaatgctgaaattgatagattaaaatcttcgattcctgatgatgataattgtcaatcttgtgaagttttattttctaaacttaatgctttgcgagatgtcaattttgttaattgcaaaaaattggaatttgagattgaaaaatctaaaaagttggaatcttcttttgctcttggatttgctttacatgctcgtgttgttgatgagttgattntgacaaagaacgttttgaaaaaatacaaagttgctttttgtgcaagttctttagtcaatgcatcatgtgcaaataaggcanaacaaaacaatggtgctttgatttctcaag

SEQ ID NO: 67432 - DNA, 456 bp, Oryza sativa
  unsure (1)..(456): unsure at all n locations
tggtgttgttctctactgcgtgacatatgtgtggatcgttgagaggtgcttggccacacctgtctggaggacagttggtgaagttcattgcaggaatacacaccgacatcgaaattaaccatactactagactccctccatactcgtaaagaaagtcgtttaggacagcgacacggtctccaaaacacaactttgacttcttatttctataaaaatatttattgaaaagtgatatatatatatacttttatgaaagtatttttcaagacaaatctaaatattataattttacattttcaaactcaacatcttgagagttattcatgatttatattcccaaggtttgacttanacattgttctaaacgattttcttcatgagtatggagtagtactaactagtaactagatggactggaattctactggaaccttgtagtaataattaagaacattc

SEQ ID NO: 67433 - DNA, 412 bp, Oryza sativa
  unsure (1)..(412): unsure at all n locations
agcttctggtatccagatggatggcgtcatatttcttgctgntatcatgggatgcactcataatggtcttgttgtaaaaggccagcaatactttgactcgatggtcagggaccacaagatcaatcccaccatggagcattatgcatgtatggtggatctatatagccgtgcaagcaagctggatgagacaatgagccttataagagacatgccattccctgcaggtgcaatggtatggcgcacattgctaggtgcttgcagagttcacaaaaatgttgagcttgggaagttttccgcagataagctgctatcgcttgagccacatgattcatctacatatgtgcttctctcgaacatatacgcngctgcangaaagtggaaagaaaggatgagtgaggaactcatggactat

SEQ ID NO: 67434 - DNA, 447 bp, Oryza sativa
  unsure (1)..(447): unsure at all n locations
taagccggnctctcttctgcttaattctcttcacgttcttatcgagagaaatgcaaccacgtccgtagcacaggggagctctatatatgtattgctaaatggagttcgaaaaaaaagtgtattgcattgctagatggaaaatgtaagggacgaaatatgtgaaactacgtactcctcatatacattctctgtaattatatatatgcctcgttctctcggttcgtatttgtacattttctttctagttcttcttgacgttacagaaacgaaatgaaatcacgcaggtttcaattcacaacttgtgagaggccggccaagagcagatcgagcgccgntgctttactgttctgatcaggccagctatggctctgcatgctgcagctgagcgtctgcactgttgagcacagcacagtcgtcgtcgtcgtgaatcgtcaatcgtcgcaccct

SEQ ID NO: 67435 - DNA, 394 bp, Oryza sativa
  unsure (1)..(394): unsure at all n locations
agcttgtaaatcctatgatcttctgaatgttgtcagntactctatcaatttccacacagttattttgatcacaactagcaagcttgtcaacaatcaacatgccaagtgcaggaagttgatcatggtatgtcaatggatgctccttgggaactgtccagtactctgaaatcttctgcaagcttctgattatgcagttctgttcatggatgtgggctgatcgagtttgtgtctccggcaagttatcagtgccttgaagtgtctcttgttgtctttgctttgggggatcatctgcattcctaattgcattcggtctttcctcttggctatttgctgtgctgagaatgggatcctcgcctctctcttgtcatcgctaactgcaaagtggattcctttt

SEQ ID NO: 67436 - DNA, 433 bp, Oryza sativa
  unsure (1)..(433): unsure at all n locations
tatttctgtcagcgaagttgtctgttgcagcccgtatcgttgataggtccagaaggagcgagtcgatgctttgaatatcatccggattagttgagactgtagcaagataacaggtgaacgatgactcatattgcaaagctagcttgctttgcccccgccaaaaaaaaaaaaaaaaaaaaaaagctagcttgctttgcaacgaatttagttaaactaaatgccatcgattgtttaactntagtacactacgaacttcgctaaatgaaataatcaactttgcctaatgagattttctctaaaaaaatgttntatcaagtaaagggccatttccctacctccaagggtaaccagaccaagtaaggccttagatgagcatagggatttaactganaagaacacttaaagttctcacaggatttggaaaaagaacaca

SEQ ID NO: 67437 - DNA, 242 bp, Oryza sativa
  unsure (1)..(242): unsure at all n locations
tcgcaatgtcctctattagaagaccccccgtttttttctttctcttggagtgtncactcgccgcacgccttgtagaaagagccctaaattaattctccttggggaagaagtttaccgctctaccaatagtggacggatcggagactgaactccatatccccatacggtatcgcattcagatggcaaagttctttcgccgatctatcaatgccgattcggctgctatatgaggtattacgagc

SEQ ID NO: 67438 - DNA, 425 bp, Oryza sativa
tccgcgattcttacactcaactgccgcatgcaagcttcgcagatccctcatcgatgggggcagtgcactcaacattcttttcgtctaaactctggacgacatgcagatcctcgcacagaattaaagccgagttatgcaccctttcatggagtcatcccaaggctatctgctacaccactcggccagatcactcttccggttactttcggctctcaggagaacttccgaacagaaaacgtttgtttcgaagttgctgattttgtgacagcatatcatgccatactcggacgcccggcgttagccaagttcatggccatcccgcactatacctacatgatgatgaagatgctgggtcctcgaggagtcatatccctgcggagcgacatcaagcaagccgtcacgtgtgacaaggaaagctgcgagat

SEQ ID NO: 67439 - DNA, 453 bp, Oryza sativa
tctttattagctatttgctatatcactcatcatattttacttatcagttggtatatcactcggatcatgttatttggaggattcacaccgcatatgctatatattgatatcaagtcacttggttgattacgattatcaaaaccactcggttggttggattatttattccttgactatacgcttggtttgttcaattaaccacattgtcgggggctacacctattatgtgcatctagtcggtgcacctgactttattttccagccctccacagtcttcagatttggtaaaagtactcgggagaccatgacaaagatgattgaagcactcggctttggagtaatctggttcgagagaagattatcttttcgactgcgaaggtctcaggggctactgtggatattatgggtaccccatacccatacggcatggttatccgactagtcatatgggat

SEQ ID NO: 67440 - DNA, 405 bp, Oryza sativa
  unsure (1)..(405): unsure at all n locations
agcttacaagtaaaccagatatggagatggttatttaagntgctttttccatttttatagaatttcaagattacaatggatctacgaaaagatcgtgtatttacaactacaacggaatagtatacaaagtcaacacaaatcattaaatggaatttatggctacacaaaccgttgaagatagttctagacctggaccaaaacaaactcgcgtaggtaatttattgaaacccttgaattcggaatatgggaaagtagctccgggttgggggactactccttttatggnggtcgcaatggctntattcgcggtattcctatctattattttagaaatttataattcttccgttttactggagcggaatttaatgaattaggtttctactaacgaacactacgaagtca

SEQ ID NO: 67441 - DNA, 454 bp, Oryza sativa
  unsure (1)..(454): unsure at all n locations
cttaacacctcttattgactntntcactattntgaaatactatttatatccaaatccaaaatgcaaaggtcgtcttattcaaaacctcaatcatcacatcccctctctcccacttcacacctcggaacgcactgttcttatagagagaaaggggctttcccatcttcttaacccgaaatgaaatggctgaggagagggaggttccttttggggggtacccccgggaagagatccagtggagacggggtgggcctgtagctcagaggattagagcacgtggctacgaaccacggtgtcgggggttcgaatccctcctcgcccacagccttccaaaggggaagggcctttactttccccctgagggtaggaaaaccatgatcgggatagcggacgtaaagctattgaacttgggtatgctctttccttttgtcgaagtggaatcgtagaacagaat

SEQ ID NO: 67442 - DNA, 459 bp, Oryza sativa
  unsure (1)..(459): unsure at all n locations
nganatcattactaaagttgtgcccctgtgtccaccaacttcttttttaattacctgagagcacactaactctcctccatcagcaatttggactttcaagggtttagtcaacaattttaccccagacatagatttcccaattttctcatcaataaaagagtgggagcttcccgaatcaattaacatcaatagttcagtcccttgtatccaccccctaagtctgatggagttgcgtgactcagttccatttaacgcttgctgagatatggccataacaatgatatcttccctttctggtgaactttcagtatgtgagtcctccccttgaatcccctgtaaaacttccaacaactcttgaacaacatgcaattgtactgcagttgcacacttatggtctctctcccatctctccncacaagtgaaacataatgcctttcgacctcctatacgcctttaatg

SEQ ID NO: 67443 - DNA, 433 bp, Oryza sativa
  unsure (1)..(433): unsure at all n locations
agcttagaaatgcgatgttcttatgggtggtgnattatctagctagcgggcttggctcgttatcttaacgagctanaagcatggcgcactcggcttggcttgtttgtcaactcgagctggctcattaagctcgtgaagcaacacttaaaatcaatatcatctcaagtttacaaattagtaacatataaattagcaaaggcattattaattccatactttatataatcaaccaaagcatagcaagatcagtcaaaatgtngatacctatgattgagtggagctgcacaaaaagatgagtggatggaggggatgagtcgtgttgaaacttaaagaatgccacataccatgggtgaggataataagcactgtgttggagttttatgggtcgagatgggctcgagttgctagcaagctgcttgcttgtttgttcggc

SEQ ID NO: 67444 - DNA, 462 bp, Oryza sativa
  unsure (1)..(462): unsure at all n locations
gaaactcaagctgcatcgngtaatgatatgtcattaatattgtatctttttattatataccattgagtttagccataattctacaatatacaattgggccaagtgttcttttttcaaaaatgccaatacaaatatataagattgcaattgattaatcatttataagatttacaaaatttcaaatttttttagcctccttacacaacataaaaaaattgtacataaattccaagattcttgcactatagtttttataaaatataacttatatgctacatcctacatagaatattttttgtttggtgttttaatgtaaaaaaatctgcttatatatcatgtaaggagactacacacagaatttcatatctttntaaaacttctatccagtcaatcaattgtttcttatacgtaagggtatttgggggtaattttgacaaagtaaatgatccaatggcatattgt

SEQ ID NO: 67445 - DNA, 378 bp, Oryza sativa
  unsure (1)..(378): unsure at all n locations
tacgggaagacggatcatagntggttaagttatcaaacctaattattattggggttgtattttatagttttataaaaatgtctcatcaatcgtcgtctccctacttctttactagtcacccgttgtcccatctttttattgttatttgccatcccctcgctcactctcccgtagcaaccgttacctcccgtctctttaatttctcatccgttcacttgtccgctcgtcctccatccctcatctttgttgctttcagcaccttatagaatcngaattagttttagatgatgccgtcatcactactttactcctttattgcccttcgactcgctctttcagggataaccaccctcctactaccttngtgacctatctacg

SEQ ID NO: 67446 - DNA, 261 bp, Oryza sativa
gttgacaatcaaaccgctccgcgggctcctcctatataacctcctcgggaccctcatcgttgacctcctagttcatgaataggttgggatcctagattccctcattatccacccagtactgactgctgccatctgcgaacgtgcctaacaagatatgttcgccatcgcggactgccatctatgcgcgcaacagaacaatagacagtgaggtcatggacatcaacatgtacagctcatacatctaacccctacactatacac

SEQ ID NO: 67447 - DNA, 418 bp, Oryza sativa
agcttatcggtcgaactctatcaatcagtattttcttgcacatgcatcttgcttaagcgagataattcgatgttgcatcattaactatttttttttttggtattatctgcttgttgggtcgaccgccggggtgagtaaactacgtgcataaaccgggggaaatgttactgttgcagcgagaccgacatgttttgatggctctattttccgtcaagtatacggtactgattaatttgacaattttgttaatgatgctcgcgtatgccagcgatcaacatgcaaaaattattgacgagtacgcgatcgatcaatttttgcaacatccagcttatattgtacacgtacattttactgtgatcgaacattgacgatcaacatccaaactaaagttattgacgaataagcgatcgataacatt

SEQ ID NO: 67448 - DNA, 452 bp, Oryza sativa
  unsure (1)..(452): unsure at all n locations
ntaactttataagaaatgggaacagattntaggagtttgctattccagaaataacaaccagcacctcctacttgtcagtttatgacctgacatgaagaactgatgcagttaataattgcagcaataaagatttaagtgaaagtttaccaggccttctccagaacagaactccaatggttcaccatgattatcaactcgggtatcataaaatattgactttggttcatcaaggagcatccctttataatgcactcttagcaagctatcatgaagaggacagtccataggaaattcacctgatattttcaaggaacgaaaagaggtataaacatcaagcacatcacatgatggaatcaaaacatgtacctcatcacgcccacaacaattccatgtgaaaggttggcttgttgaagaattgtagttttgaaatataaatagctgaataaatgatg

SEQ ID NO: 67449 - DNA, 326 bp, Oryza sativa
gcaacactctatgtgtttgataggttttagaaccgacggcttactcttctattgaaattgctcttatgccaatttcaatggtgggtaatgtaacaaaaaatttctagtggtaagtttatagaagtttttctcaataaatgagatgccattcaaacaaatttgatgacatggcaatatcattatgaagagagattaaaagaagttcatatatatggaactggatgtacactgtttctaagactataaaactatttgaaactggcattgaggagctcgagtatttcatttcatccaactgcattcaatcccatgcattattatttaat

SEQ ID NO: 67450 - DNA, 441 bp, Oryza sativa
  unsure (1)..(441): unsure at all n locations
tgtatggtcgtggaatgatctattactacatatttttctatggttgtgtttagttcacgctaaaattgaaagtttggttgaaattgaaatgatgtgacagaaaagaaaagttagaagtttatatgtaggaaagtattgatacgatgaaaaagttaaaagtttgaagaacaagtctggaactaaactcggtttatcttgaatttttttataatcgtttcgacgacatgaaagaaattgtatgtgacatgcagagtttaaaatccattcttgtactagaagtcaacttaataaaaaaagttactaaaatacaaagcgaaaccgggatggagtacatcgtaatggtagatctccttgtcggcatgctgcacgacgaaatggttggcgcggacgcggcagctcgtnccgaccgttccgaactccggcctcgtctggagcaccacc

SEQ ID NO: 67451 - DNA, 463 bp, Oryza sativa
  unsure (1)..(463): unsure at all n locations
tgatatggccagtatccatgatcagcatcatttattaagtttcttcttgtgaatccgaccactttatataaatgacagtcttcccttgttttctagaataagatgtcagcccaaacactcactcgcacacacacctctctctttctcacttgatgaaacacacacacacagagatgatgaactgacggaggaagaagatgaacggtacgcaaggaattttcacgctgcacaccagcgcgcacagcacaaacacttgtttttcacttcacttttggcacactttaacaaatgctgattacattggttaaatagaccacacacacgcacaggttaagccacgtcttgccgcacanaccggcaagcacctcccgtggattatcctctaaccaccttcctacatgcaaggcacaactcgctgcatgcagagcaccactaaatcactaaccaacacatgcatgagcca

SEQ ID NO: 67452 - DNA, 294 bp, Oryza sativa
agcttacccactcacacattgttcatagttctattccacgtccagcaacctctctgtccaactgtaccagcagcagcgacacatgcattccctccacaagtccatagccagccagccaacaaactctctgcaaccatcttgtctctctctcctctcccttgctaatcacgtgcaagatgactagcaaagtgacggacaaccagacaatacagggagcgagaggcaagacaaacgcggatgcgtatgggctgaccggcggagggcgtctatgccgcaagcggcgacaatggtgca

SEQ ID NO: 67453 - DNA, 443 bp, Oryza sativa
  unsure (1)..(443): unsure at all n locations
tgcactcaattaaattctgggtccaaaacaacttctgaattgtgtatngggataaggaactcatatctctttctggtcagatgtttggactgggtcctgtcctttgaaaacaaatctgtaaccaacaagagattctggtgcctgatgctctggcctcttggcctgaggggatttctttcagaaggtcttttggcccggtggaggtggagtgggaaaaccttgggcaacgaatggctgaaatctcttactgatgaggaagacatgatgctttggccttttgagaagaacaaatgcttttctacaaagtcttgctacaaaatgctaaactttcatggggtgaaagatatgagaggactagatatttggcaagagccaatgccccagaaggtaaagcactttgtatggcttgcttggaaagataagaatcaatccacctnctatct

SEQ ID NO: 67454 - DNA, 413 bp, Oryza sativa
  unsure (1)..(413): unsure at all n locations
gacctatgaaactcaagctgggttgaaatgtatccaagactatgttgtctgtatgatatctctgcccaggatatatgggtcgcactcgtgatgtangtagaagagacccgaaccaatgtccttagctcactactacacaaaccctcatatgaaccggtttataagtgccgggtaatttaaaaccggcacttatagagcttttcccacctcaccgcgatgaaaaaatatataaccggcacatattataggtgccggtttccttaataaccagcacctatatggagcgagccaagccgctgagccagtcgtatcctctctcagtccgcctgtctgatattatataagttctcccgcgatccatctatctcagatactttctcgctctgactacctctatggctctctctctttct

SEQ ID NO: 67455 - DNA, 442 bp, Oryza sativa
  unsure (1)..(442): unsure at all n locations
ctgcacgcatgcaagctngacagcatgcttgactgtgaaacttgttgtggagtatgttaaggctttatnggaggcaaaagcatatgcaccaagggcgaaggttctgagggatgggatgtggataaatgtgcatgcagtgaatctggtacctgnggatatcatatttctcaaagttggggacattgtccctgccaatgcccgtgtcctccggtttgaaaaaatcaacacaatgacttgctgggccaaaaggtctgttgattgtgtacacggcttcctcatatactatgcttggaccgtgtcctgtggccaagggactgctgttgttattgcgactggtcgtgatattcctcgaagcacacttcggctctacccgcaacgttacactcggcctgggcaacttanagaagggaatcatgcttgtggctgcttctgcttttctctt

SEQ ID NO: 67456 - DNA, 421 bp, Oryza sativa
  unsure (1)..(421): unsure at all n locations
agcttgagaggttgattgcagagccatgagtcacactagaagtcttgctgaatccatcccccacctggacgcttgaaaggtcttgaaccgtcgggatgagagattggagggagcgccagaggggtccaaggttcaagtcatccgccaacgatttgtcctcagcttcctactagagccacatagaccacgacgaatttgagctatgcggatggaacaacatcttgattagcagtgtgtcgttntgcaacctgngagcttagaggaaaacatagcaaagactgggatattgttcacgactaagttgataaggactatgtgctcggcatatgagagcaggcttgcctcccatccagctaggtacttgtacactntancaatngttggattgaggtcctgagctccagcttatggngagagacag

SEQ ID NO: 67457 - DNA, 466 bp, Oryza sativa
  unsure (1)..(466): unsure at all n locations
tactaagcttctcaaaaaatgtngtatgagactaaaacagggagagattctattttattaattcacactctntcgtaggaattgataatttgcatttgaccaggtggaaacagctttttccagtgatagtctaagccactattaattgtgactaggactttggaacacggcaatgctgtaaggcatcctggaaatttcaatgtgattgtaatgtttaaatgggagcaaaaccaaacaacatacgctgaaaatagttaacctgtaattcagagagtacatctggacggtgagtttgtgaacatgatacaacttagttgaaagcaatgaacaaactgtgaaaaaacagaaataaaattagctataagtaaaagggacttcactaaaatctaacttaatacccactcaatcttcacttaacaatgtcactaaagaatacatgtaagatgtaacttaaccagaacacaag

SEQ ID NO: 67458 - DNA, 366 bp, Oryza sativa
  unsure (1)..(366): unsure at all n locations
aatttataatgcgatggagtattatacttcttttgtaatatatttgcaccccatggtaggttaactgtagaaacaatgggatttccttaaccgcttaccaaaaacgtctaatttgtggcattgtgttctgtttctgaggtaccagtagacaccaaattaatactagaaatattcgtgttttgcatgatatctgctttggaatggggttattataatttctgacgttaattcgtgattccatcacatgattnttatgaaggcactgaatacaccaaaatttactccaaacatatctcatgctacaaaatgcagtagctcacactataaagtgcaatatatccactgaaattataaccactcttgaaa

SEQ ID NO: 67459 - DNA, 439 bp, Oryza sativa
  unsure (1)..(439): unsure at all n locations
tctcaaagccgggttcatcagagaggtactccatccagagtgtttatctatcccagntatggtacggaaggccaacgagaagtggagaatttgtgtcgatttcaccgacctcaacatggcgtgccccaaggatcattttcctctttctcgaatagaccaactggtggactcaactgtattggcaaagaggatgaggagaagataacattcatcacgccgttcggggtattctgctacgataagatgccgtttggactaataactgcaggaaacactttccagcgcacggtccaaggtgcacttagcgaccagctcggaacaatgtcaggcctacgtcgatgacattgtgcaagaccagacaagcactcattgttgacatctgcgaaaacgttcactacctccgcgatatcgcctatgctcatccagagagtgcacttcg

SEQ ID NO: 67460 - DNA, 448 bp, Oryza sativa
  unsure (1)..(448): unsure at all n locations
acctgcggcatgcaagctttatttatgaattctactgccagctgttttatgtagttctataaatagatatgatctatcagattaaattagcatactgcttgtgcgtcgcaatgggattttaattaatgaaaattatcattaactcattatagccattattttctatatacatcatctcctaatttctacatatatttgttactgacacgtagaccctctagcccacactatcattttcctttccgtaaaaagtacatatttggttgtaagggtggttcacagatggactctcttaccccacatgtactttctctatttcaaaaggctcatggagtggtgatgggatggtggcagattcaccactcatcactacttcttttaaaggagtatatgggaaagatgaacggtctaaactaantaagtagacctttataaatcacttcactac

SEQ ID NO: 67461 - DNA, 443 bp, Oryza sativa
  unsure (1)..(443): unsure at all n locations
ggccaggtaactctaagtagcacacaactgaaccaagatgatctggaggtcctcgccaagctacccaagttacagtgtgttaggctccgacacatttcatgcacagagagcatgctcatcttcaagaaagatgatttcaaatgtctcaagtaccttcttattgagggctntaacttgactaatatcacttttgagaatagatcagcctgtgagctcgagaagatggttttatcttccaccagcatagagtctatctctggagttgataggcttccaaaattcaaagagcttgagttgaacaacagccctgtcccgaatgaggtgaaagaagccattgaaaacaataaaaggataaatcttaaatgtaatgaaccatgaactcaagatgaggtaaaacggagatgatcaagaggatgaagacaatgctgcaacatcctcattct

SEQ ID NO: 67462 - DNA, 456 bp, Oryza sativa
agcttgatatatttcaaaagaaggggatctttatataaggggcttatttagacgtgctagaaccacaaatgaagtagaacggctaaaacaggtaagatcggctgaaaccccgatactatctctattagcagcgaaaggagagattagacgaaacgcttcaggataataacctaaccgatgcagcattaagcatgaagagaagcataagatctagtcaaaccgatgaaagctcactcgagatggtagatataccgcataatatagctcaatatcaaggcctaaacctaacggctgtttttgatgatagaggctagccgatgaagctcaaataacgagatcgatctagattatgcgatatatatgataactcggctacttgcgtagatagaattagagtgtcataaagatgtatgcactaatcctgagaacgcacgccaccatgacaagattaccttt

SEQ ID NO: 67463 - DNA, 368 bp, Oryza sativa
  unsure (1)..(368): unsure at all n locations
ctcagcttgatctgatccttttccggtgaatacaataanntaatgatttatggtgttgantccgccagagcaagccaaatctactaaaggaaagggagtggtcattggtgaaccaaagccttagatggtggtgcccaagaagccggatgtttgcctttggaaagagaatagcagtgaaacttcaacttctaaagcccctatgaagaccaaagtgacttttgatgtgcttttggagaaatatgagaagcaatgtggtgagaagaattacaaccaagggaaaagaccaagatctccccctaaggagcgatatggtcattcaccaagacggttgcattcaccttcatatcatcatccacaagacatgtcat

SEQ ID NO: 67464 - DNA, 437 bp, Oryza sativa
  unsure (1)..(437): unsure at all n locations
agcttcattctttaagcatataaattattttattgccataccagntccaatccaatttttacctgaactcccattctaacatcagcaaaatagctggtgcagtgaaggaagctaattaacttttttttttgtgaaagaccagttgatcacctggctgtagtgtactccaatatcagtcccagtaattcaatagtagtaatacaggtttcgcatggagtctttatcttgtatctttcaatccaaatttcagttaacccacaatccaaatcagcctgagcaaagcttgcgtcgaacagagagtttcagcggtttagtagtagaaatttcgcacaaatttcatatagaagtagaacagagcaatttctgtgctgccgaacaggagcagtagaacagagattaatttactattaccagccagcagtagaacagaatgaatg

SEQ ID NO: 67465 - DNA, 453 bp, Oryza sativa
aactcaagcttacaacctgggcgagacacgacagcatcggtatatattgcacaactgcttggaaccaccgctaccaacttcaacaggctaatctggaaagcctgggcgccgcataagtgcaagaccttcgcctggctaatcatccaaaatagagtctggacctctgacaagctggcgacaagaggttggccaaacggttccatttgccccttatgtcgtctgacccaggaaacagccctgcacctcctcgcagcatgtagatacacaatgagagtctgggcagcgctagcggagtgggtaacgtgcgagcaactaaatcctagccaatggaggcaaacttcaacggtgctagattggtgggaggctaccgcacatatacaagagacacctaagaagacactccgcactttgatagtgttggtcgcctggaagatatggaacgacaggaatcgt

SEQ ID NO: 67466 - DNA, 423 bp, Oryza sativa
  unsure (1)..(423): unsure at all n locations
agctggtttacagtccctcccatttctttttttgaatttataaataacattaattgatctgttgtgttgagggcaccattggaaatgggaggcatacaggaattcttcgtgccgattgtgccgacgacagctgctgtgaacttccatggtgcgaagcaacgatcgctggcgagaaggccgagcaagttacctagcaccacctgcgaagaagacatatgttccttccattggcagtgctccttctattgtgggcaacgcacaacaaagtgggcaatatgcaacagacaacatagtggaacaactcagcagatagtgttgtccggttcagaagggctgaacggatgaatgggtgaggattatntgattttctttttattaactagtttatgccatgcgttatcacggatcaggtncatataatta

SEQ ID NO: 67467 - DNA, 458 bp, Oryza sativa
tcgcataccataaacatgacaaaggtagtacacatgcacatatgttaaagaagtgataccttacctttttttgcagcttcatgaagaggagcaaagcctgctgcatctttcttattcggatcagcacctttgtcaagaaaatacttcacagtaatctcttgtccatccaacacagcgcaaaacaaaggtgtcatacctagcaagggcattacaaacaagaaatttaatcagataactccaacaaaacgatacaggtagtgttgtggtataacagctttgcaaatgcacaaatattagctgctacaattccaaatatgcaaaggagcacttcatgaaatacttatagctcagactgcatttatatgacatgcaatattaaacaatggaatcattcagaaacaccacttaataagttcatatcaacaaggataatactatagttaaaactatacaaaact

SEQ ID NO: 67468 - DNA, 412 bp, Oryza sativa
  unsure (1)..(412): unsure at all n locations
agctttatgttcggcgcttttctaatactgtaacttatgagcaagaagtgctctatcaatcaccatctactttagacatatcttctgaaacttttttcaaatccaaaagtccagtatcttcctacaaattagtgaattatgaggagctctttgtgccgaaaaaaaaagagcagggcaatatttcaaacttgcattcgaactgcgaaatatttatacaaaggaggagagatcaagataatgcagcagggttggttatctaattggctagtcaaacatgaggtggttcatagatctttgggcttcgatcatcgaggaatagagactttgcaaataaaagcagaggaatgggattccattgctcgcatnttatatgtatatggatacaattatttacgttccccatgtgcttatg

SEQ ID NO: 67469 - DNA, 426 bp, Oryza sativa
  unsure (1)..(426): unsure at all n locations
actaactgtgctggagtaaacatcgaatttcctctgtgatttatttctatcctcaactatttctcgcgatatcttcttaccaaagtttgttaaggcatctataacaacctctggtttaagtgggcaacccggcaagtagacgttcacaagaaataacttaataacttcccgaacagtactataggaattcgtactgaacattccaccagtaatagtacaagctcccataacaatgacgtattttggttcaggcatttgctcatataatctcactaaagagggagccattttcattgttactgtaccggctgtaaaaatatgtccgctagcctaagacttgatcttggtaccaatccataacgatcaaagtcgaatcgtgagccctataatgaagcantatcaatgatacaacaactggtaccatat

SEQ ID NO: 67470 - DNA, 364 bp, Oryza sativa
cccatcttcttcactctcctccttgtcctcttctgtgtgcttcctctcttgctgatcacattctatcctctcatcctgttgcacacattcttctgtcttcttctccttccattcttcagagaaatatggtttgttccctcgcaatacctccagcatcacaacacccaaactgtagacatcgactgtcgggttcagagtgccatctataatgcactccggggccaagtatcccaaggtgccttgtacgagaagatcaaccacatggtccgggccttcccatgtgagtgccagctcgaagtccgttaagtgcggtgcccaccttatgtcgagcatgatattggacgtcttgatgtcacggtggatc

SEQ ID NO: 67471 - DNA, 448 bp, Oryza sativa
  unsure (1)..(448): unsure at all n locations
tgtacccttcttacttagagagagagagagagatcgtgttctgttgcgtacacgaggacgatgaagtagagggcaatgaaagctatgggcacccgaggcagctgccacttccccggagttggagttgtcggagcagcagctccctggggaagatcgatgatctccaggcgccgcctgtactgtgggggaggcaccaccacgacngggccatgcggcggcggcggcggtggcgacttacgcttggggggcatgtcgccggagctagctagctgtccgtaatccctgtttcttaattatctctctctaatcgatctctatatatcgtcgtcgtagcctcgacctcgagacggacaggtcaaggctagcttccagctcagtgtaattaatcactagttgatcatgggtgtnctgcacggttatatatatatacgggagtagctaggtagtt

SEQ ID NO: 67472 - DNA, 440 bp, Oryza sativa
  unsure (1)..(440): unsure at all n locations
gacctctgagtcacctgcggcatgcaagcttttttttctcttcttgtcncgctgcttgtatgngnnnngaaacaaatccggcctcaagaaaccagcggngtttgcagggacgagctcangcagggcaggatcgatcggatcgtgattcatttggtttcttcagatcgtgtctctgctcccacgcacactagctccacacttgacaccactcaacgcgcgcggcgccaagataatcctcctcctcctcctcaattcctcatcgtgctcatcaatctgttcccgacctcatacggacatcaagtatgtaaaaaggcccaactttgcaccctaatatacatcataaaatngcatttctgatgtgttgtgacgtaaaagacgaagctntattgatgcagtgcgtactttgaaacaaattctcaaccangaactgccatacttac

SEQ ID NO: 67473 - DNA, 451 bp, Oryza sativa
  unsure (1)..(451): unsure at all n locations
tgngtganaaggtcataagctggtcacgacgtacagatgttcgtataagggagtgaattctgtgcaggataagtttaatttactggcaataacatatggggtttgatgggagcttttgcaagaaaaaaagttttaaaaaaaggcagacgattcgatcgctcaaccggccggtggtggattcttgtcgatcgccgagtgacgcggaaaggaccctctttttcatgtatttttacccatcggttacatccatccatatccatgatccatcagttagctgtacgtcggcacgtagcagcaacgacgtagtaatagtgtactaatagtcctgtacctaccctctcattcttcatcaattatgtataagtataacatcagcctgtgccttttaaggagcagaagaatagaataatgcgatactcttatagtgcgatactcttacagcaaagttaat

SEQ ID NO: 67474 - DNA, 364 bp, Oryza sativa
  unsure (1)..(364): unsure at all n locations
agcttggttatacgaaagaatgcgagagcttgtgtaaacacacgcagagccccctacctggcgcgccagatgacggaacgtgtggctcctcaccgggagaccgcgcaggcccccctttgccggttcggccgggggccctgggtgaggttctaagctctcggtctgtggaaagttcgcgagaatggaaacacacaagacacgggcgatgtatacaagttcgggccgctgagaagcgtaataccctactcctgtgttntggtggatctgtgtatgaagaagctacaaagagctggagagccagagaactctaactctctccctttcttggtccgaataccagtctcggatcgttctccatcccttt

SEQ ID NO: 67475 - DNA, 454 bp, Oryza sativa
  unsure (1)..(454): unsure at all n locations
cgctgcatcgtgcatctctnggttcggaaccctcgtctctggcggacgcgtacgcacacgaggtgtaggatcggacacaagtaaccaagcctattaagggggggtgaatggtagggaaaaccaaatacctaaaaacttttagcggaaataaaagttaccctcaaatcgatggaaatctcgacgtagtcctgtcgccgccgcgggttgaaccgcttgcacgccgccggtcgaaccgcttgcacgccgccggtcgaaccgccgaacccgatgaaacacaaatcaaagaactcttaaagtagatgacaactttattacttctctgtatttacaaagtgcacgaacagcactccttacaaaaatctcgactaaactcgaaaccctaactaaactagcaactcaattgctctcaaaagcgataccgggaagcctcacgctccccctctatttatacata

SEQ ID NO: 67476 - DNA, 433 bp, Oryza sativa
agcttcgggcaatttggcgaagaaaaaactagtctgataaataacagaatttaaacaaatacaggttaaactaagtatattaggcataacaagcgtttcgttcttgtagagtagataattggattttgattgagttatttttctaagggaaaaaggaaaaggaggattcaaaatccttttttcttcggactttcccaaacacaaaatacctccttgtattcgcactctcaaatgagagtggaagaaattcgactttcatataatatcttaatagaattccatgtaatgatcaatgcattttttggattctatattattcgcatgtctagaatcctaccaagagaataccccccatttttatgtaattgaagtaggattgacgaataagaaataaacataatactgtttattagtgtcgcataaaacccgaaat

SEQ ID NO: 67477 - DNA, 458 bp, Oryza sativa
  unsure (1)..(458): unsure at all n locations
tatgccattntcaatccaatcgtnggatttatgcctgtcatacctgtactctnttttctattagcctttgtttggcaagctgctgtaagttttcgatgaaatctttactactctgtctgccaaattgaatcatgtattcattctaaaaaaattcgaaaaatggataagagccgagaagtcttatattatgaaccttcgattctaaaattcaaattcttctacattgaatgtatagctgcagcaataaatttggatcagcctttctactccctgcatctacgttgagcaggtatctntaggtaaccgcacaatacctaacctaatttattgataagagtgcttattataaatcaattcttgcaatatttttcaaaaattgattatttgcattttaggtgtcaaaataaacaaaacccatcctagtggatntgtgtggtaaggaaaaacgggtaatctat

SEQ ID NO: 67478 - DNA, 431 bp, Oryza sativa
  unsure (1)..(431): unsure at all n locations
agcttgccactgccacctgatcgncgggcttatcgtggccgttctangtccaccaggctgaagtccccagtagatggtggagtccgaaaaaagcgcatttgttcgaactgtcatctgaaggggcactataaaactggatgccccacaaatccggagaacacatcgaagaacaaagtgatcaaggtgtgcacgaaatgcaagttagctggtcactatgcatcaacgtgtggtgttggtgtatagaagcaagtctatcgttgtttttaaatacaatcttgtaaaaatattcccatatcttgcgtgttgcacttggacaagtttttaattaaattcggatatgttntctatttcataattatgtcattcatcttgtgggatatacatgtatacgtgttcgctctgtcactcataaacctatgtgtacatgtaca

SEQ ID NO: 67479 - DNA, 458 bp, Oryza sativa
tgttcaatcagaatgttaattaatgtgctgtgatcctaactgtatgcatgtgatagaggtgtttgtgcatgtgcaatgcaatcttgcttgcctgtgagcatttcattgatttcactaagatggcttccatggttccattctgcaaacaactaaactccacgcaccgcttaaatgcattatcttattggccaacttgagaagcattttttttttagcttcatgcctactcatattggtgcggaaacagacctacgctttgtatactgtgcaggtgggttgcactgtcatttatatttagtatgctttcaattttatctttgtttgaaataacttgacacacttgtgttgtcttctcagctgcaatctgctcgatgctaaaagattggacaggaatggacaaggaaaaggccaagcaatacattcttagttgccaggttggcttacaacaattcctgatg

SEQ ID NO: 67480 - DNA, 410 bp, Oryza sativa
  unsure (1)..(410): unsure at all n locations
cgattcttnagtcacctgcngcatgcaagcttctctgcgtcatgattggggatggtgtttttattctgggtatggcaattgttaccatcttctttgctgcctttgggttcatgtctcctgcatcaagaggaatgcttctcacagggatgatatttctttatatgttgcttggaattgtggctggatatgctgccgttaggctctggaggactttaaaaggaacttctgagggatggagatctgtctcctggtcaacagcctgtttcttccctggtattgtctttgttgtcctcactgtgttaaatttcatgctgtggtcaaggaatagtacaggagctcttcccatctcactcttcttcacacttctgtccttgtggttctgcatctctgtgccacttaccctcctcggt

SEQ ID NO: 67481 - DNA, 456 bp, Oryza sativa
  unsure (1)..(456): unsure at all n locations
actcagctagtagcttattgagaggaggttgtatgtangnatctgatttgtctaattggtgggtcaagttgagtcctcaccaggaaaggagacatttataagaaatcttgcaggaacaaaacttagttctggtataaggttttttggatgctgtactaatattgtcatcatttatcatacttttttgccacattntaccttagttgtggtcaataaaaaaataagtcacactttagctagaaaaaaagatgtgccacacttttttgagttgatgacatgtgggaccatgagaaataagagaatcttgccacaagtgtaatcataaaccaaacaatgagttgatttgatcaaacttgtctaanatatgagatatggtaattnttgacaagttanggagtgaaccctccttcgttctaactggatgtagaagaacgagagtnttctttctcccatgat

SEQ ID NO: 67482 - DNA, 442 bp, Oryza sativa
  unsure (1)..(442): unsure at all n locations
gcttgactgagaaatcaaaggcgcataacttattgcactatttttactgcaaattcatagaagaaacagacaaagctctttgtatatgaccccatttttctaacatatggattgcatgtatcagtgtcactcttgaaacaggccaaaaccaaaatcttttattttcataatgtggtatctaccaaaagtgcatcctcactaatcaacccataattccaacatgtgaattccattatatcattataaatcataaaagaggtgaatatctattatttttatcatgtagagactatcanaggtgcatccactccatcataattctaaaggatcatgtgaactatactataaaatagctccatactaagcttaactaagtacatgccatgccgagtacctgagggaggggtagaacagcanagaccatcatcatgaaatatgttga

SEQ ID NO: 67483 - DNA, 306 bp, Oryza sativa
tgtgagttatttcaacaatgctctgcgcgacaccattcttactctttatatccatcagaactcattttggcctttacgacctgtcttgctgatcacaaaagtatatgcctccactcttcgagaacgaatatatactgttactctgctatcgtccataaatggctcgccattatcgcgatctacttgcacgcatattctatctcatatactgtgttacaaccatactataattcacactgcgctctgactcatctgcttacatcatatgctatcacatttcgcgatagcccttcaagcaccgatctg

SEQ ID NO: 67484 - DNA, 422 bp, Oryza sativa
  unsure (1)..(422): unsure at all n locations
agcttatgtgaagtaggtgctcaaaaacatatttcatgcactctttctatagtctaaagaaataaaataataacgccactgcatataaatgtggataaattgtagaatatcttgacatcttgactcagttggaaagtggtcagcattttttttactttttatgataagtggaaaatggctgagggcaaaacgggcagagagaaaatagaaatgtaaacattttgcaaaaagaccccaacgtgacaaatgctagagatgcgctctttaacagtggtgattcactactcattgggagtgggtggcatatcctacagtagtacagtgccgaggtgacaatcgttgattctcactctcctatcangtcttgctttcagaaactactaataacctaattaacaacttctgttttaagtggagtagat

SEQ ID NO: 67485 - DNA, 459 bp, Oryza sativa
actaagcttgaaatgctaaagattatagacagactttgatgtttagaactgttttataactttcgacttggcaaagatatggcatccgaggctttagtcgaagaggctcatgcccaggtcaccgtcagattcttcctcgggctcttccttcttctcttcctccttggaagaagctacagcagcagcgccactgtcagcagcagcaacaggggcagcaacagcaaacttgctggggtcctgagaagaataggcaagacaaatatgtaagaaactgtggtggtgaaatgcccaagttctcaaaaatcagcattaacttagcttccagtagtaatcaatatttaactgagtcttcatcgtgaataagaaaagtaaactgcagtctcaagaaagtgctaaaagcactaaaggcatatcaaactaagtgaaatagctatcatagataattcagtttcttactaa

SEQ ID NO: 67486 - DNA, 439 bp, Oryza sativa
  unsure (1)..(439): unsure at all n locations
agctngganancnntatttatagttnctttttggncgcatactaggacacaacaactgtttctacaggttgcaccagcacacctaattgtaattggggggattatatcatatcccttaataaatcataaatggaaaattccattttaatcagtatcattagtgtccacttaacacactaaactttcaatcattttaatcaaccccctaattggatggctccacccactttggccaattttgagtgtggttccgtggtgccaccatggacactatgtaacctggttttgccagccggcgttagttttcatcttatgtgtgtgcttctaagtaatctagtagtcgctcagtatttcttcacaaaaaagacactccattcattttagagaaatatttcttttgactttgtattccacaagctgaaaatacctgngacacttt

SEQ ID NO: 67487 - DNA, 453 bp, Oryza sativa
tgatttataagataggctactgtttctgagagcatttgtttattgttttaacaattctactaaactcctacaaacaaaattctcaactgcttgatataactagatgtgagttacaggagatctagatttactcacagcatgccacatcattgtttgtaagagttttgtaagataaaatttggatgtatagccttttccttttttattttgtgctgctaataatccttttttgtgttttatttgctacaggcacatgctcatttatctagactgtatcttgggtataaccccttcctcaaagcatctattcaggacttccctaagcttatcaagactgatctatctgttcctacagaggaggttcatttgcagctatcatttgtatggattagacaactacttctgatcttgttttgacaactacaacattgggagtaatagctggtctgcaca

SEQ ID NO: 67488 - DNA, 403 bp, Oryza sativa
  unsure (1)..(403): unsure at all n locations
gaccttaagcacctgagctgcaagcttacaaagatgtttttccgcgctattaggcgcgaagatgacatcctcacaaaggcgctcggaaccaaagaacatcctggccgaactcggggaaatggtagcgatgtgccctggaagcatggactccctcggtacagctcccaatacaggaaacggaaagtctccaaggaagagagggacgctcgtttgaaggccgaacttanggttgaggtcattcaataactagaagctagcatgaatgcaagggtggaagaaagggttaacaaggtcctcgccgacatgaatataccccgagtcacaacacctgctgtgcaaccaactcctcgtgtacaacacgacgcgagtccgtcacagcataagagtagttgtgcatccacag

SEQ ID NO: 67489 - DNA, 454 bp, Oryza sativa
tagttcacgtcgtcagctcagcaaggccggttagcatcttgctatctgcacgatgcgtcaataagcagtcaagtcactgtgatggaggcatggacatgcatgtcgggctctgcatgggatgcattgccacgaatagcacatcggggattcagacatcctatgaaagaaacttatccagcaaaaataaaaaataaaatcatggtaccagcgaaaaatcatatttttaagtagcgccagatcctcataccaactataccaatgcaataactaaaaattagttggtgctgctggtggttcaacccaacgagatcaagctgacatgcaaaaacattcattccttataaatgggagaggcaaagatatctcacgacgtaataatacttgcatccagaatccataggaagcctagctaccaaccttgagataagggatttgaatagtgccatctagtaat

SEQ ID NO: 67490 - DNA, 369 bp, Oryza sativa
  unsure (1)..(369): unsure at all n locations
acctgcagcatgcagctatgaatgatccatgtaanagngcttttgtctttagangcgcacaanaagatgttgattatggagacctaaggtctcatttccgtaaacccaagatctggtaggaatcaaatagtctagcgattgatggcgaacaacatcaagtgatcaaccaaagatgcattttgtttgactaagagtttctgatgtgtctcttccgatcaaaggcaacaatctgcagtctatttttgacgaaccacatctatgtttcacggaaaggcatcaagctcaatgaccatatcgtccccagaagcgttctgtattcacattaaagaataccacctgtttgagataatcccgaatatgattgattaa

SEQ ID NO: 67491 - DNA, 406 bp, Oryza sativa
aaaactagctgcaacattgagtccgcaacttcaacatctatgtttatggtgctgatggtcttcctctgattgtgagtatatcagaatgtcatcgatgaaaaccacaacgaacttatccaagtattccatgaacactttgttcatcaagttcatgaagaaggcaggagcattggttaagccgaacgacatcaccgtgaattcatacagtccatatcgcgtagtgaatgcggtcttcggaatatcttcttcacgaatacgtaattggtgatatccggaacgaagatcaatcttggagaatacagtggcacctttaagctgatcgaacagatcatcgatccggggaagagggtacttcgttttgatagtgacttcattgatagctctgtatcaacgcacatccttctcg

SEQ ID NO: 67492 - DNA, 414 bp, Oryza sativa
  unsure (1)..(414): unsure at all n locations
agctntaatgcgctngcatatacaggtggtttcacggtagtagccgagcattcttatccgtgcagcagagggtggtgccaaagcctgagctctgggatgatgcagtgatttgggaaaaacaaggtgagtacataatttcggactctgcatcctgtgattatcatgtgcttgcagtggatatgactgatgcctagtgcgctacttacaatgctatccctacttacaatgctaatctaaaatcattcaagtggttgttgtacatcattcttaaacgtggtaccaagggatattgttcatttaggatgaacttatcgtaaccctgaagagtagctattttaattattatatgcaaattattcaaaagcaagaattatgtctcattttggttgaaaagctattaataatagtatttca

SEQ ID NO: 67493 - DNA, 449 bp, Oryza sativa
  unsure (1)..(449): unsure at all n locations
tgtctccaagctcgcatcctcaccgatctgtttatttattatgtgtcattcgtttgtgaccgattttgcatccctcaaccaaatttgccacgattgtgattctaacatatggaaacaattttgtattttgttccagttcatttggatagcccgtttagacttaaacttgtggcagcaactcttttgtcttgtaaaataatgaattaatttttcatcttcttatggaaaagctatttggcgaagatctatggtctgtatgggtcttataagcccaaactgatagaagttttttttatcaatttattgttctaaaaatttgtgcaaacttataggcccaataattgtgtaaactttcaacttcaaatcttatanagttaacttatagtttgaaacattcaactcaaaatttaaaactttgaacttagtcataactaacactcctctaaata

SEQ ID NO: 67494 - DNA, 402 bp, Oryza sativa
  unsure (1)..(402): unsure at all n locations
agcttctatttgcganccaatatgtcaagttcttgagcagcttcttctcccatgggaaaagagttccaggtatcgcggtatactggaggaagataggagtacccgggaagcgctggctcggggttttgcacgtagaaccagttcgcatgccaacctttgttcgaggtcttgaatggcatggataagtatttttggctcaaagtccccctcagttgaaattcggctcccccaactacgcacgggttgctattatttggctgaggcttgaggaagaagacgcgcggaatagagcaaaatgcggcctgatccccagaatagcctctcaagcgtggatgaaattggcgatgtggactatggaaatggcgtgtaagtgatgcacactgatcccatagaaatacaaaa

SEQ ID NO: 67495 - DNA, 416 bp, Oryza sativa
  unsure (1)..(416): unsure at all n locations
tcggatgtgcatcgactacaccgaccttaacatggcatgttctaaggacccttaccccctgcctcgcatagatcagattgtcgactccaccgcggggtgcgaccttttgtgttttctagatgcatactctggttaccatcagattcgcatggctagggaggatgaggaaaaaactgcgttcattacccctgtaggaacctattgttatacatcaatgcccttcgggttaaagaatgcaggtcctacttttcaacgtactactcgaatttctttgggtagccaaatagggcgtaatgttgaggcttatgtcgatgacttggttgtaaagacgcgcaaccaagagactttactcttagatctagaggaaactnttgaaaatctccgcttccgctgcataaaactgaaccccgataagt

SEQ ID NO: 67496 - DNA, 414 bp, Oryza sativa
agcttgtctcgacctcaatgttgcaaccaatggatagtcttcctaagagcctgttcctgcaatacattttcaaggggaaaatggattcctcaaacttcagttgtcttctaaggagtcaaacaaccatagctcccaagttaaagaagcaaccacaaacctgtacagctcaacaaggtaatccttactgtgcaggtacggtagaagcttaacgacctgaaaattcagtatccacattggcaaattgtttccgtaagcctagggatgtgagctttagaattgcaaaaacaagccagtagtagcatacctttgcaagggtatcttcaacagagtcatcgtctagcttgccacatgtacgttgttcaatgagtctctcaaggaatattatgaaaaattccccatcactaaaatcagcaa

SEQ ID NO: 67497 - DNA, 390 bp, Oryza sativa
cacgtcatctcaatgaccattacagaggcatttgaatttacttgagcactataaaataacctaccgcgacttcacttcttcccgcatacattgaagcgatattttgcgacggacaaataccctccttacactccacgtacatagaatgccctacttaagagtcagtcaacaccctgcaactgttgtcgctcaaaaaaccgcgtacaaaatttgaatatcctatgaaatccatggtaaaagctgaatatatacacaaagtgtagaatctacggatctgtgccagtttcaaaatatgagcattactaaaacaaacccgtgtgcaaatagacctcacatgaacgcgcaagggaatagcacattattatgatagtatgtcccgcaaccaatact

SEQ ID NO: 67498 - DNA, 421 bp, Oryza sativa
agcttgactggaagttctagcttctttgttatctgctgcaatccatgcagactgagcttgttcgctaccgtgtgaaccgggttagatgccttctgagtggcaacggacaccataacatttgctccgaaaaacctctccgagaagaatacccagaaaacgtcgtacacaaacaggcagacgagcagcaacgcgcagatctttatgttgggaagcctcacatggctgacgaacgctatgcatatggatatccccagcaggttattcaacaaccagtgccccgataccaaccaggcaaccaccgtgccgacgcagatcgcaaccagcaacccctgcaaccgggtaaacggcttcgagcagcacctcgacacgaacgggtccccaacgccgaggcgcgacctgacgcagtttacgtacggcgaca

SEQ ID NO: 67499 - DNA, 456 bp, Oryza sativa
  unsure (1)..(456): unsure at all n locations
ggctcctacgacgggagtgttgcacattntcaaatggagtttatgtgataactgggctctgtgtactggagaaatggattctggatgctacagaagaggtttgttgcagctgtagctcttgtttcgttgctgatgatgaatatagcatctaatcttttctactttgtagcatgcaggtgcagcttgggatgagctaaagtacatcagagaggcggttgaatttctggtaatatctagtatatatcatgtttacgtagctagaggttgccattaattattaccacgccaccttaccttctgttaataatatttactggaaattgcagattattgcacagaanagcaaaaggactcttgagcagattaagaaaaatatttgtccggtatagacaacttacaatagcagaattttctctactatacaatntatacttcacatnagaattattttcctca

SEQ ID NO: 67500 - DNA, 344 bp, Oryza sativa
  unsure (1)..(344): unsure at all n locations
gtaatttaagctgttcagaaataaataataaatggtaggtaaaatagtccatgggttgaatggaagccaacagacctgaggtgaactacaaaagcgtgtattcatggatcatccaagtccccacagtgtcatggattactagaaacctgatgcaatacagagtatttatgcatcacagtgcagctattgcaaagcaagtttttatctccatagaaacttagccacagagaaacaatggcctgtttgggtgtcctgtcttcangcattgtatggctttctctgttcaccatctttgtcagtataccattatctaccagtgatgatcatgaaaatgatcgacaaac

SEQ ID NO: 67501 - DNA, 367 bp, Oryza sativa
  unsure (1)..(367): unsure at all n locations
agcttgtcctcttcttttatcctcggcctttatgntttccacgtgaagaaaaacgcaaattcagccagtaatttaatagaggggccccgttttagttttgcaaattcagccgtaatttaatagaagggcccatttttagtttttttaaataaaatttaggttttctgttggagagattatttntttacttattatttcagtctaggaaacccaaaacaattttttagtaggatatgatacacaatctctcgatgatgcttcaagtttataaaagttggctttactactaaataaacttgctctaataatacttcctccgtcccagaaagctagtcatcccgctgttcagaaaaatgttccacaaaat

SEQ ID NO: 67502 - DNA, 453 bp, Oryza sativa
tgtgagagcatcacctgatgaactacgccacaacttttgttatcttgttagagcacttgtgcatgttcgatgttctgacgtggcaatggaaggagaggaagattctgctgaagaaaagagacagaaggcattagttgccttgctggtaacctgcacatttgaatcattagatgttctcaccaagttgctgtactcatcaagcgtggatgtaagtcagcgcattttgattattgatgttatgactgaggctgcacaggagcttgcggaaactaaaattgtaaggagagagctgcggcatggaaacttgatatccgacacctctccctcttggctagttcctagtgatcagggacctgctggtgcacgtccttggagggaagtctcagaatcaggaacacttctgaattggtcacaccggtatgaaagagaagttccatctagatctggtcaagt

SEQ ID NO: 67503 - DNA, 401 bp, Oryza sativa
  unsure (1)..(401): unsure at all n locations
agcttgttcaattttgctggggcgtcctttgtatatatgataatgatgctacacaccatggtatgagtaataaatacactnttgtgcataatgggaagaaaattactttgctacctttgacccttcctgaaattgtagaagctgataaagaacgagctgctagtttgaaacttgatgaatctgaaaatcagcaagtggctaaatctgtttttccacctaaaaaggataagctctcacctagttctaaggttgagggaattaagttgaagggtggtgttatgcttgcaacgaaatgtgacattgctgatatttcaaatgatgatatgcgctatttcttgatatgcaaacaagccttggnttctttagatgatattgctagttcgatacctcctgttgttact

SEQ ID NO: 67504 - DNA, 457 bp, Oryza sativa
  unsure (1)..(457): unsure at all n locations
tatcgagccaattccaaaaataaatccagaaagcattcttgtattattagaactttagttcaccttatcagacaatccgtgcctcctggagaaaatcacaggtgttatttttttttagctttttagtggtctacaacatgtatagttattttttttaaaaaaaaatccaaatgaagtataatataggaaagtaatgtactttctattttcatgaaagtatactctatgggacaaattgagcctatttactcattagtaggctggtttcttctcttatcagtatttttagacgttgaacaattgaaccaatatccaaccacttgagactcatcatacccaanaggaacgatcaaaagccaggcatgagcgcatgacatgctgactgggcaggaccatatattattgcccataggccatagccccctaaagggcttggcagggctggtctattaccatg

SEQ ID NO: 67505 - DNA, 412 bp, Oryza sativa
agcttaaacatggtgtttctttaaacatttttctccaaaacttagggttcttcaaaacaaatcgtaatgcctggggttttgtgttataggtgccccaaaacctggggtttctgaaattcactctaaagtttctttaaaatattaaataattatatttttcaagtttaaaataattaaaactcaattaatcatgtgctaatagttttctcgttttgcatgcgctacttaattttcatcttcaacaagttgaaatggggcctgcggtatatatgatactagatgatactccccacaagtcgcggcgaactattcatatgtgcaatgcaactataaatttcactaatagaaaaatatagtgtcgccacgaaaaaaatcgtggcatgaatactaaaattatggcaatagatacatg

SEQ ID NO: 67506 - DNA, 449 bp, Oryza sativa
  unsure (1)..(449): unsure at all n locations
cggacctaagaaactcagcttattgcttctctgaggtaccacatgatgtattttgtgaaggacccacaacaatgatagaacgccccgagtaatcgacccgtttcccaagcagagtttcgcgaaacctcccctctttaccttcaattacatctgaaagtgatttgtatactttattgtgaccatccctcgttggttgcccgcgggacccactatcaagaagtgtatccacggcttcttgtaccaatttttcctggcacattactaaatctgctggcgctaattcacttctttttaatagataggcaagattgttgttccgacggataactctcttataagttcattaatatccgaagtcactactttatccccagacctataaacaatgggtcttaattcgggaggaagaactggtaataagcacaaaaccatccattctggntctacat

SEQ ID NO: 67507 - DNA, 434 bp, Oryza sativa
agcttacactaatgattaactctacgaatattagttatatactatacttgagtctgcctttttcgttgcgtaatattccttttataggcactcgacgagtagtctctctaaccagacgacaacaagctttcggcgggcaacacgtgaaaaaagctgggactagagaagagaatctctctctcctttgtttgtgcctcaacatgtcacatggagctagagcccggggacaaaataactttcggcggataaaataactttcggtgcggtcccgcacaacagagatgcggagagattgcgatcccgcgcatttggaaagcggcaccggagccccacgggaccggctcggtgccgcaacttggtaccgcgggaccgcttctgtcctgagacccggccggccgggcagctgtcccgcatgctacagcaacgtgcacagc

SEQ ID NO: 67508 - DNA, 449 bp, Oryza sativa
  unsure (1)..(449): unsure at all n locations
tgcatgtcacagagtcaaacccctctactgtcatgttactatcgtttatatccacacctcttccatcatcctcatgtgtcaccgccaacaaattctcccttcatcgtcccctctccagcactgtcaagctcgtcctctatgtcgatctgcatgaggtagggagggaaggtgagctcgataccgaatctagcgaagaaggcatangcggtggcatcagcggtcggagagctcatcaccctgctagcccccctgtgtggatatggcttccctgacggaggtgtctctgcccttccctccctttccctgccctcccgcacagactctatgctcgcctcgtccatgccgtcacctcctgtgcatcttgtgctagccttgtccaccacctaccaccaagcggcatggaaagaaattggtggagagaaanaatggtgaggtggaaaatatctata

SEQ ID NO: 67509 - DNA, 440 bp, Oryza sativa
  unsure (1)..(440): unsure at all n locations
agctttctcaacacttcattttatacaattttttgaagagnaaacaagagacctaaaaaatcaagatgtcgcgcgggggaagttgcaactgcggtttaagctgcggctgcgggtacttttttcatatgctgatttatcaaaataaactgaaataagctttcagaaatagcagntacttcgttttgttgatttttttttcgctcaaaaagtttggttgattntaacgtactttccatgataaaaaaaacatgctatttccattgcttcaaagttcaaagtttgttcagataaagttacatgtaagatgagaagagattatcactaattcattatcagttactttacattcattttatgtcctgctttttttcttggttcagaaagatgtaccctgatctggcagagaagaacaccaccatcaccacctcagataccatgat

SEQ ID NO: 67510 - DNA, 453 bp, Oryza sativa
  unsure (1)..(453): unsure at all n locations
tgcaattntcaagtctgactntatgtgcagaaagtgaaatttccagcttaatcacacaataggcagcaaacaacactaatccatcactacctaagcacctattagtagacacgacaacgcataagacaataacatagttaaacacttgctcaagctaaatatcaaccgtggaaaatgtctgcatcatcttaccactatccacagtaaccatgaccgtgatgctgatatccacgactagggcaccaaccatatattgtttcaatcttaaaatatccccaaaaataagaactttgtcaccatacgctccaagatagtccaggctacacaggtaggcagacaaccagtaacagcaatcgtgtcaggctgtaatagtagtttgattgggcaagacaggcttagatcaatcacactaccataaagtcatgcccgacagcactagaggctgctctgagt

SEQ ID NO: 67511 - DNA, 356 bp, Oryza sativa
  unsure (1)..(356): unsure at all n locations
agcttgccgagttcctccgtatccgtccgtctaccttcnctagcaccaataaccccgttgatgccttggactggttgcatgccattggaaaaaagttcgacaccgtctagtctaatgatgaggagaaagttatcttcgcaacccatcagctgcaggggcccgcatcactatggtgggaccacttccaggctatgcagccagaaggacagcctatcacctgggcccgcttcaccgccgctttccggaggacccatgtgccagctggagtcgtggcccttaaaaagagggaatntctggagttgaagcaaggcaaccgctctgttatggagtatttgcatgagttcaataacttggct

SEQ ID NO: 67512 - DNA, 451 bp, Oryza sativa
  unsure (1)..(451): unsure at all n locations
tgtgaaatgaatcgtaagaaacatgacatatattttgttcttnttatcaagggatacctgatatatgcttggacttcatcgcaattccgcagaatataaatatgagcttgttctgattcaagcatatcaagatctcgagttttatgagaaccaatgggccttccagcacaggagaagattgataaattaaatttgttaccaatggatgtgtcatgtattcttcctggacgattgtgttttgtctcgacatcatccaagtacctagagcttaatgtcataaactcatctgcaatgtatccctcagcaattgaaccctctgggcgagccatattccgaactagtggatttaggcagtgaatttgtctctcaaataaatacatccatcgatagatggttggcccaccaattagagcttctctagccaaatgaacaggcaaatgcatcatgacat

SEQ ID NO: 67513 - DNA, 359 bp, Oryza sativa
  unsure (1)..(359): unsure at all n locations
agctttcatacttgcgtcgtctagcttaattaattgattgcatatatatagtacgatgttaaattatgctttattttatcgccgcgaagttagatttgcatgtttcttccttgcaaattaaaattaaaaaaagtttatatgtttatggctggcagagagctacaatatatagattgatgtttgtggaggtgcattatcacaagttcttggcttttaggacaaaaatatgagctacacaatttgaaatatttaaggatttattaagtaacattgctcagtttaatgtattgctgtcattttttgtccttatctncacagggccagtagtacactgaagagcattcggctaattgcatgca

SEQ ID NO: 67514 - DNA, 344 bp, Oryza sativa
  unsure (1)..(344): unsure at all n locations
ggataggttctatttagtctattgtaccttcttttcaatgccttcttattttgatgcaaaagctaatattgcttcatgactacattcagtttcttactgtcacctctttcagtaaatttgctgctactgttngcacatactgtgtacatgttatctnttttccttggacaanttaaaagggctctcaaatatcttgtattcctaatatttgatttgtgaaatgaactacaattaattgccaaatcttgtgcaatgcaatcatcctttggtcatgaagtgctagcttaatangtgcaaaataatgcagtataattcaagaagtgtgggactgaataatactacta

SEQ ID NO: 67515 - DNA, 456 bp, Oryza sativa
  unsure (1)..(456): unsure at all n locations
ctactgatgcgtagtgctctttcttcttatttagctgacaacccgcagaggagcttgtgacactgacatgcggcaatgtttctctgcgtatgtcgagaaaaaagacttgtagatggagtatgatttgtgaaccacttgcagctcaagtgtgcgctacatgacctacatcacaatggcactcggctcaagtttacgtggtacatttgcaagatggagtatgccaaggaaaggcatcgccggacagggggctgcctccgatttttcttggctagattttgaatggagacacaggcacacagctctcgtttgaaatgtatgcgcgcgcgcgcggcagcaagttggcttccctgcatgattcctccagattgagacttggaaatgtgggatgattgtctgtttacagcacaaagtggtaattntgttatattagtccctgttaatatgtccatttagcac

SEQ ID NO: 67516 - DNA, 275 bp, Oryza sativa
atgcatgcgtgaatgagcatgtgtatggccaaagttttcctctacgcacgcaagaatcaaaacctaaccaaccaaccagagaagcaacatgcatgacgaaacacaacgagaaatcgatcgtagaaccatgtgctttttgaaacgctatatataccgcgccatcactgtgggaagtttctcatcgccacacagaaaccttcagggcaagagctatagctaagctactgtgtcacccgttcgatcggtgagccgacgccagcacacgcgccgcaacg

SEQ ID NO: 67517 - DNA, 502 bp, Oryza sativa
  unsure (1)..(502): unsure at all n locations
ccccagagnngancntgaggcatggcaagctgctggngctcatggctggattgctcatgtattcatgctgatatggcccaagaactgaaactgaaatacgaactgaaactgaaaccttaggagatggtcttcctgttaggatcaggctgaaatacgaattcacgatgcgtcccattcccatcgatctccttaccgttaaagcgggaatgaacatggcttcctttgccatcaaatattagatgtagtccctcattttgttcagaattaattatctgagggctccgatttaaaaaaaacaaatagtatggccatctagtcatggggctaggattaaccacactagtgaccaggttattgttcgccacacctcttcgatgttctgtaattatttctttttcacttgcagcaacctatacgcatacttgtggattgtgttnaaaaaaagtatgcttgtggatgtcctaagtgactagcgctatattattataaccagagaatcagc

SEQ ID NO: 67518 - DNA, 325 bp, Oryza sativa
tggctgctctcgtgtcatacacatcaacagccaaaatataattttcgtattagcagcacaatattatctatcagggcaaaatgctgaactactagcatctgagatggccacacgcatcttgctgatatatacaggtaacagctacgtatctgtatacagatagatagatctttttccctctatgtgatgcccttgtattatctaaaataaattcgatgcccttgtgctgtcacttgttacgtcacgatctcccttttttcctttagacgcggacacccaaatctatgaagatttgtacaaagggacgcgacactctacacactat

SEQ ID NO: 67519 - DNA, 293 bp, Oryza sativa
caactgacacaaccaaagcattgacattattgacattggcattcttggttgcatctctgaaagagaacattgttagttgcattctggtttctgaattctgggtttttgcaagcacgatagctgcaaggatggcaagagcacgagagggaagaaagccgcacagaagtggaggagaagagcaccactgaagatgagcctccaaaagggtacatccatgtgaggcaaggagaggacacgcaactgatagccacagccttgcagagagggtactactactgcacttcacttttggt

SEQ ID NO: 67520 - DNA, 432 bp, Oryza sativa
  unsure (1)..(432): unsure at all n locations
tctattttgtaggaatgtgagtcatcactggcagaccattccaatcagagctttacaactgtcttagacttggcctgacctacgataaactatttctaatactaaaaacaagattactaagtctccctggatcacactactcactangtcatggaatatgcttgcattgaaaaaaaaaagcatctttgtggctgcatgcttgttggatattacctccatgttataatatatgacgctgttaactntttgaccaacgtttggccattcatcttattcaaaatttttgtgtaaatataaaaatatttatgtcatacttaaagaacattngatgataaatcaagccacaataaaataaatgataattatattaaattttttgaataagacgaatgatcaaacttatctcanaaagtcaacggcatcatatattaa

SEQ ID NO: 67521 - DNA, 478 bp, Oryza sativa
  unsure (1)..(478): unsure at all n locations
tactaagcttctgcatttaagttggatacaccccgagtgtcgctcattatcttcgtcattcacagcccgctgtgatccagaaatagaaaccccaacccaaacgaattgactgactggaagacagcagcatctgtattaataagaatcgtaccttcaggcggaggcctccatctgggcactggccgaagagcatcacccctaaccgcttgcacagcacggcaacagtgttgttcaatcatctcgacataagccaagattttctggatgacctgtcttggatttgctaaggtaggattattcctggaatgatttctagcctcccatatatgctacaacgtgatagccagtgccgtcttttggatgcctgaacttctccccaggaaatcaaaaacccactgcttcatatntgacagctcagtcatgcactagcttcaatcacaatgtngcttagtgccatcccanacacatacagcaaaag

SEQ ID NO: 67522 - DNA, 453 bp, Oryza sativa
  unsure (1)..(453): unsure at all n locations
atcctatgagcttcggaatgttgtttgctactctatcgatttccacacagttattttgaccacagctagcaagcttgtcaattatcaacatgccaagtgcaggaagatgatcatagtatgtcaatgaatgctctttgggaactttccagtactctgaaatctgctgccatcttcgtctgagtatgcagttctgttcatggatgtgggctgaacaagtttgtgtctccggcaggttatcagtgccttcaactggctcttgtctttgctttgggtcatcatctggattcctaattgcatccggtctttcctcttggctatttgctgtgttgagaatggngtcttgcctctcctcttgttcatcatctacctgcagaagtggatttccctttttaagtttggcattggtgtccagaagtgcagatacaagctgcagtgccgtacgaacagtgatga

SEQ ID NO: 67523 - DNA, 404 bp, Oryza sativa
  unsure (1)..(404): unsure at all n locations
ctctcacaaacatatgtgcgcatggttgtggaaatattggttagacgtctgaatgatggccctcgtgttgataaccccaaaagggcacatatttcttctgttataactgaggtactgcgatacatggtgcttgcagtgcctgatacgtttggttctttggattgctttcctcttccatcttttgtggttcctgatgtttacagtagaggtgctttactgaagataactgctggtggtggtattgctggttcaaagaggcaggatggttatcgttacttgtcctgtggttatgctgtcntgtcaattcagaaacgttcatatgatcttgcaacagttgccaaccctaactttcangcacgtggtgcagccaaagtggtgcaagctctggacaaggctcttgtcac

SEQ ID NO: 67524 - DNA, 443 bp, Oryza sativa
cctgaggcatgcaagcttgtgcgaatgatcatctggtatcttaattcttaaaatgtattttatgtctctaaacttgtcttaggtgtcatataggtccaaacgggtaccgacccactccatccgctgacgtggcatgccacggtagcgcctacgtgtcagtggggactcacatgtcagtcatatttataaatatatgatatgataacaatatttacagaaagaaccttacatgttttaaacttactctaatcaaattctatacgtgctaatggagcggagcccacctatcataggcacagggagaacacagcagcagccgcagagttcgccggccggcgttccttcacgacgatgccgttggcgaacggcgattcttcggccgacacaaccacaagaagaaatgctgaggacttccttgcgatcctgttgaaggtggtctcgtc

SEQ ID NO: 67525 - DNA, 402 bp, Oryza sativa
  unsure (1)..(402): unsure at all n locations
catagctnttcttgtgcgtcctncgatctctgcaaaatagatcaagattcgatccataaacaaacagaatgaattagttccaccgggtcattcaatttttcctttttaaagcatgcagcattcctggctttccaaataacccaaagaacagcagcaatcccaactaccactacctttntatcttctttattaaatcacaaagccaacctcctaaaagatgcttgatatctcttgccagagtcaggttaaaaacactgccaatcacattcaaaagaaagcgagacacaggacaagtaagaaacaagtttccacattntcctgtccagagcanaattgacaattagactccttccctttcaacctctcttaacagatggctttagtaggacctattttaacaac

SEQ ID NO: 67526 - DNA, 471 bp, Oryza sativa
  unsure (1)..(471): unsure at all n locations
agcttgacaagaaggccaacaacacatgcgttttctagaattccagnggaacaatgtggacgaacccggcactcctccggacttcccagagagaacgtcgatatttgggacactccttctagagcttccccttactatctacctaattccacatactaaagtgatgcctaaaatatgaaattgagttgtacttcacttgagttgtgtgttttggatgtgagttgagcctctccttttatagcctccatataacggttggaatgacagttgtggaggttggtgcacccacaaccaccatcaacaaccaatagtgggtcgccaagtgcaaggaggtggcggtgagaggggaggagggtggtgccaaccttggtttggtcgaacccctcgttcgatcgaaccaggcacaccgcatctagccacccacattctctagtgtatgccaagtgagtgattatggcggttgcaatggat

SEQ ID NO: 67527 - DNA, 373 bp, Oryza sativa
  unsure (1)..(373): unsure at all n locations
cagaacaacancacagggaggaccgagaagacacacaccacccacgcaaatttcagggaaagctgaacccaagaggtggcggcgactcacagggccagcctattggcagcagcggcgcgagaatcataatcacaatgcgcggagtatgcgaccaggccatacaaaaccagaacaaaatagtacgcgccgtacacaaaagcaaaatactgcacggctggaccgaagaacggaagcagccaccacatgagaaaaaccggacagcgccaaaagcacgacagaagctgcacctcaagcaagcaaaacgcggcaaacctcctccgagaaaacaccaacacgcggtgcaccacagagacggagacagaaaaacggaaag

SEQ ID NO: 67528 - DNA, 472 bp, Oryza sativa
  unsure (1)..(472): unsure at all n locations
cagcgtcgagcttcttttgcatgatcatgtgattgtcacattttgcaatggaagtagacatagtggaaataatgagtttgctggtgatgccggtccaggccttgacaggaccgagtgactggtttgagcgctcatatacttaagctgttgaaatagtagttccttttccatttcaatcttgtgtgttctgaacaagaacattnttttcttctgtttctcatgtgcccttcctgcactttgtgcatgaaagaccccaaaaaaagcgaaagaaagaaaacataaaagaaagacatatcctttgaggaatggactgtacatgatataaagtaaagatcccattcttcatgtctggataagctgtgctctnttagtctctgtgctgaatacttcatttctgttcatattatggtgtntactgaccaaatgtcttctctttggcctaacaaggtaatcagtgacctttttcttgtca

SEQ ID NO: 67529 - DNA, 458 bp, Oryza sativa
  unsure (1)..(458): unsure at all n locations
agcttgcgtgtcatagagtcgaaccctgttatgagcttgatgagggaggtggccagctgaaggcgcacggattgacgggatagcggctgatggcagggagctccgcatggtagtgaattggagagaaagtgagaggaagaagaaagaaggggcaggagaatgataggtgggttctatgtatggccgtcggtatatagagtgggatgtggcgagtctactagagtgataggtaaatttgccacttatttttttttttacaaattggtcaaataagtatttggagagttaaaagtaacaactctgttagatatgctcttagtttgagcctggctgcttacttaggttttgcatattaaatgtaaaacgttgttatctcaaagactgcaatgtattgngccgggctgtacatagagggcctattaggccatgccagcccaccaactcanaattcaagttta

SEQ ID NO: 67530 - DNA, 491 bp, Oryza sativa
  unsure (1)..(491): unsure at all n locations
tganaaatagacataggatctccacacttgggataaacttttcacacatgtgcttatggaaatcggggcaggtagaaatatgtatctggatttatgtaaagaaaaaaaaaagacaaagagtctacactagtgtttcctttatgccggttactgcgtggatattaaccgggttataaagaaaccctctactttgtgcaagtgaccagagatggtatgaaatattttcatatttttcttgattttcttaatatntntataaacctggtcaagaatagatttacatatatcaatatatacatatataatgtacaattatggaatagagacctataatgaanaatgaaagcgactaatcttagaattgaataggaatgccatttcattccgtggtaaagtaatgtcgcggtaattaagccatcggatcaaatccgataaaggtnttctttttttctacttaatggtggaatattatgggaaccggactaccaccc

SEQ ID NO: 67531 - DNA, 462 bp, Oryza sativa
  unsure (1)..(462): unsure at all n locations
catgcaagcttagactngaatacattgaaagttttttattcttcattggagaatacagagtgcactngatgttgcactccttattatcttttaccttttgcatctccttttaattcacgtaatttacttgctctagtgatgtccttcaatttggcttgcagcgagctcctgatgcagtctttagcacagctgtcactgcactgaaacctgaagatgcatctgatacaaatcgagtgaagtgtgttttagataaccagggttatgcaatatacttctcaagagggctgattccatttaataagtgagatactacctccgttttttaatagatgatgctattaaatcgatcaaattgtcacttgcaattttgaacatttcagatcagggaaagtcaatcctcagtttccatatcttcttcatctgggcattgcggtatttatcaactcatacttcattctcagc

SEQ ID NO: 67532 - DNA, 490 bp, Oryza sativa
  unsure (1)..(490): unsure at all n locations
ntgagctatatctgccaagtccatatcagctccactctgataatgatgtactgacaatgccggtccacggngagcctcaattgatagcttagacttgggaggtgtaagctccgtcggtcgacttggacgaggagtcatcttcacaactatgtcttctttgggccattgtatgaacgtcttgcgcgcatcgcccaaagtcatgatttcatcatttgggggcacgggcagcggatagcctgaccaggtgtcctttactgtatcgatggacaccttggcatacccagctagcaggtctgcgccgtggaccttgtctgtaaccgagggcttgaaagccatgccctcagcaacttcaggagcgaaagttgggtggactctcgctagtaggacacactgtgctgcgccctgcataaggtgaaagtttgaatntaatattggaatgtgtacatgtcntttattagatatggatcggataacaacaattacctcgatg

SEQ ID NO: 67533 - DNA, 475 bp, Oryza sativa
  unsure (1)..(475): unsure at all n locations
tgcaagctttggttnctctagatgatatagctggttctnatcctccngnngntactaaccttttgcatgagtatgaggatgtctttccagctgagatacctctgggcttgccacctatgagagggatagagcatcaaattgatttgattccaggagcattattgccaaaccgtgctgtttatcgaaccaacctagaggagactaaggaaattcagcggcaagttcaagatcttttggaccacgggtatatacgtcaaagccttagtccttgtgcagttcctgtaattttggttcctaagaaagatggttcttggcaaatgtgtgttgattgtagagccattaataatattactatccgatatcgtcatcctgttcctaggttagacggcatgcttgatgagttgtgtggttctataatnttcacanagattgacttgcatagtggctaccaccaaattagaatgaaacttggaga

SEQ ID NO: 67534 - DNA, 425 bp, Oryza sativa
  unsure (1)..(425): unsure at all n locations
cttcctgtgccatcctctctctttntccccattcgcccttgctttctatcgcgcnctctcgagctccccgtgtcgctcctctctctccgccgntgctggtgatctccagccaccactcgccgccatcctagccatcgtcgcgtcgcgcgggcaccaccaccggcttcgccgccgcgagatcaagcttggccaccacatttcctccccaaaccgccgcccgaacgccgctcccactgtcgacccgagccccaccaccacccgccgtctccggccgcctattgccgccatccccgtccacctcaggctgtgccaccatgttgacgaccaaatttggaaatatcagtatcggagatgaagattagatcgaagcggaatcaaagataagggttatcgcggaaacagagtaagactcggctggagcccgg

SEQ ID NO: 67535 - DNA, 475 bp, Oryza sativa
  unsure (1)..(475): unsure at all n locations
tgcaagctttgagctatatctgccaagtccatatcatctctatctggagaatgaggtactgacaatgccggtccacggngagcctcaattgatagcttagacttgggaggtgtaagctccgtcggtcgacttggacgaggagtcatcttcacaactatgtcttctttgggccattgtatgaacgtcttgcgcgcatcgcccaaagtcatgatttcatcatttgggggcacgggcagcggatagcctgaccaggtgtcctttactgtatcgatggacaccttggcatacccagctagcaggtctgcgccgtggaccttgtctgtaaccgagggcttgaaagccatgccctcagcgacttcaggaagcgaaagtgggtggactctcgctagtaggacacactgtgctgcgccctgcataaggtgaaagtttgaatttaatattggaatgtgtacatgtcttttattagatatggatc

SEQ ID NO: 67536 - DNA, 480 bp, Oryza sativa
  unsure (1)..(480): unsure at all n locations
tacttaatcatgggagaagatttagattcggaatctgttttcttttacagtgagcaattggtgaattagagagaacatgttagcagagtctacttgccaagagcacctatcttatcataacagaagcgaatatttcagaacatacaaccgtttacacgctagaacacctatcttatcatagtagaaatgtnttgtgggcaaacagttctgttcttcagaataatgggatattgtgttgaatatcccttgaaacagttttgatgtgtgaaacagcagtacgctggaacactgagagcctaatgcggtactacttgcattcagacaagcagccctgcaacaagaatcttgtgtagcatgtagtaagaaagcacccttataccaatgcagctggcagcgttaacctaataaaggtgtgcaaatgaatgtcaactaaaagatacanagatagagaagccttatatggcacaccgacacattaca

SEQ ID NO: 67537 - DNA, 409 bp, Oryza sativa
  unsure (1)..(409): unsure at all n locations
ttgattataactacagacagctactattactttcatctatttattcacagcgcgaatgaaaaataaaacactctggcttacaggggttactttataattaacagacctatctcactgatcacccttgtaacgtcagagagcgtcttcagatgtctatttataaaattcctcttccgctcaatattctggaagctgcacgagagcgtattacctgtacactcaacaccctaccccgcgtttgtgtctcattttctggcggcanagactctggnttaatgctgcatctgacagccgaacttgcccgacaaatgggcanaaaaaatctgcgtttgtttatcgactgggagggcgcaatctctngcaccattaactatgttcagtccctgcgcgagttgacaccgatgtcatc

SEQ ID NO: 67538 - DNA, 385 bp, Oryza sativa
  unsure (1)..(385): unsure at all n locations
cattttgatatcaccttaccaaaatttggtaaagttgtcaaaaaaatggctatatttagtttgcttccaaattttagtaactatataagaaatcttaccaaaattttagcaactttatcaaaatttagtaagatttttttttagcatcaaagtaaacatgcccganagatggaccgcattcttatatgcatatgtggccacctgggtgaggtaattntgtttgtggttaatgaggaatggaatgtcgcaataaatgtagctgtacatagaagacgtgtgtctgcttcgcatagtacctcttttcccatattccatgcgtctgcagtgcacacgtccaatttgttgatcgtctctacgatctttgcgatgatgatgggaacaatct

SEQ ID NO: 67539 - DNA, 395 bp, Oryza sativa
  unsure (1)..(395): unsure at all n locations
ctgatctgtgcacaccattacttcttcaaaatgttatatgcagttttaattactctattactgaaggatgattggtctcactttcattactctattgctgaagtatgatggttctcactagtgttagctcacaccctttatgatttagtttgcactctctgaagaaaaaagagagggtgggcgtcggtcatatccaatgcatgaccagattaatagagctttatgtggatgtttgagcatataaccatgtctgggatttcgcatatcctcttttattttgttttctatttaaaatggttgcaaagttcggtttaaaaaanaatggttgcaaagttcaaaatttacatatgacagaatgggtgccttttatactcataataaagaangaattgatg

SEQ ID NO: 67540 - DNA, 432 bp, Oryza sativa
  unsure (1)..(432): unsure at all n locations
ctcaactagattatgagaaattgtacttataccatctaaaaataaacttgaagaagaagaagaagatggagaacacatcgttttcatatttagactagctgtctaaaactaaactagaagaagaagaagatggaaaacacatcgtttcatatttagactagctggctatccaccagccgcttattaaaatcttaagctcttctatacaaggccatatgtaacttaggccatgtcaccatgctagcaaagcaagacgtcaggcaacaacattagggatgcgggatctgctcagaattgttcttttggagtcttttcaattgcaaccaatgtatgttattcactctcggatgtctaacattcgaatggaaaattaattaaaattntaatgtgaaaaagccatgtatggccncaaccatcactaactactacagc

SEQ ID NO: 67541 - DNA, 429 bp, Oryza sativa
  unsure (1)..(429): unsure at all n locations
gctggttgcctagcgatagaaatatccacctttgtccttttgttattcncaatcaccttaagtgtgaaggaattattttgctgcgctctttcaagatgctatttgtaacatatagagggtgttaccaaagtgcagaagtgtatatacatcggggtgctcaatttgtgcgtgatttgcaagttgtaagctgctccacaaaatcactgcagaagtaattgcctaaagtaaatcaccgcttaacgcgccaagtgtacacatgagtacatgacagataacacaagggaggtcgaattatcctcattccgaatcagaacagaatggtcgacaccaacaactaaactactagtagcaaactagaaccctcaaaatgggcgcccagaaccgggacaccaataagctaacggcggcgttgcgtactgaccggagaca

SEQ ID NO: 67542 - DNA, 305 bp, Oryza sativa
aagggttaaaaaaaccaaataaatattcccaaaaaatggtgttgagaaaaagacccccaccccgccaaaagaaacaaaaaaaacaaaaagagaaacaacaaaacaaaaaaaagaaaacagagagaaaaaaagaagaaaaaccaaaaaaagggaccaaaaaaaaaaaaaagaggcgaaaaaaacagcagaaaaaaaaaagaagggagaagaaaaaacagaggaaaaaaacgaaaagaaacaaaaaagggagcaacagaaaaaaaaagcgaaaaaaaaaaaaaacaagggacgaaaaaaaaaaagaa

SEQ ID NO: 67543 - DNA, 141 bp, Oryza sativa
cgaaatgttcttgttgaatttaagactggacccatccggatacatgagctgaccctggagtcgtccttctacacaaaaacgtaccgttcaagccgatctgacatatgacaaactgggtttgtaacccccttatggcagaac

SEQ ID NO: 67544 - DNA, 484 bp, Oryza sativa
  unsure (1)..(484): unsure at all n locations
tgatctgttgctcanactcatccaagaccttgatctggttctttatattgcacacagaccttggatgtacgtgcctactgatctctttcagtgtctaatgcagaaagagaaagtgttcccatccaaagtcatttcattgccatatggtcattgatctctgcagatgatatttaccgcaatccttaagtgcttccctttcttgcttctcgatattatctattcacatcattatcttgctctaatgatttctttttgcagatattattggaaaaaatattgccatctcctgtgcagcaagtgaaatcaacaagttcataagaattcaggatgagaagattagcgcctatattatccaatagaatacagcatgacgtactaagtgtccctaatatctgttagataattagtatcgcataataattaatactttattgttttatgtagagctcatcttcacatatggagtcacctcatgatatccaga

SEQ ID NO: 67545 - DNA, 463 bp, Oryza sativa
agcttcatcagcatttgccatggcccatatttcattcaagcagagagcagttgctatgaagtcagtgcttggataggctattctgaatttttctttttccatgatagtttccagaaattgcaatagcatatctattgattttttgtgcttaactttatatctattagagagacaggatgtttcgtggaggggatgtctgcaagtgatctgaatcatatacttggtgtatttcgcagagttagtttagtctctaattggagatcaggacttctactgagattttggaggaaaattattactagtgtcttatgaaaactctaagcttcatattgttaatggagtatatctaaactctgtgatttacagtatactcctacagtcctgctattactctcggtagtagagcatcatcagtggaatctgaatttgttctaaggttgtgagttctgactttcttacgaac

SEQ ID NO: 67546 - DNA, 425 bp, Oryza sativa
  unsure (1)..(425): unsure at all n locations
ctcagctgcctgcagcctggggaatactctatttttgtctcttctaagngggccagcacggctgagaagcgacatgaatntctcctggtagtcagcaacggaaccagtgcggcggagttcggcgagggtccccaacttgttgtggcgaagagggggcccgaagcgcagttccaccatctccttgaagcgtctccacaacggcgtgccgtatgcttcttcagcatgcgtgtaacactcctgtgcctcgtctgtgagatggaacgctgcgatccaaatcttctcatcctcaacggtgtgctgtccatggaaaaattgctcacaacgacttagccaagtcattgngtcccctttaccattgaagatcgggaaatctcacttgtggtagcgtggaacccgactgtctgttgtgccgtcatgctgatgct

SEQ ID NO: 67547 - DNA, 467 bp, Oryza sativa
  unsure (1)..(467): unsure at all n locations
agcttgccgtgatgcgtctcatgtgttgttactaagctcatgtgttgggcagtcgcggagtgcgggtaaagtgtacatccactgcagtgtgagtaaaccaaatctattcgaatagccgtgctcgcggttattgagcaccgggacatgtattacacttggctagactctaaattcttaacttgtggggggatgggatattgcatgatgaattttatgctgatggagccacatcccgagaggagggaaggtggacatcctcagaaaaccatgacgattcaatggcgggaagctatccttgggatcacaatggatggtggacagaaccgtcgttgtttaaagtgaacactggtactaaaatttgatcagtctatactaggttttaggcttgtgaaaagaaatgtaaaattagctttatgcanaagaacctgaagccattccttgaaataccctctatcatatgcattggt

SEQ ID NO: 67548 - DNA, 484 bp, Oryza sativa
  unsure (1)..(484): unsure at all n locations
ctgccgtgatgcgtctcatgtgttgggacgaggcttatgtgttgggcagtcgcggagtgcgggtaaagtgtacatccactgcagtgtgagtaaaccaaatctattcgaatagccgtgctcgcggttattgagcaccgggacatgtattacacttggctagactctaaattcttaacttgtggggggatgggatattgcatgaatgaatttatgctgatggagccacatcccgagaggagggaaggtggacatcctcagagaaccatgacgattcaatggcgggaagctatccttgggatcacaatggatggtggacagaaccgtcgttgttaaagtgaacactggtactaaaatttgatcagtctatactaggttttaggcttgtgaaaagaattgtaaaattagctttatgcanaagaacctgaagccattccttgaaataccctctatcatatgcattggttgtgtggtggcttcctgagta

SEQ ID NO: 67549 - DNA, 457 bp, Oryza sativa
  unsure (1)..(457): unsure at all n locations
ttaactgcatcanaccaatggcattcgatttactcaccgtgttctgattaccacccgattcgatagcgataatcgccgtgatcaattgtggatcgacgccccaggctgcaccggctttctggcttattggcatccactgcatcgcacgttgcaccggaactttcgcgttccacggcgggttcgtatagtcatgctttgatgaacaacccgctaataacacaatcaaaaaggcaaaccatctcaatttcacttcttctatccttatagcctggaatcgccgttgaggtgacaacggcacacctaagcggcatgatatacatttcgtttctgttgtcagcaaggaattgccatgtctctgtttcacttaattgccccatcgggttactgcattaaacagcacgccgcgctgcgtggtatccagcgcctttaccgacgcgngcatcaagtcaataacgtc

SEQ ID NO: 67550 - DNA, 479 bp, Oryza sativa
  unsure (1)..(479): unsure at all n locations
catgcaagctttaaccatttntctgaatatttagattttatgtatgtttaaagcttacaacttatctaacttgagaagtacttttacaatatatagttgtgtggggggtttgcaaatattttacaatagaaattactagtcagagttgcatcttggaaccctgatggaagtagatgatggtggccttataaaagatatactnttaggccccaaaaattccatatggaatttagaaaaacagtttaatatatgtagaaagatagaaaatttccctattcctaaggccttattggttgtctggaacacataaatctattaacttattaaaggaatagaaaaagaaacctccacgttcgctctcacggcctagaaattctcatattaatcagagaaaaagaaaaacagagtccatatagaaatacaatttagaaatagctgaaattcgaaattaaaaataacgaatattggaagaggagact

SEQ ID NO: 67551 - DNA, 374 bp, Oryza sativa
  unsure (1)..(374): unsure at all n locations
aaaaccgatctagcactattattgctaatgatagactaatggcctgaatttctatttatgaagtcacgcattcatactccgtgcctaattttggaggaacgcatcatcccagtcaactcaacagatgttcctattgatgctctggtctcatcctcttgcatcattccaatcagtcctgcaccattggcgaggatataattgagctgattggtttctgctttgcgtagacagtcaacctctcttccctgaacaacacttttttagataatgcttcaaccaagctgagaaatatttcgatcaagagatgttgntacgcaatgtatctgcattctgaaatgaatcgatgtagtctgcgtattgtaatgacaacttcg

SEQ ID NO: 67552 - DNA, 467 bp, Oryza sativa
  unsure (1)..(467): unsure at all n locations
catgcaagcttcttcttcttgagatttatgaccaatttttatttcctttgctgagattaaggcaacgcttggaacattgcctcccaaacttccatgttactccctttaaaacctggaggtagttctctgaagaaagggactgaattagatttcagtccagcatcgtcccaacctaagttgntccaccagttttgttcaccgagaatcagaggcacacagcagatccattccatagcacgaatggcagtcttgccagcatagggcactcgtacacaagcagccgctgcaagcatggaaatccaagtctcccatcaccacatattttgtaaagatccttgagatgacttagccccatgtgcctgaggcgaggaaatgatgatgaagctgttgccgatggcatggtggtatcttcctcatcatcatcactcactacctccaacagtgagatgcagttgtataaatacacc

SEQ ID NO: 67553 - DNA, 370 bp, Oryza sativa
  unsure (1)..(370): unsure at all n locations
ttacagtaacaagtttttttttttgctgatgngtccgcctgaactggcaaggatgaattgcacancgaggtattgtgtattgggtgggtacatgtctncaatgaacgacgcttacaagagggaggtgatatatgggattgtgaaatcttatgacatgggaaagtatatcaccactgttctcttgactgagtttacaaattggaacggattanggtctcttatctgcagcccaccgaattcgcttgtgcgaactagcatgtgaaagctcatcttttgtgatgggtgatcgatgggaggtaactntgtttcattcagcttatatgtcctggtggactctgtagcatatcttgtacaaaatgttttgtcccct

SEQ ID NO: 67554 - DNA, 463 bp, Oryza sativa
  unsure (1)..(463): unsure at all n locations
tgcaagcttatggacttgtcgatatagnangggatgtaatgctttattagcactgcgatactgatccagtgtggtttccagaaatgtttaacgattggtagtggccagatttcttgtaaatttatttcaaccctaaattcgggttttatgcaatttaatggaaatacttcataatgatcaatcattcaggttaagatcgatctaaaccaatccattttttctatatacatacgacatgccaacggttaaacaacttattagaaacgcaagacagccaatacgaaatgctagaaaatcggccgcgcttaatggatgtcctcagcgtcgaggaacatgtgctacggtgtatgtgcgactcgttcggatcatgggttcaaacaaataagacaatttttgaagtatccatgatcggtaccaatgaataggatagagcttctctatcctagatttctacggtatatgg

SEQ ID NO: 67555 - DNA, 387 bp, Oryza sativa
  unsure (1)..(387): unsure at all n locations
atcatttcgcgaactttgtggnactcttccacttctagtaaaaattctggtgttcttgcccgataataagcactagcaggttggtgaagcataatcctcgcgtgggggaatgctatacgcttggtgggttctcctccaagcagaatgaacgacgccatggacgcggctattccgaggcatattgtatatatatctggtgtcaccgtttgcatcgtatcaaagatcgccattcctgagattaaccacccgccgggggagtttataaacaaaaaaatatcgctaattccatcttctatactgagatataccatgagacctgtaatatgattcgtgacctcgcaacgaatctcttgacctataaaaagtgtgctttctcgatacataaca

SEQ ID NO: 67556 - DNA, 317 bp, Oryza sativa
accttaattggtgccgcgaataaccaggcctggggcttcgccgggaataaggaccgcagtcacttctcaacgcttgtcggcgccaccgttcgcagcaagcaccactccggcttcgagcaaaccaagcacaaatcaagccgcatgacatggtcacaacactttcacccatcatggggctacaagtattcaattgaccggcaatcaatgcaatggccaccccacccaaccggattccccttcgccaccgaccccacaggtcggtaacagcgggagcaaagggctacatgatggggaataaactctcatccacccattaa

SEQ ID NO: 67557 - DNA, 399 bp, Oryza sativa
  unsure (1)..(399): unsure at all n locations
gacaaattcatttaccaacttaagaggtgcaaactattccgcttgcttggccggttgcgggttgggggctcgacatggttggccccgttaaaaaggcagtctgcggttacacgcatctctttgtggccattgacaaattctccaagtggattgaagctaaaccagttgtcacaatcacggcagataacgctcgagacttcttcatcaacattgtgcacagatttggagtgcccaatcggattatcactgataatggcacacaattcactggcggagtntttaaagactcttgcgaggactntggaattaagatatgctatgcttcagtggcacaccccatgagcaatggacaggtggagcgagccaatggcatgatactttcagggattaaagcgcgtg

SEQ ID NO: 67558 - DNA, 466 bp, Oryza sativa
  unsure (1)..(466): unsure at all n locations
gctncctatagctcccctctctattctctttgtttcttctctcgacgatcaggcccgtgtgttccctcctctcctcctttgtctctccctcctcccgcgcgcggngtctcgccttaacgtttgtcgcatatggnggcgacgagcaaagcgtangccgcagggagggacagggagagagagagagagaggctttctggctcgctctctctgcacgatctctcgtcttgttggattatacagccatgacatggtgcaacagcttcaacgacgtgcgcgccgtggagaacaacctggccaccgccgccgccgtggccgcggccaagaagcagcagcagcagcagcaggtctcccagcacgtcaacctcatcaagacctgcccctcctgcggccaccgcgcgcagtatgagcaggtagctagctagagcttcctccctgctcgatcgatcgatcggtctcctgtgtacat

SEQ ID NO: 67559 - DNA, 489 bp, Oryza sativa
  unsure (1)..(489): unsure at all n locations
ctaagctntgataggcatgtgtaatatgcattagaaatggtagcataatattatttatcttattagactnttgtaatgcctacgacctgaaattggcttttggatccaactcatctagttgaatcatacatacgcttttaactctcttacgttttcgttctcgcttcacacagacaattcagactgaagtaaatagtcaccgggcattaatcggcatccacaatgtgctcccaaaccaggtaataggcaatattttaatcttcataccaagtagtaagcattgtgtaaccagtaaatagctactatcaagtaagagcactacaaccaagtagtaaggagtaaaanaaacatttattcttttggcatgtattgatcctcatccctcttccttcatgcgattggctggtgataaactctacattatcttggaacctaccttattactggttatacattgtggaactnttaacaataataccctactttact

SEQ ID NO: 67560 - DNA, 466 bp, Oryza sativa
  unsure (1)..(466): unsure at all n locations
agcttgcaaaaactattgattgatacatcttcttcagagtaagcctgatttcccttgtatttttattcgtaatggcttttgaatgagtggcaacctgatagatatccactaactgcaggtaccttttctctgatgatttctttggtgaagaatcactgtttaatgacatatttgcaggtttgttttgtcctatttttgaatgtctatcttatgtggatgtagtaatctaaatggagaagcatctagtgtaaatccatcgctcagttctagcatgtgaatgaacattcatatttaccatttgatgaggtttggatggatcagatttaaagggatgtgacgggacactcataaatgatggctcaaaccgcaaggcagttattatttgtaaatagtggtccatgtggctattacatcctgtttggatctgatccacctaaaantatgaatcaacccagatggagttgca

SEQ ID NO: 67561 - DNA, 371 bp, Oryza sativa
  unsure (1)..(371): unsure at all n locations
ccggaagagtagtttcgttagctgctagatcatgtgttgtttgcttgtgtgtacgggtatggtttgcatcattggtggggatgcgaccatactanagtgtttgcttaagcaacttgaacaataaaagtctactcacaacagatcagtagtcaagtggtttaaggtcttacctttagcaacccctcttttccatctatcttccatcctggcagcagatggtcagtgtcagagagaagagcaacaacaacgatggtgtgttaaagtcacagatcaacggttcagttgaaagcaacanagtaccccaatgccataagaacccttgctcgtgatcaacatttggtgtccaagatcagatgatgggcgtattgatg

SEQ ID NO: 67562 - DNA, 467 bp, Oryza sativa
  unsure (1)..(467): unsure at all n locations
agctntataagaatgaatattcaacttcattatgttcttataaactaacagcatattaatttgctcttatttatcctgttataatctgcaacattnttatcctattgtgatcgaactccagatggtgtcattaatgaatgggaagggatcttctatgtcattctttcccttttcatttggtaaaagacatgcccacttgcaaattaacaactntaatcacatgcaaacaacaaactacaaggaaactggaacagtaacacaggggaaaaggactaatcagttatgctcaccatcagatgtcctctatgcagatccctcctggatcaaatagaacacttgaaagcttgtaaaccattgaggcaacaaagcatcaatgctggtgtttttctttacatcaaccagacgaccgataaccccacctcagtataaatcatgatttctggatggcagctttgccaaactaatgc

SEQ ID NO: 67563 - DNA, 485 bp, Oryza sativa
  unsure (1)..(485): unsure at all n locations
atttgattacttagnttcttcttctctgtttcttctcttaacaatngtccttggatgggggatgcttgctattaagttggaagaagtgggttggtaacaatctggtatcagagcccgtcggttcattgggattcttgtcatggaggtgttggggaggcagccatgcaagagggagcangaattgggttggggaagttttcatccaagcagcgcccaccaactgttcgatggaacgccaagccaacctgcgatgtccaagatagatcagagcatatctgagcccattcccatcaattccaccatgaaaaaagaggagaaatggctagatgaagctntggatcggatattggagaagtttgaacaaatggaggccaagcgtangtgtgatgagaagatngatcgaattttgaagaagttggacgagatagatgctaataggaacaagttcttcgaggagatgggtgcctctatcaaggcgaccactg

SEQ ID NO: 67564 - DNA, 474 bp, Oryza sativa
  unsure (1)..(474): unsure at all n locations
agcttaatggtggcgtcaaagcatgaganaatangatatnaggagatgaatttgggaggagagagagagagagagagagagagagcgagagagagattgtggggtggaggagtggaggaagtggaggtactagtggagaaggaagaaatcaaacaatatgagctgttgctgaggagaggccaggtggccaggtgtctcctcctgttgcagaaaagggggaaaaatattggaattttagtgatggaaaaaatgaacaatacttctgctttttagatggaagaggtaactggtcttctgaatttatactcttttattgtccatttgtggtgtactccttcatcttattttaaatacagttatagattctttttctaacatttggccgtccgtcttatttaaaactttttatgttatccgatgatatagtatgaataatactttatatgtgactcgcttcttaaatttggtttataa

SEQ ID NO: 67565 - DNA, 277 bp, Oryza sativa
attttttcagcatgtggaacatgagaaaagaggtacttgtcatgtaaggatgcctgtaatgtgtagacagtacattcagtcggactgaatgttgggattcccaaaactttgactcaataacttcaggcttctgacatttgagacacacgaagcatttgcttttacgtgtggccatataatgagctgacctgaacatatttaaaccttctaaagatcatttttataacctgcactgataagtgtaattcctgaaaatattgttgtaatgaagatgagt

SEQ ID NO: 67566 - DNA, 363 bp, Oryza sativa
  unsure (1)..(363): unsure at all n locations
tttgtccaccatccattgttgttcctttagtgctncccgtcattgcctcnctacggntctctgaggacgtccacatttccgcctctcaggaagtggctccatcagcataaaaatcatcatgcaatatcccatcccacacaagttaaagaatttagagtctagccaagtataatacatgtcccggtgctcaataaccgcgagcacggctattcgaatagatttggcttactcacactgcagtggatgtacactttacccgcactccgcgactgcccaacacatgagcctcgtcccaacacatgagacgcgtcacgtgcaagttttttcataacctcgcattggcagtacccgctccatgaactt

SEQ ID NO: 67567 - DNA, 350 bp, Oryza sativa
  unsure (1)..(350): unsure at all n locations
aagaattggttctacagatgtcacaggaatttcatatgatatatagagaaattcctctacattntggagaatttctagcataagatcttcaaatacttaggagagttgcaatctaacttatgtatctttccctcctttctatctataagaaatcaccccatttgccgcgcaagggcgcagcaagccccacgccctagccgccgtgactggccgtcgctcgtcgcgcctggccaccgctctccacaggaagacgagcctgccctgccgtgtagcgtctgggagcggttgccacaggaagtcacgttgccctgactctccacgcctangagggctgccgtatgaagccccgt

SEQ ID NO: 67568 - DNA, 376 bp, Oryza sativa
  unsure (1)..(376): unsure at all n locations
actcggagggaatcaagtcaggtgcgcctagtggtgccgtcgaatcaccaagtctggggcttcaccgggagtaaggaccgagttcacttcataatgctgctcggcaccaaccgttcggcgcaatcaccaacaccaggcttcgaagaaaccaagcaccaaaccaggtcgccatgacatggccagccaacgttggaccctccatggtggctcacancatcaccaatcgagccgggtgtacgcccnaaatttagcccaaatttcagactatttgtgtataaatccctgtcaggaccagccagtgtcacataacgacaagaatatacagttccaacgaaataaagcgtaaatactttacaaagaagcactagtcctcgca

SEQ ID NO: 67569 - DNA, 454 bp, Oryza sativa
  unsure (1)..(454): unsure at all n locations
agcttatgtggatgatgtagtcgtcaagtattagcagaagtatgatttgatcacggatctagaagaaacctttgcaagtatctgcgctttcaggattaaattaaaccctgacaagtgcatcttcggagtaccgtcagggaagctgcttggatttatggtctctcatagaggcatacaagccaacccggagaaaatcaatgccatcctcaacatgaaaccgccaagttcccagaaagatgttcaaaagctaactggttgcatggcggtgctcagccggtttgtttcacgactcggcaagcggggatgccctttttcaagctgttgaagaaaacagacaatttccagtggggacccgaagcccaaaaagcctttgaagacttcaagaaactcctcactactccaccagtcttagcttcaccgcatccgcaagagccgctgntgttatatgtatcgt

SEQ ID NO: 67570 - DNA, 486 bp, Oryza sativa
  unsure (1)..(486): unsure at all n locations
ntgccaaagaaagaccctgccggaggggcgtattgtttatgccatgaggcgaaagccttgccacgaagggcatgggtttcgccaagtatcgaaccttgccaggtgaaggcccagcgagccgacacgcctttcagaggcttaaccaaggactgggccgagtcacttggcccattaggagcccttcgagcaaaagacactgtacgcccatgaagatgtccctatcataaaggcaaccatgtaaattctcctgtaaagcctaaaccctaaagggagagtctgtaatagggctataagtagccccctagggccatataacagggggatctgagtaatttttacaaagcaatacaattgtctttacttccaacaactgttaaacgaaccacgtccttcgacatgaggcagttgtcgattcgacaacagctggcgccgtccgtggtgacctncgagcacaaccattgagagtangagcgaaaccactgatgc

SEQ ID NO: 67571 - DNA, 468 bp, Oryza sativa
  unsure (1)..(468): unsure at all n locations
agcttacattccctccgcnnncttacctanccttctcactccnctcggancaagagctgtgtgacatggcacccaacgatggagaagaccattgcggcatatctgttggcaactttnttaacaagtagacaagcacgatcggacacctaaacgcattgcggtaatatggagtcaccaaccaccctcaatttagcaaaaagctagaccaagatgggttttgatatattaaaccggctaacatagccgatttagatagaacgatagataactacacgtcttatgggcaaacggaaggtttacgggacaaacctacaaaggatttcgcactctcgcagcgaagacggacgatttacaacgcanatcgacaaagatggacgaactagactagaactatgtgaaaagtagatgcaatgtttgaaaaagcgattcaattggctaattatatagatcgtacattgtatgttcctt

SEQ ID NO: 67572 - DNA, 487 bp, Oryza sativa
  unsure (1)..(487): unsure at all n locations
acacataaaactcagctaccttcataatcctgactctagtcaccttctcacatggtattctgaccgnaccagacatctatttctccctgagtataatgtcggccctcaccattgaacaaaactaacctcaagtcaaatgcacaaaatccaacaaaacaattatttctgggcatagatatcacaaccttactcacattagtcatacgcattcacaccaacatgtatatatctttccaaacaaatttaattgaatatcatttccaaagctaattgttcattaaaaaaagtattaatcataacaataatttcatggtattaagtctataatttgaaacggatatactagttctaccataagaaacttacccagttgacctatactcacatggtaaaccgaccatgatatgtttcaagaaaaaaaccttcggatatggtcaatgatatggatgccatgcctttcatgcatgtaatgtacgtacgtatgtct

SEQ ID NO: 67573 - DNA, 468 bp, Oryza sativa
  unsure (1)..(468): unsure at all n locations
atgcaaagcttctcgcatgaaactattatagntatgagttttgttgtgtgatgcattatttatcccagaagttatttttaaataatgaagtaaaaaaatatgtatttattttataaaaaaaggtcataaaaaatgaggagcattcatacaccgataggactaccaatggtgtgacataccaagaaattaaaatatgaaaatcggttattttgaaatcattaaaaaaaacttttggagttattccttcttgtgacacccaagtgggaaaacactcacacatgccagctcaagtggctgatcgaagccgcaaagtgagaaaacactcacacacgccacatccagagtatgaaaacttagttagatatatcccttttctatgtcacaagcatttcttacaaagtcataaatactccanaatatattacatgtctcctcgagatatctnttttacaggatacaagaactacc

SEQ ID NO: 67574 - DNA, 305 bp, Oryza sativa
aatgttaacttggctttctctacattgaattgggggtgctcaacgaaaccgctggagttaagatatctgctaactcatctgggactaaagcctgaatctcatgtagccgagccctgattgagccacagtcaaccaccacgctgtctagcgatgatgcctctagccgatctaaaatccttcctagagtattcttcacatcatcagataaaagagccaaggctttgcttgtggtatcttcttctccttcatcaaggtagtccctgatgtcaaaagagaacagatcagctaatacctgtagtgacagt

SEQ ID NO: 67575 - DNA, 432 bp, Oryza sativa
gcaagcttggcgcgacccctcgcgctgcgctcttagtactttgtgtcgaccaagaagcggccgctggactctttggcggccctgacctcgctctggtactcgaagaagcggacgtccgcgaccttgccgaggatgttcgatctgcggatggagtccctgcagctcgccttgagttcctctcggaacccggccgcgttgtcgttgttggggttgctgctgatcttgaagccctcgatgtcgcccgggatggtgtatggctttcgcttctgcgcgaggatccacttcacctccgctagtggcagcggcgccatcgccgaggtcgacgtctgcgtcttcgacttcttacttctcgccggagctggagccggagccgccttgctgggcgagcgcgagcccgagcccttctcgtggccgctggccatgggtggatct

SEQ ID NO: 67576 - DNA, 414 bp, Oryza sativa
  unsure (1)..(414): unsure at all n locations
gaaatatataagtacagtaattttagatagaacaggagtaccttttccgttgcattccctaaaatatccgttctanagcgtcggctactgacagcaaggtttaagtggttggtggtcacatagacaccatatgcatgcatgtatctacttgcacgagcaaagaagccaacaatgctgcaatttgtttgcagtgtggtgcagaaaggatcccctctttctgttccaaaatggccatatctgtcctcattagtgaccagtgtaagtgatgttataacattagaacgtgaattggcaaatcgaccaattgttccagacacctccaatagaaactctgagggaccgcagctgaatctgtaaagttaggaacatgannttttgggtgtcaagaactgcacgacagagcccataagagtg

SEQ ID NO: 67577 - DNA, 436 bp, Oryza sativa
gttgatagccggcttggcctcgtgtatctttccctttagcagtttaaaagttaaggtaaaaaaataaataaataagtctaaaataatctaaaattaagcctgaaaattaaaattttgggtctggcttataagccaacaaaccatgaggaatataatataacactaagattaggtaaggttcaaaatttcggaatttcaatcctatggaacccccgccccttatacgatattattttggccgaattttttaaaaactttcatgagattcggcaatattttttcaaatttgactaaatgttgttcagaatttcagaaatattgccatatctaacacaaacgagagattgaaccctgcgaataggtaggggcagtagagcagcaaagcttgtcaacactatgatagctgaataaacaggcccgtacatcccgaatgaag

SEQ ID NO: 67578 - DNA, 408 bp, Oryza sativa
  unsure (1)..(408): unsure at all n locations
actatgctgcatatcttaaagatacagtgccaggtatatgtactctctctcaaattaaataatttttggcacggtggcttacccttaccccgattcccacgagacacttgttctacttgccttgggcgggtgaaagacagaacagcaattagagcaccaattcacccaatgtttattcaactcttattccggaagttntcaaatgattntagaaaagaaaaccaagttcctccattgattcactcagtctctctaagtgtatcattttgaattcctcactaaatgttgccttgatgattcctactctaaagtttatatgtggagcttggtagggatcaagcatggcatacttgcattcacatttgtcactaagttaaaatcttagactanagcagataactaaacata

SEQ ID NO: 67579 - DNA, 416 bp, Oryza sativa
agcttcatcagattgacaaacagaaatatttctcagagactgacaaattattgatacaaagcaattacctttacattttcctctctttccctagaccgttcgattaactttggacaagcctgcatattttttaaaaaagaaaaacatcgaagttaaatgggacactcattattagctaatgggtcacattactaactggtaaaaatcattacagaaacactatccgaaacatgggagaaatttaaacatgccatcaaacagaacatttttcagatgatcatatgttggtttaacatgattatgtcaatatacctccagatacatcttagacaacatttcagggagaaaatctattattggcgattaagccttttgttgagcccttcggaactttcaacctggcttcctaataattg

SEQ ID NO: 67580 - DNA, 440 bp, Oryza sativa
  unsure (1)..(440): unsure at all n locations
gtatatagagaaagatataagtatcacatcaatcgagagagataccaaaatagaatttgtgtatatagagcaagatataagtatcacatcaaccgagagagatacaaaaatagaatgaataaaattatacttactttataagatgcatccatatgggtggtataaaccggcctttaaaaggcttgagcaggcagccaatctttaagcagttgaatcaaatttggataacacagaataatacgaccgatcttcttatcatgcaaagcaaacactggagccagaaacattgaatgattagccaggctgaccaactcatcaatcttcttataaatccctttggcttccatattatacttttcatccatgataaagaatntcatcttcatgccttgagaagaccaactatgtgtatctggagaatacagataanatctcccatc

SEQ ID NO: 67581 - DNA, 470 bp, Oryza sativa
  unsure (1)..(470): unsure at all n locations
agcttgatgacgagcatctcttccagaatagctcattccactaatggtctgaagcagtgttacgccaaaaccgtagacatcattctttactgagataacaccttcaacaatatattctggtggcatatagcccctaaatataacccaatacaaatttaaatactcagaanattcagtagagaaaacagaaagaaaataaattcacatggaattattggaatgccctgtatcttacaatgttccacgaacgcttgcattgaccacatcatcttttaatactttagctagtccaaaatcaccaattttagggttcatgtctaaatccaggaggatgttgtctggtttcaggtccagatggactatagtaggtttcccagagtgtgtgtgaaggtaaataattccctgagttatcccttgaattattcggaatcgggaggaccaatcaagctgctcccctgcaataacgatac

SEQ ID NO: 67582 - DNA, 403 bp, Oryza sativa
  unsure (1)..(403): unsure at all n locations
gccggttattttaccgaactgatttctaacatggtaatactaatacaagctgtagctcagtaagctaaggtgaatgttgtcttacggcattatgttggagcgacatcaatgttgtttagtttactgaaccaagatctaatattggaatattgtagtactaaaactcactaggagaactcctcatctcttccggttggtaaagttgtgcaacttttgtcccggtaaagatcccttagtcccgttggagtaataaaccgggactaaaaaacctctttagtcccggttctttttgaaaccggaactattgtggaaattgtctcacccagcaaagatcacttctncaatagtgacttgtttcagttccaattatttctaanactcatagtcatatgcttctaactgg

SEQ ID NO: 67583 - DNA, 473 bp, Oryza sativa
  unsure (1)..(473): unsure at all n locations
agcttgagggtcggcacatcataacggatgtgttttaagatggacgtcctagtgccccggccgaagccgccaagaactatgtacgtcacagcggttgggttgtgcgggataacgtgcctgtcagtacggtgtactggcgaagaacaagggcacgcggagatcatgagagctntgtcccagattcggagaaagagatgctgtggaccacaatgctcgagacattcacccttcctgcgggtacagaggacaaagtgaaaaggtggactctgaagaanatggcagaacagtttcagagcttcaagggagatctgtaccagaagtatatactgaaggggcagacaccgaacttcgacacattcccaaagctaagggatcactgngacgagttcgttgcatataagacaggtgaacaagggcaggcgatgatggaaagaaacaaagaanatgccgtcaagaagaagtaccatcaccac

SEQ ID NO: 67584 - DNA, 386 bp, Oryza sativa
  unsure (1)..(386): unsure at all n locations
gtctgcgccaactgcagcggccgctcgacggcggcgtagacggcctcatggccgctctccagcagcgtcgtgaccgcgtagtacagcacctgcgccctgcaagatccaagaaacccccaaatcaagccaagaaaacaaggatccaaacgccagcaggcggtggcgcgaggcggcagagtaccatccgaagaagacggcccagttgtaaacggagaggtagagccgtcgcaccgtcgacccgacgcccgccatcgccgagcactcagcagtagctaacaaggangcggatgangaacgcgaggcctggacaaagatactggcttggctntaatgggcgcgtggactgaatctactatangctgttgatactgctcgcatcagcatca

SEQ ID NO: 67585 - DNA, 405 bp, Oryza sativa
gaccgcagctgcagcttgaatggaactgactgatacttttatcttatcaatatgaaaaagggggcacaggtcagataccacaaaatctctggatcttgaaaactggccaacatattttactgatcagtaatcattctgaatttaacataattaatccttgcaagaaaaatatgtcaattagttgtgtcatgaaacagtgacaggagtgattgatatatactgtagcaaacaatcgtgaacgtgatgcccaagatggtgaaatcaaaacaatgaaagaaaagaaaaaaactgtacaaatggaaataactatacaatatagggaggcaaattccacaaaatgcacattatttattaacaggtgtactgctataaaagatacctatagcactatgtcggtaagggtgt

SEQ ID NO: 67586 - DNA, 423 bp, Oryza sativa
tgatcgggtgctaactgtgaccagtcaataaccacatgtatctgtggttttatatactgggatataaatatattaaatagaagtgtctgggtttaactacatcctgtatataatcgtgtgctacttggtcaattcttacaagagaaaacgaagatcataagattaattaaccgcatcaaacggccgtagaatctgcaggtatgaacatatgctatacaggggtattaacgtgctcataagtattttggcattcactttgaattgtatgtgaattggctcaaggaatgacctggaacataggcaagcataaagaatctccaatagtcttactgaagttccataaaatattgattggaatatttcccatccaatataggacaaagcatacctggaaatcattctcttcaaaattattaatggtct

SEQ ID NO: 67587 - DNA, 449 bp, Oryza sativa
  unsure (1)..(449): unsure at all n locations
agcttgccggccgtgagtggtgttgtgtgtatatttataaaaaatctcctcctatcctaagtctatntatatccaagtctattttcgcaggcggaccgtaagcgccgcttaagtggtctgcctgcgggcattaaatttcacttcgatttatatttttgtaggcggttatttggctctaagggtcatgtccgcctgcgaaaataagatccccacgttgggaaaaatactttttctagtagcgtatgttgtacagttcatatgttgtcaagttaattagtctataatctatacttaaaaatgaatcatgcatgcacgcgcaggatgatgctcgttgatctgcatgatatatatatcccattcatcctttgaatacttatcttgtctcagctagagatacctcaatctttntccagcctttgaatattgttctcagataccttgcagaaata

SEQ ID NO: 67588 - DNA, 478 bp, Oryza sativa
  unsure (1)..(478): unsure at all n locations
tctggttagattccgcagttntgaattggntcggctttgatttattattagcacatagaacatggtattattgtgccaactgcaaaggtgatgagaagtgagattcagaacttaagctgctcgaccagatgtttaggctgagattcagaacttaaactgcttgatcagatgtttaggcacttcttatggagtatgcttacaagttttccacagaatttatgttctgcctagaatttctcaattagtagactgtcttgatgtatttgtttaaactgtccacagaattgcttacaatctggttgatntcttttgagtatgttgtgttgttttctataaccatttcacatggcaagggaacagttggtcatttgccttcctcatgttcatgtagtcattctcctggctcatctacccttgtcctgcagataagcatatcattctacctgcatgatgattcttgtattgaatcgtctaagtc

SEQ ID NO: 67589 - DNA, 135 bp, Oryza sativa
agcttcagatagtcagtaagtgcagaactttattgtgtaatccccacaacttttgagattacttagtctgttgccaccatataattaactaaaatccatatatattccctccattttttaatagatgacaccgtt

SEQ ID NO: 67590 - DNA, 466 bp, Oryza sativa
  unsure (1)..(466): unsure at all n locations
tgaaacaggtctgggttagntctaaacattntctgcaaactttttactnttcggncacatcgntccaattttaaccaaactttcaattttagcgtaaactaaacacacccacangtgaattttggggaataataaataaaggaaacttttgtaaactgtcgattgacaagcatatgagggaagatagttgaagagcttttactctagagtaaaacttattcaatgcatgctttcatcctggaggacctggtccctacctaatctttaaaattgtagatttagacccctaatcttgataaatataagacgaaaggtccaaatttaccacaaccacattntagaactgacaaagaatgccatgtatagccacatttcaaggaaaccccttcgatcaaaatcttctacacaagccggccataaccttctattatattctataatatattaaaagtcccttaaacatctt

SEQ ID NO: 67591 - DNA, 354 bp, Oryza sativa
tttttcatatctcacttgtttggctagaatattacagactctgcttgtggggagtgactgcgattcttgtggctgctactccacaaccagaccagcagttgaatcgggtaatctgacaaatgacaaataattgatcaaattctttcacctatgaataactggcaactgaaagaagaactctacacataaatcatactgaaatctgcacgtctataaaaaaaatttcttatgactaactaccagaacggattcttaatttaaaactaagtcataacatattataactacacattaatgtgcaccatcataacatgtaagatatctatttctacaatacttaaacaacttcatatt

SEQ ID NO: 67592 - DNA, 434 bp, Oryza sativa
  unsure (1)..(434): unsure at all n locations
gactctgtntaacgggcctaaactgaattcaagtgctggaactaaggccgaataagtccaccttgactctcttaaaagtgacccgaatctaatttatgaccctaaaccgtaaaaccggatatctcgacccccgaactattgaaaccggtggtaattgactcccttgatggttttagagggcggtttcgctgacgtggcgctgacgtggcatgtatgacctagtgttgacggaaaacatgaggcctgcgagatatgcttaactccagtgcatgtccaaaactcgccttcgggtatgctagcgtgccagatggattatcctgcaatcaacaagaaatagcgacaaagaacccgcggttaaacctataaatgatagccgatcggctaagtgccgatgacatatcatttatacttgagccgatgtcatatatgtatcg

SEQ ID NO: 67593 - DNA, 442 bp, Oryza sativa
  unsure (1)..(442): unsure at all n locations
ttcatcttaagcattattatgttgggtagaatttgtattcatattgacaacaaaaatatggatgtgcatttctttatataaatgattaaaacccagcctctacatctaaacctaatatacgcagctcaattggatctgcatatggatgaaatattctgcttaaaaaagtaaattatccatgttatccaaatttaaattctaattcaataagtaaacacacaaatttgtaggatattacacgagttgtattattcttttagaaaaaaaagcatgaatttatatgctgttcttaaaataaattattcaccgaatacatatctactntatttaggtggttttgccataagtcatgggtattattaagccaaattggggctacgcttattgaactgaagggaagcatttttanaatctgtatttggtactccctccgtttcacaat

SEQ ID NO: 67594 - DNA, 470 bp, Oryza sativa
  unsure (1)..(470): unsure at all n locations
ctaagcttcttcttttcctcaaaggattgtcgggccatatctgcatatattattgttttaacctgnagaagctcttaggtaatggagtgtcgatttctcatcctttcttgaacctgaagctgaactcgtaagagtgctaccaccaaatgaatttcttctttccaatactntggacattgaggactttgagaaaccgagacaattctattcaatgctggctatcttcctttgaattgctgcagggaagattatatgttaattagacaacttgtacagcctctcatgattcaacataaatcagatagaacctggaaattctaagaaaataattggcaacaaaaattgtactagttccaagttcatctgagcagcatgcatgcaagttgatgctaaatagctatagtcaaccaataacatggcatgcagaaacatgttcttatcatcacagtcgcacatcgcacaacagattt

SEQ ID NO: 67595 - DNA, 485 bp, Oryza sativa
  unsure (1)..(485): unsure at all n locations
atgcaagcttggaataatttgtcaatacaatgtattttattgaatactcgtgtcggcatacttggcaatagcatcgaaaccaagaaaactgcaagaaagaaaatgatatctatatgattaacctattgaggtcgataacaatgaatttggccgattgcattgtcagcttgcatgttctgatttccagtttagtgaccatgtatatattttttttaatccatgaacaaggaacaagcaaaattagtattttattaaatgggtaggcatgctctgctttgatgaaatactctaagttgagaacttaacagaaaaaaataaaatcagaaccatccaagtatataaatattcattatctatttaatttgagcaacttanaatgtatggaaaacaaaaacacccaagtatgaatatggagtcaagaacgtacactgtgaggtgattcaggtttatctagaccttttcttttttacagaaaacattacttc

SEQ ID NO: 67596 - DNA, 385 bp, Oryza sativa
  unsure (1)..(385): unsure at all n locations
caatttatgtctgggctttgtactggatatgtattttgatctcttcccctcatcttaaactaaccttttcacatgtgctatttactgcagtgtcattccttctttcaagatttctatcctaagtgcttcaacttcaacgttaactatatgccacctctaacggcatcactgttcactgaccaaaaagtgactaatcaaagtgttaaaattgagggaacaatggactcagttattggttccaagtgtgaagttacagcttaacaacaaagacacacacgtgttgaatgtngctgtctaaataatttcttctgcaggatatatgagttaacatttanggacaacattcttaccaaattggatgtngatcttcttattataattggag

SEQ ID NO: 67597 - DNA, 458 bp, Oryza sativa
agcttcacgcattgtgtactgaaattcttttgtttatgatttcttggcgttacacaatgttgaagtaattttatattcttattagcctgaattctaagaaattatgtttgaagactaagagtgtcgaacaggaaccattctgacacatggtatgatcatatggatataggtcacttgtgatggacaaacaaacataattacatgatgtctgattgtgattgcagtcagaattataggtaatcacaattttagtacaaccaatgaaaggttagttcaagagtaaccaaatattacagattacttcatggatgcattttttggattattttgtataagtagcaaagagggcaaaccagtagttagtacttactatacctaatagcactttaaaataaataaacatgattggcaaggaatgatacagtagtactctaattactgagtactgagtagcaatt

SEQ ID NO: 67598 - DNA, 226 bp, Oryza sativa
gtggaattataaagaattctattagtgataacataccatttgatttatacctacttattattgtaaatatgcaaaatcggacgcattgcgactggtgcgcactaaccacaacaccggtggaactgttactcggcagcaaaattgagagaggcgccgctttacctcacgcaattgaacataaaatccacactcaccaggacaattttcaaccaccccagtatggtta

SEQ ID NO: 67599 - DNA, 456 bp, Oryza sativa
  unsure (1)..(456): unsure at all n locations
gattgggcattttctatgctctcactgcnttaacagatgtgcttaagtccctaaaagacacatggtttcaccacacctggaaatatatggcatatgtggtgtaaaatcccgataaataaactcataaaggatttaccaaccgcctggaaaatgaccaatatatataatgagcctaagccataatattggtcaataaaagtgcacacttacgtggcaaaaagcaatgatattgtatccaatcaattgctttatgaatccaaacagcgccttgacttatataaaanagtcagcgggcagctatataaagcattacttgttggcaccttttaaaatgcattgtaccaactcctaaaaagttgagtaactgcggtataataggatttaaggtattgagcacttgatcacgcgcacttttgcctaagcanaaagaacgtgacangccacacctgaaaatat

SEQ ID NO: 67600 - DNA, 463 bp, Oryza sativa
gcttgccgacagatagcagaacggtgttttttaatattcatatcccggcgttattcgtgaacttgtcggcgctgcactttcgcagtaatcaactgcctaatcaggtgtctgatgcaatgcacgcctggggtatagacggccaccatctgacggtagaaatcacggaaagcatgatgatggaacacgataccgaaatctttaagcgcattcagatcctgcgagatatgggcgtgggcttatcggtagatgattttggtacggtcttttccggataatcccgcttagtcagtcttccggtatcggaaatcaaaattgacaaaagttttgtcgaactgtgtctgaccgataaacgcatccttgccttacttgaagccattaccagcattgggcaaagccttaatataaccgtcatggcggaaagcgctgaaaccaagagctaattgagatgctctcataatccact

SEQ ID NO: 67601 - DNA, 472 bp, Oryza sativa
  unsure (1)..(472): unsure at all n locations
atggactagttgtggcactggcgctttatttgcttcccttntgntaatcctaanaaagaaaacgagtcctttagattagatactttcttctttttttagtaaaatggtatttgcttctgcaattccaattatatcaatactttactcctaatttattactcctagagttgtctatttatggngacagacaataccccaccccaggaatagctgatttgaggatgatcaatttagaggatatgttcgccgtcttgcttcccgccctttgtttagggcagtggaaagtatttttccttttattttaagaattntgggaacatttcaacaaaggaggtctttcacaggtcaaacgagatctaagacttaatctanaagaaattactaaatngaatctatttctattaaaaaaaattgcattaaaaaaaccgatcaaaaagggcgagcgaagtaagtgatcganaaactttgttct

SEQ ID NO: 67602 - DNA, 478 bp, Oryza sativa
agcttcttcgctgcacctcgtgccccttgttttctttgtccaacggagggttgactaccactagcctcctcctcctggttcccctccacatccctttccacgtgcccctgctggttcccctccgcatccctctccacgtttccttcctcgttcaagtactggtttggatcctcgttcccctcttcttgtcacgaccggaaatcacccaacaggcgttcctgacgtgcgtgtattattccttgtcccaggaggcaaggtacaccaaaagttgatacaaatcagagtttaacaagcggaagcgtatataaaattattacatgggcagcgaaggcccagcacacacaaagacaacgaataacagcggaagactagggcgacgaccacaggcgcttgacggcaggcacgagctagacaccaaagccttcatcttcaatgagctcctcatctgtgctcgggaaaattaagcaagactgagtac

SEQ ID NO: 67603 - DNA, 384 bp, Oryza sativa
ctcagctattttcttcaagtctatcgcatcacgcgggtttttctatttattagatgatttggctacccccgagcttggggcagctgggatctgatagccacggtggtccagaagaaggagagagacaagcggagagcacgaggcggtgtggtggagctcgtggcggccgggttgtcaccatcagtggtcatggtggccaaatctagctgtccccgagctcagggcagttgtatctgatggttactgatgtccatgtcaccggacctgatgactacagactaagccgacgcctccgattgagagggagagggttccaccgctgcatgggagggagagggcacagccgctgcgtgggagaaagcgccaccgccgctcgccggtgga

SEQ ID NO: 67604 - DNA, 463 bp, Oryza sativa
  unsure (1)..(463): unsure at all n locations
tgcggcatgcaagctttgacntctgagacttctttcttttaagaaaaatagtactcggcacatatactctttcttctgtacgtacattcagaaagagtatcagagtactctaaatcagaaagatatttcttgtgctagttctttcattgtgtatgtaaaatcgactacaattccggccagcgatcgagattcatgaggttatcggcgcaacctttctttattcttgagcttcttgattagatgcatcgctagaggttcgtcgtcgtcgcccgggagaggcacgccatttccgctgggcttcgtcgctgtggactgatgaggtttcgtcaccgtacgttgcctaagagagctaccgtcaatattagggttcgtcgctgtcgaggtccgttcatcgccatcaccagcgattgcgtagaggcagttgagatcgagcccggccacgagccgcgcggcatcacggcgt

SEQ ID NO: 67605 - DNA, 445 bp, Oryza sativa
  unsure (1)..(445): unsure at all n locations
ntagaaagatncaatttaagcataaaggcattctgagagtattagttcatgcaaacattggagcttcgctgttttgacacttctagtggataacaaatgggcccatttgtgtctatgaaatgtgggtccagtgtcattntagaaaagattaggggacgattttgatgacaagttgaggggccttcggtgtactttttccgcacacaatataaccctgttcaggcccaaccgtacgacaaccgcctccgatcccctctcctcactccttctcggcggcgaggcgtctccgacgaaaaccctagcacgcatctcttcccctctttcccatggtgagtatccacaaccaagacctcgccgtttcgatccgctcggatagttgcttcgtcggctcggctccagatccatctgaccgatcctgtgatccagcttggtctgccttttgggt

SEQ ID NO: 67606 - DNA, 491 bp, Oryza sativa
  unsure (1)..(491): unsure at all n locations
gagcgaccgaggcatgcaagcttgaagttaaacaacactgtttttgtatataattatcacagaaccaatacttatttcaacttactttaactctgggcagaggaaaaaggttatgttatgttgatattgcgaacagacgatctaaagatacaagtgcactaaaggttcagggagcactgtagcagttacttaagaatacacaatagcacagttgacactacacatattacaacttagaaaattaccaaactttcttcagttaactgatgaccacaagttcataggttctagaataattgacagtggcactattcaagtttataaactttaaccgcttgtctttntgcaaaaaaaatctaaatacttgaaaacatgttatattagataagtatgtggtgtcctaaatataaacatgcaactttctctcacataatataatcatttagaagtaatttatggtcaaagtgagcaggctgtggacaacactgaca

SEQ ID NO: 67607 - DNA, 460 bp, Oryza sativa
  unsure (1)..(460): unsure at all n locations
tgactgaatatcatatannggactagatttaaaatgggtggtgtgttaattattgatttaatttaggttatatagccaacttataatagaacttgtatgtgttgttacttaaccgtgccacatgacttcgatgtttttgtgaaggatatataactagaccaacccaatgcttagaagcattgcatttaccatgtaagtgttaatacggtctggagtaacaagttgcaaggctatgtgaaacatgcatatagtgtcaattntggacatgaaatcaaacatggctcctaaagacaaccaaaatttggaacatttctgctcaataaatccttactatccctaggccgctacaggttccatgtagtcatccacgcaaacagccaaacaaggaacatattgcaccgaccaatatgcatggngaaaataatggaaagagcattangatatgttcatctgataattc

SEQ ID NO: 67608 - DNA, 472 bp, Oryza sativa
  unsure (1)..(472): unsure at all n locations
gcttntgtgagatatttacagaaatgcctgatcgtacaaatggagtacctttgcttccattgagtaccagggaaaaggatggcaggttgaaggaggagaaagacagcagactgaaggaagagttccataagctattaaacggaaaccatggggatcctactgatcgggtattgtagaagtcttctccctatatactccctgaacaagcctagcttagtacagtcagcctgtctattagatgaacttgcctatactttatactatgctggatcctactttctccgtcccaaaataaacaaacatattatgagatgcgataacctgctcagatcattatactagaatacgtcacatctcatgatttgtttattgagacggagcgagtactactaaatttgtttacaacccttgctagtttaattactccctccatcctaataatatactacctccgtcccanaatgtagctatt

SEQ ID NO: 67609 - DNA, 395 bp, Oryza sativa
  unsure (1)..(395): unsure at all n locations
tgggaatatggatgaattttaccaaaatttcttcactctaaaaagcgcactcccttccttccttctggaggtttggtttttttctccctctcctccctttttctttcttttttttcttggctcagngggccaggtcctccttttatagctcaaggggataccacatgcgccgcctctacctaccctctatcggagggggatcccaattcacttttcctgggctntaaaccgtgccttctccccgaagctaagcaacaaccgattctcgagtggaaccaggcgccgccccccgcctgacacggnggacaaccctgtcattccctcataaatgaacgatgacctgtgacagcccttcctcgagtgacgctcggacgtgacgggtcatacccaccccc

SEQ ID NO: 67610 - DNA, 468 bp, Oryza sativa
  unsure (1)..(468): unsure at all n locations
agcttattctgcanaatgacaatanactcctttttgatttgtnnctttctttgaatgtatgcttattacatatacttccattatattattagaataaaaaacatggttattattagaataaaaaataacttatatttgnttccttataagtatgcaaaccgggtacatatgtactgtatgtatgtatttagttttctgcctctttagaaatagtaatttcatactgagtgtctctgttctctgttttatatttgtgcagttctgtttgtcggctgtataacacaaccgttgagagagtttgatgatgtggtactctcctgcttgaccatcatttgcacctcgcttctatgcagaccaagatttgaaacaaattatgtaaaagattattaatttggttatgggaatggctactgtacactttatgtaatttagacactacatttctctcaccattcactaataactctg

SEQ ID NO: 67611 - DNA, 233 bp, Oryza sativa
  unsure (1)..(233): unsure at all n locations
ttgagaagctgtcagctctctcgatggctggttctgatctgtgcaaattccgtagttttgtgtactagttancatcgggctcaccatgagttatgctcgacacctccctgggactccttgatgtcggacggctgcaagcaaacacgtctgcattgcgcgaggaagtgatagcacgagttctattctcattagtgtgcccgacttgacagcttgtcggtggattggaacggaca

SEQ ID NO: 67612 - DNA, 244 bp, Oryza sativa
caacaactataacctgcggcaactgatgaactgattttttctttacacaaacaaacggtgacacgatacggagatgaaaaaattacaccctaatcacccacaaatagagaatagaaaaaaccgaaataatagacaagataacaagataatgacaaatagataatgaatggatatggaatagataggaatagaataagaacaagataagaatataatagaaaatagataaaataaaaagacccca

SEQ ID NO: 67613 - DNA, 416 bp, Oryza sativa
  unsure (1)..(416): unsure at all n locations
tttctgagatgacatctgatcctgaggggaagttagatgggaagaaagagaagttatatcccgagcaaaaggaagccattgtttctgaaatttcacttcctcaaatattgaaaaaagaagaaactcatattgccgtggaagtggatgatggttcatcgaacatggaattgtctatgatagcacaagaagtacaacgcgacaactccaaggttgatgtgaagggacaacgttgtaatattttccagtccgagtgcaagattcaagacaagatatgcaaattaataattgatggtggtagtactactaatgctatcagttcagatttagtgcatgctttatctntgcctatgagaaggctttctaagccgtgttatattcaatggatgaatcaagcatgcacattaaaaattactcac

SEQ ID NO: 67614 - DNA, 430 bp, Oryza sativa
ccaggaagtaggcttattttatgcaattctaaaatgcaatctactatggtcctccacccactgcgtatgtgatcaccatgagtaggtgctatagtaaaaacagcctcggttgccattctaaccttggtgtcctcaccgaaaagtggtacaggatcattaatataggaagtgttcagcaaggtggtgaacttacatagtgccacaacaagatcattcaacacatcatcaagatgatagaatgccgccaacttcgccactgatagaaaaccattaatgcatcctgtaaggaactcttcatgctcaacattatcaaaaaccactgagatagcagcaaccgttggtccagccatgatagtaaacatgtcatgatcaagaaaagggaaggagtcacaagcaatgtatgctgatgtcctctttgactctcacatca

SEQ ID NO: 67615 - DNA, 506 bp, Oryza sativa
  unsure (1)..(506): unsure at all n locations
ttagagngacctgcggcatgcaagcttaaggtttgtcaccagaagaaacagactctttcacgcccagattggtagatctcccctcgcagcacaagtccagtagaacgtaggaggagaactgagactacgagagaggcagtgcttcgccggaaggaggtcaccgtggagggaaggaggcgcggtcgccggagagagcacaagccaatcgccgccgccgccgccgcgagctggagatgacgaggaggaatggaaccagtggatccgaatcctccgctgctcatgctgtagcagacgatccgagccactgctccacgatccaacggctgggactgatgccacgtggcgattcaggacgagcggcccactcaaagttgggccggaacggngacagacgctcgcgtgcagcccacattaaggttgggccgaaacggngagtgcggctcatttcaggagagcccttcatctttcgaagttttaaatctaagcccacgtcagggagaggtact

SEQ ID NO: 67616 - DNA, 413 bp, Oryza sativa
  unsure (1)..(413): unsure at all n locations
atttcactgtaacanaatctcagatcttatgcttctattgtagatcctacatacatgatacgtgccattcctagcaatgcatctgacaatgtgtattgcacactgttggcacacagtgtggttcatggagccatggctggatacactggtttcactgttggccaagtaaatggtcggcattgctatatcccgttttacgtaagtcattcgctatagggcagttaaactttctgttaatacaaaaaataaaaaactctgctccactgctctccatactgattactgtcttatcactaaaattttcagaggatcacagagaagcagaacacagtttcaattactgataggatgtgggcaagacttctcttctcaaccaaccagccaagtttcctcagcaagaaagatgtggagga

SEQ ID NO: 67617 - DNA, 461 bp, Oryza sativa
agctttgattcaatgaaaagcctcttgtgtattactgaagcctttgttggtgcttctgaataacagacagatcgtccccagtttgagggatacatggagacaagcgatgaagtttatttataataaagctgaaacatattataggttaacaattttattagcaaattagagaagtccctctcatagtctcatgcgatgcttatattggtatcgctattgtgcttttttcaaggtgtgaaggtacgcttcaagctaaagcccagctgcattcaaacggcggcccatatgatactgctatcaggccatcctattgggctttgaagctaccttctgcttgtagattccaggtaatcttttatatattgtataaaagaaattcacaatttcataagtttgcaccgcgttgttttttatagtaaggcttccaacaggttgaagatccctagtatcgtgtgagtctt

SEQ ID NO: 67618 - DNA, 396 bp, Oryza sativa
  unsure (1)..(396): unsure at all n locations
gtgatgcactgagagaggattgggtacgcaacaaccttttggtttgctaaagagactcggcacgcaatgatctatcagatgaacttccgtgcatggcatgaacatcagatctcttctctcctgtagattcttcggcgcagtagtttcttaatctgttaatgccattgtccttatagttaacagtaaggtcacgacttgatgctgatgtagatagtttatcctttttcttgtctaacagaagcttgcttgctgctgatactccagtaacacatgagttgctatcatcatggcattctactataggtgatctagaaccgtgatatactagccttctacgttntgctggcttgcaacctcggattctgctgaacagatgatctgcgatgacttatttca

SEQ ID NO: 67619 - DNA, 371 bp, Oryza sativa
  unsure (1)..(371): unsure at all n locations
agcttgaatgaacttgagagcaaactntgttgatttaatgaaaanttgttgaaatggggtggagttccctctcccggccggttggcttaagtagtgcacccacaacggtcaaaaccgacctgtggggcccactagccattgcctcaaagagggaggcagccgaccgttgcctggccggttcggncnaaccangtgtnctgccgaacccctggtgggcccaatcggccccactttcgaccgttggatttcaacggtcagtgtagtccgggcactgcgaattttagtggaagcttattttggttagcctgaaaaaatattcaagaatttctgaaatgaaaaatctaatgcactttgaattaacctgtgctgat

SEQ ID NO: 67620 - DNA, 389 bp, Oryza sativa
  unsure (1)..(389): unsure at all n locations
cacatgctcaaaaccaaattaaataaagcaacaaatgactcaagttactcgccgagcatgatgatttttatgcgtggaacatttttcatgaacccagacaaagatactaatgcaactgactaaacgataaattaatgcacaaaatagatgcatagctataatacacacataaaattgcccatcgaacctagacacgacttagtgcatatcacctaacaaattcccgactgactgccaaataaattccaaataatgttnttctaaaacaccatactattcctagtcgataaatccaatngaaatagcgatcaagatttttnccacgaatcataagagcataccccataattttcccaaaacatatccaagtgcaaaaggcatgtgcagat

SEQ ID NO: 67621 - DNA, 480 bp, Oryza sativa
  unsure (1)..(480): unsure at all n locations
catgcaagcttattcttgttattntatctgtcattttatattcttaattgggctatttccctgtgatattctcttatattaagagaaaaaaaagtctattctgaattatactattccctgaatgaaactgttatctggatattgatggattcccttttgctaccagtagtgcttgtctttatttatttccaagctggctgacttatttcattgtggntcctctatttatatttatgcttaataatagtattcactggcatcagaagaagccagaaaggggacttctatgattcggtatgacattggtttcgctaaaagttaactcatggatgagaaaaccttacatgtattttaatagctaacaacagagaacatccatgataccgtcatgggtcagtaacagttaaaatgtttgatggttattaattgtggtatgttcttctgtctgtacatgnngtctgttgatgaactgctcggtca

SEQ ID NO: 67622 - DNA, 470 bp, Oryza sativa
  unsure (1)..(470): unsure at all n locations
catgcaagctnttcgataacctcgcattggcagtanctgctccttgaacttaaatcctcatgcgctctatgtgtccatgtttctagcagtgtgaggagttctggcgctcccggaaaagagaagtctcacacatattaaattatggttcaagttaagttctctctcacacacactcatggcagtcctaccaatggcgacaccgatgtagggcacgcctctcggccctacctcaacggctgtcccatcgtagcgcacctgcctcactcaggggtgaaccatctatgcagggatactgcctccgctcggctatctaatccgctaggtctatacccattcgagaagtacgggtgtacggnggtcgtttcatgcttaacttcatggctcggtccttaattgaccggngacggtactagcctttcccagataccacccagatccttcgtccaccccagtcgaaaacaattgtttaa

SEQ ID NO: 67623 - DNA, 468 bp, Oryza sativa
tcttcttgaacacccacttgcaccccacaggtttacaccctttttttctctctgtcacctcccaagtcccgttagcgataatggaatccatttcactatggacagcctccttccagtagtctgcatcaggagatgcatatgcttctgaaattgacttaagagtgtcatccacgaggtacacagtgaaatcatcaccaaaagacttagccgtcctttgtctcttactccttcgaggagcttcactgacatcctcctcagagacaagttcatgtgtatgttcagtttgttctggtggtgtgattgaactgggaattatttcagagggttggttcgaaccactatgtgtatccttcattgggaaaaagctctcaaagaaagtagcatcatgagaactcataattgtaccaacatgcatgttcggtacctcggattaactattaaaatctatatgcatgctatgatagcata

SEQ ID NO: 67624 - DNA, 476 bp, Oryza sativa
  unsure (1)..(476): unsure at all n locations
cctgcggcatgcaagcttcactagcttgngtaaatntctacttttttgtcaagtaatactactgtttgcaatctgccttgggtcatagtggttcaactgatcatacaagtcagttaaacagaacgatgcaacatatgattttaaaacagtcgctatatttattaaaacagtggagattgatgtaattgaatttctttggttctgcactgcagcttcgatgcatgtgtttctgctaccctgagtaaatttaacagtgataaaatattagaatagatcagatcccatggaacagaataatgagcttgcatttggttagtcagtgatgatttatgcatttcatataatgtaatggaaactgcaatgaacaatatgttgccttctagtatgtactgatgtatgctccaaactgtcattctaattntgtaggaacttattatttgtttaattntcaggctgtaatgccaagtttgggctgg

SEQ ID NO: 67625 - DNA, 476 bp, Oryza sativa
  unsure (1)..(476): unsure at all n locations
nggacggcgaggcaacacggtggtgaagcgggatgtgtctgtctagcaccacgacggcagcaaccggcggcacgctggacatgttcaagcgactggctgctagccggngagccaatgaataaacttaattggttcanggttcctgatgcaaattcctaattccttctcattttacatattactagtactagaaaataagtgtggtcgttggcgcgccattttcatagcccatgtgtaatcttttttttttaacgactcacactagacggtgcgaagttctattgatagaacaggaaaaaaattacaagattacaaccctgaaaggttgtaaccaggaaaaaggaagatattataccaccacccacacaccgacagcgtcaacacacacattcaagagaaggactagcatcggaccggccgccgctaagcgtgaccgaccgccgctaagccaacaacggaacatagccgagatcacc

SEQ ID NO: 67626 - DNA, 474 bp, Oryza sativa
  unsure (1)..(474): unsure at all n locations
agcttatccaaaagagaccgagtttattgtgtatgctgcatgacaaggtatctattaagtaggaatagtttgttagtttccttttatctttaggaaagtgtgtttagtgtccgatatggactttatgttttccttttatctttaggatagtttctttcttgtccgacaaggactttatcaaaccatgggtataaatatgtacacccggggtctatttaatttatcaatatcgatcaatacaactactctcggcgcatcgccaccctctttaccgaggtttttacttatcaaccggtggaacttggcacctgacgcggggctgcatcggctttcgatccccggcaaaggggtaagtcctatgttccgtcgggccctggtgaatctgtcatctacgtcggtgttgttcaaggctgcatcgcttcgatctcttggatcgctctggtttggttgatatatntgcctacctgatatctc

SEQ ID NO: 67627 - DNA, 483 bp, Oryza sativa
  unsure (1)..(483): unsure at all n locations
ntttcctccagcgaatcacccaacgacagatctttcttcttttatcattcaaganatttccatttctgttctttacaaatccaaatggccgntcttctagggttgcgggctcttatctttctcatgtgttcctgaatgtacggctcgacgatggcgagctgttgcaaaacactgctatgtgcttccgctacatctttgaagtcctcatcatagaaccttttcttgcctacgatccccgtcccagctaaccggccctcgtgtaaagggggggtcacaccgatgggttcggcgtccttcatgtaatctatgcagcattctaccatctcctcagttgtgtacccctctatcattgatccttccgaatgagctcggttacggacataccctttcagcatggacatgtacctctcgtacgcccacatctggtgtatgtatagtggaccaatctcgataatctgaggtacgatgtggacaatcagatgc

SEQ ID NO: 67628 - DNA, 471 bp, Oryza sativa
  unsure (1)..(471): unsure at all n locations
gcttngcagaaccctcatcgacgggggcagtgctcttttatcctcttcgccaagaccctggatgatatgcagatccctcgctccgagttaaaaccaagcaatgcgccttttcacggagtgattccaggattatccgcatctccactcggccagatcaccctcccggtcacttttggcacgcgggaaaactttcgcacagagaatatcagctntgaagtcgccgatttcgagacagcataccatgccatactcggacgcccggcgctagccaagttcatggccgtcccgcactacacttacatgatgatgaagatgcctggtccccgaggagtcctatccctacggagcgacatcaagcaagccgtcacatgcgacaaggagagttgcgacatggcccanactcgcgagatggcgtctgcccgagaggatatccgactggctgcagccacggcgagcgaaggagatatacct

SEQ ID NO: 67629 - DNA, 460 bp, Oryza sativa
  unsure (1)..(460): unsure at all n locations
tttgctatatcactcatcatattgtacaattgttgttggtatatcactcggatcatgttatttggaggattcacaccgcatatgctatatattgatatcaagtcacttggttgattacgattatcaaaaccactcggtggttggattatntattccttgactatatgcttggtttgttcaattaaccacatttgtcggggctacacctattangtgcatctagtcggtgcacctgactntattttccagccctccacagtcttcagatttgataaaagtactcgggagaccatgacaaagatgatngaagcactcggctttggagtaatctggntcgagagaagatatcttttcgactgcgaaggtctcaggggctactgtggatattatgggtaccccatacccataccgcatggttatccgactagtcataggggataacttatatctatggaatatg

SEQ ID NO: 67630 - DNA, 481 bp, Oryza sativa
catgcaagcttgccactgagcggcggaacagtcgagtattctctttcatttgggtagcccaccaccagtgtcatgcgagccaactctgccacaaaatcgtcaatgccttctccgcggtagttggttgggtggtcggccatctagagaagacaaaggggtaggatcaatgcatgctcaaatccaatttaaatgaagcagtaaaggactcaaattaaataagcgaataagagcggaattttatgcatagatcatttttttgcatgagagcgaataaataagatagacttacatagcgataaaataatgagaaattagatacttactaataataacaataagagcataaagaccttgcaacccatattcctgagttaggacctaatgcattcctcccatctaatcccgactgactgtcaaataaatctcaaataattctactaaaaccctagactgacttgatttgacaattccaagcagaatg

SEQ ID NO: 67631 - DNA, 301 bp, Oryza sativa
  unsure (1)..(301): unsure at all n locations
ataaaaaatggaactgaaagaaaataaatgaaagagctatgagaaaaactcacagcaactgtacaaatgcattacgagcacaaagatgaatcaccatgtttatnttagataagctntctcactctagaacaatcaacacataataaattgtattgatcaagtgcctatcctccacaacatagaggtacagcatcttatatagcagacccacaaattttaatcctcaaccaatcctcaagctntcacagatcaaacgttttatatgcatataatcaactacagaacacagaaaaattaatac

SEQ ID NO: 67632 - DNA, 479 bp, Oryza sativa
  unsure (1)..(479): unsure at all n locations
gcttattacatgcccgttcttagccccactctattcttctataccacgctggggttcccgacgactcagtcgtgcgtgcgcgatgtgaccaaggcgggtgcgccacgcgggaggcacccccgtccaaacctaggcactcgaggccctccaaaggctacctgcctcacgactctccaacgtggtataaatgatcacagtagaactagtaagaacaagccggtcccaaataaggcatgtggtaagtacgtagggtgcttgattagatgtcaaaatgttcggtccttaacgacctagacggngctacttgcatcaggggaaaccaacctcccattatcgccctatcacccgtccgaatccaacataattcatcaaccattatttagtgtaagtgctcaagttttatgcccaataatgcaagttgtctatataccacaattaatagcacctgccatctctatagttctattagcactaagcat

SEQ ID NO: 67633 - DNA, 388 bp, Oryza sativa
gaaactaacgtttgcaattttgagaggcaaacaatgctactttaacctaggcgaggtccacttaacttgtacttaaataaacaatttgagaacaaattaaaaccttttcattttcagcctatgacaaagaaaatgcaaacaaaaatgtgtacatgcatatgcatttagcattagtttgatttgagtcttttatgtgcatttggactttggtttgcatatcatgttaggttcatgaacatgaataaaaggacaacttcacttgtgacataattatatggacatgaaagtgaagtcaaataataacaactcagttcaagtcaagtcataacataagtctgtacaaacatttagatgcatctatataacgagaacacttatataaataaac

SEQ ID NO: 67634 - DNA, 483 bp, Oryza sativa
gcaagcttttgatctactttacacgtgtaaatattttttgttcttgattgcgcatttcaaaagcgacaaatccttaatcattctgaatatcttcaagttttgtcacgttagacgaagtcggtttcgacgaaccgtaagacggatggcatgcatagttgaatttcagtttaaattttaaatttaaggaataataaaggtggtcagatggtgcgaagtaaagtttaaagcttgttcctacactgaatctctcaacatcacactttcttcagttgtgccattataaattgaaattgccaacagttgcagaggcaactcaaggtctcattctcagaaaactcatcagtcagtttcagtgaaaaccaagggtggttaacagtaaccaccccaccaatgagtccatgatctgatgatcacacctcttgcaacatctcaagttattaacaggcatacatatcatctcccataaacaaagaacatatatca

SEQ ID NO: 67635 - DNA, 426 bp, Oryza sativa
  unsure (1)..(426): unsure at all n locations
gtagtagtacgttagaggtaaagaaatgaaatatcatatttagtaaatcagtaggcacattcaataatagtaaacatatacagcgacatgcatatgacttacatgcatgcttatgtcaagcagcagcaacaacaacaaacataacaacaattacaataataatgtccatcacattctgtatttgggatggtaagaatgatcgatgataaatntctccccagtccaaatctctcagaatcaaactgtcactcaactctcacaacatatatagctactatttgttcttttgaaactganactagtatttgttcttgttgaggagatcgtagtacaccatgggcttcctgtagttcttgccgcacgcctnctgcanaaaaatatataananattaaaaataatcacttctgtgtagataataaacacat

SEQ ID NO: 67636 - DNA, 488 bp, Oryza sativa
  unsure (1)..(488): unsure at all n locations
cccgcatgcaagctttannttanttctgaattgtaatttcccatttttgttgaacttatacttactagtgtgcgaaaagaaaatatctgtttgcatttcaaccttgcggattttctgtgctctgacgttntaattatggccttataacaaagttctagagttacgtctccttgtttatcgaaaaaaaaaacttagttgtgggctagacgtctacatttggtcacatcttattgattttatggaaatcgaagtttggttgtaccaaacaatatcttgtgttctccgttgaggcttcattttttcatccaagagtttatattttgtacttttagttggattctttgattataaaacgttcgtcttgcatcaattcttcaaatatcctttttcgagtttcaaatttttttgggttgtcatggttcatctcctttaagtttgtttgaactttattttctcgtttataaaaacaaaatattcttttgcattta

SEQ ID NO: 67637 - DNA, 411 bp, Oryza sativa
gaagccgccaagaactatgtacgtcacagcggttgggttgcgctggacaacctgactgtcaatacggtgtactggcgaagaacaagggcacgccgagatcatgagagctttgtcccagattctgagaaagagatgctgtggaccacaatgctcgagacattcacccttcccacgggtacagaggacaaagtgaaaaggtggactctgaagaaaatggcagaatagtttcagagctttaagggagagctgtacaagaaatatatcctgaaggggcagacaccgaacttcaacacattcccaaagctaagggatcactgggacgagttcgttcatataagacaggtgaacaacggcatgcgatgatggatagaaacaaagaaaatgccaccaagaagaagtaccatcaccact

SEQ ID NO: 67638 - DNA, 456 bp, Oryza sativa
  unsure (1)..(456): unsure at all n locations
agcttcanacttctttgaagtcctatagctttatactcctacatgctctttcttatgtagcaacaaccctttatatcacaatttacacaaaaacttttgatattgaaatcaaactatggtcaatagtcatatgctgcttgttcactcctatcgcactaaatcggtagcgaaaattgtggcgctactattcctagtgaccttatgattntgcaggaaagttttgatttgtctcgctaccattggcggtaatcataattatttttagaaaaaaaatcatatttcagtcgctactaattatatcgattataataataatgtacaaattgatccatttttaattgcttcacaaccatctacatcggtgtccaacaaattcgtagaaccaccctcatctgcatctgcctctctcctccctcgccgnggctactntagtttcctatctgtcgaggtctaaca

SEQ ID NO: 67639 - DNA, 468 bp, Oryza sativa
  unsure (1)..(468): unsure at all n locations
acagcttgtctaaccctagcttgctaccaggattagggactttctttctcagaagaatcatacacacaggagtagggtattacgctttatagtggctcgaacctgtataaacctcttttgtctcatcgtcttggaggagcctccgagatcaagatcacacacagtttcgctcaccanatccttgaatctcacccgctgcccccgaccgaactctcaaagggaggcctcacagcctcccgctagagagggtcacctctcgacaaacgtaaaatgagatatnttgtatatataataatatgaatgaaatcattgcggtgaacataaccattcaaaagttggataagcaacttcaaattatttgtgcccatatgtaatagtccgtatgtgaaataatggtacgcataacattagcaatactccaaactgatcacttttttanttttcttaagctgcgtgcaattggtcatg

SEQ ID NO: 67640 - DNA, 483 bp, Oryza sativa
  unsure (1)..(483): unsure at all n locations
tgcaagcttatcagattataataagctgggctctattttataataagctactttaataagttgtctgtttcttccagcttactcccaataatctggattataataatcccaagctgaaagaaacagggccttaaatttgtctaatatcaaaaactcacattcttgttttttcacctaaattagcttaatgaaaatttaagaaaaccaaaaagtttaatttgactaagaaattaattaccctgtcagcctttaatttatttatttatttattggtaattgaatcctatcttattataaagataatgtccagtaatttctatagctcaacatgcaagtatgtcactttatcactcacttagaattattatctagagtattntaaatcacatacaattaggcatatcatcaccgactagcaattatttaggaatatttaaatatatgtaagcataacatatcatctacaatnttgttgtattaaca

SEQ ID NO: 67641 - DNA, 476 bp, Oryza sativa
  unsure (1)..(476): unsure at all n locations
agcttaattaaaccagttcatgcttgatctttcctctgtttttcagacattgaagcggcggttagaccaactcttaatctgaaggttagccaagtcttttccattaattgatttaattcctcgcaaaaaaagtcattggaattaattagttggtgcaacttaagaaataaaactgtggtctcccatatgtatcaaaatactagccaccctgtcgcgcttcgcgcgactctgagttctaatataacctgtcaatattagtaggccatctatattggggtgtcgcaaggctgatgcgagagcgagacgacggagactgcgcccaagatttggggatttggatcgtctctcttgtgtgtattgtgtcttctccggagaataggagagattatcgctggttntttttatcctctcctttcattggtgtgcaaccttcccgatgacttccttttatttatttattggttctttgactagat

SEQ ID NO: 67642 - DNA, 488 bp, Oryza sativa
  unsure (1)..(488): unsure at all n locations
tacgggtataaatggagccatgaagcctgctactttgcatgttctttcttatagaacatatcagacacgcaaatctagcttgctgtanacacagctagttcgtaattatcgcatatggccatggggaagtacagtgtgggtctcgtggttctaaggttgctggcccttgcgttttcgaccactgtgctggctgaaacacatgttgttggtgactccaacggttgggacttctctgtgtcgtttgatagctgcgctgatggaaaggtcttcgctgctggtgacactctcggtatacacagagacagtctcgctctatatatcttctctctttatactactacctccttccctaaatgtttgacgccgctgattattttaaatatatttgaccattcgtcttattcaaaaacttttgtgaaatatgtacaactatatgtatacataacaatatatttaacaatgaatcacatggtatgaaaagaattaat

SEQ ID NO: 67643 - DNA, 452 bp, Oryza sativa
  unsure (1)..(452): unsure at all n locations
agcttcttctaaagaatttagttactcttgttatcatagcactcactntagtttactacatatacatatccaactttcatgtttatttcgctttggtgtttgaaatgttgaactaaaatgaaattacaatattttgaaggattgttgccggacttcatgtgcattcatgtgtcttacacttggctatttaaataatgtacccatagatgcatgtccctcttatcaccgagttccataacttctttgaattcaatataaacacttatttgatttattgtcttaaccatggcacaatatgtcaaaatgcaccacgcacattgtattaactaccaacactactttgtgcttagaagaaaaatagatcgtggcatcagatttcaagaacaaaaagaaaacttgaatataagcatgtagtacccgatagtgtggagatcttgtcctgtggacaccga

SEQ ID NO: 67644 - DNA, 472 bp, Oryza sativa
  unsure (1)..(472): unsure at all n locations
tgcaccgacgtaagnatctctttaaattctaatcattttattattttgcaaagcaaattaatctagattatttcggtagtcaaggctagctcctgaactgcagttaatatgacagatgctattgctataatcttgtttgcgatgcctcttaattcctgtggtgatacaacttaatcctggaccattttttttaacaacatatgatcatataaatctatttccaaggaaacttattctacaaatccaatgacatcatggaaaatatgttaatggattgtgctcaccattagctctttnttagagtcatctatttggacacacagtgatgtatatgggttatatagattgttagattataatcataatgccatgttatgctacagctacacccatctgcccagtataatttctaaacctttcacacaagaatacagcctaacaacagtngagttggtcagaagtaattgtgggc

SEQ ID NO: 67645 - DNA, 472 bp, Oryza sativa
  unsure (1)..(472): unsure at all n locations
agcttgtccatggcttgcaggttcttcttctcattagatgcatcgngcaagaaaaaggttgtttcttgacaaatgtcgagaacaacattttgatggccagagggacaaggttcangctcgataggaggttgtgatggtggttctttggagtgcaattcaagggtctcgccagaatcttcttgaatgaaatgaagatcatcctgctctagaatagattcaggggactcatgaagaagaaccgccattacttcctctatcggcgtattatcagggaggatgcctgtcaaggttttctcttaatcgctatgaggatcatccctgaatttaggagcgcaacccggagcttgaatttctttggaatccggtgatggctccacggaggactctntagttagacccgaagatgttgaaggcttgggttcangcttggctaaagaaagttcctcccgtcttgacacanatgcctctggat

SEQ ID NO: 67646 - DNA, 386 bp, Oryza sativa
ggaggatctcggctgggtcactggagttgacgagagttaatagagagagagagagagagagctcgccggtgtagaggacgaagagacaaaagtgacagcgtgatcatggcggaagtgaccgttgctatttaaagcctaaaaggccgagataagccggttgggcctgtacgaactgatgaggatacaactaggtcggatataaccatgactactttatgtattaaacaaccaaaggtgcatatgttctacatttgatttacttgttatatatttgtacaaacgttgctacacaatgagtttcgtgtgttttcgtttgcagaggtacatgcttggatgaaagaaaagagaccgagcataaggaatgcatggatgattaaagaagttga

SEQ ID NO: 67647 - DNA, 419 bp, Oryza sativa
agagatttttatcaacatctttttatttccaaatgcacaacacgaatatgtatttctaaaagcgaacaaatttaaaacctgactcaaacacggatgacgtaccaaaaatacccgaaaaacatcttcaatttttataatgagtactgctatacatccgaccctattgttcgaccccagtccgaccctgccgtatctgctaatcaatttacaccaacgagccagctgctctccatgtgggccagagcaaggagcaggtaagtactggtcggatgctaagtcgtacatactagtcggatgtgtagcaatttccttttataatagtagagataaaacccatatgggcgttatatttagcatgaagtttcatgtgtgtttcaatccacttcactcctctcccccactagggcggcccaaatgtt

SEQ ID NO: 67648 - DNA, 476 bp, Oryza sativa
  unsure (1)..(476): unsure at all n locations
cagcttgaagagctgataggaggaatgttcggtacatcatgagatgtttttgttcttaatcagctacgaggagcactgatcattcaaaatattaatatgaagccttttatgttgcaagagaagacaaccttgtggggatcaagacgaataaggagttgctgttgaattggctcggagatgatttggaacagagtagtatgattaccacagtttgggggatgggtggagtgggtaagaccactttagtttcccatgtgtaccacactattaaagtggactttgatgctactgcatggttaactgtctcaaacagctaccaagttgaggatntgctgaagcatattactagtgaatttggcataccttccaatgctaccaagttgatggagaatattcataaccatttacaaggtaaaagataccttctaattctcgatgatagtctgggtgttgatgtgtggttcaatataacggat

SEQ ID NO: 67649 - DNA, 467 bp, Oryza sativa
  unsure (1)..(467): unsure at all n locations
aatatactntgttagatgatgattttatctccgaactatagatggcttacttttaaagtgtttaggtcctgatcaatctaaagtagccatgggagaggtacatgaaggaatttgtaggacgcaccagtcggctcataagatgcaatggctattaaagagagcgggtttttattggccgactatgctagaggattgttttcgttattataagggctgtgaggcatgtcaaagatttggaaatattcagttagcacctgcagctatgctacatcccattgttaaaccgtggccatttagaggatggggtttagtttttgttggtgagatacatccttcatcttctaaaggtcatcgcttcgtcctagtagctactgattatttctctaaatggacggaagcggttcctttgaaaaatatgactcataaagaagtgattaattttgtattagagcatattattcatagat

SEQ ID NO: 67650 - DNA, 470 bp, Oryza sativa
  unsure (1)..(470): unsure at all n locations
ttcgatcctatagtcttcttggagttctggaatgtctttattctctcttctttggggaagaatatagtcgaattaatagtattatattctttatttatatatgctcatattttattttatataattctttattgagtatatttcctatgagtagtatataccttgtatatttgtttcatcctaggctagttgatccatgctaaagtaacggtccaatgaccttcataggttgctctagctctaacttgttcatccnctanggaagatagtgatattggttactagcataaacgtggtgtttaggctagataaatatcgttggatgtgggtgtatcccacggaaagtgaggtangcggcaagtggtgatagccatgtccattctttgtattcctccatgttcgggtatgacataagagtgcatanatgccataactacgttggcaaactagcagtgagtgggttctctata

SEQ ID NO: 67651 - DNA, 405 bp, Oryza sativa
  unsure (1)..(405): unsure at all n locations
tttttcttcttggcacaaagcatatttacatacacatagcaaatacattaaccaatacatctcttctgtctctctgtttaatacaatacagaactaggttccatacaatgcttctcatttctcagtgttcccaagaaacagtcttgcatgatatcatccggtgctaaatttttggcacaacatacataattacatactacacaatctgctgcaactcagctgcagtatggttcatcagaaattcagactcaagaactaataggcagcagagcctgcttcctagtagcctgaacacagatctcttctggagctctacctgctctgaaacaagctgattntcagtgcagtttcattgcaaatgttgagatgattacatggcatatacgatctctccgctgctctcaa

SEQ ID NO: 67652 - DNA, 346 bp, Oryza sativa
acagttctgtcctgttctgcagacgcaccgtgaaaaatgcagagccagtcaatcattcattcagaggctggtccacagtgattctactctatctctgcctgtcacaagcgagaatccaacgccaacttttccctcgtacactgcacaaccagctcgcacttgcctgattacacaacagcatgggtaatgcccactgatacagtacttccattatacatgtccaaacaagaacatggcatagttttcattgcacagcaactatttcacacgaagtttaaatgaagagatgagtctgtaagacaagaaagctcttttgcaaacatgattgataagacactgctccttc

SEQ ID NO: 67653 - DNA, 470 bp, Oryza sativa
  unsure (1)..(470): unsure at all n locations
catgcaagctttgggaatagcctgacgtaggggatgttattgaaggatgttgcgccgcttgtctacgtagcctccaaaaaaaagaacagaacgcttcaacaggcttcgcaagcgaaccaatggcttcttgacttggacctgccagggactacgggctagacgacagacctgattgatcaacttgtcagggtttggagcgtcgttcaggctatacacctggtagagcacgaggaggacaatataacatggaagcttactaaccacggcgagtacacggcagcatcggcatataacgcgcaacttcttggaaccaccgctaccaacttcaacaggctaatctggaaagcctgngcgccgcgcaagtgcaagaccttcgcctggttaatcatccaaaacagagtctggacctctgacaagctggcgacaagaggttggccaaacgggtccatctgcccattatgtcgtccgac

SEQ ID NO: 67654 - DNA, 423 bp, Oryza sativa
  unsure (1)..(423): unsure at all n locations
cttctcaacgatccacaaattaatctctacatatattttctttcatttcgatatagaatgatgcctataatggctgacanatatcttcccaaaatacccagtctacacaagccaagtcttcggcggctgtcagaaatactatacctaccttgcaacctactccatgtggctacttatgatccccaagataccatgtttggctccatgtgctagatagtagccctccaccttttagacctgaattagccctcaaggatcccaacaggtgggctaatttttcgctaaagtgaattaaccnccccccccctcanaacattaaccccttccaagggatgctaatggggctaatattgtgtgggaaccactcaaaaacaggtctctctctccttctctctcctctctttctactctctctccaccttt

SEQ ID NO: 67655 - DNA, 489 bp, Oryza sativa
  unsure (1)..(489): unsure at all n locations
ggaccttaagcagctgcagctgaagcttactagaactgatcttggtttttttttttcccgagcagtcttctccatcctgnggctgcggtttcttgtttccctgtaagaaaagctgttctaatttgcagctaattactgtaactgaatatgttcctgttgtttgctaatctttacaaactcccatctcacatgtatgcaggctggtgatcgctggctggttcgttctcgtcatcacaatcatgatgtctgctgctttcctcctcctgcacaagtaagcctgaatttttccgatgaagaaatgcattcgcagcgtgttcaggcactgacactgacagaactgggctggcagcgtggtcgccgacacatgcgtggccatggacgactgggtgacgcacccgcaggcgcacacggcgctggacgacatcctcccctgcgtcgacgtcgcgacggcgaacgagttcatgtaccggagcgaggaggtgacggtgc

SEQ ID NO: 67656 - DNA, 397 bp, Oryza sativa
gacaaaactaaaaagaatgaagcctatgctttgtgcctgattttttaaccgggaggaacgtgcccctacccgtggggctcggagcttggtttattgggcgcttgatgaaacacacgatgatgctctgctggtatcgtccaaacctgaagcgaatctgcccaaggtaggaaaccccgggatgctcatgcggctcgtgtcctgacctacaaatctatactcctgcatattgtatatcagccgtagctttcagagtttcagaaatgttacataatactccatgcttggtactacaactgatgtctatcgtggaagattttcatagtgtcgtgcatgaatctccgtggaggcacggatctatgctggcattttattatgcccaatcgcatacaggagtaca

SEQ ID NO: 67657 - DNA, 463 bp, Oryza sativa
  unsure (1)..(463): unsure at all n locations
agcttgagcggaattataggaggctatagtgtactaaattgtatactagaataggaagagagtagagtagaaggagtcagaagaattccggagttgtcggtaatcttctctcattttattctgttgtcggtaatttagatttatctcattagaattatctcttggttagttcctaaatagcgtacgggatcattgttcactataatctatttattttatagtgattgcttttttgttagatctgcactagagtagttattaattgcgtagacgcggtgtctaggtaattaatctccagtggttgctacgtatcccacagttcttttgaggtangtgtagaggtggtgatagccctcaagagcactgtcctccctgtccgggtacgtagtagagcgacatctgggaacagcgggttgccagtgcctaaagtattgcattagcattaaagttaagctttccctag

SEQ ID NO: 67658 - DNA, 417 bp, Oryza sativa
  unsure (1)..(417): unsure at all n locations
tctcgggagactcatgagcggtaactgccgntacttcctccgcatactcatcttctgggagagagtcggttaaggcgaacattgcccgcgagaatggaactgaacaattgttttctcccaaagttaccttgaggctgtctaatcgaggcgtgtttatgaggagttgctcaattggcagcccaatcagaatgtcaaagtcatggatttcaaagacgtggaaatccaagactgcctccttgttttcaaagaagacaggtacatcttgcacaataccaaatccttcaatgatattgccattcgggtgcttgaagaatttgtntgtcggagttattgctctattgcttangtaagcgtatgcaaatgactcggagacgagattaaccccgacagttggactgtataggataccaacatcgt

SEQ ID NO: 67659 - DNA, 280 bp, Oryza sativa
gggatagtatgtgtgtgctcacgtttatacggagttcaccaatcttaagctatgccgaccagtctttgaaagtgtttatagaaatagagcccacctgtgtgtgagcacgtagagcgtttttagggctagagcataacagctattgcacttgagaagctaaagccgctagctataccaagaacggtgtatattgggtcctccataggacatagtattacatattattgtgggtctgctcaccagcttttctcttctcactttgcccctctctattctcttg

SEQ ID NO: 67660 - DNA, 304 bp, Oryza sativa
  unsure (1)..(304): unsure at all n locations
caacaaaggaaggagtgaggcatctaagagaggaagggagaagaggagatgaggcaacgatgaccagaccatgatgacgcactctttcacccgccgccttgacctggtacctgatacacagatgtcaaccctggtacctgatacaatgcatcgatgctntaaccatttttagaaaaatacaccagatattacaataccaaattaatttcatcaaaatccgttattggattggtcaaaagttaaagaactntgatctangaaaaatctatcgtcttccaatacggaacaggaggagtatgaacta

SEQ ID NO: 67661 - DNA, 457 bp, Oryza sativa
caggcatgcaagcatcacttatcggagactgtcatcacctatgtctatggcgggtacgtatctcagcgaggtcatgtcctatggctgtcctcacctgcaaatcctcgagcttgacagcatctactcctgcgtgagagagctcaccatacacaccagctcactcctgagcttattcctcgtgtacggcaacgatctgatctgcaatggctggaagtggatgcatccaatctcacaaagatgccagtgaaggatcgcttcgacattgaattgaaggactcggccatgtcactctcgatgccggcgatggaggagttctgctacgaaggctgctgccctgaggaggtcaagctgatcggggaaaccggacgcctgcagaagcgcatattcgtcatcaatcgacacttcttcgaagcatattagtaagatcttggagctcttctcgagtacctgcactgat

SEQ ID NO: 67662 - DNA, 423 bp, Oryza sativa; identical to SEQ ID NO: 67586

SEQ ID NO: 67663 - DNA, 460 bp, Oryza sativa
  unsure (1)..(460): unsure at all n locations
tgcaagcttgantcaatccccagccattctgttgnggttgctgctatagctaatgatctggtagttgagactgctgtgctactaataccatccacagtagtaaagtaaggtgttctctataaaacatgtatatctcagcaataaacttgattaataataaaccaccttaatagattgtctacattgatatctatagctctctcatgcattgcctcgttgttctctataaactatctctaaattaatagatagctctgctctctctcttcatttaatatcttaaaagtagaaaaatatgctgacatggatctcttgtagagagcctatagataaccattgtgggtcccctaatttctccatgccgatataaacggtgcttgagttcttgctctcttcttgctttgatctcactcggctgtattttctatagaggggtactctggctgtaactagtactact

SEQ ID NO: 67664 - DNA, 272 bp, Oryza sativa
ctcacacgatataatcgctgcccgctaacctaagtttttttgagatagaaaagcgatgcaagattgtggagccaatttacgcacagcacatgacggtatacttttgagggggcctctggatgacgtgggattgaggtaggtaaaaaaatgttcaagataacatataaactaggcctatgccagaagagagataatgccatattactcgtaattgagaaatggccatttataatggctagcatatatgtactcttcagatatatcacttaagg

SEQ ID NO: 67665 - DNA, 419 bp, Oryza sativa
ctaaagctctgaccaagattggaggcagttgcaggtcaatcaggactggacccattctttccaggaggccatgtatgatgagcagtagaacgcccttcgctttccctgccattatggacgctcatcttcttttgaggtaagctttcctgttaggtaccagaggatgaggctggctttggtactaagtactcatcaaggaaaatgcttggcaggatggctcaatggttatggaattgtatcggtggacctggacaactttcagcgttcgtcctggccgtcactgcgagcgcgtgcgccgcgagaacgactgctgctgaatgagccacagacaattgctcgctgtgctgaatgagccacagacaatacgccctgtgacagttcaatctcatctgccaaatctgtatccgaattcagatgca

SEQ ID NO: 67666 - DNA, 352 bp, Oryza sativa
  unsure (1)..(352): unsure at all n locations
nttgcttaacgcactagctatccatcattatagacgcaaatgtcattatcatgcttgatgcttctcccttggtctgttatcattcgctattgttaacaaaatcaccagtacaatatctagccatctcacatgtactctttttctttccacggctctcacacaattagcagtgaactattatttcttttttttaagtaacggatagaaatccgatctctatatccaaaattggatatacacaatcaaatgttaaagaaatgcttagattccgacttaactaagagacaacaattttcttttttaaaaaataaatactactccctccgtcccataatataagggattgtgagtg

SEQ ID NO: 67667 - DNA, 465 bp, Oryza sativa
  unsure (1)..(465): unsure at all n locations
agcttgtcaggagaatatgcgagtactcttatctcatctgggaccattgggcttgatggggtctctcttctgcaatcgttcgtgctgatcacatgcgtcttcaatgcagatcctgaactgatttgcaaaccatccaaaccatgggagctgcagatgaatctggctgaaatttgaaaccaacatttggtagagctagaggagctacgaaattgcacagcatagctctgaattagccttatacatgaggaccccccggatgataagcaagattgtcaggttcagaagcaatgaaattccagaatactgtcaggtatggatgcatactgtgtacagtgcagcgtacagctggctcggatgagtggatctggctatcctatatgacctgcatacagtgaaccagtgctcactgatntgtacaacgatacgtcaactaacaggtttacaaacctagtagtacacttgagt

SEQ ID NO: 67668 - DNA, 441 bp, Oryza sativa
  unsure (1)..(441): unsure at all n locations
tctatgtataaaattcctatatagaatagacaatatatgttttcgtattaagtctacatgtacaaagtttatattcatgcatagaaatatcactagcatatgggccaaaagtctagcaaactaacatacgggctagaacacatggccagaaggccaaccattacgtgcagcccacgaacaacaccatacgaagaaaaggaaaaatcgcacgatcggaccgganaaagaaacggcagtgttgagcgatcgcgtactatatggacgtgactatgtangtagtgatagctcgtttatctaaactagctatcacaccatctataagagacattggtcttgtttggatcctccgagctattaaatagccctccggaatcttgctatttaggagtattaaacgtagaatatccgacaaaccgatttcataaccncaaggctattttg

SEQ ID NO: 67669 - DNA, 435 bp, Oryza sativa
cttgaaggtgtgttgcagctatttctgactttatatattatgttgcattttgggggtgaatataaccacaattttgtgctatataccatctgttagtcttctaccactatagtgcaatttaaagaatactgggtcatgtgttcactgctttgtgttacatatcctctatagaatcatattgccagtattccgctactttgttcatagagatgctttaggagtattagtaaactcttaaataaaatcaagtgtgagagaattttgtaagtgattttgcataataaagctgagtctcaataaagctagcagtgatagtgaatgtttgtctattgtctttgtgtcaggttccactggtcttatggtatgtttcaaataagtctgcatcacaatgctaggatcaacttgtactttactagaattgccatgttttatcat

SEQ ID NO: 67670 - DNA, 357 bp, Oryza sativa
tctaagcactgagctgcagcttcactgtcacaccctcatggcggttgttttcaccaactgtacagcgagacgcaggtttcttttctggcaaattattattcagatcatgggtcatatatataccatatactgtgtgtttaccttcgagacttgcccggatctacttccatgctacttcaatgctgtcacatagatatgttgctgccacattactgtatacattatatgacagtgattctcatactttattcattattttagtcccatacttaccccaattacccacacctttagaatgatatgaatgatatgatatgaggtacagcacaacttgtagacatatcgctcggtactgac

SEQ ID NO: 67671 - DNA, 222 bp, Oryza sativa
gaaatccatccaagtatcttacagtgccaccacacgggtattatgggataccccttggaaagtacttaattagtccatgattattttatatgccagtagtagtgggacacttggatgaggagaccaaattgtgtgtgtaatgagatatttggccatgtgtggccccttctctattggggcgatgcaatacccataggggtaggagcattcctagtgtacctg

SEQ ID NO: 67672 - DNA, 405 bp, Oryza sativa
gcttgagacgattcaggaggaggaagacgacttcttctactacttccacggcgacagcatgaggaggaggaatgctgtggctgctgccgatgaagatgagtgcgggcaccggaagctgcattactaggagatgcgggataggtacccgttactggtcgcggaggtggaggcgctcgccgccgtcggcgagcttgcgctgccgccgcacgtgccggggctccgccgcctggtggagctcgtcggcgggtgcgacgcgcggcggctggaggacatgctgaagaatgatgcgctcatgaaagtcgtgaccaacctccagcgccggcgggctaccgtgaatatgatgtctgcgctgatcaagaccgaggagaagcacaaatgaattcggcgagccgtctatcgcctgtg

SEQ ID NO: 67673 - DNA, 365 bp, Oryza sativa
  unsure (1)..(365): unsure at all n locations
gaacgacggcaccttccgcggaggcgcccaagccttcaagctggacaccctcctcaagctggcggacgtcaagggcgtggacagcaagacgacgctgctccacttcgtggtgcaggagatcattcggtccgagggcgtccgcgccgccagggcagcaagcggcggcggcggggggagcagcatcagctccatctcctcctcggacgacctgatcctcctccagagccagagcagcatcggcagcaacagcggcagaagcagcgtggacgcatcgtcgttggagcatgagcangacgagacggagcggtacacgcagctggggctgggcgtggtgtncagcctgggcgacgacctgcagaacgtgc

SEQ ID NO: 67674 - DNA, 367 bp, Oryza sativa
  unsure (1)..(367): unsure at all n locations
tgtaaagtgatgagaggactatcatggggctgggacatgatggtcccacccaacaaaacgacgcatgggggatgattcaacattcttgaagatgaaaacaatggttatttatttgatggggatggactattgagaagaaatggtgtgaatgacgagatgtanagaacgcaaatgggaccccccacgaacagggattgcacctcatagagtacactgctagcaatattgtactatgaaagttnttaatttttgagatgaaagttatcaaatttgagttgaatgtttttgaatctgagatgaaagtttttaaatctaagttgaaatttttcaaatcttgacttgaatttctttaaatctgacttgaaag

SEQ ID NO: 67675 - DNA, 432 bp, Oryza sativa
  unsure (1)..(432): unsure at all n locations
agcttatagctggctgtggcacaggaaccataataatctgtgagagtgacaggtggaccatatattaatagttaagagagctaaccactatatgagttggctaagagataggctataaagatctataaagtaagcagctggctatattattagccttgctcttatatggaggaaagagaagaggtagagaggaaaagcggtctacagatttatagttaactattgtatntataggctattaagttagttataaatgatttactattttttggagctagtaattcattatattattaagggcatgttcagatagtagctaaaataaaccttaccaaattttgtcaatgcctaaattgtggccagattgtaatattgccaaaatttaagcatgatttcttatgtatttaccaattttgggaacagattaaacgg

SEQ ID NO: 67676 - DNA, 399 bp, Oryza sativa
tgacctgcggctgcatcttgcacgctctgttatgagattttctcttcttgagtggtttggaatggtttgaaaagaagcttgcagacaggaagcggtgttacaacatgtttagaatgacccctgatatgttctatagtcttcatgatctgttgggtgacaaatatgagttgaagtcttacaatatattcaaaagtattgggggtttaagattggttctttggatggctggggcttcacaatccgtttagccagctgaggacagatttgagcgcctcctaagaacagtgcaccacatgtttcacaaggtttggcaaccttttaagctagtgttacatatttaacccgtgaccgagttacactttcattcagatgaggacctaggttatcttttttacactg

SEQ ID NO: 67677 - DNA, 414 bp, Oryza sativa
agcttgcgaattgcgattgtgcgagcgctcgctgtggtattaatttttgctatacctggggcgatggaaacgtaacgtactactactacgtgacctagggtgagagacgagacgagacgagaatatgagatgagatccaaattcaatctgcctctctaccccacgaaagaaaagattcttctcttcgtcgacgacccggcctctcgctctcgttgcctttctttcgcgctcagtctctctcggccaattaagctgtagatcgggcaccaccaccaccaccaccaccaccatccacagggcgctgcaagctgggccaggcctctctctatctctctctcttgagaggagagattaagtagggcatagagagaaaaaagctactcctaattaagccacagcttgagcagatcagct

SEQ ID NO: 67678 - DNA, 436 bp, Oryza sativa
  unsure (1)..(436): unsure at all n locations
gcatgcaagcttgtcgagaagattgggcgacattcattaagcatttgtggatttgggctagaacctaatgcggcggtcccaaaggctcaacagtggactggtcttcagcaaagtaattcggcatttctccgattattgtcgccttataaacaaaacaaatagaaaaccatgggctactgtaaacagagattgaatcaaaagtaaaagagttgtacaatataaataccaggttacagttgtcatgaaaaatatgagttaggtcagcagtcacattttgtgaaatgtttttattcaatatccaatggatcgtcaaattcagaccaaattctgaatcagatgttgcctctcttactctttttggaaatgcntgccttgtacttccccattccagtggagaaccatacttagcactgtcctgaacaatatcacctttgtc

SEQ ID NO: 67679 - DNA, 415 bp, Oryza sativa
agcttcctcggtgatgccctgctctccttctttcataatctctatattgctcctctatgtggatagcgacagcctgccttgacatattgtctccctggagcagctaatatctactagtagttcaggcatattgacagcactggcgagctgacctacgggcacaattttaattgtattttcagcacattttctgttgcatttttctttatcttagcacatattttggatgcattttcctttatcttggctgcgcgatcagctatgggtcaccatttattattattattattatttttgctggcaacccattatacatggggtcaccatggtgaaccactcaagtgtttatcgcgtgcacatgctagacgagcgataaccctgtttcactagctttcttaacacatattattaaagg

SEQ ID NO: 67680 - DNA, 430 bp, Oryza sativa
gcttcatactgaaatgtaaaaaaagggggtgccttcatggtaagcaaaaggtatataactgtatctgaccaaccgggaagtcctatcgctaaacataaaccaaatgtaccttatcctatcctatccaacagccacccaaaaatcaatcccctaaaatattcacccatatatagatgtggggaaaatgaggccaccggcgtgaaagattgactcacaggcgggcgagggtgcaaagaagagccttcaagtgatgcataatgcataataatatggtatataatatatatatccgggacacgcaacataattcacaatggcgttgatatcaatatttattacatatatttacactgtttctcatcgagaatgatacttcttaattgtaatttgtgagaatggtgaccataggatattaaacatctagtattta

SEQ ID NO: 67681 - DNA, 429 bp, Oryza sativa
agcttagatgaatctaagagaaagtattgagctatatgtagtctctcaaagccataacacaattctcaactaaggtgttatgtcattggtccttacaccagctcatctactttgaatttgccttcttcgcttggactaacgtattaactcactagatgttcattatgttggcaacgcgtattattgtgttgcagatagcatgttgtgcaacatttatgcagtaattccacagcctcctttgattctaatgcaattttaatatatgactggcagctgtcatccatccgtttgctgaacatttagcctatttcctgctattttcaatctccatattgccgccaatttttatgggctgtggttcttgcctggctggtgtcttgtacattacttacattgatttcatgaataacatgggccactgcaattttg

SEQ ID NO: 67682 - DNA, 432 bp, Oryza sativa
agcttgacatacgttctgttgttcattggagatttcttgttccatgccatcgcatgcaacttgacatatgatcttgactttcaccacgaaaccgtgaaagattgctccacctctcttcacgtctgcattctcctttccttattgaccatgactgaaccagatctaatgaacctggtatatgtgttgaactgccctctttgatagtcaaaacgtatctgtttgatcctgtcaacaaactgcaacccacgtccttgcttgaaacgccactcgcaggggtggacatctttgtctattgagcacctgcttattctaagagaacacgtgatacattttgctcagcatggcaaggcaagaatttataacgtgcataaggtcatcgggcaactcatgtggttctatacatgttatcagactgcttcgtttgatattgag

SEQ ID NO: 67683 - DNA, 255 bp, Oryza sativa
ccagacacacgataacataaccagtctgaagaaaacaatcttgtgacatgctaaaaccaaccctttggtaatctaattttgtcctaagcacaatgacggattgaccctgctaattagtggaatgaactacctgttataccataatatccacatagaagctacatgtggcaccatgacatcataccaatatacggccagaaattcgagcaagacacaatcaatccccagtctaatttgaccgaactagcgatgaaa

SEQ ID NO: 67684 - DNA, 435 bp, Oryza sativa
agcttctgtattgaaagaatgtaatttgtcatgttcataccatgctctctggagaaaatgtcatgctgcagaaagaaatgaaaagagagttatcttctgtaggacaaaaaatagctatagttaatttccaggtttagtttgaaagaacagtgaactcaacctcgacattcaaccaagtagaagatggtttgatcaaggatatgaagccggtgacagaaaggatgtcgaagttggagtcgaacctcggggtacgggaataaattgattgtgttactgtccaatggtggacagtgagtacaagacaataattccagatgctcaatacaactaataagtgtcaaagaaccaagaaaacaaaaggcactaggataacatccatttttggtcgctctagccggccggcaactgcagagacaagataggaatgcagtacgt

SEQ ID NO: 67685 - DNA, 427 bp, Oryza sativa
  unsure (1)..(427): unsure at all n locations
agctntgcaattataaagcatgtgtaagcgctatcctggataagacaggaaggctgcgccgntgacatgcggaccccacacgtcaacctaaaggaccgcggtagaccgggtacaccgagacggtccacgggtcgacggaagcggaccccgtgtgtcaaccgaggcgagtggccgacaaacggactccactagacaccacacgggttgcacacgtggaaaccacgcggctaccgagcggacacactaacacggacactacacggtcaccacccgcacacgtgaacgactaccgacaccggtacacgggtaccggggtcgacggccgcacaacgggtacggtgcgacaccgaaaggacgaaggcggggaaactagaggacggaaaccttaccaccacgcgacgaagcgtgggaacgacaacgaccaacg

SEQ ID NO: 67686 - DNA, 365 bp, Oryza sativa
agcttatatgactttatgtttcaataagcctttttatgctataaacctattaataataatattgttgtgctataaaacctgataagcttgtggtataataatattgttgtgataaaacatttttatgctctctttgttggattcttggtgggcaacttgaaacagcagatggattcgatttatgctatttgctctccataattaattttctttcctactgatatatgtgttgacacttgtgttctgtttggttcacatttgtatgctgggttgggcccacatagtataaacattttgtgtgggccggatagtcttacattgagtgctcagataggtttgggccagcttttaaggctttatggttc

SEQ ID NO: 67687 - DNA, 120 bp, Oryza sativa
ggatcattaagaattgaacagaaacatcaaactacctgagaagaatggggtagataagttcaaactaagctccaacccacataacgcattgagtgccaaagcatacataaaaagcttatc

SEQ ID NO: 67688 - DNA, 422 bp, Oryza sativa
  unsure (1)..(422): unsure at all n locations
gcttgtagattggtggagaggaagaagtgataaatgctaggctcaaaagtggatctcaaggctcaaaagggcaaaagatttggaatggaaccagccaccttaacttggggggtggagggggctatttgtagccacggcctcagatttgtccgatgggagcaaatattccattttttagaaatttctgaagtgatttttgaaatattcgaaaatcaccagagagcaaaaacaactttcaaaacttgctacaataactttggaattttccgaacagtacaaaattccagcacgagcacagcagaaaactgggcaaaaaagcatttcggaaaaaaatctgaaaacacccgtactgattttgcgccaacactgcatttcgagaatttctgaagcaattttcaaaaatntccgaaaacaccagtacc

SEQ ID NO: 67689 - DNA, 426 bp, Oryza sativa
agctttaaaacttttcataatatacatcatttaacagtttgggaagcggctaaaataacaagtggcattcctaacagaccaaatgaacggagccttggtccctcaaaatggacatctccttatttcttacgtatcatccaaatgaatcttgttaatttttttaaaaatatatataactatttaaatgacatgcaagaccaaaggataccctataaggtattaattttttttgccattatctactgtgtattacgctcatcttaaaacactgtatttttttttctttgagatgtttaaaggcacagaccacttatttcacaagcgcatatatagtttggtcctcgtgacatctaccccctctatcccataaaaaccatcctaaaccatcctagtactgaatgtgacatatcttagtattacaaatct

SEQ ID NO: 67690 - DNA, 429 bp, Oryza sativa
  unsure (1)..(429): unsure at all n locations
gcttgagctgctgcgtgcttgggtactactactagctatgcgagagcatgaataagtaataataataagtacttttatctctccagctaaatatataatgatgagtgctttttaatttcttcttgcgctctgttatatatatatgtgattatctctgacctgatcatgatcatcgtcgtcatatactcatatatctctactcgaactcgtggtatgtatggttgttgattcgatcagctgtggtgaactgattgacccgttacaaagattgcaaactggatatgtatctgcggctagagaatgggtggtataattngagatcttgaatgggtgttgcttaagggctccttattttccccctttggaatgaattgattattgagaacattggagtaagaaaaaaaaaagaacttggaaattagatgtcac

SEQ ID NO: 67691 - DNA, 425 bp, Oryza sativa
  unsure (1)..(425): unsure at all n locations
gcttgccgacatgtgagacccctgcaccggcgtccctcgctggccagccttcgtgcgccgaagaccaccacacccaccggcagcttctcctcacacctaggtcgcctnctccaccgccgaccgcgcctctctgccccaagccagcctcctccaccggacgcgcctctcgagccgatccggcctccctccatcggctgcgcctctcgcgccaagccggcctcagctgccatcggctgcgcttctctgcaccaagccggtctccgacccctccaccaaacgatgccgcgccgaccagatgcagccgtctcccacgccctcggctagttgatttgaaaaaatgacgacttataatatggagatggactatctaagaaattaagaagcacagacagacaaacaggggcggagataaagatgggcacctt

SEQ ID NO: 67692 - DNA, 427 bp, Oryza sativa
  unsure (1)..(427): unsure at all n locations
tgcagcttgtagttntgcctatcagaggaggatgtatattgtatccacatgttttgtgtcctgagagtttggggaatgctcacgggtggattgctgtatgcttccagctgccaagtgaagcacgaatttagttgggagactttgtgttaagagcatgataggattttcagatcagcttcaggcactggcggagccaggatttatatatggaaaggacttaagaaccttgaagtgggcaaatacactacctacttaggttaattacctaattagctatgtgattatgtgtgaaaatatattttgtggagggggccaggccactggccttcaacaagttggccctcatgttacgctaactggatggtgtggaacggaaatgtattgagtttcctgaatagtgattaacatgctatctattctgggcgat

SEQ ID NO: 67693 - DNA, 384 bp, Oryza sativa
gctttctgtagcataaagcatcagcatatataacagtattttcatagattgaaacgatttctcgaggacatattcctagttaactagcacggtagtacctatagacatgaacaaagcactctacgaatgagaatgtaacaagatctatttcacagttaacacaaacctttttcttgacgtgtgtgccaaattttgtaagtgcaggaggaacgacctgaccagcctcccgcaaaacattgacaagttcaccagcaagtccctgtatatagttttgaagtgacaataagtacaacttaagttgtaagggctaacctaagggctaacgtgtggcacataatctccaataccttgttctcttgagtgaagaaagtatgtgcaacacct

SEQ ID NO: 67694 - DNA, 435 bp, Oryza sativa
agcttggaaaagtacttgtatgggcaagatggtttgttctctttggattggggtcaaaggtttcacatcatcaaaggaatcgcgtctgggctgctttacctccatgaagaatgggagaaagtagtgattcatcgagatgtgaagccaagcaacatactcctcgacaacaagatgaatgccaagataggtgactttggcctctcatggttgcacgatcatggagccaatccacaaactacacacgttgttggcaccatatggtacttagctccagaaatagcattgaccggcaaggtgactccactcgccgacgtattttccttcggcatattagccctagagattacatgtgggcagaaacctatgaagcaaaatgcacaaggcattcaacaaacgttggttggttgggtgctagaatgttggaaaaaaagatca

SEQ ID NO: 67695 - DNA, 423 bp, Oryza sativa
agcttcgacattaatgtattcaaccatgtgtaacatatacaaatcctagcttcttatatttggtatatggagggactatgttatttgcttcatccaaaaaccgacgggtaaaataaatttatttatactacaacacctacatatgctcagagatgataaatttcagctatttttatttgctctatccgtaccaaaatataccaactagtaataaattagatataataagtacattgtgtctaatcccgtatttactatattttcggatggtggaaaaaattattggtaaattatttatgctgatatgtacttattatacggataaattaaatattttaagaaacaaacttgcaagaaaagcttaaaacaaatagtctatataatttaagtaaaagaacttttctctgagaaaacatatattta

SEQ ID NO: 67696 - DNA, 322 bp, Oryza sativa
tagtacatattgatgcaataaagatgatctatatttcagaacatctttagtgtggttttctctggatccccatggtcacactgcgacaaagggattgaccaacaaccgcaatagttttggcagcgaccaagctgtttaccacagagcatctcggtccaccgacgatactaccccgtttaacaacgtccacacatcgatagaacagatctccttatgtttgaggtagctttattccagaaaagtttggttttggtcacccacctggagacttggttctgtattcatccattacagtggtatagaccacgttactcttttaact

SEQ ID NO: 67697 - DNA, 419 bp, Oryza sativa
agctctgctggccacagggggtctggtgttctttatctacgtgagatgctttctggaacaatgcacccacagccagtcaatgcggaccctccaaaggcaaagccatcatcagagatcgtgaaagtcacaaggcgtgaaaatgcagatgtaatgcctgtacgtcaaagtaagaaagtaccaaaaccgacgtcatcgaagaagacatctcaaccgacagtaagggttatgtttgttgtaatgggtgccacatgtatatagttttccagtatttagttggatctcattctcacgtgtgtgcaattagcttgagagactgcttttttggtgactacttttattttgatgtccagaatgaaacttgtagtaataggtttgagaaaatttcttatttaccataatatataactccaatcccttat

SEQ ID NO: 67698 - DNA, 409 bp, Oryza sativa
agacttttgctctctcttatttccattccgtcttataacgctgggagcatatggaaaggaaaaaaaaaaaggataaaacaagatttggtgttaacataattaataagaatcttgaaaaatggtaatccctaacataggaatccacgactgaatacaataccaataatcataaattaattaattgaccaataatattgtttagttattagaaaagtgcagcccagaggaacatctcgaccattcatctccctgaacaactcgacaggatatgatcgtgtccttcttcggcctcgtcactgaagtagttgctcgccggtgtgccgatggccgcgtcattcatggccgtcccttactgttcccctcaccagctttctttcctcgtacatggctccagactccatcaccatcg

SEQ ID NO: 67699 - DNA, 412 bp, Oryza sativa
agcattgcaagtgtaggtgatgatctgattcttctttctaagctgcaacaatgcgtcgaggatttgtagaggcacaagaccggtgggattccgtctgcgaattaatgtttgagttggggtgtgtagggtcgatccaccctttcgtctctcaatgtgagtgtgtgacccatcgttctgagaagaaaagcgcatgcgggtgcattcgctattgaaaaggtgagagggtgtttggtttactaggagcccaacaagtgaaatgcaatttactgagtgttcaactgatcgtctgagggttgtttttctttatctattataaaagtttaagatgtttttactagaattttggtacgtcatctgtgtttaaaacgggtttagttttatgtgtcccgttaatctatatctctacgacaag

SEQ ID NO: 67700 - DNA, 438 bp, Oryza sativa
  unsure (1)..(438): unsure at all n locations
agcttggggagcgctntaccttggcaagcagtagaccatcttgatcacgcagcgngcagacaccatggtatatgtgagcatcgtagccacgcgcgtcaagccggccgatggagatgatattcttgcacagcttggggatgaaatacactgcctctagcgagcgatgatctccattcttgcactggaacaacacggtgccgcgtcccctgatgtccacaactgagccatcaccaaacttcacagtaccaacaacaccggtgtcgaggtcagcgaatgccggtcatatgattggtggccccggtatccaggaaccattccgtggtgttgtcctcctcttctgcaacctcatgatccagaatcacctttttctcagtgagatgcacctcgtgcacaccaggtgttcgcccgagtgtctcctcaccggcgagagacaccccc

SEQ ID NO: 67701 - DNA, 431 bp, Oryza sativa
  unsure (1)..(431): unsure at all n locations
agctgcattaaacacctaaattcccgtgacttgctgagtatgaaagtactcacccttgctctatataaatatatatagntcctccatcctgaagttgaagatgaagtaaagtgaagattaagggtttcgtcctggttcccagccgtcgcctgtggtgttgggtgttaaaccgttggttccgctgctgctgctgttgttggtgtttgcctcatccatgtcgtcggttgcattctcaggctgttctgagctgcaacctatgttaaggtaataagtcctctatttattttaaggattgcaattattcatatttgtcaccgtgggtaccagcactatgtcctgngactggtactgagatcgcggtttcgtaggaagcggttcacgccgtttttcctgcgacacgctcctatcangtgccgttgtacggcggtgcc

SEQ ID NO: 67702 - DNA, 426 bp, Oryza sativa
  unsure (1)..(426): unsure at all n locations
agcttgtgtccangaagtttactaatctacgctacttactctcgagaagtgtaccaggtttcgcggttttgctaggtttaccctaatttcttactagcaaattcaagattaattcccatggcgagtttgaagtatgatctaccgctcctggaccgagacacaagattctcactgtggcaagtgaagatgcgaaccgttcttgcacagcaagacctcgatgatgcgctttctggatntgacaagaggactcaggattggtccaacgatgagaagaaaagggatcgtaaggctatgtcatatattcatcttcatctatctaacaatattttgcaggaggtgcttaaggaggagacagccgctgggctgtggttgaagctggaatagatatgcatgactaaggatctgaccagtaagatgcacttgaag

SEQ ID NO: 67703 - DNA, 433 bp, Oryza sativa
  unsure (1)..(433): unsure at all n locations
agcttcaggaaggcacagattcctgaagggattattgttcattagaagagagagttccgtgcgctccagcaaggaaccatgtcagttacagagtacttgcatgagttcaaccgccttgcgcgctacgctcctgaggacgtgcgcaccgatgctgagaagcaagagaagtttttgtttgggctcgacgatgaattgaccaaccagctaatctccggagtctatgaggactttgagaagcttgtggacaaggctatccgccaggaagagcaacgcaacaaaatggaccgaaaaagaaaggcagctcagatcagctttcctcangggaacaatcagaagcctcgcttcatgacgggacagctaggtgggccttccaccctgatcgtctgtcagcaccgtccctatcacccgagtaacttcgacaacgactacaacg

SEQ ID NO: 67704 - DNA, 433 bp, Oryza sativa
agcttgttattttttcattaaagatatgatgcgagctcatatatatacttagttgcagctaacagttaagttccccatggcagtgcaagacctggtttgtggaagctcaataaaaaaatttcaactgcaatgttttcagcttgaacttgttccgtttatagttgaatgttaaaagaacttaaactgaaaactgctaatgtgtaggaataatggaataaaatatgctaattaaatggaggttgaatgtctacctcagtaaagccaagattgatgaggtaggagaagaattgaccaccagtaatcatgagtacattagttgacaccaaacctcccctaatttccgaaggagcagcttcagcaatgtaaactggcgctgtgactgatgctatacccacacccaagccaacaagaagccttccaagaatcagaatgt

SEQ ID NO: 67705 - DNA, 424 bp, Oryza sativa
  unsure (1)..(424): unsure at all n locations
agctntagcttctaataattggtaatgggtattaccaactatatagaaagttagatatgtgatatatgctttaatggtgtttttttaagtatattgcgttagtaagtgacaatgacggtggatattccagcatataaatgagatatgtaaagcagaacttaaaagtataattgcttatggtatattatattcccatagttggagtacttggtcactatctataggaataaattgttggatgagcgtttgagaaaaatattatatgattattagacgattcttcaaggaaaaaaagaacgattatgtgattgttggtttagagggaaattcggaatcatgtgactcgattcattattatgaaaagcagcccacatgctttatctaaataagttgaattcacatgctattattttaagtcgtgaca

SEQ ID NO: 67706 - DNA, 376 bp, Oryza sativa
  unsure (1)..(376): unsure at all n locations
caatatactaaaacaacacacttnaaatacaccactctcattagaatgctcacttgctgaacaatggcagaaacatagacagttctccgcacactatcctccctatcagcgcgatcagatcggcctcccatcctcctccttccctgggtgaatgcactacttctctgttacaaccaatccacggtcaattgatcatgaaagcatatcaccaccagagtcaatcaatcaataattcaatatgcgcacaattatcaatacactagtgcttgctctgagaatcaacagccgagaaatgtacggccacaaaaaccaatcctaaaagacatcaagcacagtgctcatatcacatcaacaaataaatacacaaatccaatcc

SEQ ID NO: 67707 - DNA, 433 bp, Oryza sativa
  unsure (1)..(433): unsure at all n locations
agctnttgtcccaagctccaccaaaatcaattatctctgctctcaacatatcttccaagatttgatttactcgctcggtctgaccatctgtttgcggatgataagccgtgctgaaattcaaacgagtccccaattcttcttgcagtttctgccaaaattttgaagtgaactgactccctcgatcagatacaatctttttgggtaccccatgtagacacatgattctcgagaggtagagctccgccaaccttttgcccgtatacgtggtatgtactggtatgaagtgagcaaccttagtgagtcgatccacgactacccagattgaatcgtgacccgatgatgtccggggcagtcctgttataaagtccattccaatctcctcccatttccattccgggatttgaagaggttggagtaaacctgctggtctttg

SEQ ID NO: 67708 - DNA, 427 bp, Oryza sativa
agcttgaagctgcaaaattatgcagaaccatcagtggtgccacacttagcatataacttcacttggctaacaaacatcctacaagatagcatttggagaaaacattacccattcaatgcaccaaccaagggtgcaggcaagaaatgtctcctccttattcagaacatcagtgcccttcaacatcttgaaactatcaatgacagagatcccgcggttgcactttcctccgagcacattgtaatccagcatctgctccggataaaaaaaaaatgtcaactactttaacatactcaaatatactgtatgtccaatttctgtgggtatgattctgatatcaatacacaataaataacaatggtaaatggaaatggaaatggtaataggtagaggataaaaatcaaacaacagaaacaaaccatcagcaacc

SEQ ID NO: 67709 - DNA, 414 bp, Oryza sativa
agcttgatgcaaatgattcaacaacatctatttcattcctaaggatcataaacaaaagataaatacatctagccttagaattatttgaatagaatgctgtcaaaaaacaagaatttgctgacgtgtttaaaacatgcgataatcatcatcaaagacattctttttgataattcatcatataccacagttcaatctagcatgtatatctataaacctagaataacataaaaaattacaacgagcaatcagcgtagccttacagtacatgggcacattattagcattcgcatttacctctcacccagatgtccaatgtagacaaggacacttatgagaccccccgaactgacaattctgctggcagcttgcaaagccagctcagttgtcttagctacagtgatcattgatttatct

SEQ ID NO: 67710 - DNA, 432 bp, Oryza sativa
gcttgaggttgatgggttgatcgaccgactaccatctctattatgatacatatactaacaaatgcgaattgcatcatttgcaatggaaaataaaggctacacttaccacttaattgttcatcaagagtgatacgctcacgactccaatcacaagatgcacccaatcgcttaatctgattaatgatagtgctcccgtacctggaaaggaaacatcatttggagtgattgctacaatttataaaatatggaaccttcttgaatcatgattttttttatcaactataatatgtattattccatcccaagttcatgatagttgaactggcaattcagaataataacacaaggctggtcatctagatgatcaaattattatgacaggtaccaccctacacgattatgataccacaagatacttataaactgtatgca

SEQ ID NO: 67711 - DNA, 431 bp, Oryza sativa
agcttgaagaaatatctcctctacattgtgtcttatcggtttagtcaagccgattgggagatggcccattccaaattgcctggccgagcttatcggatggtagaactcataagaaacctgaatatttctcccttgatggatactaacaagaagaatgcaggggctaatggtggcagcgaagaattctctaaacttttgatatttctcatggttgatgtcttcaaatctgaactctgccagcagatctaaatccgtcgagtctgcatatggaaaccaaactcgggcattcttctgaaatccatcataaaaactgaagaaccagtccttcagaaactcagccgataactttgctccagcattggctggtgtggatgcatactccccataggacatacacctgcagtgggtacgctcttctccatcattgtctg

SEQ ID NO: 67712 - DNA, 424 bp, Oryza sativa
agcttcccagccctttcactttgtaattgctgtactgatcaataaagccgggttctttcaattgcgttttaaaccaagtgaatttaggtacatcatttcaactggctcccgatgcagaagttataatcataaaaaaatacaaggctttctaagtaaaagtgctatagtcccgtgctccacctgcatgcacttacctaaatttttctcttctgcgttatcagatggcaggcaagaaacatacaggcgttactgccctttttttttaatcatatcatgaatttagtaacataggttatgttcatgaataaaatcaaagaagtttgagtagctttgcattgtcatgaacaccacaataatccaagcatccatacaccatggccttgcatccatgaattcttagtatagttcatgcacatacttagat

SEQ ID NO: 67713 - DNA, 426 bp, Oryza sativa
agcttatcttaatgcaatttacgtcatcattttgttatcatttctctcgatgattcctttttctcttttgttcatttctgacagggggacatggggagtttttccttttcactgtataaaagtgataattctgcctaattgcctgatcaatttttagaactcggtgacacttgtgctattaaactgaagcctttttttttgacaatttttaggtgggtgagcttgttaaaagagctgttccgcttgcactctcaccggagaacgattcaagaaaagaagagctgaagaagctccatgagaagaaggaagagatcgacaagctggcgcacaagcaagttcggcgcatcctgtggtctggactaagtttcttcatgtgccaagttgggctcttcttccgccttactttctgggaatcttcatgggatg

SEQ ID NO: 67714 - DNA, 331 bp, Oryza sativa
cgtttgtgtaccctggctgggtctggacaaggatttaatgcatattcagcttagaaattctgggtcgtgaatttctgggcgtgacaaccagccaccacctccacgccggcaagcctcatgctgctgcaccggcacctcagtcgtgcctccacgcactgcgcccgggtccgtcgccaccggccgcgccttaccggtctccgccgacgccagccgctcctccgtgcgcgcgctgcctccgctgttgtcgccgcgattctcccggccgtgttttaacggccccagcgggcgtctctttcgtcgccgctgattgccacaagcgcgccagccttct

SEQ ID NO: 67715 - DNA, 429 bp, Oryza sativa
gcttggctgctgctcctttgatgaggagcattcattgtctatttccacatcatccttggcgacaagtatttaagctaatcaccggtgatctggccggccggctgttattaatcgacgcaagcagagtggccactttgatttaggcgtacggttgttgaatgttgatgatcgatgagttcgaatgtttcggttttaatttccatgcatgatttgcttatatggtcatagaaggcggcgcgggcgcgcggttgactggcttgacggacatcgagaattcgagatcaagaatttaactcagacgctcgacaactgaatgttagacttagaccgaggtccccgactacagcgatcctcctccccaacgcggccaacccctcttcgcagcggacggacacggcatccgagggaggcaaagacggcggagaacaa

SEQ ID NO: 67716 - DNA, 382 bp, Oryza sativa
agcttctcgggttcttggtctctgcccgaggcattgatgccaaccccgagaagatacgagctatagaacggatgcgcccccccagcaagcttatggatgtgcaatgcgtcaccggttgcatggccgccctaagtcggttcatatcgaggctgggagagaaggcgctacccttatttaagctcctcaaacgctccgggccgtttacctggacggaggaagctgaacgtgccctcactcagttgaaggcgtatcttagctctcccccagttctggtcgccccggagccaggtgaacccttgctactctacttagcggtgaccccgcaggtagttagtgcggcgttagttgtggagcgcgatgaggacaaccctcatttcgcgca

SEQ ID NO: 67717 - DNA, 373 bp, Oryza sativa
atgaaccggcgaccccctggagacctgaactggaacgaggggacgaccaacatgaccgccagcacatagctcaccgaaccgggagaaaaacgcacccgcaccagcgccacgtggtaaaagtggccgacaaagacaatcacaagcactgggcaaggaatccgacacagaaacccttgaagaaggcatataagggcgacacggacaacacactaaaaaaactagcaccctatcaacactatcaggaacagaagaaccgtagcactacaagttggacgatgaagtacaccccgacccggatacactggaacaagaaagcaggaggccaacgccctagccaccagaacacccagcccagcccgcaagcaagacgaca

SEQ ID NO: 67718 - DNA, 430 bp, Oryza sativa
agcttaagacaatattattaaaatagccgatgttacattagagcaagaaagataatatactagctaatactctagtacagatctatatgggcaagtcaatctatagtaatataccaaatataggtcaatagccaatattgatagcccagccgatatgacctagacttgatatattactattaggtgatatgtctatatagatggaaaatatacatggaacagataaggaaacatatatattaggtaagatcagctgaaaccccgatactaccatattagcaatcaagaagaaggctagagatcatggttctaaacatgacttagtaggtccaatgtactgatgcagcactaagtatgaaaagaaacacgatatctagacaatcaagccgctgactgaattttcaaggtggtaagacactacgccgatatt

SEQ ID NO: 67719 - DNA, 434 bp, Oryza sativa
  unsure (1)..(434): unsure at all n locations
agctttacatgcatactgcaatgatcctatatttctctctttgggaagntggaactgttgtttgttgaatggagttcaatcctttaacatcccgttaaagtttgtggcatactgtatgtcaatcactattggactgccacctcatatgagagagtacacatcatgccgctcaattaaaatggttaaaggggaaatatctagtgaaaaccatcaaataaatgaaaacctgtgaaaaccggaccgaatctaaattcataacagtttcctattactgttcacctgaaatttgtcttttttgttcctcccaaatgaagttgagtttttacttaagatttggtgggaatgttgcctctagtttttttttcatgaatttagagaacttttaggtccggttttcacttatttgatggttttcaccagatatgtccacatgg

SEQ ID NO: 67720 - DNA, 430 bp, Oryza sativa
ctttactcccctcaattgaactgccagaagcattgctattttcggaattcaacttattttcaatggctaaacggtaggcagttttaactgtaaaaataccaaatttctccaggtgccatgccaagaaatcatcttccccttggcgtgatgtgcgaatggacagaatagcatccgcatccattggaagaaagatttgtctaactaattgctcattccagtttgtgtttgcatccaacagatctgccacccattttattctgcatcttccttggctggttatcactttacgagttgacgattgtggatattatgggtaccccatacccatacggcatggttatccgactagtcatatgggataacttatatctatggaatatgtaatagatcataactcgggtattacgtctccttatatattacggaacag

SEQ ID NO: 67721 - DNA, 437 bp, Oryza sativa
agcttcaacacatttataatattttagcagcaatcttacagtatgatataaaattttactagaacagtttcgggcaaaaaatacaaactcatagtaaaagatagaaagagtaatcaatcaaccagacatcagaaaagcagataatttggcgatagcataccttcacccagtattgtgctttgctaaatgattctggactagttatgtcgtagacaacaactgcagcagcagctcctctgtagtaaagaggtgccaaggcagcatacctaaaattggctggtaccaatgagttcttgattgagaaaaaccatatgcatgtgtggcacgtaagatggatcaattgtaaaaatcagtaacacatactactagaactttctcacaaaaccaatgcttctaatgcaccaacagcatgccattatcccaagattggaagaagc

SEQ ID NO: 67722 - DNA, 242 bp, Oryza sativa
ggtgcatggacaacaatcattgcccgtaaatgggcacgcccgggggcacaatgtgcacgcggacgataggcatgggcaacaatcaatggccgtcatgtatgaaccggcatacacactggtacaaataatatcacgggcacggacgcacgggtataggtaggcactaccatggcccggcacgccctgttgccatacctattatgactgcggtcatagaaaccacaccatatggcaatatgagc

SEQ ID NO: 67723 - DNA, 429 bp, Oryza sativa
  unsure (1)..(429): unsure at all n locations
agcttgtactagtgaaactgaattgccaaactatataaagtaagtttgcttcttatgtattgccatgatatcttgtccattagaacaattaattactctgccttttgctctgttngatattattaagatgtttaattgaagtttttttaaagctaagatatgtatgcccaacagttggggtttattacaagttatatcatttaattgtcctgatgtcaatcaatgccaactccaatatattagtggactagttgattgccatgtgttgaacatgcattattgttgtttcaaaatttgaaaatttcacaaatatttgcacagaatttccagatagtagataatctcaacacaagtgaaattagtagatgatcaaatcctttttgcacaatccgacaagtaatacacgtacatacatgcacagatatcacg

SEQ ID NO: 67724 - DNA, 432 bp, Oryza sativa
  unsure (1)..(432): unsure at all n locations
agcnttgagaatgtatntgccacgcttggagaagtggctctttgcaaagtcctcgaaatgctgcatcaatagtacattaaacaatcagaagatcaaaagattgtaaaaaaggtatagttaagcatctttatgctactagcatagtaaagagttagttttactatatggcaatgcaaattcttgctgtgtctgctagaagaatcacggattgcaatgggaacaatggaatgaatgtctgattcaggatttagcatccaaaataaactacataaagatatagacatgttgatctaacatgcatgtatctggcttatgataaacaaaggctcaagttggaaagagaaaatatctgagaataatataaatgaaatagctctcgaagagggaagagctgtgttaccattggaggtcgcctcaagatatacaacatgg

SEQ ID NO: 67725 - DNA, 435 bp, Oryza sativa
agcttaacatacatatagcatatcatgtcatgtgttgcaataaaaagaagatgaacccatctataatataataagcatgcattaaagtataaccatgaatcaaagattttacaattaagcttgaatcaacaataaaaattcatgatttcatacaatttataatgcaacatcttaacaagcacataggttgaaaaataaacgctaaacacatatacctattgcatttatcactctttcttaaataacctttagcacaacataacaaagagaatttttaactttttcttttcttgagcctttttctcatatttttctcttttttttattctgagtacgtccctgtcgtcaagactgtttccagggattcggcacccattattttactcacatcgaatacgtctttgtcgtcaagactgtttccaaggattcggtatt

SEQ ID NO: 67726 - DNA, 430 bp, Oryza sativa
  unsure (1)..(430): unsure at all n locations
agctnntggaggatgtcaagtctcaaatgagtttgattaatatattcatgtgattaagaatactaacaagccggcttacattcattattgcctcggcctgcttttctctgaacctgatgcagccatgcagctacaacgcgtgaatgctgtcaccgtgtacacttcaaaatacagtgcatcgcgtcatgtggtcctgtcatacagtcatactcctatgcaaaatgaacaaagtcaccaattatcaaatcttggaaatcctagcagaatactagtactagtacacgacattgaataatccctccgggaaaaatgagaaatgtaacagtaggtcagcctgaagtactggataatttattttcgttttgcaagctgcagtccgtatttcgtaagaagtacacagctcttgggcagcaattgctagccaagaatc

SEQ ID NO: 67727 - DNA, 415 bp, Oryza sativa
  unsure (1)..(415): unsure at all n locations
agcttggcgcacacgaaagaggacgagggcttataaagacacgcgcaccccctacctggcgcgccagatgacagagcgtggggctcctcaccgggagaccgcgcaggcccccctttgccggttcggccgggggcgctaaatgaggttcttcgccctcgatctgaggaacgtcagcgagagaggaagtgcacaagacacgggcgacgtatacaggttcgggccgctgagaagcgtaacaccctactcctgtgttctggtggatctgtgtgtgaaggaatacacagagccggagagcgagagagagttcatgctctataaccccttcgccagagtcccaacccctctttctcttttttctctttntttcccctcctaggcctgggccttcttttgatctggtcaggggtcaccacat

SEQ ID NO: 67728 - DNA, 426 bp, Oryza sativa
  unsure (1)..(426): unsure at all n locations
agctntgctacttcaccgaccatgacgtctactataacctcgacatctcggcatgcgttaacaaatataatgccgtgttattctactacaacaagtggttctctaattatcaagatttctactcagacatcttcgacacatatcttcactcaagtgatggctactcgatgacaagaagctacagttctcgactctatgttcagttgctttccaactaaccaaagagtcgggggctacacaaatacaagactctcaaaattcgataagctgaagaaatcaattaatcagccaacgagtcaactctaggagtcattatcttcatatttgcttcggagcagacattctacttcagcaactccaattatttcaccggcaattttggtttctggacgctgccataattaaagtatcaaattcaagatttaa

SEQ ID NO: 67729 - DNA, 431 bp, Oryza sativa
  unsure (1)..(431): unsure at all n locations
agcttctatgcccatttgcgggagatttacttttatccagcaaaaaatatatcgaggtacgatcctcatggtattaaatcgtttccgatccttaaatccagctgggcagaatggcattgttagatccaacaattggaaacaatttggtatcgcgagatatttgtacctcgagatactttttgttggaccggagcaaatctccatttgcttatatgccaaaccatggagatacagacaattcatcactgatctgccagggttgaaaacaaggaattccagttcgatctacggtgtttgtatccctccacatccattcatatacaatagccagtgtcttcgtcgtatacgtggatattgtctgccgtttacgtccgttgccttcttattcaattccatccattttattntctctgaccaattggctcaattgg

SEQ ID NO: 67730 - DNA, 420 bp, Oryza sativa
cgtggcaatggcatgatccatgtgcccgctgcttctcggcgtgccagtcttgtctatcattgacaggaaaatttcgacgcctcgagcttgctgtgctttttgtttgactggaggcacttcttgtgcttcatcaagccccggttccggtagtttctcctgttaaacaaggcgcatttgagagaaaaaaaaaaaggactagtgctcaatgaaaatagctccaatactccaatgatcatattgttagaaaagatgtttaccattagagcagaattctctaatctaagtttcttggagctttccgttagcctgcttatttcacgtctaagggatgtgttctccgcagtcaatagctcaacttttctagccagttcctcagtctcggcctggtagaatgaaagaatatcattattggacaagtat

SEQ ID NO: 67731 - DNA, 224 bp, Oryza sativa
gccgccagagctataccggcaagccagaaaggaccggagcatccggagatcagagatagcaagttgaaagcgaacagcttgatgagaatacctcattaagacaagctctggccgggcaaacgaaaataaacggtccctctggtgggagatgatactgtcaagtgtcaacaactagagatgaattagccgataccaaggagaagagaaatcttgatatggattaa

SEQ ID NO: 67732 - DNA, 389 bp, Oryza sativa
  unsure (1)..(389): unsure at all n locations
gggcccatgatggtggggggccaatacctaatactagtagtatagtattttatccgatgttaagatcaatgaattttattcggaattaaaggtggtacaagtgagtttgccagattcttcgatgtacgcgcctgagattctgaagtttgttatggatgcagatttctatccacatgtttcagttgcctatcaaattctcttaaccgtacatgtgacggtagtttcaggtgaaagaagcttctcaaaattgaagttgttgaagaattatttgagatcaactatgtcgcaagaaaggttaaatggcttggctatgtgctccatcgagaatgatatcttggacactattgatcttaataccgntctgcattattntgcatcaagaaatgtcc

SEQ ID NO: 67733 - DNA, 443 bp, Oryza sativa
  unsure (1)..(443): unsure at all n locations
nagcttctcgcggatcaccgccgcggcgacgatgtcttcttattcgcggaggcgcatgccaagaatgggaaggggaagcggcaaaagcgcaccgttgatggcggcggattctggcacgggcaaaacacttgcgtcgacggcgagaggctttgcgttcccgacgacagcgacagcagctgcggcagcggcggcggcttggagatcgcgtggcgcaagtacgtgctcagcttcttctcgaacagagagaggggcagttctggatgggtgatgcacgagtacgcggtgacggcgccggatggcctctcctcgtcccaattgcggctgtatcgcgtccgattcagcggctacggcaagaagcgcaagatggagccccaatgttcgggagcccaccgcgacgacgacggctagctacaatgcgcgccgcccccgcgctccatggcgga

SEQ ID NO: 67734 - DNA, 427 bp, Oryza sativa
agccttctccctgggagatgattccaaatctatatttgggccaggtgaccacaactctactccgtcagcaccactattcatggaagccgcacctgcctctcctgcagttaataaaagcagtgataccccctcgctcaacttgaactcaccatcttcatcatcagctggcagtcgggggcaggatgcgtcaaccccttccacttttgaagaaccagaaagaaccatggaagtttcaaaacctgcttctgtcgctgctgccacttgcccgtccaggccagagcctcctgagactggtactcacagaatcgagttctccgcggtagatgacatggatactggatcttgtagatcacctgtgagggatactcctgaccctgacaatcagaagagcgaattgtctggatcacgtaatacacctactgaactt

SEQ ID NO: 67735 - DNA, 449 bp, Oryza sativa
  unsure (1)..(449): unsure at all n locations
taatcgactgcagcatgcnagctttcaaggctgtatactcgtaatattatgtatgtaacaaattaaaaaaaatagtaagtctacgatattatcacctctgatgttgtggaacttgactcccatgtcactctctatagagatttaggagaggcaactgtccctaaactcccacactccaccccaagacctccacaacttgacacttctagtgatgggcgatggtgccttccaccctcctccatcttcaccttattgatatctctttcctcctgcatttcccttcctcattttttaccccgctctagaatcaagtagggtgttggcggtcgaagtacaattcgttgcacaagggcttcccagcaaagctacatgaagaggttggacaaacgatggttgttcggcggtactgacagtactacgcggaatcacagaaacactctatgtgggat

SEQ ID NO: 67736 - DNA, 433 bp, Oryza sativa
  unsure (1)..(433): unsure at all n locations
agcttgagccgagatcaacacttgtgaccattctattcaaccatatttatgccgaggtcttaaccatcctttgtcaaaactttcttctcatcacaagcttgacttcattcttttcaacatggcgatgtccttggcttggtgaccgtcaacacatggtgtcatgcatccattagcctcattacggtggaaccttgaaagtgtcaattatgcctaaagggggggtgaataggctaattcaaaaatcaattaaaagcggaagatgtaattntcggatatttccaaaattttcggatatatccgaaaattttcggagtcagcacaaatagcagagtaaatcctagatctagctgcctacaacaagaatatgctagcacaaacagcaactagacctatagcggctcgaacaagcaaagctagtggagagggagaaagt

SEQ ID NO: 67737 - DNA, 401 bp, Oryza sativa
  unsure (1)..(401): unsure at all n locations
agcttgntgtacgaaaccaaacatacttatattcttctccttacaatcttccatgctccatatagcctatggctacctttccccattatttttttcacatagagtttgttctcctacagtctcatcaccgattgctactcctattatggagaacgcacgctttttcagcggataaaataattagggggtatttttaaatatgattgatggtttagattctactaactcaaactttagtaatatttgaaaacaccaatggatctcgtagcatcagaattcagaaaccctcttaaaagataataaagaactctaatgaaaaaaactcataaaacatcacgacaacaaaatttggaccgagcccgcagagccacagatntatggccacattattaaggagcttt

SEQ ID NO: 67738 - DNA, 425 bp, Oryza sativa
agcttgtcatcccaggtaaaaacttcataattctgactatcgagccagtatgctccagcatgctttgccatccccggagctgttgcaaccgataggtatgtattgttccctgtggcaaagtacatccacgcaccaccccacacaaactcatcccagtaactggtggaattgtagaaaattgcttgatcagagccattggggctgtatctcccacgctgcagcctaccgaacttgtacagggcctttgcgccacgcacgagcttgtcagagtaagtcttgctgtccttgaacactatggaagctgcagcaagggcagcagccatttcggaagcaagatctgagcaagagtggcactcagtgacaggtctggggtaatcgatatcctctggcctcatccagcagtagtggtcattatgttgggcacc

SEQ ID NO: 67739 - DNA, 392 bp, Oryza sativa
  unsure (1)..(392): unsure at all n locations
atacaccatgcgcacactggtttaacaaatgtgcttaagtccctaaaagacacatgggttcaccacacctggaaatatatggcatatgtggtataaaatccgagtaaataaactcataaggatttatcaatcgtctggaaaatgaccaaaatatataatcagcctgagccataatattggtcaataaaaatgcacacttacgtggcaaaaagcaatgatgttgtatccaatcaattgcttgataaacccaaacaacgccatgactatataaaaaagtcagctgggcagctatataaagctntactgtttgacaccttttaagatgcattgtaccaactcctaaaaaggttgagtaactgcggcataaaaggattntaaggtattgggcacta

SEQ ID NO: 67740 - DNA, 322 bp, Oryza sativa
  unsure (1)..(322): unsure at all n locations
cagcttccagtcttgcagacattgaaaggagaaaaatatcttagtttcttactagccgcacgcacgcgcacacgtactcgntggtctagtcgtctttaaacaaaaaaacagttggttcgggtttcgtagagtacatggctgtactttgttggtttagatcagcgattgaccaaaatactgttcacatatcagaccaataactttattttggccttcacgtgtgcaaatataaaacaacattaaatttttttaaaaaattagtaattcacttttcattaactattaaactagaatatatactccctccgttccataatataag

SEQ ID NO: 67741 - DNA, 81 bp, Oryza sativa
  unsure (1)..(81): unsure at all n locations
actggaacctcaaaacgcatgagacccgaaacgcccggctnagcccttgcgccttgcgataaaatgccatgggaaacgggg

SEQ ID NO: 67742 - DNA, 439 bp, Oryza sativa
agcttgtaagcatggtcaatattgttaccaggtggttattttgggtgggctacctaatcttcgaagctcagaggttgcaaaagccaaaaatatcttgatgtttatagttctatgccaatatgtgcctcgactgatcagaataagaccactgtatcttcaaatcacaaggtctgctggggtaattacagagacaccatggcctggtgctgttttgatccttttaatttacttgctcgccagtcatgtaagtattctattcaataactctggatagtcaacaatgccaaataaattgtcctttgccagagcaatatttaactgcaatagtgaaaagctgaaaacatgatcaatttcctgtaaagattaaatgaatttattattgatcaaaataaattcggctaacttggtttgaggtgtggtatgggcgtagtctcatctt

SEQ ID NO: 67743 - DNA, 426 bp, Oryza sativa
agcttatcatctgtaatgtacgttagactggcttatcagtacatcagtgagtttggtagttgtgaagttggagctataacatcagcggggcatgacgtgtggtaacgataacatgagcctatttaagctatgatttgatgcaggctaggttgttacccttacactgatgtttcccaacgaaggtggagtcacccgatcacgagggtgatggtgtgataatgataacatcatgtcttcagtgtgcgagagtctcttttttttctagctgcttgttcctgtggtgaatggcgttggttgagtgtcgtgcttggtttccctgttctcgttgccttggtagtttaggatagttggtgaagtggacattttctttttttaatataaaacatcaacaataacttaaccgtgaaaaaaagggaaaaaagaagc

SEQ ID NO: 67744 - DNA, 430 bp, Oryza sativa
agcttaacagctcacaaccagctgttgagtccaccagttggtctatttgaggaagagggaagtgatccttggggcacgcctagttgaggtcagtgaagtcgacgcacatcctccacttcctgttggccttccacaccatgaatgggttggctagccactctggatggagtacctctctgatgaaaccagccttaagaagtttatcgagctcttctcgtatggcatgtttccgatctggtgcaaatctccgcagtttttgctttactagcttggcatcgggtcgcaccataagtttgtgctcaatcacctccctggggacccccggcatgtcggacggctgccaagcgaatacgtccgcattgtcgcggaggaaggtgatgagcgcgagttcctatttctcgttcagtgatgccccgatcttgaccgtctt

SEQ ID NO: 67745 - DNA, 413 bp, Oryza sativa
agcttgatcctccgcgggtgccttggttgtttacaatggcttgcagaagttcggtttgagtggccataactccggccagggtgtgttagtcaggtgtctgagtttcttcattgctggttgacgcccgacgtcggcttgccatttgtgtaggccgaataagtaagtatctaattttctaactagctcttatggttttatcctattaaaggagttgttttgatgtgaacttttgttttcgcaagcatggtggaataaactcatttataacacaacagcaataacatcataaataacatcacagagttccacacatagtacataaatcatgatgcaattgactgcacacatacgcagtccaaataaggttcatccaaaagatacatcgaactaaccatcaagctactcgtcaatct

SEQ ID NO: 67746 - DNA, 407 bp, Oryza sativa
agctcgagacgctaattaacctacaccccctttccttctcaaacaaaaaccgaagcaaaggccagattatccactccaacgaagaaaaatatgtcaaatattaagccttgcttagttcctaaattttttttctcaaaaatatcatatcgaatatttggacaaatgcatggagtattaaatctttacctattataaaagtttaagatgtttttgtccagaaaatttcgtacgtcactcgcctgatttttctccctcgcgcgttccgtccaatttttttttcacacgtggtttttttctccggttattttccgcccgatcttttttggtcgtgacttttagatccgttttttccatcgcctgttgcacaacgtttttttcttttttttttcaatccgaatatcttagat

SEQ ID NO: 67747 - DNA, 414 bp, Oryza sativa
  unsure (1)..(414): unsure at all n locations
tgataatcagcgagatgttcttagatcttggccatcttcgagatatacagcggtgacgcctgcatgacaatcatcggtgagatgaatcaactgatatagaatntctccggtatctgcgccacagctcagagaaaggcacccgcccgccgccgccggaatcatgctccgcggctgctcctcgtcgccacaccgctcctactcgtcgtttctgtttcgccggaacatcttcgccgctgacccccgttccacggccgcagctcgccaacggaagagagaggggggagaggatgatttatgtgggccccacatatcagtgggttccacccatacttctggtgaatgacaaatgagttccacgtataattttttatttctaatgccacctaagcgccacgtcaacgccacatgaaaaga

SEQ ID NO: 67748 - DNA, 63 bp, Oryza sativa
aaccatataattaaatacaaaaaagaatactgaccccacgaccaacacggccacacgacccgc

SEQ ID NO: 67749 - DNA, 391 bp, Oryza sativa
atttgagtcgatgcattgagacgattttttttttaatttctgaaactctataagtgttggttcctgaaccggtatatttgataacaccaaattagtaccggttatggagtgccgattgggaattctgcacctatgtgagattcattatgttttctgtattagtgatggtaagtactgtcgtgaccattccggaaagtttgccatgcagatgcgacgacttatcattcataaatccgaaaagtcagcctctgttgaccacgtgaactttcacaatcaatggtaccgatcgagtggacccattcgatcgaccggtggcagatggatagaaaaccaaactaaagcccttcaatgctacaactgctcgctcaagctagctagctgcaataactac

SEQ ID NO: 67750 - DNA, 398 bp, Oryza sativa
gcttcttcgctgcacctcgttgcccgcgtgccctcttctgttctacggatggttgtctaccactagcctcctcctactggttgccctccacatccctttccacgtgcccctgctggttccccttcgcatacctctccacgttaccttcctcgttcaagtactggtttggatcctcgttcccctcttattcattccagtactggctgcttccctccggcattgtattcgacaatatctgttcctcatcgcggtcagacatctgttgatacaagaaacatctgctaagtcacgagacatttatgttttaacaatataaatcatgtatgctgagtggtaatgtcggacattagaacccctaccaaacttacgtgcgtagtctaatttcaaatcgtgatata

SEQ ID NO: 67751 - DNA, 211 bp, Oryza sativa
  unsure (1)..(211): unsure at all n locations
agctntcagcttgttgagagcttgctcagccttcttcgttcacacaaacagcccaaagctcttgatgagcttgaatagaggtatgccctctctcccagcctcgatatgaatcgacttagggcggccatgcatccagtgacgcactgcacattcctaagcttgctgggggggggggagggagctcattctctctaattcacgtatttactta

SEQ ID NO: 67752 - DNA, 382 bp, Oryza sativa
tctattattaataaaagcataagaacatgagtggaatgtgttattttgtgatttacagtgtttgcttgtcatctccgaagtttattctaaacactattccataatatgtgcatgtacaactaaaagtagttgtcacatacagccaagagaaccacttgggagcaaggtatgtgaaaatatgaattttcacaggcggttgggcaacccacatattaaaatcgattttcacatacagttggcttaaaaaacttgattttgacatggggtaatgggggtgtcttaatgcagctgcatgttgacttaaatgaacatctgaaaattgaattttaattacctatggtggttttggctttatgaaaaaaaaagagatatattaaaaaaa

SEQ ID NO: 67753 - DNA, 383 bp, Oryza sativa
  unsure (1)..(383): unsure at all n locations
tgacaaggcattttattagccgacacaagagnactcttattcttttcgatatggggcccataccaacaacagattatgtgccagaccatactgtgccatgaaacccatgggtgctccccgacaccaccccggataattcacatgtctctcggcatcaatgcttccctgataagctagttactcaacncaagggtgttccattccacccatgtggtcgaactcggcttatgtctggatgaaatttcaaggaaacggtacttaacttcaataacgggaaaccgtacacccggttcgttcccacgtccgaggttatggaaaattaatttattatgcaagcaccaacccagctgacggttttccaaatcttttttaaaacccaactt

SEQ ID NO: 67754 - DNA, 404 bp, Oryza sativa
agcttgtctaacacggcggttttgtccactctcaattggacatacaccgacgcatacttcttatcttgggtaacatgccaatttggactatctgagtgtgtctcaagggccttttcaaagatgctgacttcattgtttgagatcatactctctttcttgtccatgcatgtcgaacttgcaggaatcttctttttcatagcaaaatttcgatcagtgtggctaactggttcaattatatcaggtgcctgctcatcagatatttcttcagaacatgtttctttcgacttatcatcatgtgaattctctatctggtcttcaagaagtgcacctgcagccgaatgctggacctcctaattcgttctatgacttcactcttcacttgacccctcagagtacttctcact

SEQ ID NO: 67755 - DNA, 322 bp, Oryza sativa
  unsure (1)..(322): unsure at all n locations
agccgaacggagcccggccggtggacgtctatcactcgatacggaccctcccacattggtgagagcttgctcagtccagcacgcgtttggacgcggcgtatgatgaggtcgtcgacgcaaagtgatcgggcccggacgtggcgctgatggtagcgccgcatgctctgctggtagcacgcggctcggagggccgcgcgccgccttcgttctttcaaatagtcgaggtcgtctcggcgaagctaatcttgatcagcctcgcaatacatggtgacccgaggggacctcanggtgagctcagatgggaggaccgcctccgcgccgt

SEQ ID NO: 67756 - DNA, 388 bp, Oryza sativa
actgaccagtgagccgttgctgatgacaatgcctttcaatggagtttgttgggctccttaatgcggcgcgtcagtgcaaacaaacaaacaaaaaaaaaacccggttttctcgacgacgacgacgcgtagtaccttctcacgcggagcagtcgctgacatgtgggcccgtgctggtcgggccgggaggtggggcccacatggcggcggtgtggtcaacgtgtggtacggattacagaattgggaagcctctggtttggtttcgggcgatcgaaacggatctgagatgatctgatgtgagtgtgtagtaaaaaaacaaaatgccgttttgactttaagatggttatgtcaataaaaggctctctctcgagaccaccatgatcacctcatc

SEQ ID NO: 67757 - DNA, 393 bp, Oryza sativa
  unsure (1)..(393): unsure at all n locations
agcttaaagccatgaatcccttttatgcatatctggatctggatcctacagaacaaacatataggatgagtagtatctgatataaatataatactcgagaaaaattcaagtattttaaaatatttataaatatatatttcttctcttgtcaattttgatttccccgagcagatgactcattacgtttaaacattctgcccgactagtcatagccaccaaacaccgggagtcggcctaagcactttccaaacatgcatatgagtgacatgagttcgtcattaatggaacaaagtttcacgggtcggagtttactactcgggtacttttgcaattattaagagcnagaaaataaatatcttatctctatggctttgatttattctgaataatact

SEQ ID NO: 67758 - DNA, 314 bp, Oryza sativa
ttgagtacgtccagactagcaagcgccgcatgctcatatctttcgcctttctcagacctaataatactgcttcgtattccgttgtgttgttggttgtgtcgaactgtaatcttgctgcacactgaattggtatgcctcctggcgaaattatgattgcagcggtgcccgccctttgtgagaccacaagccatctgagtgcataacccatggttgttcgatatgctcgggctccaagacgtaagctagctttcttgaagctatcatcaaggcgtaagctaacttttccatttcgatgtatcttactttcaccccct

SEQ ID NO: 67759 - DNA, 257 bp, Oryza sativa
  unsure (1)..(257): unsure at all n locations
agcttacataactgacgcnccacgaaaatttaactttattatncgataatctcaaatcatgaaggcgcgaaaatattatataacacagtgatatttattaatttctaattctataaatccacgtattctgtgatggaatatctccgctctacatttgatggatgacgggtataatattatctcttttaactaacacaagaataatattgttagctcggctcttactgatcttgctacttctagcttgattaatgtga

SEQ ID NO: 67760 - DNA, 381 bp, Oryza sativa
  unsure (1)..(381): unsure at all n locations
ggaacataaatctaagctgtttgtatgccgactgatgctctcctgttggtttttctttctgnccaagaggaaaaactgatgttgggtttgatattattactgctaatactgatgttagagccaatacagttgggcttgagaaattgagatgattagtgtatatgctaattgaatacacatatcatatatgacaactggaatccatggggaaaaaatgggaaaaaaagggaaagaaaaatatgaaagaaatccccgaatccaatcatgcaccaaatttaacgatttaatcatcgatgtattttctcatacacacgcatagcacttaccatcaacgaattatatgcttgcaaccatgtgcggattttttgtaaccgatgctct

SEQ ID NO: 67761 - DNA, 382 bp, Oryza sativa
  unsure (1)..(382): unsure at all n locations
agctntgctagcattgtcaggcccctcggtgagaacccttgaacctctagcactcacatgcatgcacgcatttagcgagtacatggccgtagacacacatgcaccgtcacccaaagataccttccgctcggactcgccgctagcgcaactccggtcaccaacgaccgagaaaagtagaggaatggaatcgcagtaacattctcttcattttgtcttttggtcgcacccccaaccaagtcaccgtttgtcgccggcgccggcgagcagaggtgccgctcatggcggctctactgctggatcgatagagaaggaatcaggacttcactttgaaaatttaacaaattatagggtctggaatgcaaagatacaatacacacaacac

SEQ ID NO: 67762 - DNA, 437 bp, Oryza sativa
  unsure (1)..(437): unsure at all n locations
tggagattatcgtgctattgctgcatcaaattgttgatgttggtaaactgtgcatcaacatttcactgccattcttgcgtttgagctatgtgtccttcgaggttgtgctaaatttttcctgcttgcggttcaagggtgtccatcctcctaatgatctcacccaagtcccatcgagaggaagtcgaacgctaccagttggagaatggatgcatgccgcttgaactaaaataacatgagttcatgtttccccactacacatcctgaggtgcttgccactggttttctgtcacatcctgattntcgtttcaggatttataaattatttaataaattattaatagaatttatattaaatgatctttaattttcaagtgaagaaaatgtgggaaaaaaaattcttaaatctaaacatggatggattaatttttgtaaaatct

SEQ ID NO: 67763 - DNA, 404 bp, Oryza sativa
agcttaaagatattttatattgacactatcatcttgtcactttcagaagctagtggctgtggctacaattgtgcaggagcaggacggctcatgcttgtagcattcttgtcttacaactctttcccttggctttacaaccatgtgcatataaagttctgatggtgccatgcgctttgggagtaactgaaagtgcatcggatgtacactaatcaaactccaactcttggggctcctttgatacacaacaattctgtaagaatttgtttgtaaaggaatagttcattctcgcaaaaattcctccagactttttcaatgatactaatacaaaatgatttcatcactggtgtgaaacatatctttcatctctcttggacatgtaatagcaaggtactaaatcgcgacct

SEQ ID NO: 67764 - DNA, 326 bp, Oryza sativa
  unsure (1)..(326): unsure at all n locations
cgtcgagctcgctccgaatcttattctctgtgcgtcngtgcactcgagctggctggtgcttggaactccttctttgcagctccgtgatgttctgtttccacaataacttcaccaatgaatctaacctgggcaaatctgcctaagtgctcatccttgttgaaaaatctggatgagagaaacccaacatctgaagctcttgatattgatataaatataatatgtatgcatgtttcctgttcaataagccaatttatctatcaactagaaatttcaattattcagaacgttgtttcaaccatggcttcatcaccaatcttaaaaataaa

SEQ ID NO: 67765 - DNA, 312 bp, Oryza sativa
agcttgcatcaaacacctaagttcccgtgacttgctgagtacgttattactcacccttgctctatataaatatatatatatagctcctccgccctgaagagaagataaagtgaagagaagattatggtttcgtcctggttcccacccgtcgcctgtggtgttgggtgttagttcgttggttccgctgctgctgctgttgttggtgtttcctcatccgtgtcgtccggtgcattctcgggttgttctgagctgcaacctaagttaaggtaataagtcctctattattttaaagattgtatgattatatttgca

SEQ ID NO: 67766 - DNA, 321 bp, Oryza sativa
ttcacaggactaaacattcttaccttgtcactctcgatttcttaaggcatcccaacaatattaacatgcctgcgttgaatcacacgaacactatatgggtctattgattcttctgtcactcctgactgaacttttactggtttctgcttttgagacttggcttgttctttttgaaagtttgatttgtcagcacaaagttcctttaatctgccattataaagggcacagtaattacttcactggtaagctccataaattagaaaaattaagaagccatcctatatatactatcataagaaagattccaaatcagtttctttt

SEQ ID NO: 67767 - DNA, 286 bp, Oryza sativa
  unsure (1)..(286): unsure at all n locations
aaaaaaaanggaaaggggaagagagaaggaaaaaaagaaagaaagaaaaagnaaaaaagagagaaaaggggaaaaagagagaagaaaaaaaaaaagagaaagaggagaggaagaaagaagagagagagaaaaagaaagaaaaaaaaaaagaaggagaaaaggaaaaaaaagaagaaaggaaaaaaaaaagaagggggaaaaaaaagaaaggaaaaggggaaaaaagggggaaaaagggagagaagaaaggggaagggaagaaaaagaggaaaaaagaagaaagaag

SEQ ID NO: 67768 - DNA, 433 bp, Oryza sativa
  unsure (1)..(433): unsure at all n locations
agcttctataaactatganaggacgctgttgagaatggtccaattgctttacattctactgtcgaagttttggatatgaagctcgtctggttagttccataatattcataaatttgttttatccacaatgatatacaatttgcttataattgtaagcggctctccattcgtccacttgtcagtatacttttggttttcctgtctgaccgtctgttactttcacccttaacatcttggaagtctctttccttgcctggtaccttcacccttaatgcccatattaatggtcaaacccaaactgataaagaatatgcattatctgatngtctgattatcgaattcatggggcgcaatatgattatgtttttccatgcanaactgttctgtgatcttgattcacaattgatcctataaaatatgtggtgcgatgtta

SEQ ID NO: 67769 - DNA, 294 bp, Oryza sativa
gtgacacacttaatacacatattgtaacatatcactaatatgtatgaaacattttgttttaacggatgcaaacatatggttttcttttgacataatattatcatgcgatatcttgtggcaaggattaatcgcaacgatatacaaagggtgatcggttcggaataggataaatatttatgagaaaaaatatttatagagaagaggaaagaatcgaaagaaacaactagacctgtgcgttggtgtttcccatacaaatggacccgacaattggacagacaacttttttgaattttt

SEQ ID NO: 67770 - DNA, 417 bp, Oryza sativa
  unsure (1)..(417): unsure at all n locations
agcttcgaagactctctgatctagtgctcctcatcgtcatggagtcagctaggtcattggaatctctcacagctagtggagagtcatagtcatcagatgttgttatgacggccattcgtccttcattagcagtatcataacttgctgaagaagatgcatcctcagcttccatcataatgaacttcccaatgttcataactaacatgttctcaaaattgtcatcatctctctgaacatctttgtaaccatacctaacaatgcagcggtacatccgatatgctctatgtccaatcctgcccacaaggtatcgttcatctggcgacacatatggtactggtactgacttgacacacagaaagactaggacttcatgaaacgcagggagattagtantgatatgtgtgaagatgtgggtac

SEQ ID NO: 67771 - DNA, 431 bp, Oryza sativa
agatcgaaaccgatgcagctcaacccgagagctcgaactcgtcgaaataaaagtaaagcatatagggtggcgatgcgccgagattgtatcggatgtctcttttttttacataagactcgggtctatttatacccgtgaattacaagatacgttcataacagacacgactattatctctaacaaactctaagatatcatatgtctttacggcagacttttgcccaaacatatctctaaggaaattaaatagaatatcctaattaatagatacaattgcctttccaggactctatccatgcatggcaatcatcttgaagcacatcaacttgaacccgatgacgtacaccgagtcatattatcagaatcggctgtattggctaaccccgctcgactcgaactctggcgacctgaccttatccgatttggactga

SEQ ID NO: 67772 - DNA, 331 bp, Oryza sativa
agcttgaatcgagaagctgctgcttcatcgagcgagctttgtccctcgctgtactgcaaatgccctccctgagatacatatgggtgcaaagatacagatcatctcaaacaggccttgacctcctgctcatggacaggcctttctggaacatctagtttacacctccgagccctgagagttttaatcatatgacacaagatggagaaccctgtgtggatagccatgctcacgttcttgcctactattcccttgctggaaagaggtctgactgccctcagtgggtgatccccttgcatcctgcgtgattgtaaatatgtcaagctgtgtatac

SEQ ID NO: 67773 - DNA, 304 bp, Oryza sativa
atattttctttgacaatcctctatctgcttctttcgttcttatctcattttctccgcttgagtgtggccgcaccctaccaccttcaccggtcacaaccatgtcacgaccacattccccaccgtcggcgccgagcagtgccaccaccaccaccccttgccagtgccccacggaccgatcgatctgtgaaactggtgtccacggcaaagaagcaccggtggagccgagtgcgatgatgcattgtctattgccaaacaatggacacccgcatctggagatgcacagccagtgatgggaacttgatgc

SEQ ID NO: 67774 - DNA, 304 bp, Oryza sativa
  unsure (1)..(304): unsure at all n locations
agcttggtacggacatgcgggcgtggagctatgcaacgcgagaggcacagtgaaaaagtctgacagatccgcgtgagctagacggcgaagcccccagatccgatcgaggcgagctgagtccttgggggcgtggggcgtggggagataccttgtcgaggcggtcgaaggtgatctcgtcgcggcggcgcgaccagatcgcggaggaggaggangaagagctggagttggatgagcatgatgaagaggagcanggcgccgccgccgccgcattcgcgagcatgggcggcggcatgtgggcggcggt

SEQ ID NO: 67775 - DNA, 386 bp, Oryza sativa
gctcttgtttccctgccttttccccttcctgtcagttcggtctgcctttgtgctgaaggtattttcttcttctttattgttatacattactatatgcctctggccgaataattctttgcatgatattatatggtatatgtgtgccccagaaagtttatgtgtgtgcaactgcagttcctccctagcattgtcatttttttatataattagacggacctgtgctgtgcgcatatattgaaagtgatcccttcttccccctatatgtttgggtattattagcaaaagagagacgctacaccttacaatgtcacaattgttataacgaccaatttgttacttttactatctgtaatgtcaaaggcgtgcatactttcttctcaacttat

SEQ ID NO: 67776 - DNA, 356 bp, Oryza sativa
  unsure (1)..(356): unsure at all n locations
agcttatcaagcctagaaccatatgcatgtattcatctgggaagatacgaagatttgaatgcatgaggcagtttgtcgacaatactcttagtttggctaagggcaaccatgtatctaacaaaaagggtctttttcggtctctgacaacaggaactggcatggagtcaaagaggtacctcttgaggcaaactgttgacctcaccattagccattggcccaaaagccaagttaaaaactccaatgaaataactgagtttctgacacanatagtgtcaaaacacacttgcatttcaaaggataanatttctctaactgacaggctacctttcgatggttttgattctattgcagtggta

SEQ ID NO: 67777 - DNA, 283 bp, Oryza sativa
actcgagatgatatgcttgtagcaatgccatattattatttctttaataatgaatgactaattagtttttctatataatgaatgcatgattaattaagatgtaccactccatccacaaatattacttgtccatgttgtataaccaaaattgttgctttactgatatatctaatggtataagcaaaattctattttataatttaatgggttggatcttttatactaccacttcgatcaactagtatcaaaatagttgtttttttcaccgatagtacaacccaaa

SEQ ID NO: 67778 - DNA, 333 bp, Oryza sativa
agcttgatggagaaaagatcggttgatgattcatcggtcacttgtgaaactatttcggttatttctatgcctaagaccggaattgttagtgattctctccctgttagttctattgatgttgacaaaaagaaatggaaaagtgttattattggggatcctcggcccaagaatagaataaaaaatgcgaaggccgaagatcataaagttgcaaaggatgagtcatctagtttccaaaggaccaaaaagccgaagctcacttttgagatgcttatggctaagtacaagaaaggattagccggtcaacgatttgataatcaaactagtgattcaaaa

SEQ ID NO: 67779 - DNA, 386 bp, Oryza sativa
tcctataagtaaacggactctgttttttgagcagaatatttatttctgctttcttggttctagaaacagagataatttcaggtacaaaattcaaatctctttctgctccctttctaaccgatgttctgctcctttggtagtttctgctgattttcaagttttggatcaaggagcagaacttaccgatgatgagatttaattagacgaagagaagttgaatatgtactacttatctaagtacgtacacagcagaaactattcccagcataaactcggttatgcagaatatgtactacttatctaagtacgtatagatgacatacagtatgttagttatcaaccgacagaacatgttctgtcatccaaaacagatacggagaaaaaaa

SEQ ID NO: 67780 - DNA, 414 bp, Oryza sativa
  unsure (1)..(414): unsure at all n locations
agcttctgtgaaagaccccaatataggaatatcccaaacctacatcacattgaacaaaagcagatcagaaaaatagggcacaatgttgtggcaatggcattgatacaaacatgattacatactatttaaagatatatattgaacaaaagctgatcaaaaaacagcgcccaaaggtgtggcaagggcatcaatccctacatgatttatatgcattgtctgaagatagaacaagtatatgcatttagcaggacttcagtgtgtaactctgcctaataaaagtagaaattccaattccaatatcgagttcccccttctgaaactgcangataagatatgatctctttcatggaactattcaagacaatcttatggtccaaaatcaattaccaaaggaaaacaacttgaattaaacat

SEQ ID NO: 67781 - DNA, 415 bp, Oryza sativa
tcattgacagctcataattcatgaaaacatgttgattctattatacagagtagatgggtggtatttgcaataaaatggcttataaagtggaatgtcaagtttcaagtgatttataggatggtttttgcaattttccctaaattttaagcgtcactttgaatcgcaggaataaaaaaaacagataaataggaaaaaaaacaaaaaaaagattttgatagaaatgtaaatgtaaaatagataattgcaaacatagaaatgaccttttgattagatcacatgaaaaacatttcttgattcaaagagctatatagaaaaactatagaaataagatcctgcaaaatgtaatattcatgaacgccgtaataatgtgaactaatgattgtggacttgagaaacccatgacttcacaatttca

SEQ ID NO: 67782 - DNA, 209 bp, Oryza sativa
  unsure (1)..(209): unsure at all n locations
ancttacaganatataagagagacaagatcacactgtcgcctccgttaacttgtggctgtggctacataagtggaagagcaggacagcactggctctgagcatccttgcgtaccatctcatgtccttggctttacaaccatgagcgtataaagtactgaccgagccatacgctttgagagcaactgaaagtgaatcggatgtacatgta

SEQ ID NO: 67783 - DNA, 381 bp, Oryza sativa
  unsure (1)..(381): unsure at all n locations
agcttgtgcctgtttggagagatcatcatatattattaaagtatgccgctcgcggtacataaaatactcaaccaaggctgctcccgtataaggagcgaggtattgtaatgtagcacgggaatccgccatttcagctactacaatagtgtattccatggccccctctttatggaaagtagttactacttgagctacagaggatgctctttgaccgatagctacataaacacatattacatcttgccctttttgattgagaattgtatctgtaactactgctagtttgccggtttgtctgtcccccataataaactctcgctgaccgcgccccatangaatcatcgaatcgatagcaataagccccgttgaaaggggtcatat

SEQ ID NO: 67784 - DNA, 271 bp, Oryza sativa
aatatatgaagcacagaactgttgaagattacaacgctctgattgaataagaccactctcttttcaaaaagggggttggtgttgatccataatcaaataatatgtcgaagatcgaataagaattattatatcttttctctgctttatttatataatttataggataacgatgggctaaataaagtataagcaataaaagggcattaaattgtaaaataggacatttattatatctatgagtatttgaattggatcaataaaaacatttatg

SEQ ID NO: 67785 - DNA, 440 bp, Oryza sativa
  unsure (1)..(440): unsure at all n locations
agcttcgagccgaagcaacccgcttccccttccccctcccgaagtcaccccccacacacttgggcgctggacacgagacgtaactgtgctccgcgaccgccgctgcggcggaaagcgtgggagggagagagcaagggaggaggggggcccgtggccgaggaggagaggggaagaggaggaagagcgtgcgccgttgcgtgcgtaaaagagcatgtataataacaggctatagcatgtacaatagctgggctattagctagctactaaatgtaattcattctagcattnttcacatttatattaatattaataaatctagacatatatatctatctagatntattaacatcaatataaatatgggaaatactggatgacttacattgtagaacggagggagtataaacatattttaatatgataaaagatgagagagaaaa

SEQ ID NO: 67786 - DNA, 211 bp, Oryza sativa
tcaacaccccacgtttatccggatggtatgtataaagtattcagtcttcaccctaaagccgcgagcccgctacatgctccgctccagttgtgggcgcgcgccttctctccttttttacgcattccctaccatccgctcgcacacgcggttctcgaaacaagcaatcgcttttcccattcaaaaccattccaccctcgcgccgcgggggaaa

SEQ ID NO: 67787 - DNA, 434 bp, Oryza sativa
  unsure (1)..(434): unsure at all n locations
agcttccataaaagctagactaagcaataaagtaccgcgtattttaccttctgcttctggctgtctcgcaataccttctacagcttgtcctgcagcagtaccttgaccaactccaggcccaatagaagcaagacctacggccaatccagcagcaataacggaagcagcagcaattagtggattcatgatgagttcctcgtgtcaaaaaaaagaaatggttaaggatacaatcaaccaagaaattcatatttctaagctctattggacagaagtaactaaaaagtacaaattgaaacgataatctgaattctccgaactgcttcgagatctcctttntagtttctaatcattagaggtttgtgtactcattattctatttctcttttctttcaaccaactgatctntcattccatccttctttctttcctcttcg

SEQ ID NO: 67788 - DNA, 374 bp, Oryza sativa
  unsure (1)..(374): unsure at all n locations
cttgtgcctgtttggagagatcatcataaattattaaagtatgccgttctctgtacataaaatactcagccagagctgctcccgtataatgagcgaggtattgtaatgtatcaagggaatccgccatttcaactactacaatattgtattccatggccccctcttcatggaaagtatgttactacttgagctaccgaagatgctctctgaccgatatctacataaacacatattacatcttgccctttttgattgaaaattgtatttgtaactactgcatgtttgacggtttgtctgtgacccataattaactatcgctgaccgcgcccaatatgaatcatcgaatcgatagcnataagccccgtttgaacggg

SEQ ID NO: 67789 - DNA, 257 bp, Oryza sativa
actaagcttcccttctttctctcattcgctgccgccttgtctcttctttgtgctctgacggcgtcacgtcgttttgctacgtgcgaagatccggacgagcaaggaccggaagggactccgagcggcccactccttccttttcccggcccgaggccggagagattactcccgcgccgtcggcctcttgtcactgcgcccgcccgcacggtagtgcatcttcccgttctacctccttgctccatgttcttcccttagac

SEQ ID NO: 67790 - DNA, 191 bp, Oryza sativa
gcttgaactgagaagctgctgcttcaacgagccaactcttttcctagctgtactgcaaatgccctccctgagatacatatgggtgcaatgaatcctatcatttcaaacaaggctttgcctcctgctcattggcaggcctttctagaacatcgaaattacaccttcgaaccctgagagttttaatcatatga

SEQ ID NO: 67791 - DNA, 321 bp, Oryza sativa
acaatcaccgatatggttcggtcgtgcttatctcatattctacgcttgagtgcggacgcacctcagcacctccaccgctcacaaccatgtcacgaccacatcccccaccgtctgcaccgagcaatgtgcccaacacctccccttgccattgccccagtgaccgatctatctgtgaaactggtgtccagggccaagaagcaccggacgagcccattgccatgaggcaatgtctattgccaatcattggacacctgcatcgggagaggcagacccagtgatgggaacttgatgctatcatacacatgctttctaatacctatg

SEQ ID NO: 67792 - DNA, 377 bp, Oryza sativa
agctctacagataccttcgcttttggattgatctgctcccaccatatattgaaaaaaaaatgtcttggtaagtgccagggaatgcaccaactctacttcaaatgtcaacagtaagtaaaggtaacaaaagtgctccaattcttgcaagctacaacaaacttttattctaaagcttatgtaattctcccacagcacccacaatatttctaagtgtcattggctcattgcaccaatactaagagaagaacaacctgatgaagaatcataattaactgtgctaaatcctcgaatgaatagatggcatggtggggtggtggggatatgagaggaactccaggtttggagtttctcaaccgagcaattgatgcacttgactt

SEQ ID NO: 67793 - DNA, 378 bp, Oryza sativa
gatttcttgtcatggcaaagaaccaaaatcagtaattggccttctatcatctgagaactcatgggattatgaaggtgaacaccattcttattatgcaggagttccatggtggcggcaagatgcagatgaatctgacttgatctgaagaagaacaagagtatatgagaattttagccctgaacctcagcctggggtggctcattttgtgtgatctggcataagtccgatatccaatgttatttggccgccaaagagaaacataaaaaaaaatgccatatatgaaaaccacagaatgcgtggtgccaccgatgaaaagcttacacgccaaatatctttccacatacttccaaaatatcttgctacagatattctcatctc

SEQ ID NO: 67794 - DNA, 457 bp, Oryza sativa
  unsure (1)..(457): unsure at all n locations
agcttgagtatagattaagcctataaaaactcgtcgttgtagtaggcctcgctaccttctgggacttcttcataacacgggtcttctatatgttaaataattcaagaatgagtacttatgtactctgcaagacacttataatatgttatgaacataatcatggaaatttaaatatgatccttctaagcataagatattaaaataaagagaaaataaatataacagcaaattctcattatctttaccactattttatgtttaaaactacttatatgtcaggagtaggaatcacccttatgacacaactccagaatcgggagtacggacattcaaatgatttaattcacctctgcagagactgtccagctntacccacacgatgtcaacagtttgcaatgctgatgacaccagagccgttcgaaggcccacttactactagttactgcacgagtgggat

SEQ ID NO: 67795 - DNA, 330 bp, Oryza sativa
  unsure (1)..(330): unsure at all n locations
taatatcccgcggtaaaatttcgagggcggttgagcgttgtcgtcatataagaaatgggaaaaaacaacaacctcgtgtgtatcgggggatggaaaagcctcaccgcacgctggacgccacccgatgatctccttggcagggagaacgccgtgcgccaccatctccttcatgttctcctccgtcacgtcggacggcgcccattggccttcaaagctttctttctcttccgccattgattttacccgaatgcgttgatttgattcgagggatggctaaggagaggtgagggattgatgcggtggattacnggaaaggatttgatgaacttt

SEQ ID NO: 67796 - DNA, 457 bp, Oryza sativa
  unsure (1)..(457): unsure at all n locations
agcttgccactgccttgtatggctggcacaaagcttccctagacggcagtcactgcaccttactccatggagcacctaacacatgtgaaccattcatttaagcatttaatcacagcagcaggaaaacaccactcagtagccttgacgggtgctgataagatacaatgcatgtcacttgccgcttgattacaagctagacacactaggtcccatgtttttgttgtttgttgtgttgcctcaacaaaggctcctggtcacatccccaacattnttgttagttgattgcaagcacaaagttggcaacatttaagatcacccgaatcccataaggtgcccgcaccaagttgtgctctcaaaggaaaatccttcttttgggctcatgatgacnnagttagcacatagttaaatccnctggatgacctcacncattnttgctctaggaaatatatatatatat

SEQ ID NO: 67797 - DNA, 303 bp, Oryza sativa
tacaaagtggactctgtgtacaaaaaaaaaatgagttatttatttactgggacttgatgttacagacacaaaaacttcagcaaaatgttaacatcgcataacgaccggtttgctcttacaagttctgcattatcatcatacatgttctccttctccatgttgcgacaccccaacattaacaatgcaacctttgggagaagaacactactacttgactaaacacgaagaagaaaaactgcaacaaaggataccaattaaaccaaagaattaacttgctcgcctcttcttgctctcgccgatgct

SEQ ID NO: 67798 - DNA, 428 bp, Oryza sativa
agcttcttgacaatatgctagacattagcattagcagagtagaagttaatgagataacaatgatcacagggtctgtagtgatttaacaaaagcctttttttctttaaatattcattaaactcttgatcttttttgagtatttacaattgacaatctgttcaattcactattttattggtcctagtccaatcaatgtacaaagccacgattatccttaatacactacagaggcttggaaatatggcgcatcgagaacttcaagccagttcctattcctgcgtcttcatatgagaaaattttcatgggtgattcttacatcatctttgaggtatccaagtacatattatatggggtcataactcatattcatatatcatcctctcttttggcctttaatcatatcattagtcttttgcctaaatagtcta

SEQ ID NO: 67799 - DNA, 426 bp, Oryza sativa
  unsure (1)..(426): unsure at all n locations
tggacaaaataacatctcttgtgagacatgttcttcctttatagatctagctagctcatagattgtttgctaattgcagctaaaccaagcttgcatgcatcaaagcgatctgtccatggatatgctccaagcatgcatcaatccatgccctttattcttagctcagaaccagctacatccctctgccctttgattntgatatatattcttttcttttcatacatatgctctttcgatttgattattaattgttcctttttggccattggagacaagaatcgatggtttgctgcagtagaaaatatctctttatatatgcatgcaaggagaatgtacccgcatacacgcaaagatgcatagtccaatagtacttgcatgtacagtgggatatctctgacaaatcatgcctctctaaaatggtgttgt

SEQ ID NO: 67800 - DNA, 373 bp, Oryza sativa
  unsure (1)..(373): unsure at all n locations
agcttgngaagaacttcagcgaataaacattattcttgataagaaaagaaaagaaaagaaaataacatggccaaatggagattcaatgtgacagttgaaattaaaagcagggggtagtaatagtaacagtcatgtgcagacagtaaaacggcaacagcaacagtactgcagaacaaaaaggacactgcctaaatttttctcattacctttccctctctctctctctccagtgacaataatgtcagaggattcaaagtagtgtgtcctttttgcagcttgcatttgaagtcgatctgtgtgaatatctaaagttttactgcgagtgaaatgaaggtcctnctcttggccttgctctgatatactggcattctgt

SEQ ID NO: 67801 - DNA, 359 bp, Oryza sativa
  unsure (1)..(359): unsure at all n locations
tgctttatgctaataaaggataggcaaacaagttttgttctttttatttctcattcaggcaaatattagatcatgaatttcttttaggttaaagtccatttgtaaccttaaactgtgctcaaagtccatttctcatcttgcataacaccctaaaccatattttatcggggttctaattgatatgatagtggtttttcgctagcatgaacttcagntaagtattatgattttcgacctaattaagtaccatttgcatcaacaaaatatgcagctaggaaaaccacctccattttatacaaaaccactaaaaaatatgttccaatgtgtttctttgtccattaataattgaaagggaaaaa

SEQ ID NO: 67802 - DNA, 164 bp, Oryza sativa
  unsure (1)..(164): unsure at all n locations
ctcgcccggatcctaagcgactgcggctgcagcttgatgaggggaatcaagcnagatactggagacaccgaaagcatatcgcacggaccttgccgcccgaagagatccgctccacgtcgatggacaccgaccgggtcgagtgccccatgccgacccgctcccct

SEQ ID NO: 67803 - DNA, 350 bp, Oryza sativa
tctgctctataagctatatcatcactttagtttttacttgttttaatatgacatggcatcattctaatgttgctgttgcttgatgctgaattgatcgacctgcatattgatgagataagagatcagatgagatgatatggtgtttattgtggttgcaaatgttgcatggattgcttgcttcaagaactggtcgagcatgaagtgaaagacaattaaactccgagagtaatttgctactagtatcgtattccaaggtgtataatacttttcttgtcgttgattaattaactaaaggatctgacagtctcccacaggcgcatacctattttggactatcgatcttcgtaatc

SEQ ID NO: 67804 - DNA, 423 bp, Oryza sativa
  unsure (1)..(423): unsure at all n locations
agcttaaatgattactatatgaaaatattagaaatcagagtaaattttacaaaactatatgtattttgatcaaattattgaaaaactacatatttaacgcgttgtattacaaaactacagatttaaggctaagtatcacaaaactgaatatttagtattgaagttatcacaaaactatagcttttagagttcatatccctagcactattgtaatatgtttgagctataaagattattgttttgtgactaaattggttataaaacatgtagttttgtgataatttagtaactaattaaacatgtagttttatgacacttcatcttaaatgtataattntgtgataaatttggttgtaaatatatangtttgtgctgcatcgaattaaatcttgagtcgtgcgatggtttggtcatactatatgt

SEQ ID NO: 67805 - DNA, 382 bp, Oryza sativa
  unsure (1)..(382): unsure at all n locations
acacttaatactcagcttatatggtgcatgccgtcgagcgccctcgtctgcgatcggttcangatgtgcactgcggtgacgacgacctcaccccattaacgaccaggcatcttctttgccttcaacagactccgcgccattgccacgatcgtctgatttcgccgttcaacaacaccattctgctgcggtgaatatggcaacggtgaggtgacgtcgcacgccacgccctgcgcagtactcaccaaattcaaccgatgtgaattcacccccccccccccggtctgtacgaagaactttcaattttctcccacattcaagtttcaccttcgcctggatgtccctgatggccgccggagcttggtctttgtttcccagttgacaa

SEQ ID NO: 67806 - DNA, 224 bp, Oryza sativa
actgttcacactttgtttaccgcgaacatgatcggggagcaatcaatctgttagcgagcgctttcctcttcaactgacctactacctctctacaaagctgcaatttcaatcttactatttttatccatatcaaattagtttgcctttcattgttaataattgttaattaattagttcaatagtccacccttctcaattagtctctgtgcacaatcatatcccct

SEQ ID NO: 67807 - DNA, 366 bp, Oryza sativa
  unsure (1)..(366): unsure at all n locations
ngctctgtgtaagatcatttggctcaatatatttatgttgggtttctcttcccccggtgatttagtcaataaaaaaaggatgctatagcccatcacatgacggcattggagtgttaggagtcatagtacctgcccaaaacatgttgacgatacccatagtaacggatccaggatttgagcaaagggtattcaaagttgaaaaaaaaaatcatacagaactcaaaaaattggactgggaaaatcatacaggagtggtaatgacatgtttaaagccttaaaggtacaaacagtagcacaatagtcaagatgtctatctccaaatgcacacttggggacatatcactatcatgggcattgggtgcttca

SEQ ID NO: 67808 - DNA, 440 bp, Oryza sativa
  unsure (1)..(440): unsure at all n locations
agctntaccaggaaggaatcangaatacattcttcaagtggagggtgatagcagtgtgggctttctttgccttctatcagtcgatagtgttctattacttcactgcagctgcaagtcggtatggtcatggttcatccggcaagattcttggtctttgggatgttagtacaatggctttcacctgtgttgtggtgactgtgaatctccgacttctaatgtcatgcaactctataacaagatggcactatatcagtgtagctggcagtataacagcctggtttatgttcatcttcatctactctgcaataatgacatcattcgacagacaggtgggatagttcatagattactgaanaatccagtgctctggtatgactatnttattcctataactgcattaacttcgtgcctgtttctttctgcangaaaatagtatattt

SEQ ID NO: 67809 - DNA, 416 bp, Oryza sativa
tgacacaaatagtttcttcgcttgctgcttgtatatatagaagtgtatgcctacaattgttgtccatttgaaatccttgcatttacaaattctagtacacatcagatccaatcacatagaaatcaatcaatcatagtatcttcatttcagctcaaatcatctaaacattaaattaaatagagaaacaggattggtgcaatgaaatgcttggagagttggaggggtaattactaagatttacagcacatgataccaagacatacggattttttaaatacagtaaccaatatgcttattacttgtctactctcaagtgtaatctgccgctacaacatagagccaacatttaacacactaaacagtatgtcaagatggcatgatacaacatattatagttcagtgatcactgacagtga

SEQ ID NO: 67810 - DNA, 307 bp, Oryza sativa
agcttaagattggtaaacatgaactggtcagctgaactaagcctcaagaaaaaaaaaagcagagttcataaactagaagcaaactgttctgacaatctgccccttgactggttcaatcaaaagttcctagcctgattgcctgaattcacaatctgaactgctacagaagcatgaacaaaatttcgaaaatcccaaattcatagcctgcaaaatcatgctgttttgaacttttgctaagctgggtgatgaactgatgatagaaaaaggtgcttacaagtacgtgagctggccgagctggccgatgctg

SEQ ID NO: 67811 - DNA, 396 bp, Oryza sativa
tggtctgcactccttgcgccagcggcactggtatggttttcttttctcttaaaagtttatggcccgctcacacaaggctctttatattgatcagcaatagtgtgtatctatatgctctcaacatactatgtgctgctcgcataatggtgctcctgtattctacttaaataccaaatccttgttctaaaccaagttaaaccattcatgcattatcaaattgtgaaccaagtaatagcattcagtgtgcattatccaactgtgttgacaatacccaatattagtgttttaaagctaaacgttctatgcaatctgaattattcgtcttatgttctcataggtacatacagagcacatgtgctaccctctgtgatgggttgtatgaagggcttgactggc

SEQ ID NO: 67812 - DNA, 293 bp, Oryza sativa
  unsure (1)..(293): unsure at all n locations
agcttgctcgcacgtatctgcttccactcagttgaattctttcgatctcgacgacggtctattgacgttctcgatcgtaatctcgttggcaagcactaattaacctgttccaacttgtcggaagctgatatacagnaacatagtagtactatagactacaggggatcttgttgagatatcaatctttgattgtttcggagctcggcgagatcgaccaatcgatgcaagatggagtactaataatagctgcacgaatgaactaacttcaatggttcaaaaaaacaaaagaatat

SEQ ID NO: 67813 - DNA, 448 bp, Oryza sativa
gcttgctactacatagagattaagaaattaagtcaataaatttggaatattaactttctattacatacagatcaagaaattaagtcaaaaaatggagaataaaagaatggtaccttcaatgtggccaaattgaaaggttggatgtgatagtatgccaagattgttaggtttacatagaatctttcgtgagaaccattgccattgttagatcatccacaaagaataccatcaatgcatatgtattatcatcctgtgtacaaaaatatcgggcaacaaattaaccaataaaaacctgctcatagcataaacagcttaacctaaatatgaccacatatatcattcatgtttgactaataatgagcagcaaaccaagaacagggaggatcagtggctagatcaaataagtacacttgcatatagtagattggaatcatagtacaacacatat

SEQ ID NO: 67814 - DNA, 342 bp, Oryza sativa
tcacctgcacacccatcacccgccatgagtccatgacttctaagttttttttcttcgatcttccatggcagcacgcacaatgcttgcaacaaaatacaaatattgtattacggggtgggactggccgacggagtgcttgaccgctagtccggtggccttgttgacgaaggcgaacgcctgcatgccctccccgtccttcaccttggtgctgaacctcatgtacttgaaccagtgctgcatttcaattcattccatttcagtatacatcaaaatccgatcgaatatattaacaaaagaaaaggcatatattataatggggacctgacctggtgctcgtccttg

SEQ ID NO: 67815 - DNA, 360 bp, Oryza sativa
agcttctctagaacgttccttgaaattccttcaacatctctagtacggagcgaccttttcaatttcctgttttctctcagaatttcactattcattgacctgacctcatccagctgctgtctagcacattccaactcgtggacaaggtattctttctcgtctagaacctctttcaagcgaatcctataaaaatacaggtcgatatcctcatctgatttgggtggctgaaaacatatgtctcaattagttagaaaaaaccacatggaccctttaatttgttagggaaagaaaactaccacaggagcttctactgtgataaggtttttaatgactgatatgactatatttcaaaattgagca

SEQ ID NO: 67816 - DNA, 414 bp, Oryza sativa
  unsure (1)..(414): unsure at all n locations
ttggatggggctaattgccacataaaccttctcgcaatcatcttctatcatcttttgcgccatcattgcatgatctatctgtgtacttatttgcaaatgcgagtatgaaatatatatacaccaagtctggaactaggatatctgcatcagcatgttgctagntttttttttattatttctttttcgctgctatattttatatacaacaggaaattcaactctgcatcaggtcaaactattgggttggttcactctggggctgagctgttgtccttgggtttcgaattaaataaaagaaaaatatggaccggtgtatataagaataggtttttgcttcagcttctaaaatatataatcaataattaatattttggctaaaatactgagttcataacaacaatagtactttgaggg

SEQ ID NO: 67817 - DNA, 368 bp, Oryza sativa
agtctccctttatctctacgaaaagttctttcttgtccgaccaagacttggatcaaccccatagtataaatatgttcacccggggtccattgtatctatcgctatgaacgaaaccattcagtgcatcgccaccatctttacttataactttgtttatacgttccggcggaacttgcacccgacgcggggctgcatcgtcttctatctcccgcgaagggataagtccaatgtttcaccggtcccagcaattgtatcgtctacatctgcgtcgttcaaagctgcatcaggacattccacctctaggattactctggtgtggataatatatttgcctacctatttatatatatctatgctaatccagcctt

SEQ ID NO: 67818 - DNA, 259 bp, Oryza sativa
  unsure (1)..(259): unsure at all n locations
cctccttgnnaatgacaaacgagttaagcttgtcgtgataattctgttctacctaactggaaattcccttagatatcttctgggtggtgtttactttacatctcacacctttactcctaagcacattggagttatgatctacatttgcattatttgaagtttatttgttatataactatttttagtatgtttttaatcaaacaacttattgatgcatttgataagttgatgttaagaaagccgaacgttgacatgatca

SEQ ID NO: 67819 - DNA, 455 bp, Oryza sativa
  unsure (1)..(455): unsure at all n locations
agctnggagttntggtactacgctgcactactcattcttgtgggtctccttaataatgccagactccagcttgatatcatgtcaatttggtaagtgttgttaatttacaaagccctcctgcaaacacaaatgcaagctttggctataactgattttttttatttctataaaaacaagagtgatattttaatttacagcatcaattaccagttctggaccatgatggttgcgatgggcttcagcgaagcaatcaggtacatacacaataatggccattaactcgtattatatatttgcacatgctatcgatattacatacaaaagtttagcagattattatatatataaggatatcatagttctcctttnttaagatattacttaatcgaactattcatgcacagatgaatggtgatactcttaatggcttaaataatattntttattttcacaat

SEQ ID NO: 67820 - DNA, 434 bp, Oryza sativa
  unsure (1)..(434): unsure at all n locations
ttcttaagaccctgttccttactagaaaatcatctctatttnttttccaatttatgccttgtgtcccttgggtgaatctggagaagagttaagcacacacgtttcttgtgaaaattcgataccttggaatacttccggtgaagtgctacagcaatatattcgtacgtttgctgattttatctgtgactaacaacattatgaattgatagaccaacaacttttttcgggccatatctgaggatgtaattggctgagaacgattgcatggtcgtagtaagtaagattactggtgcatgaactgccacagtttttgttttgcatgaagcaaactggtggataattagctgtattattactcgcatttgtcggcttcctcgtcatatattccatttattcgtgcaaattctatatgtgtaccatctattttacatata

SEQ ID NO: 67821 - DNA, 373 bp, Oryza sativa
  unsure (1)..(373): unsure at all n locations
agcttaacggctccccaatgtctccgtgctttcttgcaattnttagttgtttcttttaagaaaaaagcaagtcaccttatagtagatgtattagcaagtgataataccttaaattgcggttacagtataccgtgcaaaatcctcacaaaaataacacaatgcaatttgttttactaattaaatatactaccccattcagatttgatcgatgtatttgttcttgacagcagtaccaaggaggagtaaaatgacatgctactagaaaattattcacttgccttgctttgctgtggagaataaggcgaagccttgcatgcgagatgataagggagaggagcaataacttcgtatgataactgaactaccagcgcat

SEQ ID NO: 67822 - DNA, 309 bp, Oryza sativa
  unsure (1)..(309): unsure at all n locations
tctatacaggcccttagttcaaactcgttttgatttgttttgacttgagctaaggttctagttcgttatgtgtaatgaggtagctcctgacctgcttgcaagcaaaaagagccaaggcaagcaacaggttaacaaacacaacattctaacaaagaaattaaaacacatctctaaccctaggattccaatcctagtacatactatctccgtttcgaaatgtttaacgccgctgactttttagtacatgtttatntggatcnataatttacatacaataaaagctatttaaatttatcgatttaaataaat

SEQ ID NO: 67823 - DNA, 304 bp, Oryza sativa
gcttgcttaaacacctaaattcccgtgtcttgcttgataccaaaggactcacccttgctttatataaatatatataggtcctccgcccggaaagtgaagatgacgtaaagggaaaattatggttttcttctggtttccaaccgtcgcctgtggtggtgggtggtagtccggtggttccgctgctgccgctgatggtggtggttcctcgttcgcgtcgtcgggtgcaatctcgggctgttctgagctgcaacctaagttaaagtaataagtcctctatttttttaaggattgcaatgttcatatt

SEQ ID NO: 67824 - DNA, 365 bp, Oryza sativa
ccgataaaaggattacccctgacctcctctagctgccggcgggatccgctcgctccggttagccaccgctcgtcggaacgcctcacgcgttgtcggccgtctgatcccgggcgccttcttctacttcttctaccacttcacccctgcccgcgtggccgaacacgtggaagccacctcaaccctggggccgcttgactgggtcaagtcgcgcccagtcagtctcctcccatcgtatttcctccgtgcgcgcggtccacgggaagccgtgcggctgacgtgggcccgccgcatacatccaccggtgcgcgcgacgaaccggccatccgaaccctatcgcccgccccggtgcccctcccacgtgaccc

SEQ ID NO: 67825 - DNA, 334 bp, Oryza sativa
  unsure (1)..(334): unsure at all n locations
agctnggcagggcacctacaacagaggttgagtggcttgagcctggcagtgatcgctgccttgtgaaaggtgtttgtggtccgaatagcttctgccatctcaccgtgactggagagacaagctgctcttgccttcctggttttgaattcttgagcactaaccagagcacacttggttgttggagagcattgccaaccggtggctgcgtgaggaacagctctaacgatgagacgagagtgacaaccacgatggtcgaagtgaagaacactacttggttagagaacccgtatgctgttctaccagccacaactagtattgaagcctgcanactact

SEQ ID NO: 67826 - DNA, 192 bp, Oryza sativa
  unsure (1)..(192): unsure at all n locations
aagcttcttctccacttcagaccacacttcaacgcctcgcgtttgtcgtttcaaanacccgccgccgacggcgccgtcgcgaatcgccggatgcccgccgccgtcgtcgccgaaggggcggcggcagactcaggcaacgcgctggtcgactacatacttctcgcatgctgaacggcgcatccggcgcccgag

SEQ ID NO: 67827 - DNA, 411 bp, Oryza sativa
  unsure (1)..(411): unsure at all n locations
agctntcagatgttcttacgaggctgttcagtagctgactgttctaaaaagtatgcagccataccatntggtcctttcttagtattaataacagctgatgagggtagaggagcattaagagaatcgataacatcgtcaacaagttcagtgtactgtgtgtcagttagctcagacatagtaccgctcccagtgccactactgattgtgaatacttgtttcctttgccgaagccctgctgctcgtgccacttcaaaatcattgcttactcccattgatgaatccctccaagaagcatcttgtgcatatagttntagagaaggcgttggtgcaagagaaggtgtaattccagctaccttcggagggtcaatgggactattctgttgccagaaatcatatcaaggcagtaagtac

SEQ ID NO: 67828 - DNA, 265 bp, Oryza sativa
atactagcttaggagtgagcactggaggatgggtgttctttgtcttgttggaattaataaaaaaaaattgtgaggaatagacgatatagtactgtaaatatgaggagaaaaaaagagagaggaccggcggctttgtcggagcgttctgaaacctggatgacttttgtagaatgctggtaaagctctgcatctccgggcgtgctctgcttgacctcacttgagcgggggtcgtctcctctcacctctgatgacgcggtttgactgc

SEQ ID NO: 67829 - DNA, 349 bp, Oryza sativa
agcttggtctaaaattcccgaataattagccttttatgattatattggcaataatccggcaaaggggggattattcagagcaggctcaatggacaatggggatggaatagctgttggatggttaggacatcctatctttagagataaagaagggcgcgaactttttgtacgccgtatgcctactttttttgaaacatttccggttgttttggtagatgaagagggaattgtgagagcggacgttccttttagaagagcagaatccaaatatagtgttgaacaagtaggcgtaacggtggagttctatggtggcgaacttaatggagtaagttattctgatcctgctact

SEQ ID NO: 67830 - DNA, 423 bp, Oryza sativa
tctgataaaaaacagagggttctagcgagatttgtaatatgtttacctttacgctttgccgagatgtaatgggccattttatgattccatttcttaataccatgaccaaaatgaactcccgcttctatcatctctttcaaattgatgttccaatatcttcttgtcattttttccacacttccttttgattttttcttttttttcatcctacctttccattacgaaatttctttcttttcgaagattaagaaagagccgaaatagcttgaaataaataataattgttccgatggaaccttctacatggtataagcataaccctaatgaattaactaaaactctttgtaaattaaaataaaaatagaaaatctaacctcttagcgttctaagtcaaaaatctaggttaaagtaaaaatctgttta

SEQ ID NO: 67831 - DNA, 429 bp, Oryza sativa
  unsure (1)..(429): unsure at all n locations
agcttcttccctctgtaccggcggcctttatgantangatgatggcngcctggtgtgtttgctctgcctgccgggtgcctgccgtcggcgtggaataatgccggtgccggctgcagcggcggattggcggcggatgggatgggagtagattgtagtgaggaggggaggggaagcatgatgagatgggaagagagactgctggaatctggaaaccgtgggtcgtttccgatttctacccctggctttggtgtttctgttctttgcggattcaattcttaaatgaatcttagctataatttacagcccggtcacctgccttgagggacttatttcaagtacatatcatattatattcggtgtttggatattaaattaaaggtataaacactaattacatacccattcataacattggactaattctcgaga

SEQ ID NO: 67832 - DNA, 222 bp, Oryza sativa
tgagagtcttgtatttgtgaaccaccacgttctctttggtttttttgtaacaactgaacatatagtcgagatctgtggcctcttgtcgtcgcgtactcattgcttgaataaagatgcatgccgaagatgtccgggtagaaatattgtagattgtaacacctcttggtggcataaaataacacgggatcatttttgttgactcatgccgagatgttgaaactc

SEQ ID NO: 67833 - DNA, 449 bp, Oryza sativa
  unsure (1)..(449): unsure at all n locations
ctaagcttccatataagctagactaatcaataaagtaccgcggattttaccttctgcttctggctgccncgcaataccttctacagcttgtcctgcagcagtaccttgaccaacttcaggcccaatataagcaagacctacggccaatccagcagctataacggatgcagcagcaattaatggattcatgatgagttcctcgtgtcaaaaaaaagatatggttaaggatacaatcaaccaagaaattcatatttctaagctctattggacagaagtaactaaaaagtacaaattgatacgataatctgaattctccgaactgcttcgagatctcccttttagtttctaatcattagaaggttgtgtactcattattctatttctctttttttccaaccaacagatctttcattccatacttctttctttcctcttcgatatccttgagt

SEQ ID NO: 67834 - DNA, 357 bp, Oryza sativa
  unsure (1)..(357): unsure at all n locations
agcttggaagagaggcaaggttgttttgctaatctnttatttgaagacatttttgaaatcactaagtgatttatttctttctaagtttgggccgaaaagagacttgcatctcgattcgactttaagagatgtttttcaacagctcatttagtaatgtaccgacctcccgggtcagatcattacttctcggctcccagagccattccacttgattaatcggctcccagagcctttttcattgtctcggactcccagagtccagctgcccagcagcaaagcaatccgcctccactcgggaagcctagtctatgatgcccacaaacattccgaatcacacagattcgtttctgaccactc

SEQ ID NO: 67835 - DNA, 359 bp, Oryza sativa
ctaagcttctcttccttgcttaccaagaacccggtttggctccatccgacctcttcccggcgatcccaactattggcatgtgaggtctccctgaaccgactagttacttatccatggtgtcccattccaccttgtggttgcactttgattatgctcgatgaagtttccacatgaattggtccttatatgcgaatacgggacatcgccacgtatgcacggctcccgcatcgcgagttttcacaatttattttattttcaaacacaccgacaccacatgtcgggttttaaaggcttcacaaacccattttccaagttttcgacaatcaacggcgtatgtgggatatttggtatgcgcgctc

SEQ ID NO: 67836 - DNA, 391 bp, Oryza sativa
  unsure (1)..(391): unsure at all n locations
aactaagcttcgataacactgacatatccgatgacaaagggganaccttgactgttttggntaccagaaaatatttttctttttcttatctaaagaattaaagaaatggctaaaaagtagtttctttcaagattaaaattaaggatcataccataatatatgcccaactggatgcacaagatataacgttgagcatgcacagaagcaatattaatatttggcacgttgcaatgaactttccaatgattttccttggccttttcctctcgtgttagcgcatattaattacctaactcacgaagacgtacgtacggttctactactacgtgttatattacgtacgtacagcatgcgagagacattggaaaaatttgactggtcttgtactgtc

SEQ ID NO: 67837 - DNA, 405 bp, Oryza sativa
agcttgagggtcggcacatcttatcggattttgtagaagatggacgtcctattgccccggccgaagccgtcaagaactatgtacgtcacaccggctgggttgtgcgggataacgtgcctgtcagtacggtgtactggcgaagaacaagggcacgcggagatcatgagagctttgtcccagattcggagaaagagatgctgtggaccacaatgctcgagacattcacccttcctgcgggtacagaggacaaagtgaaaaggtggactctgaatataatggcagaacagtttcagagcttcaagggagatctgtaccagaagtatatactgaaggggcagacaccgtacttcgacacattcccaaagctaagggatcactgggacgagttcgttgcatataatacag

SEQ ID NO: 67838 - DNA, 359 bp, Oryza sativa
ctgcataattggtacctcgccagttattcttttatttcaatcacaaaacatctgcacacctccttgagtagccattttacctttattgttgctttgtaaaataacaagcgtgctcaaatggaaggaccataatctgcatgagtaatgcatcacataatgaatcatcatttgaacaacaatacaaaatgaaattgtggaagaggttacctttacagtcttcttatcctcatgcatagatgcatttatacaccaatggcaaccatcagctgcaccttttgcaataaaccttgtatgatctgttttcatacctctatcaaattcaaaaactttgaagaaagcattatgactttaaacttttc

SEQ ID NO: 67839 - DNA, 390 bp, Oryza sativa
  unsure (1)..(390): unsure at all n locations
agcttatccagaagagaccgagttcaagttttgccgttcgacaagntatctattaattatgaataggttgatagtttcctttcatctttacgaaagggtgtttagtgtcgtataaagacattatcttttccttttatctttaagaaagtttctttcttggccggctaggacttgtatcaacccatgggtataaatatgtacacccagggtctatggtatctatcttcatgatcaatacaattcggcgcatcggcaccttttaccttttctactttattttatcgtccggcgggacttggcacctgacgtggggctgcatcggtgttcgatctccggctaatggtgtagtccaatgctccggcggcccaggcaattgaatcgttacgtcgg

SEQ ID NO: 67840 - DNA, 397 bp, Oryza sativa
tgcatcggaggaggagtggatggagtacgaataccacttctcatgtgcattcgtgtttcaccagatatcatgaaggtgttgttcgactgtatttgggagtatatgaagttagcatacccagttgtacaacctaaaatggagacagatgaaaagaggaaaaagccatgctccgctcatgttgaaagtgttcgggaattagatgaagctttggcatttctcccagagtttcaagagtctgttcttatcttgcacattgccacgaacgtcttctacggcctgtgcatcgaacctgatcaaaatgcggcatcattcaaacaactggaggcgatcaagacgttgtagactacatggtgttcctcgtcgcagttcgccccggcatgctaccattgcttaaagc

SEQ ID NO: 67841 - DNA, 329 bp, Oryza sativa
agcttaattgttcccttgaaagatattaatacatagatcaaagcaatgcacacacttgcactaactagcttagatttgttcttttggtagagctcatcgatccttaccttgtcgacgatcgaagagtgttgttccagtgtgtgtactgtgtagatcgagcttgcttagcttcctgtctgatcatggaaagctctcgccgagctcagggacaagccctgcgagccaaggttgtctactgtgaactgctcggcctcggaggagtagaacaccagctgatgatgcggccctggagccaaggaaagcagtgaatggaactgcgatgtgtggtg

SEQ ID NO: 67842 - DNA, 377 bp, Oryza sativa
tggaccctgtcggcagacacgcctgattcctctacgctcaaagaagacgcccttttcattcctgcccatcacaactcccccaatcctatcgctagctcgtagcacggtatagcatccatcaaagatatccttcgatccacgcctagcggctactgtgtagtagctagcccatgtcgtcaggtccgaaccgaatcctgatcaaaacgacgccccgtgaaaacgaaagatggccgagcccgaccgtccgcatctagcttctctatagtagcatatatcgtgtgatcgatcgtgtccgatggacccagacacacggctaccgctacgtgcgtgacgcgccacgctacgactccgattgattctgcgcgagaccgatcgag

SEQ ID NO: 67843 - DNA, 323 bp, Oryza sativa
  unsure (1)..(323): unsure at all n locations
agctntagacaatttanaaacatgggtgggaaaatcatgattttcaaaacctggtggttgtttgatataaacttcctcctgtaaaaaaccatttagaaaagcacttttcacatccatttgatacaatttaaaaccttttgaagcagcaaaagccaacaaaagtctaattgcctcaattctagcaacaggagcaaaagtttcatcaaaattcaaaccctcaacttgagtaaaaccttgagcaacaagtctagctttgtttctcacaatcaaaccatcctcattttgtttatttttgaaaatccacttggttccaataatattat

SEQ ID NO: 67844 - DNA, 330 bp, Oryza sativa
tgctgcattatacacctaaattcccgtgacttgctgagttcttttttctcacccttgctctatataaatatatatagttcctccgccttgaagtgaagatgaagtgaagtgaagattatggtttcgtccttgttcccagccgtcgcctgtggtgttgggtgttagttcgctggttccgctgctgctgctgttggtggtgtttactcgtccgtgtcgtcggttgcattctcgggttgttctgagctgcaacctaaattaaagtaaataaatcctctatttatgttaaagatttgcaatgattcatatttgtcaccgtgggtaccaacacta

SEQ ID NO: 67845 - DNA, 315 bp, Oryza sativa
agcttgagcgcatatacgacatccatggccatgacagtcttgcggtgagcatgctcggtgtatgtaatggcatcgcagatgacattcttgaggaagatctcgagcacgccacgagtctctttgtagatcaaccctgagatgcgcttcacgccacccttccttgcaaggcgtcggatcaccggcttggcgatgccttggatgtagccgcgaaagacaatccgatggcgcctagcaccacttgtaccgcgcccagaaatggctaccgactagtggagcgcgagaagtgctagtggaaatggaagagaagtggcactg

SEQ ID NO: 67846 - DNA, 310 bp, Oryza sativa
tgtcaattttcgatgtgttcttgctaacaatgcaatttttctgtctctcttttcatgctgtggtgaatcactaatcactttggaggatggagaacaccatgggggcatgtgcaggagcactcaccgatgcatttggcgaagctctcctggggcaggcgtccgtcggcgctcatctcgtcgaaccgcttctcgacgtttttacacccgtccttccccgccgacgtcttgtctatgaatcgcaggccgcgcatcgccggctgcgcgctggaatgcgtccgcttcagcttcatcgtgtcgggcaccatggacg

SEQ ID NO: 67847 - DNA, 447 bp, Oryza sativa
  unsure (1)..(447): unsure at all n locations
agcttcacgaatcttcaagatatccacgatcgacgaanatccggttaccgcaactatgcgcaaacaaacaaaaacctaaacaagagaccaagaaaaagaccctatttagactaaataatagtgccattaaatagatctcaattttatggaattactggaagtggaacggtgtcaatcggacgattggatcgagagatacgaattttggaagtttaattagaatttctggcgaaggaagatatttgtagaacaaggggagattgattcatgaaatttatagaaataatattctcaagaatattattgaccatctctgacatgcgggaccaaaggaaatgatttataaggaaaatgattcatgaaaatttggaatagagaattgatntatgggatcaagggaanaagatttataacccatgaaataagaataaataattactgatttat

SEQ ID NO: 67848 - DNA, 380 bp, Oryza sativa
  unsure (1)..(380): unsure at all n locations
ctatactaatagcatacaacgctgccaagatttggtnattgttaaatataccaaaatttgacactaataaattttagaagggttaaaaatagctacaaagtgaataaacccttaacatttctaaaaccttaacatttcgaaaacttagattaacatttgacagtactttcaataaaagaatcatttgatagtactaaaatatgatacagtcgattttgataatgtactgaacacaaagccgaatagaatgcaatgccctctaacgatcggagccatttgatcttatgagttattatgacttgtattttggtccccttttgttttctgaacgagttacgggcgctgagatcatgcactaatcaaacattccacatatattt

SEQ ID NO: 67849 - DNA, 321 bp, Oryza sativa
agcttatgaagtatgcgcgtgggaaccatctattgaaagggtggatggtctgtttgttaaagctccaagctacttcaagctaaaatgctttaacaaaatgaattagaaaagtagagctatattcttcatatgtcttcttcaaactctcaattcttacagttagatttgtaagttagaatcgtgacccttaacagctagccttaacatgtacacacgtacgccacagaagtacagaacgcgtatctcccttggcccaattggggaatgagttaagcgcgcccacccgatcggatcgatcaacccgagcaccgaactcgatcg

SEQ ID NO: 67850 - DNA, 373 bp, Oryza sativa
  unsure (1)..(373): unsure at all n locations
tgacccatntggtactccatttcatgattntcttgatatgcagntncatattttctctatactacacagattgagcagtatggacctctcaagtactatcgcaccatctaaagcaaacggttctggcgattcatgtagtcaaactcagctggttattgaatcaaggaagtccttttgtgactgcaaaaacaaatttatgcataagtatggaaaacttgtggtctggggccttaatgcatcatcatccatgacactgaaattagaagctctagcttggatagatacgtttggaaacctggttcttggcatggaaagggatgtggataagcgcaatatctcatacgaagtccatgatggtgctacccttctgaat

SEQ ID NO: 67851 - DNA, 428 bp, Oryza sativa
ctgcagctactatcagagcaagtatagtaatgtacaggcagccagcgaaatcaacagctacgtcatcgaatccaatgtggaggagcgagaaaccaagaaagagaaggaaatgggtgagtcgcgagtcgccggctcggagcgttatatccgaggcgaaacgcccgctcccagcccgttgctggcgtcggcgcttgctccacaacggatgttttgtacatgcatatattaattgcttagatgttttaattaggtaatgtatcagtcaacttatagccaacccattatacaagtgagtttttagaacatggctaagtgacatggaagtgacttttagccggctgctggctaagttattatccctgctctcatggactataatcagaattctagcttgcgcagctagctactatcagattctttttcacact

SEQ ID NO: 67852 - DNA, 167 bp, Oryza sativa
  unsure (1)..(167): unsure at all n locations
attaagctttacataggagaagaactttcantttttttttcttaacgaccgaacctaaactacagaattccacagggcaatcttcacactgtggttataagcgcaccaactacatatcccgtaaactcacacaaactaactccaccacatgataaagctcccacaac

SEQ ID NO: 67853 - DNA, 387 bp, Oryza sativa
agcttacattaaacacctaaattcccgtgacttgctaagtacgatttttctcatccttgctctatataaatatatatagttcctccgtcgtgaagtgaagatgaaatgaagtgaagattagggtttcgtactggttcctaaccgtcgcctgtggtgttgggtgttagttcgttggttccgctgctgcttgctgtgttggtgtttcctcgtctgtgtcgtctgttgcattctcgagttgttctgagctataacctaagttaagggaaataagttctctatttattttaaggattgcaatgattcatatttgtcaccgtgggtaccagcgctatattctgggactggtactgagatcgcggtttctgaagaagcggttcacgccatttt

SEQ ID NO: 67854 - DNA, 406 bp, Oryza sativa
aactaagcttccaattttgaattctatgtaggccattgttatttattcgtttgaaatttagcgagagttccaacctctgggaaaattctctttgagtctatctctctcatccgattcctgcgttgttcctgcgctccaatcaaacgaacattcctgtgtttgttctgtgttttgcaatcttctgttttatacttcaattacggtaagaatactatgtcttttctattcctacgatttttctatcctgcgattcaaaggggcccttatttccaaagtttttcttctaacttccaactgtttcatcacatgaatacttttgtacacacacaaacttctaactttaccattacatgatctcaatttgaaccaacttctaatttccttgcgaacaaacacagttgtcttg

SEQ ID NO: 67855 - DNA, 381 bp, Oryza sativa
agcttcatgagcacttgaagttgttgtccattgcgcattataggaccacatacatcttttatatagcatggtgcagatacatgatgtgctcccttgtgacaattacacatcataaaccgaattaagtctagtcatagatagtaagaataatgctccattcttttctaaagttgagctggctacatacctagattatcatgggcacgctttccaagccggtaaatggtgagattttttttttttaataaaaaaacttctcatgtataaaatacatccatttatcaactctgaaatattaaaaaactaattaatcaatctctaataagccacttcattacttgtgcagctgatcaactcggctgaacatccgaaacaaacaga

SEQ ID NO: 67856 - DNA, 416 bp, Oryza sativa
  unsure (1)..(416): unsure at all n locations
gctttcactatattagataatgtcttaattatacgcgactactattatcacgtacttcatctgtcccataaaatactaaactagaatcagatattacacatcatattactatgaatttagacatatctgtgtttgtgtttagattcgttgcagtagactatatcatatcattaatttttttagacgaatggatgtgttggtgcaattgaggacttgggggtcgtaggctgcangtgtgaattgaccgtgtaaatttggagacttgtaactcccaatcttcttctcgattgtcaacctttcatgcttgtcctggtcatatggtactactcctgtcctgtacttgtgcctaactccaagataataagcagtacaagtctcatctctgcgctgtcgccttttactctcactgcaacaca

SEQ ID NO: 67857 - DNA, 323 bp, Oryza sativa
gggaggggaagagaaaaaattatattctgttgagaccaaggcgaaaagaatgggcgagaagaaaactggcaaaggagaaaggacccgggcacagtctgaaattaccaaattatatccgagagagatcaccaatgcggagaaagaatgggaagacacgtaaaaataaaacgcctgtccatcggatgcaaaattaacataactgaacaaggaaaaatataatagatgaggattggggaggaagcaaatatcaaatataaaatgggtgagcaagcaacaaaagaagaagaactgaccatgaacaaaaaaacgaacaggagggcctg

SEQ ID NO: 67858 - DNA, 328 bp, Oryza sativa
agctttcatgcgccctaccatgcatgaggctatgggttttctggaggatatttctgtcgtcgcccgaacttgcccagcctgaacaccccccaagctcatctgggtactaatatctcttggctagcagcacgatcacacgaatgtatgaccaatgtatgaccattggaataataatgcatatgcattcttcgctgaacttgttctgtccttaaaccactcctatctgttattgacatgcctttgctgattagatcttgcacgatcccctgtcacttatggtctgcctttttcagataatcacttatatatgcaacttgcatatcactac

SEQ ID NO: 67859 - DNA, 335 bp, Oryza sativa
tgcctccatctcctcccacttcggcatcgcgatctatttccttctgttccccaaaagagatggtacgtcttcttggcggcattatctttgtttctttccatcatcgcctgcccttgttgacctatcttgtaagcaacgaactcgtcccagtgatcccttatcttcgggaatacgtcgaagatcggggtctgccccttcaggatgtatttccggtatagatctcccttgaaggtctggaactgttctgccattttcttaatagtacactgtttcactatgttctctgtactcacaaggagcgtgaacgtctcgagcattgtggtccacagcatctc

SEQ ID NO: 67860 - DNA, 350 bp, Oryza sativa
  unsure (1)..(350): unsure at all n locations
agctttgaaggagatgatgagagactaaatcgaatcaaacgggttttcataaagacagaacgtgaccatatgctgaaccctcagcagcaagattccatgatcaagaagtggccacccagtgaggttttggaaatagatacagatcatagcccctttttttcagcaccagaacagctctttaatctaatagtcaaatccctatgatgtaaatctgcatacaactcaaacatccaaggagacttctccaaattattgtaccactgcatatacacaacaactttaaactgatttagagccacatctttgtgaatcatgctcctcangagatcatggcatgtctgcatggtata

SEQ ID NO: 67861 - DNA, 174 bp, Oryza sativa
ttgcactatgtataaattttataccataatttgcaattgttctcaccatattatcagctattcctacatctatctcaacggtcaccaattctagaaagaaaaattctccgatgatcgatgatcatacacccggtcgtgcccattgtctacgcccactggctgtcctctccgcca

SEQ ID NO: 67862 - DNA, 360 bp, Oryza sativa
  unsure (1)..(360): unsure at all n locations
agctngcaaatntgtttacaacgatgcattatttgtgaatgaaagagctcaaaatgatattctcttgctttcacggtattcctttcataataatctttaaaaaatatatcccttggtaaaaacaagagatttgtacataacaaaattatgtgtctcatttctaatcctagtggcataacaaggctgaacaaacgtgcgtgccaggatgttgctgttttagggtcaggatttctcaagcttgatggtacatgatttcccttttagctgacaagctcttagtttctttggtatgatttaactatccatctaaagctattatttactgaaagctcgtgcaaggaaggacactaaaaaaattga

SEQ ID NO: 67863 - DNA, 367 bp, Oryza sativa
  unsure (1)..(367): unsure at all n locations
tgaatcagacaaatggaggaaagacaccacatcaaatttttttcatcaaagcagnaaccgcccgtcatctctgagaccctcttatccgaaatcaaatgcatcattttatggccggttgcatttacaaaagcatgcatacccaagtgttccaccatagcaagcaatgtaccatatgtggcatcatgtgcaagcaacacatcagaagccgcatttttcaatggtacccactatgggcagtacatgctttccaccgcctccaactgtgctccacatgtaccctccacctatagggcaattcaccatgccatccagccaagatggtttatgtcttattccatgttatcctgaagcttaccccgttctttca

SEQ ID NO: 67864 - DNA, 421 bp, Oryza sativa
  unsure (1)..(421): unsure at all n locations
agcttcgagacagtggtacttgaagtttgatgggactataaagaaatttgggtttcaagagaatgtcgaggacaactgtatttattcaaaatttaagaatggaatattcattttcctaattctgtatgtggatgacattctaccatctagtagtgatgtcagtccactgcaagaaacaaagaaatccttgtcctcaaactttgacatgaaagacctcggtgaggcttcatatgttgtgggcatacagattcactgagatagaacaaagtatgcattgtgactttatcaaaagacatatatagaagaggtgttgaagaaattcaacatgtacagatgcagtgcttcacctgctcttatagtcaaagcggaaaagtatggggcatgacaatgtcccacanatcagtatgagctcaatgaaatg

SEQ ID NO: 67865 - DNA, 439 bp, Oryza sativa
ctggatagagaagagaaaaggaatggatatgaactaattctttatccagtcgtttaatttattccgtgactatccgcacagccatgggacaccatacgatagattttctgtaattaaatcatgattgtaaagtacatttccatcgagtgtggagggctgcaagatcagttcaatccgttcaatccggtgtgccgtctgctggagagtccttaattcttgggagggcagcactggctacgctctaactttttagcctacaaaatatgagggcgaggtttaaagtggggtgagttcaatttctatatatgtttggcctaaaaatatataaggattaagtagggttgtgaaaattcaaaattttgaattttgaaacgatatgggatagagatatgctctatataaaaagtgtagatctcgacgatatcaataaatttataac

SEQ ID NO: 67866 - DNA, 341 bp, Oryza sativa
  unsure (1)..(341): unsure at all n locations
agctnttctaaagttattcaatagactgtttataaaaaaaatcacatctgaggtttggcgtgaacattttccagcttcagtgtggtatcaattactgcagtcaccttttcatttagctccattaattgaaatgcttgaatcatttttttaatctgatgatgtgtttagtaatttttttcatgtcactagagcatgtaattcactaatgtggtaacccatatttttgctttctttctcctacgcacttaatatcataagaagtttttccctgaaactattcccagggtcgtactggattgaagtaaatacgatgttgaagaatggctttcaatattcctaac

SEQ ID NO: 67867 - DNA, 319 bp, Oryza sativa
  unsure (1)..(319): unsure at all n locations
agcttgctgatgctcttatgtctatggcttgtatggatccgcaactgcaaaggtgaagcggagttnttaggtatattctgatccgcttatcctttttttttctctccatgttgtctaactgcagttgcattagccacttcactttttaacagtcatgtactcatgttgtccttgtgaattcacaagttttttttaaggcattgcaaactattcttatcaggcaaacaagaaaactaggagatttcaaaaagacaaatgcaaagagctttgagtgtttcagaaggacttgggggaaacaaaagtagaaattcctgttata

SEQ ID NO: 67868 - DNA, 309 bp, Oryza sativa
  unsure (1)..(309): unsure at all n locations
ttatcaagtatacttatctcacttaatagattctaacttcttaacattcacattcagaccattatactatatgcaaaactgttaataagatccttacacaaagtaatcgtttggactatgcaacttgtatgtaaacatcaacttgtcatctactcctttaaattaagttaaaacagttgatgataaaaaacataacactgaacaaaggaaatgtccatcaataaggagacagacacatgaacatanttctggtgatctatgtcaagttggaatttcataatgctgcggagaatttcgtattcataaact

SEQ ID NO: 67869 - DNA, 461 bp, Oryza sativa
  unsure (1)..(461): unsure at all n locations
agctntgccatgactaaactaatgaatattggcatgtcatggattgcgagtaaagcgtacatttactgcagtaaaataaacatgaatctattcgaatagccgcgctcacggaattgagtatcgggactcatatggtactttggttagaaacttaattcaagattttactaaatgttgctgcatttaaaacatcaggctttctatttctatattctctgccttctgctagtaatcgtaatcctactcaaatattactatttcattcattcattattgaatataatagtttgctgagtacgttgtactcacccttgcttcaaccccctttttccagagttaaattgaagttcttgccgaagccaggaagttcaatcatataagtaatcttatttcaatctagttctcaaatctaaattagttagatgggttaagtctatagcaaaatattaaggttgagtcat

SEQ ID NO: 67870 - DNA, 427 bp, Oryza sativa
tttataacgattgtacttcttgcgccagaggaactgcatgaagcaactatcttgttacataaaacaatgagagctagttcatgatgaactatgcaatgtccttgtttgttccaaaacagctgcacattgcaatagtactatatttgtatggaccaataaatagaaataatcgtgttggacttcattgcaaattttgtatgaatatagatccacacattgacaattgaactttttatcctttatactattctctctccagatgggaaaattgaaaattgaaagcaaggaaaaacaaaaaaacaaaatgttatgatgggttgctgctgacactcgcacttgggatgcagattaagacatttccgttagaaaccaattacataaacaacttgcgttctatctcccataaaaaaaataataaactgaatag

SEQ ID NO: 67871 - DNA, 369 bp, Oryza sativa
acctgaagcatgcaagcttctcgggttcttggtctctgcccgatgcattgatgtcaaccccgagaagatacgagctatagagcggatgcgcccccccagcaagcttatggatgtgcaatgcgtcactggctgtatggccgccctaaatcggttcatatcgaggctgggagagaaagcgctacccctatataagctccttaaacgctccgggccgtttatctggacggaggaggctgaacgggccctcactcagttgaaggcgtacctcagttctcccccaatcctggtcgccccggagccagatgagccgttgctactttacctggcggcaaccccgcaggtggtaacgctgcgttggtctgggagcgc

SEQ ID NO: 67872 - DNA, 397 bp, Oryza sativa
  unsure (1)..(397): unsure at all n locations
agcttaanaaatgattgaaaattntgtttaagtgcacattatgtgcattttatgaaactaatgagactaattataattagtgcagaaaantttgacataaatttacaaaataaaacaaatgtaataaattaaattttttatttgaaattttaataggacaatggatatttttgattgggagtattcataaaaaaattattgtgagcattggtagtcctatctttgtatgaatgctcatcatttttatgacgtttttaaaaaataaatacattntttatttctttatctaaaaaataattntatgataaataatgcagcgcacaacaaactgataactataataatctcctacgacaaacttttacatttttaataatgcaattcatgaatttctatg

SEQ ID NO: 67873 - DNA, 426 bp, Oryza sativa
actaagcttaaaatttcttcaaaaagatgggaggtcatgcaaatttttctattttatttattttggtgattacatacaaatcggaggtacctaaaaagtttgcaacttcatcctccactgttttttttgtcatactacatttgcacctatgttttgcacacttttttttgtctccaaaatttaattgcaagttgatgagagagaaaatgtgtgtggggaagaaagaatatatagaaatttagttcatttgctaaacaaggttgtataaaataggtgagaacgaaaattctagtgaaagttaatcttaaataatagaaaaacaaactaaaatgaatattaatagaaagtaaacacatttaaaataatttaaaactttacaaataggttttaaaaattatttggcgtaatattctatgatatttggag

SEQ ID NO: 67874 - DNA, 350 bp, Oryza sativa
  unsure (1)..(350): unsure at all n locations
aaattggnattgctgctnattttagcacgactacacagcacgtctaccatattgttatggacgcctgctggtcgaaaagttgtaaatttagtactacatattttaaagttgaatttacaagtattccggctagctactggtaaaaagttcaaaattttcctatgatatttggtaattgtgcagttccaaattttaccgtgggcagttaaatttcactggaagtctggaacacccggcagaaaggatgacgttgagtgttgaatttcctttcctttgggatggcaacaatatgcccaataatttgactagtccaaatcttttgtgggccaagcttgctttattttccgtgg

SEQ ID NO: 67875 - DNA, 423 bp, Oryza sativa
ataaaactaacaggtgaaactgtggataccgataaaaattttggatattttgatgctggactgcaactctgataatgatgacatttgtgctcattccaacacatatatctttcttatttttttgattattgtcaatctgcatcattttcccagggtggcatatttgtatcaactgccagatacccgccttccatatgtgttacacatgtacctattccctatgcataatatgcattaaagaaacaaaattcctctttgttacgggaaacaaaggcttctgtgagacatgcatgaatactgtgatgttatagagaacacgatgagctccgaacaaatggaatatttctctgtttttggcttacatcaaacatcaatggattttatagtatcaccacgatcttgacctttcatcctttttacttc

SEQ ID NO: 67876 - DNA, 362 bp, Oryza sativa
tctataaaaccaacatatatgagcaatgcgtgttcaactcttcatcttacaattcaataacttgcaaagacatatgcatatcgtcggaaaaatacacctgctttctctctgctaattaaattcagcgctaacaggcaaaaaagtcttgcatggtaacaagtcatggtatgattttaatagagacaacgttgcaatcataaatgacaacgataaccaaatttcaattgtgttgattgcggctgctgtgcttatggagttatctaagaaagcttggaacatatacactctccaagttcatgactgatcaaattgtgttgtactttgtcctcaaggtcactacttattgattgcaattttttgtt

SEQ ID NO: 67877 - DNA, 427 bp, Oryza sativa
  unsure (1)..(427): unsure at all n locations
agcttcctaaatcctgagagaaacaatnttgtgcattgtattgaacttcccggtaatatgaatatctccaccgggtcagcatatagaagtataccatttgcttgtaaaaaatgtaaccctttattaacgtacatgcacctagatagctgggttcatcttcatttttctaaccaatgtttgcaattcagcatgcgcaaacacaataccgatgaaaaagaagttgaaataaaggagatttttttgggagagaaaatgacaagaggccttcggagtccaagggtgctgcaggttgcgggcagaagcagctcttgtcaatggtagcactnttgtggcattctaaaatcaaattgtgaaattcaaaaccagctgtaaaaaagttgagccaagcgaaatttaatttttgactggctgccacttattatatatg

SEQ ID NO: 67878 - DNA, 364 bp, Oryza sativa
  unsure (1)..(364): unsure at all n locations
tgatatttttcctgancacgctctggttatttgtgcatccggtttattccatcaccggttgttttgatctcgtatgatccttttcacacgcgcaacactcctcttgctgccaccgggccataccctaacgtcgccaacgtcgatatgtctcctattgacatttctccttcaattgatagcaaaaatcaattcatcacttctcccttattatttttgtcacaatttccactttcaatgtaactttaattcgctggatttaatcttaatcgccaatgatgggctgccagctagcttcgtccaccaattttatttgattttaccaattcgctccattttgggaataacgggatagaggagtaaaagc

SEQ ID NO: 67879 - DNA, 425 bp, Oryza sativa
  unsure (1)..(425): unsure at all n locations
agcttatggcatgatttatatgtacaagatataacatagacgaagaccattgccggttctgttgtccaaataatctccaaaactaaaatattgaagaaagcttcagagaggctcacacgcttttcaaataagtcgcaatgatgcatctgtatgaaacaaagaaagaacaatgtcagagaaaaacagtctagagtgtcctatatttttaactttgttaaaatattcaaaagcagagagatctcatgtgcaaattaaaaaagcagagagatctcatgtgcaaattaaaaggagaagttgtatacctgtacatggtaagtaccatctgttttctattatgcattatccacaatccaaaaggcaaccttcaaatttcacagctgtccttggtactntttacagcatcagaatcatcagcctttccctcg

SEQ ID NO: 67880 - DNA, 357 bp, Oryza sativa
  unsure (1)..(357): unsure at all n locations
cctgcctgaagctttgatgtgtattttttataannaggttctccactgcaattatgtgctagctatattacctttgtattattgtagatgcatgcttaacttgttttgaagcaccaaatgtgatgctgttacagccgtttatcttcaatgtgaggtgcctggacagattggaaatgatattggaatagaactggttgagtaatttcctattacattgttccatgtatgccgacttcacagatgcttgctcagttgccttacgataatcttgtgtgcactcttgggtaaatactttgagattgttgcctaccgttctatgttaaatatcttgtaaattggtgacatcttaatttttta

SEQ ID NO: 67881 - DNA, 304 bp, Oryza sativa
  unsure (1)..(304): unsure at all n locations
agcgtggtccaacatacaaatgacgaatatattanaagaaaggtgtatatagaacttaatagatgacattactaaaatcaatccatcaaaaacgagtagctagctaggcatcgtccttgagtttacctataataaggctaatgatgagaatatagtgagagcatgcgaaaagattgcagaaaagatcgttggtccctcggtgcctggccatcagctccaagtagtagtattgcaccaccgccagaagcgcgaactggatgatgccgatgacgtagctcctcaagcgactcctttganggagcgt

SEQ ID NO: 67882 - DNA, 256 bp, Oryza sativa
gaccaacttttattaccctatttgcacgttggaccaagcaatggcaagtgttttcacatttgaccatgttttgttaccatatttgcatgttgggtccacgtgtcaaccattaagaacatcttttttctcatccccgtgaaaccattccttcggtcctccctcacgccataagctaatctcctctccacactcctctttcccaatcacggctggctatagctgctcgaaccactccgccatgtaatgagccaatgat

SEQ ID NO: 67883 - DNA, 289 bp, Oryza sativa
ataccacattaatagctcacagttgtattaaaatatattgattcagcttaacacgcgcgttctatcgtgggtgttactacaaaactaagtagggtgatggacctctggtacaaaataacttatagagtgaaatgccgaaacttaagtaacttctggagtgagttttgtaatttacaagttttccaatgtttcataatataaagcgcgcatgcatacatgtcaattactagcactcccctgctgcttaattaatttctttaatcctccatacacatatctctaatttttt

SEQ ID NO: 67884 - DNA, 335 bp, Oryza sativa
aacacttcagcttcagctgaatgacttcttgttattcaatgggatgggcttgtgctggtccaaatacttttggagcaagcagttcaaccacatatgcttcaagaatcccatctgaatttcatgatcatctgttaaaaaggaggaaattgctttgggtcatccaagaacaggcatctgatcttgctaacatctgcacatctgttttggagtttgaaggatcgagagacggaatttaccttattcctgaagataaatctttcggacaatctactgacagatgcaggacatggcagcaaactctcttgaatcttctgacacgtctaaatgcaacatat

SEQ ID NO: 67885 - DNA, 400 bp, Oryza sativa
agcttaacaggatgaagaagacctcggtgggcatgcctcactgcagcagctttccaagcattgaaccactaaatcaaggtttgtgtgaagaaagaaagccacctgacaaattgaaaaacatgtgtaagaaagaacgtgcaccaaaaaggatgcaatatttagttggcgaaatgctatatattatcaatggtggttttaccaataagaagttcacccgactttacaacatgagttcaataggagctaaaactcagttatgaatttctgatttcaggtgttagttatactcagttactcacagagtatcgctctttaccaactgcaacaacgcgatgcagtgtagaccttacagtcagcaaaagaccgagacaatcaaaaaatggtcttttcattaggataa

SEQ ID NO: 67886 - DNA, 312 bp, Oryza sativa
tgcttaattagctcaagtacctaactcgtatttatatttctaacacaaacacatacacaatccgtacacagctgcttcttctccaactagctacctacctagactcgcttcctttggctctcatgcttctcatcgtacgtctccaatggctgctgcttctactggtaacttactgcaagaagtacatgcaaagctgaagattaatgcagcatatgaaaccattagtgagatgatactatgcgtgttcatgtgtttgctattgcaaggaataatgggagcccgccggtggcgcttctggtgctgatggctgcg

SEQ ID NO: 67887 - DNA, 380 bp, Oryza sativa
  unsure (1)..(380): unsure at all n locations
aaacgaaanaaaaagaggannttgaactgaacccggaaccaaagaacggagcagaaggaacaaaaaaaggaaagaaatcggggaagaaagaagcaacttttttcgaaaaacccacgaaggaaccccaccccacccaacggggcaagggggagaaaaatcaaaaaagagagaagggaatggaacaggggcacgaagggaaaaggaacaaaagaacaaccggcaaagaggaaggaagccagggaaacaaagaaaaacccaaaaagaaggggccaacaagaccgagacagaaaagatgcaagaataaaaaaaaagccaaaaaaaaggcctcctgaaaaaaggaaagaaacggaggcaaaagggagagaaggagagaaaaaaaa

SEQ ID NO: 67888 - DNA, 424 bp, Oryza sativa
tatttggaagttcctgctgaggaaattcttgctctttctcttcaattaaaagtagtttggtttgtgatattctcaattaaatttttttaaaaaaatttgtgaacaggttgtggattgttccatatgtctttttgccaacagtgtgaatctgcttgttgggatgcatatatacttgtaaatatccaaatgattcctcatacttgtttttaaaaaaaaaattgctctgatgtgtaacatgagcttaatttccataaacaattactatactcaaactgcatttgtttagtttattttgtctaacataagtgttgttctattgttggaatgtttatatcattatatgcgtgtaagatgagcaattgctttcatttttcggcagatgattgctaacattacaaatatttttggagtttactgagctttt

SEQ ID NO: 67889 - DNA, 428 bp, Oryza sativa
  unsure (1)..(428): unsure at all n locations
agctngcatctttgaaataaccatgaaactcatgttccatttgtgaccatgtagaaattgaattaggagcaagcgaactaaaccatgtagatgaaaagtttgacaaagaaagaggaagcaattttaacttaagcaaatcatcattaccggccttaccacattgatcgatgaattggccgatatgctcctttgttgttctaatatcctcacttgtngaatttgtgaaattgggcacttcaaatccttgcgggtatgggaccgaatctacgtgttcaagatacggcctttgatatgtatgcattgctactttggattctatttcactactatcccgcaagacattatcatcatcttttccaacatccacatgaccgattgtgattcggtttatgtgacacactattcacttcgcttggatacaatcgacc

SEQ ID NO: 67890 - DNA, 395 bp, Oryza sativa
  unsure (1)..(395): unsure at all n locations
agatgtgttctcaataaaaacaacattgctgaattataatcttgtaattntgggagaaacttgttcagctgatagaaatgcaaggttaaatgcatattgagaagagcaatgtatgaatatacctatacatcttacagcagctaattttgttaactaattcataggtggaacactaatttcttttgggcagagggagtctgtgcatgccgcttctcaacaactttgatgcatangaatggatattctactttttcctgcatataactctgactttcgtactactgtacaaaagagttctttaacaagttacgttatatggacatgttcttgttttaaagttgtgcatgggcttttattcgttaatgtgaacgcatagttcgaattatgtggaaatc

SEQ ID NO: 67891 - DNA, 343 bp, Oryza sativa
agcttgagaggggtaaccttgctcttgatatgagcctgtccagaaagaacgtgatccgggttgtacgtggttacaaagatccagcttgcttgactgggaaagtttatatctatgatggtctttataaaattcatgagtcctggaaagaaagaacaaagactgggatcaattgtttcaagtacaagttgcagcgagagccaggacagcctgatgcaggtgcaatctggaagatgtgccagagatgggtagaaaatccagctgctagaggcaaagttttgcaccctgatctatcatcaggtgctgaaaatctcccagtgtgtcttatcaatgatgttaacagtga

SEQ ID NO: 67892 - DNA, 432 bp, Oryza sativa
  unsure (1)..(432): unsure at all n locations
actttggttgttgctttcctcgtcgtctgcgtcttgcttctattcgagtnggatggagntggacgcgtcgcgacgtggatggatggcggattgatttgctgcgattgaataacggtctgatgccgcattttcctctgcccttctctcttcttactgtactcattattttttctcaagaatctgcctcgttgtgcatgtcggattgtcggctgtgactgtctctgtgaccgcacctctacgttgtgagagcatatgcaatgggtaactccagctagtagcttcgctcacagcgtctccgttccgtctatgagtcatgctcctgaaggaacgcgtgaccncaacatgggaacgcgcccctcttgctgctcgactactcttttgaacacgggtcgagtggtgccccgtcctcaacctctttcttatattttcctt

SEQ ID NO: 67893 - DNA, 409 bp, Oryza sativa
  unsure (1)..(409): unsure at all n locations
agcttccatgccttagaaaagttctatagtgtattttggattataaggtattcatcggtgattaggtattctaaacaatcaaggtacgataaatcaaattgaacatatggcatagagaatatcaacaaaattcggctcaatgtacaaggaaaatgttacataccagccttatttctgcagattgaaaataagattggagcggaacaacacattcagcaaagaaagctgtagatactgcatcatcaatcacccttctttacatgtgaaagagctggcgagtaagagctttcagaaaactgcaacagtacagaatcaatcaaaagatacaaggggattattgaagtggtacctatgcagcacgaatgcaaatgtagaacctcatacangtagaagcttgaatggaataact

SEQ ID NO: 67894 - DNA, 387 bp, Oryza sativa
tctccaggtttcatctcacattttatgtactcctttttttaagatctcgacgaaggtctttaatgttggtagttccttgacgaaagtttttcaaagcactccaaatttcattggcagtgttaagatgcgaaacacgataataatccgtgcaaaaaatttcactcaaaagaatattgcgagctttgcaattgttattaaaataagttttcaaagcaatagtgtcaatctgttcaagaatcacatatggctgtgcaaactttttccaaacatcataatcctcagccataatgtatgattgcatcttatcacatcaataagcataatccgaaccatcgaatacatggtgcgtagtagtaaacttgttagctatggctaaagctctatatc

SEQ ID NO: 67895 - DNA, 75 bp, Oryza sativa
  unsure (1)..(75): unsure at all n locations
agcttcgtgcatgcggaggcccacagcagaaagtacgtctgacacctccggtgnattgatcaacgggttccggtc

SEQ ID NO: 67896 - DNA, 400 bp, Oryza sativa
aatggatcacgcaagtaagagcgaaaaggcatgtttctactggtcaaatcaaatagctactattcacgtaaaatacagggacgatgattacagattgtatttacaaattgcgcctgacaacacagtacaaacactatccaagcagataccataacgctctagtagaatttagttgagggctacatgaattgagcggggcaaaaatataattaaatatactttgtatcacattatatcatctgacaaaagctgcatctgaggatcttttcattgctgacagctataacatcagcaatttcattacctgaaatcccgtattctgcgtccatgtactttatacacaccaagagccccattgactaattgcaaaagcaaaatctcagatgttttatcaatactt

SEQ ID NO: 67897 - DNA, 371 bp, Oryza sativa
  unsure (1)..(371): unsure at all n locations
agctntgctaggcgcttatgattaaaattttgcttgctcggattaattgcgatcacgtgatatcggtgatacaccaatgcactccaaagtaatatcatagacacaggattcttaataccactagatcaagctttgctaacctgtgaagagattaaagaaaacatgagcatgttgttgggagaacatatggcaataagggatggggtagcttttagagggaaataaggattttgtccttaaaaaaatgagaaatgaattaccttcaacagcgaataatatgggagcgtatcctatgcacacaggccctcgcgtgtacacaccgtgtacaccaactataaattatcacaaaatattcctagaaaattcataca

SEQ ID NO: 67898 - DNA, 435 bp, Oryza sativa
  unsure (1)..(435): unsure at all n locations
agcttgccgacgtccggccggctgtctggtggtgcaacagcttggtgacgaataagctcgtcgacgtccgagcggtggtgtaattaacagcattgagccgagagtggagtgtgtcaaaaatggaatatcatctctatcantttatatgtacacaaagaatggaaagtactgatcgatatgatggaaataatcaattcaattacagcgtaattagtggatttacatcgaaatttgtggatccaattcagtctcatctcaaatatggaaataaattatcacgcaatcatatgcaaacgatgtgggcgtgtngcaaaaggaaagtgcgcaatcatatggaaataaattatcatgtaatcaccagaaaattagtacatgcatgtttgcttatatggaaaggcantcacatcacgtcgntcacgcatgcacgcaaatatg

SEQ ID NO: 67899 - DNA, 333 bp, Oryza sativa
tacctgcacacccatcacccgccatgagtccatgactttctattcaacagacttcgatcttccatggcagcacgcacaaagctagcagcataatataaatatagtattacggtgtgggactggccgatggagtgcttgacagcgagtccggtggccttgttgacgatggcgaacgccggcatgccctccccgtccttcaccttggtgctgaacctcatgtccttgaaccagtgctgcatttcaattcattccatttcagtatacatcaaaatccgatcgaatattgaaacaaaaaaataagcatatataaaaaggggacctgacctgttgctc

SEQ ID NO: 67900 - DNA, 395 bp, Oryza sativa
  unsure (1)..(395): unsure at all n locations
agctnntacctaaaaagcaaacttatttgctccaaccaaacgacacgtttgaaatccgatttattctaaaggtccaatgacggcctatcgttgttccattatgtttgctccaacaccactattttcatgtgtacacgccaacttgcaaacaaaaagaaaaaagggaactttcagcaccacaaaataagattctcttttgattcagaaagtgtgaatattttgttatttttttatctagcataagaaacttatatatgggtcaagaactaccagatgcaagtaagccataatttctttagtggtgcatgctagtattaaacttgaacctcaattgataaaaaaaaaactgccaaaatagtgaactacagatataattcttcatcctatatatgaaa

SEQ ID NO: 67901 - DNA, 382 bp, Oryza sativa
  unsure (1)..(382): unsure at all n locations
actttancanatcagagatgggtgcatgtatccctacgtctatgtggtctaggttcgtgatagcagagtgcacgcatatctgaagcagatagaaatttcaatagctcgctcgcactaatctcgaataaagtcgaactaactgaatcacatgaattatgtggtgttcttttccgactaagatacacgatttatcttgactntttttgctagcacgtatttaaactgttaaatggtttattccgtgaaaagctttctatatattagtgttgctttgaatattaaagaaatctattgtttaaatttataataattatgcgctaatangtttttttacacaccctacctttatcttttatggtcagtataaaactaccaccttaat

SEQ ID NO: 67902 - DNA, 340 bp, Oryza sativa
acgtttacatttgcaagtcctggccaccatgatgccaccatttaccgaacgagaatggcgattcaagtttctaacttatggtggtctgaactctgaattcaaaagaaattaagtctcaagtatggtcaagcagtcaggctgaactccactccgtacaggagccacagaactcacgctctcctgtgccgtgcgtctgatctcaccatgaccttatgacaacggtaattcaattcagcttcaagctgaaagcggtctatatcatgaatgcgagtgctagattcagatgctgcacacatggctagaaatcattacacgatttcattgcctcggatcgcctcta

SEQ ID NO: 67903 - DNA, 390 bp, Oryza sativa
  unsure (1)..(390): unsure at all n locations
ntaaccacagtntctttctgacgaacaccacacgactgtttataagttatgccatgtccccaatgcctgagagtaaaactaactgatgctcgtggttaaccactcttccaattgattatgtctgcgcctctgagttaacccatacttgtcagttgccactccttaaatgcccagttgcctagtcctttaataatttccatgagcaaaaagcaagcagaaatacttactagcatccatgcgagccataattagttatatttctgtgggagtaacaaagacgtggagatcagccacaacgattttctcctctgataccaactgttgacttactctcgcattaatatctgggaaaaaaacaaacctttcctaatacacatcagcttacgaaac

SEQ ID NO: 67904 - DNA, 417 bp, Oryza sativa
  unsure (1)..(417): unsure at all n locations
atgcaagcttgcatncttgagataatcatgaaactcatgtcttatttatgaccatgtagaaaatgaattaggagcaagcaaactataccatgtagatgccaagtttgacaaagaaaggggaaacaacttcaacttaagcaaatcatcgctaccggccttaccacattgatcaataaatcggccgatatgctccattgttgttctagcatcctcacctgtgaatttcgtgaaagtgggcacctcaaatccttgcgggtatgggaccgaatctatgtgttcaagatacggcctttgatatatatgcataactatnttagattctatctcactactatcccgcaagacattatcattatcttttccaacattcatatgaccgatttgtgattcggtcttaagtgacaatgctatttcact

SEQ ID NO: 67905 - DNA, 301 bp, Oryza sativa
  unsure (1)..(301): unsure at all n locations
actaagactgctctcttgcttggagtatgtgggagtgtcggtatgtttatgaatatattggtcacacacacgcacgtatatatgatgntctactgtgtaacacaacaacttcttttcttattctttttggcgaataatggtcacactacatcgtagccaaacagattcatggctacaagcttctatatcaatccactgcccatggccccgtgtgtgcgaatattccaagatcaactttaggcgataagcataccgttttatcgaacacgctagaacgctagtcctacatagaataaaaaaa

SEQ ID NO: 67906 - DNA, 432 bp, Oryza sativa
  unsure (1)..(432): unsure at all n locations
agcttatacccttattgtcccagtcaaatttgctatatttgtccacaaacctatagagaacctgcagaaaacatagagtaatttatggcaacgtatgtagggtgtcagaaacaagaactttacaaatgctgcagaatagttggaagtcagaacttacagctagtggaccatccaatgttccatggaagagatggaaaatatataacaccaatatctccaatgcataggtagaaattaatccatggtgagcaccaagaatgcggctttcataataacaccaagcttttatcagcattatacttctcttgaaaaggtggtttntttcaaatttttgatcaacctgcaaaatgtaatggttatagatatattttcccctgagcagtctgaccttaaagaaatcatctaccaactggtgaaccacaaagaagtaca

SEQ ID NO: 67907 - DNA, 386 bp, Oryza sativa
ttgcagagaaactcacgaattacataagtaggggttaacattgtgacactaactcactctgatgtaagaataatcctattaaaaatcaggatgactatatgaaaccaaaattaaaccgcacattttcctatttttcatcgaatttcccttctattgtctacacaaaggttcagacaccttcatccgaaaccgacactaatcaggacaaactcatagtgatattcagaagtagcaagttgcaattgttgatgcttcagctgaacataagcatccatattacaaatccaaatactactacttgatagttcctcaactgtactcaagttacttaatggtaatctacaatcgtctttgtccgctatcggaattgacgcattgttcgtcac

SEQ ID NO: 67908 - DNA, 428 bp, Oryza sativa
  unsure (1)..(428): unsure at all n locations
agctnggaaacccaccttttctagattcttataatctggctaccaaccagctgcatctcagaatcttaagctctctcaaacagacactaagtatctaataataataaaaataaagttcacatcgctaggtgcctaatatttgaagggtacaatttgctatggtttaacgtacgctcatgcaagaattgtaacctcaattcctatgatataatttaactctttatttcaattttaaatttctataatatattagttaatacttgcaagatagagagtttattgctgctcatatattgtgaagaaccacgtttttgtttgattatttgtctatttatctatnattttagttcggataaatttatcacgtttataatctatctattcagcactcatatgactaaattaaaatgaataaacacatgtagtat

SEQ ID NO: 67909 - DNA, 376 bp, Oryza sativa
  unsure (1)..(376): unsure at all n locations
tcgntgtctgacctctgtagactatcttcgaacatatcatttggtttataactgggaatagctcccacgaacaagcagctcggattcactttctttacattcagtttatttcccactattatctttaggttgtcctcagttagcattcaacgtattcctttacacctttatccttgatgtgttctttcccattggatcatctcccaagacatggcattgcctggtaaccggtgcttgcacttttcactccgtgtagcatctgataccgagttaaagatttcattccttgccttcaaagaaacacttttacctangtcgtcttgcttacttcatcatgcctcaatgaccangtgactggtgcggngcaattactatc

SEQ ID NO: 67910 - DNA, 427 bp, Oryza sativa
  unsure (1)..(427): unsure at all n locations
agcttgtgacgttgactggtggcagtggttcgatgtgctggatgggctactgggcccgtactggaaggcggccggactcgccttcaactgcacgttcctcctcttcggctccgtcatccagctgatcgcctgcgcgaggtcaaattcctttcctccccaactcaaccaaccaaccatcactctcccactgtcacttcgcagcgccagtgtaaatatgtagccgtgctgctgcgcaacagtgtgtcgtggtgacagattgggtttgtgcggatgggctgaaaacctgaccgataatttggtggtgttttcttcagtaacatctactacatcaacgaccggctggacaagcggacgtggacgtacatcttcggcgcgtgctgcgccaccacggtagtcatcccgtcgntccacaactacccgatctggt

SEQ ID NO: 67911 - DNA, 386 bp, Oryza sativa
  unsure (1)..(386): unsure at all n locations
tgccgacgtccacaatccaatcatctccatcacaagcttgtcggcgtcctcccttatctcctgatctactgacatgtgagagcatctagtccaaagtgaaagcttttggtaaaagaaactagcccaaagtgaaaactttgtctttatgatggtccatgttgaaacttatgtaaaaatacctagaccaatgtgcaatttactcaataaataataattctaattttttaataagacgagtggttaaacagtacaagtaaaatgtaaaaatcccttatattagaaaacggagggagtacgtggtttcaattctctctcttccgttcagntgtgttctctgccgagtgatgctttggagctctctactatcactaaaaataatataaatc

SEQ ID NO: 67912 - DNA, 426 bp, Oryza sativa
gagcttatttggtaggaacttaccgcagctttaattcgggttccggaactcaaagttccaagctcttacctagatgggagacactatattcctttgcagttaatcatctaacatagtaaccactacaattaattaaacagatgataattctctagtactaaatacttaagtaaaataaatgttgcacctgttttaaaaggaaggttgcacttcaataatattgaatgaaataggctagtgaaatttacctagtaattatgctgatcatgttttcaagtttcttgcatttcgccttggatttttattttttttttgaaaaccaagcctacaatcttatcttgcaacaaatctcaatcaattactgttcaattaaaccacaacttttgtcgaccatacagatcttcgtgaagataacactacttactt

SEQ ID NO: 67913 - DNA, 439 bp, Oryza sativa
  unsure (1)..(439): unsure at all n locations
gtgataattntgtagcttaattcagaaagatgacatatttgaacataaatgtggggatcgagactaggattaaagatttctcaaagaaaaaaaaagagtaaaattaaaagaggagcacctgtatgatgaaatcgatggggaccaatagggcagcaacctgtgtgtatttctttctgcaaagtgatgcgaaagtgaagcaaaggatgcattcgatacgacactttggactattgggcacactgcactttgcagggctgatcaagttagctaccactagattagcaaaagcttcctccccttgtttagccctgtcaaagatttgtgtttgtttagctagttaaacctgattagtattatttagtagcacttnttttttcactgctcacgaggactactcctangacagtangacctncattttcagtgacatgcctatact

SEQ ID NO: 67914 - DNA, 404 bp, Oryza sativa
  unsure (1)..(404): unsure at all n locations
agcttaactnttctgcgttacaacccctatacccatgatttggntggggaaaacaaaatgtgtcatgaagataaaagtttttgcctggctcatgttctgtgacaaactcaacacaagagatatgttggatagaagacattgtgccaaagaagatgatgacctcacatgtgttttgtgcaatgcgtattgcaaagaaacagggttacatcttttcttcacctgtccgttcagtatcaggtgttggcagcacctgggagttgagtggaatcataatttggagtttttccaaatgatcgccctagcaagaatcaagtttgcttagaggggtttcttggagattttctttttggcagcatggcacatatggaagcaaaggaatggtttaatctttcaaaacgttcaac

SEQ ID NO: 67915 - DNA, 431 bp, Oryza sativa
  unsure (1)..(431): unsure at all n locations
taaggcaagtcacacagatcccaaacaaccctttgagcttgttgtacccgtttaaagctaatgttttctttcaacttatgcattattttcgaatgtcatcgggtggtgagcctttcctaattaattaatggctgaagatgactttattttcctatgggttataatntgattagctagaaccttatgtattagtttggttcgctaaatgctatatgaataattgcttagccatgcttagaaacattagctcattaaagggatgaatcgtactacattattatttatgtttatatatctaatggtagctcatgatggctaatcgtgttacgttaattaattgacaattaaaacctgattaaaggtgggttgtgagcatatggttttgatgattgtgctcatgacaattaaggaccggttcatgaagctactgt

SEQ ID NO: 67916 - DNA, 408 bp, Oryza sativa
agcttgccaccagaggcttcatattgttgtcaggtttttgcgggatctttggaggcaagaattgccgctgctgtcgccgggctttctggcttgataaccccaaccaacaatgttcttaattgcactttgccagaatctacccacgggcgcgcctgctgccagaactgtttacaatatgggcagaacggatcggcgaagacgtagacaatgaccggcgcatcttttttaccgtcgaggagccagtgggattgttccatccgttgccacatttcgcgtccggctggtgcgtaaatttctttttcgataagtgtgttactcaggttttcacctttctcgttgtacatgtaaccagagatagcgtgcttaccatctggagtcaggtagatggtgacgcccatattctgatac

SEQ ID NO: 67917 - DNA, 361 bp, Oryza sativa
tgcgacgtcattaatcgatgagtacgccctgctgggcttgttctctctgctgactgaagtcaatctgtcaccgaaaccaggcctcgtggatcgcattaactgcggtgcgcacaaagatatggcgctggaagatttccaccgcagcgcgctggcgattcatggctggctaccccgtttcattgaatttggtgcctgtagtgcggaaatggcaccagaagcggtactccacggattacgcccaattggtatggcttgcgaaggtgatatgttccgcgccactgcgggcgtaaacacgcataaaggcagcattttttctttatggctgctatgtgcggcaattggccgtttgcttcaactcaac

SEQ ID NO: 67918 - DNA, 428 bp, Oryza sativa
  unsure (1)..(428): unsure at all n locations
cagcaagcttatttaaaaataaggttggttttattatgcctaantactctatgttatccaattatttataacaaaacaaaactcacatattatacaataatctgagttgtattaaataaagaagataagtttgcattattttgaaggacttgggaggagaaaacatagtattatgtgcagaatggataacaatgtcacatgcgattatgatctaaagggaggagaaaacatagtataactgtactaatgctgtaatgtcccgcctctcccattcataggtcatagactgccctcacaacacaagtctttcctgcacactntatcctcactcgtgtgatatgagtattctattaaagagaatcggcttcggaaaaaagttgcaatttggtgatatgagtattctattaatcctattaaacgctcctctt

SEQ ID NO: 67919 - DNA, 370 bp, Oryza sativa
tcatatggaatcttgttgtcatggcatttgtgtatcgtgctattgagcaagaacacagccgtagtgactgcctccccccaatagcacgccggcactgacttggccttgagaagactctgcaccatcaccagaatcatctgggtgcggcgctcaaccaccccgttttgctggggggaatacagcgcggtgagctgtcgcttgatgccgctcttggcgcagtgcgcggcgaactcggcggaggtgaactcgcccccgttatcggtacggaggagcttgagacggcacctggactcagcctcgctgcaagcttgaaagcgcttgatagccgcagccgcctcccccttgttctgaagaagagtgagccacatat

SEQ ID NO: 67920 - DNA, 363 bp, Oryza sativa
agcttaataatagtagtattagttggttgttttacatggcaccgaagaatagacccggtcacttttgttgcacaccctttttactttcaaacgtatgtacacagtcaccaaactctccatatataaccagcccatcctgtctctcttccaacaatcctagcttagcttcaattcttcagccacttcaattcaaggaggcagccagctcttgaataattcttgtctgccatctctgaaacaaatctagttagtacagtattatagtaactgcagctgaattcgatcatggcttcgtcgtcggcggcgatggtgagggtggtgctggtggccgtgctgctgatgcagtgctgcaatgcgatcatg

SEQ ID NO: 67921 - DNA, 428 bp, Oryza sativa
  unsure (1)..(428): unsure at all n locations
tgctgtcacttgggtgacccgattcattcttattatattactaattacttcattcatgatggttcttccattttttttgcatccacttgctttggagcagttgttgggaggttctttacctaaagatatctgtgtcctgtcaaccagtcctggagcattactataattgcatggatttcatcacttctgtttgttnttgcattccttagtcttatgaatgagatgacctgatacaacgtaaattatgttagatgtttaaactagacctcagatagtgggttatacctgtttctacttgctctgaagcatgttgtccattgctaatttaggatggcaaggaggaggtcatcgaagcttggtacatggatgacagtgaagaggaccagaggcttccttatcatcgtgagcccaaagaattcattcctctt

SEQ ID NO: 67922 - DNA, 416 bp, Oryza sativa
agcttgctcggcaagttgtgaaactttgtttccccatcccccattgtctatcattttggttgtgggggttaatttcttatgctttcctaacaggtactgattattttcatcctctggtttgcctaaacggctaattagttgccttaatttcttttcattggtttgagtattttctatgatcaaataagatgaccagttaacttggttcactttatattgcaaaactacaagatgacaatcgagctctggatcgtctaacaaaacaaaaggaggcagcactactagatgcacaaaggactgtggaaatagcaatggcaaaagctgctatggttgatgacttacaaaacaagaaccaagagttgatgaagcaaatagagatctgtcatgtatgtactgtgttcctagttgtaggataa

SEQ ID NO: 67923 - DNA, 451 bp, Oryza sativa
  unsure (1)..(451): unsure at all n locations
taatgaatgcatcacatacacattttctgttgtattttgtttgacacaagatatattccaacttcagaattntgaagtcctactccgcattatattctgggctttgcaaacggctcgcacacaaatttggattttaaacaacatctgcgttttcttggaacaaattctgcatgaaagtgatctggatacaacaggtctgtacacgtgtcagattttttttttcacattttctttggatttttccttttcttgcatgaagtcgtgaacccgagcagctcttaattaaacagataattaatcccctgttcttgtagaacactttactaacagcaaaccgtaaggacttcttgtcagagtacaatatatcagtcgacgtatcagatgtgccaacgatttacaaccaccaatcataaacatacttcttataatattgcaaaccaaacaattactt

SEQ ID NO: 67924 - DNA, 378 bp, Oryza sativa
  unsure (1)..(378): unsure at all n locations
gcttggtcaaaggtttacatcggtcgattcgttggaagaagttgacataggagatggaacttaaccaaggccgacttttgtaaataaatatatgagaaccgattataaggttaaagtaatcgagctacttaaagagtatgtggattgcttcgcatgggagtatcatgaaatgccgtgtcttagtcgtgatcttgttgagcatcggcttctaattaaaccgggttttaagccttataaacaaccacctcatcgttttaatcctttactatatgaccgagtcaaagaggagattgatcggttgttgaaggcggngtttattatgccatgtaattatgcggagtgggtttctagcatagtcccggtggagaaaaggggagt

SEQ ID NO: 67925 - DNA, 472 bp, Oryza sativa
  unsure (1)..(472): unsure at all n locations
tagaaaaatcatcagacacaggagtagggtattacgctccttagcggcctgatcctggataaacccccattgtctcatcttcatcgagggcccgaccccctcaatacctcgcaatacttctagctcttcaactttcacccgttgcccccggccgaactaacaaaggaggggtctcatggtcccccgctcgaggagttcatccgccgacacctggcccaaacttctggcatatcctttggccaggagactggctggtgggcacttatggcatttaagatggtttggtcccattttaagtcggtttctattaacttgtgggccctccaatccttatactcgtgcatgattttctccttaatttacctgcatacatatatttaccaaaactggtagaagttcgaatagtatatttgatatattntatggatgaatngacgggtataagttgcacttaacgtgcatcaacaatatg

SEQ ID NO: 67926 - DNA, 420 bp, Oryza sativa
agcttatagttgagtacagatgatctcgttatgtttactccaatacacgatggccgagaggtggagaattcaatgtcgagaacaatgacccagatcgcgcagccatggccgattcttttattgaacaaataattcagatggtagaacataaattacaattattacaattaaagcagagcattatttccgttgttttcaacatgcacacttgcacaagcagcaagtcctgcgcttactccccaatgcctagaaaggaagaagagcaaaacgaaacagaatccccaatacagtcagtttggtaagctttgtccactgcaggccacctgtataactacaacagagggatcaaggcacattattcgccgaaccgagtgtcaagaggtgagtgtatcttgtgtgtgtatatatggtacggataaa

SEQ ID NO: 67927 - DNA, 343 bp, Oryza sativa
  unsure (1)..(343): unsure at all n locations
ttgcatcgtcggacccagtcctgagcgtnctagagcatggntggtttttttaagccctgccaaatggctttaccgaccaaagtgcgcaaagccgaataagccccgcattccccctcatgggcatcgccgatgatctcgatgccttgttcccgagggatgcatttcaagaggactccattggcaccacgctggtagagggtcccttctactagcatgtaccgcttggagatgcgcgcgagcttctcgccttttgcgtgatcctcangaagagtgcgactgccaaggtatgcccggatgtcggccatccaggcaacctgtcgtggggggtcgaggtcgaccccct

SEQ ID NO: 67928 - DNA, 387 bp, Oryza sativa
  unsure (1)..(387): unsure at all n locations
agctntgtattggatatcattgtaaggttctcctttgttatatgctcaaacacgcttcagaatcatggtgatgccctgaccgacaccgatgcacatggtgcacaatgcgtaacgaccgatacgccgatgcagctcatggctggcagccagtgccaagcgggcaccactcattcccaacggatggcctaaagcgatagcgcctccgttggggttaacatgtggggcatcatcaggcagccccaattcgcgtagtacacccaacgcctgggccgcgaacgcttcgttcagttcaatcacgtccatatcgtgaatactcaaccctgcgcgttccagcaccctgcgagttgcatgcaccggaccaagccccatcaggcgcggttccacccc

SEQ ID NO: 67929 - DNA, 430 bp, Oryza sativa
  unsure (1)..(430): unsure at all n locations
cccgtagttagcaatgaccggaccgacaccgttatctactaacagacccgcagccgcagaaagcacaaaatacccatgcaccacccgctcaccgaatatagattcggcagcagcaatcttatccatatgtgcatagaaatgatcgccgctgaggcaagcaaagttaacaatatcggcctctgtcattgtgcggcggggagtcaacaggctgtcgcctggttgtagctcctcaaaatatttgcggaacggatgaatacgatcttcttcgactttcgcaccgcgcacccactgtttactgatagcggcaagcatcgtcggactaccctgaacagcggntcgctgcatgtaatgtttcaccgctcgtaaaccgcctaattcttcaccgcctcctgcgcgaccaggcccaccatgtaccagttgtggcagtggg

SEQ ID NO: 67930 - DNA, 430 bp, Oryza sativa
agcttccaattctttacaagcacagggatttgcacttctaccctccatgggcttacacacttccgtcttggctcttgagcattccaacctcgcttattgaatcaggaatgtgggtactagtaacatattatgtggtcggctatgatccccaatttacaaggtaattgttaagttctgttcatttgctctctggtccgatgttcagagatttttttccctatctgaagattgatcttaatttatcatctgcagatgtcttggacaatttctcttgctcttttttctacaccaaacatctttggctcttttccgggtcatggcatctttgggtcggaacatgatagtcgctaacacctttggatcgtttgctttgttggttgttatgatccttggaggattcattataaccaaaggttaagcttcttgagtc

SEQ ID NO: 67931 - DNA, 474 bp, Oryza sativa
taacttgcgttgcacttgtacggatataatgcgcacactatgtatatttgtataggtctaaaaagaaaaaagtaaagttggtatgcaatgcactgtatatggccaacgatgctcgtggtccattcgaccatatgggctttggtcccataaaaacgtagtactacattttattgaattcattatcaaatacattctgatagtatatttgtctagtgtcggaaataatgcttagaatttttgtaaatttaatcatactttaaaaagctgacttatgaaaaacttatttaaaaaccttattatatgaaactgatgtagtaatggtcaaagtcacctattcttagtcgaaaagatatctccgctcacttggtttatcaattaagcttttggcaaagcaacggtaatacacatacaacatatatgcatgacaccatgttcaaccatatatagatgaacacgagtatacatacctacgtt

SEQ ID NO: 67932 - DNA, 368 bp, Oryza sativa
ccagcacgcatgcaagctcatcatgagccaagacaccacactgctgcatttttaattccgaacagcagtgataacggagacatgacacctccgccattgtatctccagcttatcaaccgcgacccaaacttaaatcgcgaaagctagccttagagggaataaagtactgtcgcaccatagattcccatctctacaaaaacaacattcttttttcctacagcaagccgcgcaaaagggataaacaaacagctcacttataaagtatattgcgatcaccacaaaacatgacaggctttaggctcgaacgcgctcagaacatatattatactcacaattgaggcaatctgctaaaactaccacatttgtga

SEQ ID NO: 67933 - DNA, 409 bp, Oryza sativa
gcggagctcatgaagagcatagcagagagtgagagagtttaatcgcactgcgaaaagcgggggttttttttcctttatttttgtttggcagagagaataatggcagtttggcacaccgggattttgtactatatgtatatatatgggagaaaaaggcgaaagggtgggacccacctgtcagcatcaaataatggtggccctccaagggaccggtggggatgggcccaccgcacaatgagacacccgtgaaccgaaccgggcttggcgttccccgagaaattgcaccacatagacgacactctctcgaaccgcgtgcttgtcttcaactgtgtgggtgttactcctagctatcagtatacttcccccgctaaaaaaaaacgatttccgtggctaacatttgacccgttca

SEQ ID NO: 67934 - DNA, 383 bp, Oryza sativa
gcataaactttgcaatttggtggcttttatccagaggacttaatttggtgggggggaatggtcaagaaaggtccatcctttttgtgtgaaagagagatttatttacttgcatgagtatctgtctatatctagctaagggctcctttggaagtattttaaaggaattttaaaagctctcaatcttatgaaaaaaattcctatatgtttcttgagataaaagtaatgaccttataaaaattttatgttttttcttaatcggctcaaaacataagaattttagagaaattttaacgtaaggtttttttttcatctctcttaagctccatgtaaacagtcgtttttacagatttcctgtattttttcaatccatatgaattaaagtg

SEQ ID NO: 67935 - DNA, 402 bp, Oryza sativa
  unsure (1)..(402): unsure at all n locations
gaattgatgcgtgtgctgcaaatttatctatccggcaacggtagtattgaggagcttggcgagatttttctcgtttagttgttttttctttttttaaaacttatctgggtttttaatctgcttataaaaatataatcagcagctcttctaccggtttagtttcgcaaaattcgatggccttttctacctctgacgcgtatctagcattcggacaagttataaatgtttattttntcatgaagataatgaactccattggtcgtgttgtgccgtgagtctacttgcatgtggtgcttaccaaacgcgtcgtcctcgtgaacacgagatgttcgacagcgaaagaaaatgataccacgaataaatttttcctaacctcatgcaacttggtgtgatctctgtccg

SEQ ID NO: 67936 - DNA, 425 bp, Oryza sativa
agcttcgcggcgaggtctagtctagacttgtcggcatcaacttcatcggtggccgtgcttcccccttcatcccctctgcttggacggggatccaccggccagatccggcgcatcttcaggccaagggtgagctcgtcgccctcccctcttgggccaacgtggattcccggtgactggatccgattcattcagtaaaataattggaggaatccctccaaacggatccgatttctccctgccatgtcgcccttgggtgagtaataataagcctgcttttatttaaccttgcaatcaaatcacactacgatacacagcgactatatcggatttctcaatccttccaaaatgagtgtttgttgtctcctttctgtgataaagatagcaattttccccctaaaatctcacatatagcttctaaaaaaaag

SEQ ID NO: 67937 - DNA, 425 bp, Oryza sativa
  unsure (1)..(425): unsure at all n locations
cggaccttagaaactcagcttggctgccccattcggtatcgatcgggtctatgatctgttgctctcgcagatntgcacatacttttcttaatatttttgtgattatgcccttggtttgacatcaagcattttgacatgaattnttgcccggttgtcacttgaattttcacatattcgatttgaatagatgagggcaaacacaatcttcacatgaattttgcccctgtttttatatgattttggacattgttaagaggagacaacaaaatggggataaagctcaagcattagtttacaaaacagagacggctaaatcacaaagttagaaaaagtagtggtggaatcaccattggagtttaaagtagcagtaagatcgccattgctactttgtaatggtataccaaatttgtcatattggttctatt

SEQ ID NO: 67938 - DNA, 421 bp, Oryza sativa
  unsure (1)..(421): unsure at all n locations
agcttcaactatttctttactgtgttttttcttctcaagggaaggtaaatatcgggagcatataaaattgctccctgcaaagtatcagttttttgagggagcctggcaagattaatacattgttgtatctgaaattgtttcaacatgttgcactctaaagtttcttctgctcccacgggaaggaaaataacctgtcccccaaaattctggcattgattattttattgttgttgtcagtaatgtgttgtttgtgttgaaatcgtgagcttgtcaattgctctgcataccttntatctgttgttattgaatgagaagctagacagcggagttcacaataaactgttgcatttttaatacgacaacttctgatgaanaaggtagcacaggtaggtgtatgcattgtgaagatatttgtgaagat

SEQ ID NO: 67939 - DNA, 465 bp, Oryza sativa
tggaaagccctattgagctactccctcctgttctcttatttgacgttatagcctaatagctgttggattgaaaaaattgacggcttagctttcaagactcatagtttcccagctttacccttgcatgcatgcaaacacaatacactcccgatgcaaacatttgttgcttcgtttccatctgtgacgcaatggccaatactcccggagtaaagatgcatgcatccgttacttcgtctccatccccgaatgtatttaatatgagtataactaaaaatatggatcctaattaattacttattgctatttgcaatgctgtctaaaacgtcaattaaactagaactagagggagtatgtattcattgtcaatagtatacaatattcacgaaaaaagtatataaacaattatgaaaatttatgaaataatataatgatgcatataccaatgccaaggacatcgcaatacac

SEQ ID NO: 67940 - DNA, 428 bp, Oryza sativa
  unsure (1)..(428): unsure at all n locations
agctntagcccctcccacagaggtcgctttatcataaagttcctggggccttccaatgattgattaatcgcaatccatgcttaatttgtatattatggggaggttgtcaacgtcagcgggttcgcatcattcacttcgcagccattcggtgcatgcacctactcaggccttgattaattcgcgaaaagaaaatttttagatatcacgttagttatttgattggatttaaaaggggtttttagacacgaataaaaaactgatttcataactcacatggaaaccatgagacgaatttattaagcctaattaacctatcataagtacatatgggatattgtagcacttatggcaaatcatgaactaattagactcaaaagattcgttctatacaaattatgcaaattagtttttattttatctatatttaa

SEQ ID NO: 67941 - DNA, 465 bp, Oryza sativa
  unsure (1)..(465): unsure at all n locations
tagggaattcctccttcttcctgcttccccacccccttactcattggatcatagctggtcgcggatgttgttagagtcattggatttgaaggagagctagcacagatcgcgaagcagaccctaaggttataaaattataatattttggcctcaattttctatttaatgtaatttaaattccatataattaatacgctttcaaagttaaaaagatctcaagttcgagagatatggcaggcatagcttaataaaaaaaaatttcaatgcccaatttgagagcgctgcttgcggctgggcgcacgcccagccgccggcgcggcgcacccgtacgtactactactntagtagtactactagtactagtacaaagtagtactacttactactacactgctaatactactataaaaatatatttttatatgtataaaanaatatatacacatatngcaaagttatatatga

SEQ ID NO: 67942 - DNA, 372 bp, Oryza sativa
agcttaatagtataccagatcatggaatgtgtctacatatgccgcctgatcactactgttatgtatactaatacattaatatctgttttggtctgctcaaatgctttatttttagttgccactgctcacctcactgtcagaatgaagggagcaaaggtttattcagttatgctgcatttgatggaacgatctttggtcttcttttctccacaggtgcagactgttctgctttgtttaaattgcagtcctacatcaatcctacatcagacattgttttagttcaaatgcatacattcatggaagattagcagtttgttgtcctgccttgcacctgatacccaaattactctggtgaaacctatcctgtttact

SEQ ID NO: 67943 - DNA, 423 bp, Oryza sativa
  unsure (1)..(423): unsure at all n locations
tgcgttactttatttacttacctttcactttgattgtcttactttattcaaattaaaccaaaaacttgtgctattaattggataaatgtcttaactccctcctttcacttgtctttagatgccgcgctacaagcctgagtacttgtttggtgttgagggatttgttcaggagttgcgtacgatgtcctttgccatangatttgggactgcccctttgtatgcccagattcctcacgatcgtcacgaaaagaagtgccgagtcatagtcaccttgaacagtaatagtgaagatatctcctcactgatgttcgaagctggaggaggaaactacattcatgcatgtcatgaggtggcaaggatcgccatangagagctccgccatcgctacagtgatcagttggccgacaccttatcgctaccatt

SEQ ID NO: 67944 - DNA, 351 bp, Oryza sativa
agcttaaataagaatcaggagttttactattctataatgatggaagtaagacgccattgggagtgtgtcattgtcgcttatgtcacataactaggggagtttggaacgtctcatgagatagagatattcttttccttagattttaatggcgttgtttagctttaagttaaaatttcactaagtcaagaaattagccaacaaatgatcatttaaggctaggtttacccataagcgacctccgatttcctttaagaaatttaagacactaatgctaaaatcaaatgaagttatgagatctgattatggtggtaaatactaaataaagtttgttcaccttataagacattaaaa

SEQ ID NO: 67945 - DNA, 457 bp, Oryza sativa
tggctaaaacgttcaacagctttgcgataatttatctttcacaacctcttctctaccatcagcaaacttaaaacacagctgtaaaaggataaggtaggacgtcaatccattaaaagaacctaaatattctatgtgaatgctaacactgtaactcaccaaaaattccttcagaatagttatccttgtatgagcagaaaagttgtgataatgagcaatgacaactgcttcatcctcaggcacctgtttgccatgtttatccaaaggtctatatgtgccagggtagtgagcttttataagacatgtgatggtagatgaaacattcttcttcataggattcgtaatccaagcactagaaacaacatgccatttaccaagttaggtaatattagtgtaaaacaatgaaagtgataaaaaaatatgttcagccatcataatattggattataggaactatgca

SEQ ID NO: 67946 - DNA, 419 bp, Oryza sativa
agcttgtcgccggcgctgcttcttcgtttagctcgtaacgagctctctcccacgtgctcaagaagtcaagatcttgccgttccagtcgcgaccctgagctaggtctagcgccctgaagtcgttggcggacaggtctggatcgggactggaaagggaacagttgggatggggcaggatggtggcagcaagttgcaacgagagaggtagagacgtccagtttggatccggccagcgagcttagccgcgccgccgccattgaagcgcctcacagggaggtgtggattgtggtgctggggaggagcggaccatgcaaaaacctagctttgcccttctacctgttcggcgaaggggaggtaccattgaggagaatttggtactgggcagtaccgagaattctcatccgtagatcgagctcaatg

SEQ ID NO: 67947 - DNA, 441 bp, Oryza sativa
  unsure (1)..(441): unsure at all n locations
tgctccaaaacatggtgccccacccaaatttgctcatctatatatttatgatactgacaacgaaacaactaaccgaatgaatatatttgattaagaatcatcccgcgatggcccttctgataaacaaatcgttgaaaaactaaggtctatgttagacgagcacaacgaattggttaagtcattccgttttgcaaaagaacgaatggaggaacatggataccaggatactgctcttatgctcatgggttgcaatgctaaagacgaagttcaatacaatttgccttccaatggtgagatagctgggattgtagttggtgactactctaaagatgcatacanttacgatgtgttagtaaaatccaaagacaatcgattaagacaagtttctgcactacacccttcttacatggctttgccataccctttgctttctcatatgga

SEQ ID NO: 67948 - DNA, 88 bp, Oryza sativa
cgagctatcgagcggatgcgcccccccaacaaacttaaggatgtgccatgcgtcaccggttgcatggcccccctaaagtcgttcatat

SEQ ID NO: 67949 - DNA, 434 bp, Oryza sativa
tgacaagattgttgtggttcagcttagcaaccaaaagtatttcagttttcatctcttctattccttggttggaagtcttcgcgagcctcttcactgctatttcttgacctttaggtaggtctccctgcaagcaagtgaagagaagttatggcctcatgattttatagcccttgataggtaccaaaagataccgtataaaaaaacatcaattttatagaaaaaagtacggtacctgtcggtacttagctatttaacaagagtaaaatttctctttataaattgagagaaaacccagacaattacatccaagtggtaccttgtacactacaccgaagccaccttcaccaagccttttgtgctcagaaaagtcatctgtagcaactcttagtgttgacagatcaagaatgagcgagccgatactttgcatgtcatct

SEQ ID NO: 67950 - DNA, 347 bp, Oryza sativa
tcccaattatgacattcttgaattcacaaatagagtctacctttgcttctggtagaccagtatatcatcaaataatggaccgaattattaacgactttaatttacgccacaaataaaaaacaccaacaagctaaaatggttagctacaattaatgtcagggtaagttggaggctgcttacttacctgtgcacatacagccaattagagctcttatctttcggagcattcacttggctaactttagcaacattggactgaacacctacacatgcaagcaggcagaactggatctgtgctgactgctaataaaagaagtcctttctcttttattttcttcccttttttt

SEQ ID NO: 67951 - DNA, 451 bp, Oryza sativa
  unsure (1)..(451): unsure at all n locations
gcgttacgtatataaacgacataatgtccactaccctgcactcttattcagcaataattgatcatctagatacacaacaacaatcaccagtccaccatatattacaccatatattacacagataacaactaaaagtgaccagaagtaattacaagaatggcatctaaccaccgaatcgaatcgagatctaagcagataccttgcaggggcgggtcttgataacaatatacccattcttgcggatggttccggcctgctggggataggtcttggacgccccancgtcngccttcgactcgaaatggtgctcctcagagttcgacatgccgatcttagcgagcccctgataacaaaatcaaatcccaaacatcacatcaaacaagattgcacaaaagaacgaaatttccataccaagaaaccgagcaagtgtggtactgaagcaattggacta

SEQ ID NO: 67952 - DNA, 428 bp, Oryza sativa
agcttggatgcatcgcaatacacttgaaaacccttctttggatcaggcaaaatcaaaataggagctgatattaaacgattcttcaactcttgaaaactctgctcacattcttctgaccacttatacttcacatctttttgaagcaatcgtgtcatgggcttggcaatcttggagaaattctctatgaacctccggtaatatcctgcgaggcctaagaaactgcggatctctgaaactgtcttgggttgtttccagttggttacggattccacgttactaggatcaacggcaactcctcctgctgagatgacgtgaccaaagaactttacttcagacaaccagaattcacatttgctaaacttggcatacaactgatgttctcgcagcttctctagtgcaaagcgaagatgttcttcatgctcttcttt

SEQ ID NO: 67953 - DNA, 340 bp, Oryza sativa
taacatggctagatggtgtcacacattcggtgaggattccagtagtggttcgcaccataatccaagactttgtttcagatacttcgtaaattgttctggaaaaggtaaatagactgtgtaatattactttatactattattttcattcaaatgtaatgggaccaacttgagccaatactatctattatatactaaaagtccatgaaactttctaaaaacactctcaaatcgccatgtggcttccttaaaacgctcctaaatcgccacgtggcattataataaatagagaaaattcgaaccattgattttcacttaaaataggtggacccattattttgag

SEQ ID NO: 67954 - DNA, 119 bp, Oryza sativa
cgccaccaagaaaggtctgattaaacgtttacagaccacccctctcttagctaaacacacagcttgtgctattgcttacacaacaacaatcgttactgccgactatgattgtatatatg

SEQ ID NO: 67955 - DNA, 383 bp, Oryza sativa
tcacgccggcgagcaatccgacgcggcagaaatcgaaactattcctctttttctacaagaggaacaaatacaatacaggttagcctccgacttctggagcagaggcgtgaagcccgaaaagaacgaatcaaatgcagagatggataccacaaatggatctgagaagagccggacagcggcggccggcgaccaacagcggcgcgccgtttgccggctatgggatcggaggaggaggacgacaactacctgagccctgaaccacctgtgggccttctgggcttttgttcgctactatttgcccacacgtctgtgcccatgggcctggtttttctgcccactatccatctgccccgatcaacggctgtgattctacgagggtgagc

SEQ ID NO: 67956 - DNA, 386 bp, Oryza sativa
tctctatgacatgtgggtctagtctttataatttctaaataaacttccttttaagcagtggcataattccatggttgaagtattgtcatggtttgtggatgcatggatggttgccaaacatgcaagtaattttggttggtatcttggttgggcttcccaaattaaaaatatggtgaagaattgttgcgacaggcaaataggaccagcaattttgacacttctataattgagattaacacacatgttcagaaacattcagcttatactcaagtgcatagcacagctgaggtagttactgttaaacctgaaacaaaagagctaatgaaccctgaactccggtcctttgctctgcttgtcagcaacaagaatgaagagaatgattttgt

SEQ ID NO: 67957 - DNA, 485 bp, Oryza sativa
  unsure (1)..(485): unsure at all n locations
ggacacttaaaactcagcttgatatgtagagatgatgtaaaagaattatcattggtttatacaagtccttagnagaccgggacttccggttgacacatgaaggtaatccaatccatgggctgaaaaatctacaacaaaccttggagatagatcacacgataatgcacaaatttcattgtgggagcattgcacctttctcaaccaacatgcatgtacaaggatcacaataattaagaaagctgaaaatntgaagatgttcaaatcttggaaactcaaaaaataacttagaaggagcattgaaatgacattcaaatgacctttgataatttagacaaaatttggcaatgaagtccaactatagagaatcgaaagtcacaatgtaagctctttccaaatcacaacaacacaacccattttgagatataaagatcacgaattagctcanagtcagttttttctganaattctacaagttgagaaaagag

SEQ ID NO: 67958 - DNA, 426 bp, Oryza sativa
agctttggttcctgaggagctgttgtatttcttactccagctgcttatcttgaataacatcaattcaagttggagaaagccaagcagagactagccgaacgccgtgaacgcaaagaaattgaagttactattcaagctaatcggcaactcgtgcatgaagagaagtccaaacttgatcagctatcggaatgcccgatcaagtgtaatattagtcggctagaagctcgcaagatcgatcttttggcacaacttcaagaatgcaacgcccgaattggacctggaacacaagaaactagccgatctcccgtggtccgtcgaagaagaaaaggcaaggctgaaatcagctatcaagaatgtcgctgatatgaccaagtctctgaaagttatctctagaaccgatgctcaagatgcttaagccattgaaga

SEQ ID NO: 67959 - DNA, 365 bp, Oryza sativa
acacaagaaactcagctgaatctaggggaagaccattacatcatcaactatttctatgatgggatcctttcgcctagcgacactcgaaggcgaggagttcgaccattcctggaacgccgcctccctcaagcgcttctacatctagaatgggtggcacccaaatcgccaacttgtaaaaatgtacatactgtcatgtaagcctttcggcactatgtaagcctttcggcgagaagaaaaacgaacaaagagaagagaaaaagactaaaaaaactggatgtagggctattatccaccatggaggcccgaaccagtataaaatctctgtgtcctccgccctctttttatttcttttcgcgtgattgata

SEQ ID NO: 67960 - DNA, 422 bp, Oryza sativa
agcttggttcctgaagagctggcatatgttcttactccagctgcttatcttgaataacatcaattcaagttggagaaagccaagcagagactagccgaacgccgtgaacgcaaagaaattgaagttactattcaggctaatcggcaactcgtgcatgaagagaagtccaaacttgatcagctatcggaatgcccgatcaagtgtaatattagtcggctagaagctcgcaagatcgatctcttggcacaacttcaagaatgcaacgcccgaattggacctggaacacaagaaactagccgatctcccgtggtccgtcgaagaagaaaaggcaaggctgaaatcagctatcaagaatgtcgctgatatgaccaagtctctgaaagtcatttctagaaccgatgctcaagatgcttaagccattg

SEQ ID NO: 67961 - DNA, 369 bp, Oryza sativa
tgaatcaaagtgggaaggaccatatacatcatcaaacatttgttcaggatgggatcttttcgcctagcgacactcgaaggcgaggagttcgaccattcctggaacgccgcctccctcaagcgcttctacatctagaatgggtggcacccaaatcgcccaacttgtaaaatgtacatactgtcatgtaagcctttcggcactatgtaagcctttcggctagaaaaaaaacgaaaaaagagaagagaaaaagaaaaaaaaaactggatgtagggctattatccaccatggaggcccgaaccagtataaaatctctgtgtcctccgccttctttttatttcttttcgtgtgatggataatttgtggaaaaac

SEQ ID NO: 67962 - DNA, 458 bp, Oryza sativa
  unsure (1)..(458): unsure at all n locations
cgacccggaccttaagtcacctgcngcatgcaagcttatattactcatagtggtctcatatgtgatcaccaattatttggggttctgggtttattgttaagaagcactcttctggtctttctcatcacaaagtcatatttttcatgtgctactttcttgctactgactactgattaatacaattatgtactgtgattaatacacgctcacttttctctgtcatggaaaataccgcataaaaaagttcataacccaaaatccctttttatacataaccatcaaccttttacattccacaatgcaacggttgacctcaaattttaaatattatcctgtcttggcagaaacatatctatgctgaagtatcttcacgaccaatcagtatgtcattttgatgtgctcgatgttaaatttctgaagacatacgtcaaagatatgtaagtgctactgcttgcatg

SEQ ID NO: 67963 - DNA, 259 bp, Oryza sativa
gacacaagaaactcagcttcttgccgataaggattttatagattttttttttttttaagcttccttctgtactgagctttgtacttacatcttaaatcatccacgtcaaaatagatactataacacccacatctgtcgtcaagaaattcaccttattctttatgaatatactatctgttatagcaaaattatactcgaggcgggctgcgctgtatttactcctagtctcctactgccaatgcatggcgcgtgatcccgt

SEQ ID NO: 67964 - DNA, 422 bp, Oryza sativa
agcttgaatgctaaaaattagcaatgtgttcatagattggaaataaaattagcgatgcaagcatatattagaaatataactcaccttgccggaatagcccaaaatgctcgggaccaggattttgtaggttgaggaagaatttgatggaagctaatggtcatgtcatccaagcagaacttataaagcctctcactgtcgcagcttgaccatacaagataaacacagtttccttgcaatacaccttctattgaaggacatgagaaggcataagttccagagatgagaaatgcacggtcgttgccaataccctccaccctctcccatgacaatgtctcaagattcaagcaaaacacacggatggcggtgagtaagccgtcatcatataagcacccgagatcatctatccacaatagaaataactt

SEQ ID NO: 67965 - DNA, 457 bp, Oryza sativa
  unsure (1)..(457): unsure at all n locations
tcatgtaaaaaatggtacacatggttatgcatttgcttttcagttcatactcaaaatgaaaagaacatagntgcacataccagcaaatgggagaaatccagctccttatgcgtgacagaaaactcaatatcaaatggagcaatctgaaaacatgtatagtaccacatgagttgcccgatggacttatgcatgctataaaatattgacttgacatactgtacaaattgtatcacctgttctcttaaaataagaaggtgcttaattaggaaaagctgtccatccattgcagttgctttttttgcaatgaccttgcttgcattctgttcacaggatcaaacagatacgctctgaatatcaaagagtgcagttcaacacataaaacatgttctttagatcttgttaagacatgaacaataacggaaggagaatacagacctgaagagatgtggagcaaact

SEQ ID NO: 67966 - DNA, 422 bp, Oryza sativa
agcttctgtcaagcaattgctctgttatcttctagaattgattacctttaactttcttgtacctctttgggaaaagttcatcgccctcaagaactacttctttatgcatttgttcccatattgctccaaaatggctatgaaatttatcttgaatccatgcttttatctcaggataaagaaaatctggattaaaattccacacatctcttaatgctgcccggctatctattaactttgaaccaatcttcatcctgtcaagaagatcaccaactcttctttggctaacaggccctatgagaacagatggtgacagtgccaggaacttctgaataaccttaagacatggcaagacatctcctttaagcaaagcacatgcaaatacctgcaaccgattggtgccatcctgtatatgtaaactatgg

SEQ ID NO: 67967 - DNA, 440 bp, Oryza sativa
tgtctctatggtttgagagcctattatgaaccactttatccactaaggtaaaccatgcaaccaaattcttccccaccaaagcccttctgaactcaacatttaacggcactttatctataacatccgcaacaatagcattcttattccttacaagattgtataaattagggtacaacttttcaaaaggtaaatcaccaatccagcaatcctcctagaatcttatctgagaaccatcccccaccttaaaggcaccgcctttaaaaaagacatccctcatccccattagcctagcccagaaatgtgaatctccagggcgtttctcgacttgtgtgatgggtttcttagtcaagtatttattcctaagaatgtcctgccaaccccttcttcattgatgagtttgtacaactatttgctaagcaagcatttgttttgtatctcta

SEQ ID NO: 67968 - DNA, 369 bp, Oryza sativa
  unsure (1)..(369): unsure at all n locations
agcttgatgcccccagccggtcccgccgacgccgacgcagtgcgtcgctggtccacatcttcatcgactgcaccggcggggccggggccacctccggtcgccgcttcgtncactccgacgcgcccctcctgccgtactcgtcgtggntgccgacgaaagatggcatgaaacagagcacggcgaggagaaaggcgcgctcttcgccgtcgacatccaggcggcattgcccgtcgttctcctggggccgcgcgcggctcccgaggggggtgacaaagcattacttccccatatgataaactggcggtaatgctatttcctcctttctctcccaaaaaatgtgtacgatttaacccaatccacggattgcag

SEQ ID NO: 67969 - DNA, 257 bp, Oryza sativa
  unsure (1)..(257): unsure at all n locations
gganaataagtgaaagtacgattagagcgtctgttgtgaactcattctgccattatgtcaaaattgtgattaattgtccattcaaggacagttcggaaaacgtgggacaaatctattctgatagcatatagntgttgtactctgtcctacacaatttttttaaaaaatcttgttaattaagtcctgataggagcttttttacttggtcttaaccttggagtacattttctagctgttttttttccggaggggagggg

SEQ ID NO: 67970 - DNA, 450 bp, Oryza sativa
  unsure (1)..(450): unsure at all n locations
ttaagtcacctgcggcatgcaagcttgggagaggcaaaagagaagacaatgattgttataagaccancaacaacaagcccaactacaacaagtcgaagagttctaaccaagggaggaagacggagaatcttatgaaggcttttcaacaagtttgcgccgctttccggccactaagtgatgtatatggtgaaagtggagatgatgataagggaaagaacgtcttcgatgtttgcttcatggcgcgtggtgaatctgacacacagtatgaagataatgaggtgagtgtttttgaagaagctattaatattttgagtgctaaaaataaaaagtgtgagaagatgtataaaaaaaaggaatttatcattgaatctcttaaatcttgaaatgataggttaaaatctcttattcctaatgatgatgaatgtgaaaatcgtgaggctttaatgaatg

SEQ ID NO: 67971 - DNA, 398 bp, Oryza sativa
  unsure (1)..(398): unsure at all n locations
ttcttccggagcgtcaagccgcgagtcgtcgctccgcttaaaactctcccgacaaagaaaccagccataccagcgccacagactttcaagactatggctaacaagactctctgtgaatttgctgctccctctgctgacaatgtggccattgggccgcagatcaacatgggagatgtggatttttatctgaagtctagcctcatcacgatggcgcaggctagcccattctgtggcaagccgaacgaggatgccaatgctcatttgcagcacgtacactatgaagggtctcagtccagacgccgtcaggctacgactgttttcattttctctccttgngaaagcaaagcagtggttttatgccaaccgtgctacaatcaacacttaggacagatgctcca

SEQ ID NO: 67972 - DNA, 446 bp, Oryza sativa
  unsure (1)..(446): unsure at all n locations
atccttaagcacctcggctgcagcttcccaataagatgagccatactttcctgttttttataatgantatgagagaaaatgaattggttactaattagaaatgcatatgaaaaatactagatattgtgaaatcagtctgagataacctgctttaatagaggggatatctttggaataattgtgacctctctcattccgatccttcaaaacaaataaagcaactaatgctttcctagctgcgatatttgctgactgcactactgctggcggaggagaaagaagaccaaanaattgccctataacttgaagtgaaaacaataattctcctcttctaacagagaccattccaccttcaatcttgtcagactcttccttaagaatggaagcaatatacagaggtacaatagccaataacatgctcaatcgagaatgaagatgatgaaatg

SEQ ID NO: 67973 - DNA, 464 bp, Oryza sativa
  unsure (1)..(464): unsure at all n locations
ctgagatcgagctcagccatggctagccctgttcagcttattcttgacctcttgggagaagaaacaaaactttatgtactactttgtaaaactacctcacacagagaacagtcacaggatcgcgggttgatttctaaaaccccagggacctttctgcatattggtctctcactgccacgtggaccccatcctttaaaatctgggaaatgataaaagaaatactcaaactaatatatgtttaacagaaaaatgcacaagcttggtaaatccatataaaatcaaatataactctttttgagatgattcaaatttctgtgaactcaccaagttattgaattaaggttatgaaataaaaacttgcactcacagtacacattntcacctcctaaattatctaagaaaaattatacataaagcatgcatataagtattaaatgcttacaaaattcatttcaactcatttt

SEQ ID NO: 67974 - DNA, 426 bp, Oryza sativa
agcttggaagtctcccgacgtggctgattcccacttgctgggtgatccgggttaataatgtcatctgggtaaagtgtaccccctctgcagaggttaacaaactgttcgaacagccgtgcccacggtcatgggcggatgtgaagtgattcctagcgtagttttgtttgactactgcttgtaaaattgctgttgtgaaaaggggattcgatgtttgaaaaatcagcagctgacgggatcagctaggcccgggtggccgtttgaaaagttgttggcccgggtggccgtttgaaaagctgttggccgggtgccaatcttgtttcaattctaaagattgatgcattgcacatactccgaccggacgagacgcactgtctcatccgtgtcgtttgagaagcactcacttagacttttagaaaagagttaaac

SEQ ID NO: 67975 - DNA, 446 bp, Oryza sativa
  unsure (1)..(446): unsure at all n locations
actaagcttgtcaatctntcctttgtttcagtctcaatgttaggtttatactttttttttattggggaatgaatcaatacaaccctgtcgagcacaaaaggaaaaaaaataaaataaaagagagaagaccctacacctaaactcttggacccataaaatacacgctacaaaacctttccaacaactctatgttgctgctggggtgccagtgccagtgccagtggagtgacaaaaaaacagaaccgagtccactgaactgaccagtacaatagaacctacaatcaagcacagctcttcgacccaatcgactcaataaaccaaaagggaaggtactagccttcattctgtctgtcgtggaattctttcttccactcactgtgctgaggcaacgcacataatctctcagacagagtctgtgcaaccatatatactacagtgagctacaa

SEQ ID NO: 67976 - DNA, 418 bp, Oryza sativa
agcttctgtcaagatgttaattattaagtgatggtaccttcgggaatgtctcggcccaatcttggtacaggaattgtggctagcactggaatgttcgattcaataactctcattacagcagggaagaatgccgaactaaacagctccattttacccacttcatcaataatgaaaagatcagtgtcgtccttgacctgatgtgtaaaaagagttattaactccagatcacatgataaataatttttaaaccagctattctgatcattgtacaattaatattacatgtatcgcatgaatgtgctaaaacaatgtgcatcccttactttattttatacatctttagtcagaatggcttacctgcagctccggcaatgctagagactccagagaagctatatctactttgtacctcccaaca

SEQ ID NO: 67977 - DNA, 346 bp, Oryza sativa
acaatactatagaactggtatcccgggatagcacgatatcgccagatctgcatgagtgcaaacaattgtaaccgacaatactaatctgcatgagtgcaaagaattaactaataccagtatcaaatttagtatttatttaaagcttagtggctaattgcacacctgcattttcagtaatctgaacatgacaacatacttgtgtgtggattctgaatttctgagactgaaattggcattggtgcaagcagcggagaacaagtgggcttgaacacgagcaacaagaggtctcagaagtaagagcccaatctaaaacggcccaagataacgacccactaacgggccaata

SEQ ID NO: 67978 - DNA, 405 bp, Oryza sativa
agcttgcttctagatatcggagctagtttactataagacgaaatggtcgatcatatggtttatgacatcggcaccttcgctatgcataacgggatctttgacctgtccaaatttcatttataagcatgcgttaatctcagcgctatgtcaacaaacagaaactggttgctaagttaaaagaaaactacgagtaaataatatcgactctgtttgtacacagcatataaaagaacaaggcttagacgggcaaagagatacctgaatcacactatgtgctgcagatcttactttgctgttgtggaagctgacatccaccttttcccacgacacaagcttcagacctcttaaaagccgttctggaaatttcagaagaagttatgctcatatggacataacacatggcat

SEQ ID NO: 67979 - DNA, 427 bp, Oryza sativa
  unsure (1)..(427): unsure at all n locations
tccagctctgaacaacagatatgataactgacgcggtgattacttgtgccactcctttcccctacatgcactacacgtacgtacgtatacatggacacgtggcccgtctncaacccggtcgggccccgcctcgtccaaccaaaaaccgcgcacctgggaagggtccccccacgcatcacgcagccaagtgccagccgcccactctgccaccaccatccacccacgatctctctctcctctatatctcacgcggtctgcacggtcacactcactctcggtctcactccctggagctggagcgtattaaaacccttctccgtccattcgatcctgccacttnctttctctcgccacgatctcctccatctctctcttttttctcctcgccggccgagtcaactatctcgcccgcgnctgagtacgtacg

SEQ ID NO: 67980 - DNA, 54 bp, Oryza sativa
ggatcttaagcgactgagctgcagcctgggtgctaagaggtgcttttttctttt

SEQ ID NO: 67981 - DNA, 270 bp, Oryza sativa
gatgcccgacagacaactatcaataagatgagtcctcttctgtggctgtgtccgcattaaattcagatctgctccttaaccattaatgtcgttgcatgaggaacatattcatgttaacccaataagttgacagaacgagatgctcttatgatcatttctgtgatgactatcactatgatataaacaataaactcgtgcactctaatttccctttcttgtcctgacatgaggcagcgatgtctactgtaacgagttaatattattaatgct

SEQ ID NO: 67982 - DNA, 424 bp, Oryza sativa
  unsure (1)..(424): unsure at all n locations
agcttttaagtattactccctccctccgttttaattnnnnnnctctgatcaaaggcaaactactttaagttaacttaaaaagtttgattaagtttctaaaaaaataataacattttcaattcaagataaatttattatgaatacatattcaattatatattaatttaataaaactaatttgatattataaatattaatatgattttgctatatatttgtcgacaaattttctcacaaaaatttgacagatataattacagtacaatcgtagtgtaattacactgtaactataatgtaacttatacgtactttcaaaaatctctttgtaatatgttatttcggtaaaatggaggttgtgggaacaaatccttacacatatgtgtgtgctgtgatttttttcctcaccanaacaaatcttgtaata

SEQ ID NO: 67983 - DNA, 434 bp, Oryza sativa
taagcgtcttgaggtccagtgtgaaatgctttatctgtataccacgagtagaccacgagttggtacctacaatcccatgtaggagtaagtacccctcagccattcttgcagccctccatttgtaaccagggagcaatgggatagtcctgtcgtgccgccacggttcgtcggcaccgcccctaattgccttggagaggatctccaccttgtggacaccaacatcaacaatggtgttgaacaccgcaagcctgcctacttcctctgcctccccaatgacacacttgttggtctgaatgttaacaaagaagaaatccatgtcgcgagtgtccagcatgagcaatgtgccggaggaatgcgtccgccagtagacgtagccgtgcacggattgggggaggaacaacttctcggtggcggcgcaggcgttcagcacggcg

SEQ ID NO: 67984 - DNA, 418 bp, Oryza sativa
  unsure (1)..(418): unsure at all n locations
agcttgctgctcatggcatgcctttgtttgctttatccacacgcagctgcatcaaatgggttcaggagtcgtttccgacaggcggggattgctccgggttggtggtgatctacgagcagtgcgtgcgtgccttctggcacgacgaccgctacaagaacgatctccgctacctcaaagtgtggctggaatatgtgagtttcatgaattcaagattggttctgaggtggattggttggattggattggattggtttggtttccttttgacatccagtttggcttgatcttaatctgtatgcaggcggngaattgtgctgattccgaggtgatattcangttcctggaggccaaccagattggtcagagccataccaattactacttgtcctatgcgtcggtaatggagtccaagaacaag

SEQ ID NO: 67985 - DNA, 463 bp, Oryza sativa
  unsure (1)..(463): unsure at all n locations
ntgaggcgatcaaatagaatgaaaaaagattatggattctcatcgttgcctgctcatcgatctctatagatagctaatactccatatctgtcgtcgaaaaattcgataatgaccatatatattcacttgtcaaaatcgaggtagctagatgagatgcttgccggcctgcttgctatatatctgatgaaattaattaattaatatgaccaaagaaagaatattctccctctgcatccttgtcgatcacatcttttttcggagaagaatataatgcatatattgtgaaaagtctgaagatttggtgacagtaataagtgcatatatatatgtggcttacgagggtgttcttgaatagctgctgatgcttgatcctgggctgtgaagtagangaagatgtgatccaattctgccatgtcgtatcctcccccaggatcctttctgcttgacttgcacaaattaatac

SEQ ID NO: 67986 - DNA, 425 bp, Oryza sativa
agcttccacactgatacagactgaaagtatcagcttaggactagaaaaagggttccaaattaagtactccattaatatatccacccatcaacagaaactgatcattcatacattatatgtacacatgcatgacgacgtctgctactactgcaatctcaatcaaattaaaggctaagatatataatttacctccaaacaatgcaacagcgctatacgacgtaccactataccctatacacaggtgcgcatgtttgcatgcacaatcaacgaaatctgcacaagctgatcgatggaatcgatcaccacgaaacaaatcagatcaaacaatcgaggtgaaaagaggttattaataataaacgctagctagctgcgctgcagaactgcagctagctaacagctgggagtgtgtgtaagctagctaagct

SEQ ID NO: 67987 - DNA, 435 bp, Oryza sativa
  unsure (1)..(435): unsure at all n locations
tcgcttacttctctagataatttggatgttccttctttggggggaaggctcatgcttgtggatatggctggttctgagaacataaaaacagcaggccaaactggatttgaagccaaaatgcaggtctgcgatgtcactaatgcctgtataattttgtactttcagcaggacgcttttaatgttaccccttccacaatgaatacctaatacagaagaataattaacactgctgtgttatgaaaaatctaaacataacagttaacggtcttgcaagcagtgaccacattgtaggttgtttttcttccttttttttgatgatgaagcgatattatcacaagcacgcctgctttaagtactttatgtactactattatattgtttntctgcacctaatggatgtgttgataattaagtcatagttggtacatgacatac

SEQ ID NO: 67988 - DNA, 372 bp, Oryza sativa
  unsure (1)..(372): unsure at all n locations
gccatgaaggccaccgttgggcagctaacaactacacacgatcaagctagccacgcacgtacgcacgcagcgtacgccgcaggagtagtgcgcgacacaccaatctcactgcaagtgcacgtatgtagtatgggcgcaaacatggtcggagaaaccaacaaggaaccgcccgctcaatctgggaaaaaaaaaggagtagtattaattagcaaattcatttgcatcattaggcaaacggaatatctctctctctcccccctcgatccaaggtatgtcccgaatgattggatcctcgctgccctttaatntccttgctagttcaccgtaccagataatttcacgggtaaattaatctggaatcacctccaactt

SEQ ID NO: 67989 - DNA, 390 bp, Oryza sativa
  unsure (1)..(390): unsure at all n locations
acactaaaaactcagcttttaaccttcttgagaatctttattgtgagtatcaatttctttatattaaacggatttcccaggttgaggacggaaagatctctcctgttactgagattacaccacctcctattccagaggatcttaataccgcaattaatagtgggaaggtccgagctcccacacacattatctccactatctcggatgacagaagttagattggtggcaatgtngttttccacatattctccatgttcaatctttgtcatactatccctaccaggaagtaatataggtgcatttttgtgatacatgcgaggaaccctgctatgctggtgtccccatgtctacaattattgaacagggttatggagttggtgacgttatttc

SEQ ID NO: 67990 - DNA, 338 bp, Oryza sativa
atatccctgcatcccatacggttggggagaggcatatctggcgacatcacacccctcccccattgccaccggagcttggactactgtcgctccctttctggcctactcagggacggatccaccgtggggtgttgggaggacttgagctccccctaccccgctagagcaccatcgagacagtggatgttccttcaattatgcaatacacctcgatcgatcaagacttgttttatggcacgtaactgaagaaacaatcaggcaaatcaccaactcgcttctcgaataacggacagtattaaccgcctcacttttcaccacaaattacttacttgggaatg

SEQ ID NO: 67991 - DNA, 451 bp, Oryza sativa
  unsure (1)..(451): unsure at all n locations
ntatatcgancgancnctattgtttctaatttattactttctcattacaaaaaagatacacctattatttttgtcgctaagatcaaagagaaattaactcacgttgcatgtaacgaaaattaaggaatgtatatgcacacatgcaactaatactccctccgtccagaaaggaggacgttctaagttagttaagaaaaattagtgttatgtgaaaatgaccattttgccctcaatttataggattggggctaatcatttgaatgcttagtaagtattaagatgactcatcggattctgatcaaacatttaatttacctctatttaaatcttatatgtatagagactacaaatagaaacaacttatttagaanaacttatatatgaaataagtctaactaatcatgtggatggatggaatataattattaaagaatatcaatcgatcgatctc

SEQ ID NO: 67992 - DNA, 433 bp, Oryza sativa
agcttgacagaattctagtttctacggagtttgttacaaaattcccactctctactgttagcatcctcgctagggaaatttcagatcatacacctttgctatacaattcaggcggtgcgtccgcagcttaccaacctcaatttaaatttgaattgggctggttgcggagggacggtttcagtgatattgtaaaagaggtgtggcaaggggtgtccattgagggtacacctttagagagatggcagaggaaaattagacgattacgccaatttcttcgaggttgggcgaaaaatattactggtgcttacaaaaaagaaaagaaagagttattggataaattagatacacttgataagaaagctgaacatactatactcaatgagtttgaattaaatgttaagcatgttctaaatgatagactggctgagttatt

SEQ ID NO: 67993 - DNA, 468 bp, Oryza sativa
  unsure (1)..(468): unsure at all n locations
taggaaacaaactacgacggctaaaacacaaactccaagcagcaggaagggttctagccacgctacactcccaacaagtctctaaaagcgacaatgccagctaaagaccacagatgatcctccgagtggatggactccagaaccctgagactgaagaaagcgtggagtcgaaaaccctagagtttcatttcttccacaactgccaaaagatcaggagcaccagggagtcgaaactggcgcggagatgctcaggtaatatcaggccctggaggacggccaccagagattgtgttactctagaccttctactccctccatcccataatactcccttcgtttcaaaatgttatgaacaccgtgactttntagtatgtgtttgaccattcgtcttattcaaaaaaattaagtaattatttattcttttcatatcatttgatttattggtanatatactttcatatacacata

SEQ ID NO: 67994 - DNA, 437 bp, Oryza sativa
  unsure (1)..(437): unsure at all n locations
ttgagtcacctgcggcatgcagcttctggataaataaccccatccaatttcgttttatgctagtatgaaagnttctggagcatgtacttccaagttactagtatacagtagtgttgaaaatntcaaagctttctcctacactgcaatgccgggacaacacgatcaataatctaaccccaagcgccaaatttgtcattgcagttattactgacactggggtgggacatccttgctcgtcagtgcccgataactgctacctgtagctgctaaatgcaccttggaccaactagatcaccccgtgagataaagcagcattgcagctgcccttctctcctcttcttcctcccaaacaaacagtaataaaaaaaggtaatttggaagaagatgaagcacgcggcagcatggaggaggagagcatacatacatttacatggagc

SEQ ID NO: 67995 - DNA, 388 bp, Oryza sativa
  unsure (1)..(388): unsure at all n locations
tgaggctntagcccttgggagcagccatagcccaagttctcgacttttatctcgccgcggcatggctcgagtcctgctccgacgagagcctcctgcgatctgcgcctcggcctatcctccccttacacgctgccgccgcaaaaagatccctcagttgcctcgaccgataaatcttagtgacattttggatgatctcgttcagtcattcgggcaaaaaaaagtttttgttgctcacagaaaatcacacttgaacattgaagatttcttcaagtcagaatgcattcttgatgatcgaactatctgaccacgagcagcagtggcagtagtacagtgctagctgcaattcataaccactgaaatgaccttcaacttgaagttcaatcttatt

SEQ ID NO: 67996 - DNA, 431 bp, Oryza sativa
  unsure (1)..(431): unsure at all n locations
agcttatgaataagattgacaattttacaatgcatcgagatttatcgctttttactggtttatgtttcaactcgctgcaaaacaatcacaaaatcacagcccgtgctttttagtaacttaataaacctccacgtgccattgtttgttctttttgagctgcgacagcttctgctcccaactctcacctctttgctcagctactctcttgagtgtgtcctggatccctggcatcatacccttcaaaccacaaaagtagatatgtgcaccgccatccaaaagtttaaaaatttcatcgctgtactcttcaatcttgtcctgcacatacatctttccaccattcttattcttctgttccctacttagtgctttatcatacctgcanagtcaatgaaattcaagttagttcacaaaagaatcagtcagctactcac

SEQ ID NO: 67997 - DNA, 457 bp, Oryza sativa
  unsure (1)..(457): unsure at all n locations
ctcaactatggactcttacaaggcacttaaggcctttttgtatttgccctaaaggagtacctaggctatcaaagggacaacttcaaccatgatggtcttatgtatgttcctccaccaaaaggaaaagtggacaagagtgtgatgatcaagaggccccaaggtcttagcaattttgttaaggccaaaagtatccttcctaatgattatgcttcacattgttcttttgatgcatcttatgttcttataaagaatgttagtggtcgtgttgttgctaagtatgtangcccgaggggcaagaatatttctatcaagagagtactttgggtgcctaaggcacttgtcactaacatgagaggacccaagcaagtttggtacctaaaactagaaattgatctcttgtangaatatatcttcggtggaagaagttgcgtgattgatagttgatgcaccaatcaca

SEQ ID NO: 67998 - DNA, 395 bp, Oryza sativa
agctttattatatatgaatttaaactgctattgttctgatctgaattaaaacacttaaaatagcaaagaaatccttattaagacagccacatcataagcacatgatgtcaaccggcgactgacccacaagcgaacaaacctaaacacacaaactccgttgccactggctggacccctggcggctgacgcgggaacgcatgagagagcggacgtgggagctgacgctggaacaagaactggggctggagctggagctacaggcgctgctggaactgcgggaagtgctggaagagctgctggaagaggtgggttcctgggcgcaagctgaatgcgcacgggtgcagtcggtgacttgcgaggcgtggtgcggatccggactcctccggagcggggag

SEQ ID NO: 67999 - DNA, 464 bp, Oryza sativa
  unsure (1)..(464): unsure at all n locations
tactcatccgagttacctncatccaagtagtagtccatctctaaggtgatggaaatagataaagactgagtactatccactgtactcgacaagtcataccaataagaggtatgatgcaagcatttacaaggaggctaggggcttttttgcataaagtagttctaaagcaatagttgagagcagtaaaactattgaaatagattagacaatattaatcatcaccatccaatgctaaaccacgttgtgacaggcccaaccatccacctgaacaataccaattccgttaagtcaaattattaatgatgagacaaatcaccatgaggctggttgatcgccataaccacgagcacgggtattcaaatagttttactctggctagaggcgtacaactgtaccctcaatacataaccctacagcacgttntcgtgcgccaacatgccaccatgacatatccgaaatgaact

SEQ ID NO: 68000 - DNA, 156 bp, Oryza sativa
agcttcgcgcccgaaaatacagcagtcttattttttttgcgtcctgctgagttgggcccggcccacaagccgagtgggacagcacatatttctggctccaccgctcgatagggactgagtggccagatgcacgtgactgcagacacaagtcatttt

SEQ ID NO: 68001 - DNA, 342 bp, Oryza sativa
ttcatgatgtatcccagtgtcttttcatcccaatatctttcttgttctcttacaatggcaaagcgagcttgttgaaccccaaaagctcgttcgacatccttccttactgcttcctgtgctttggaaaaatatttcctcttgttgccatgtggttctggtatggtgttcaccaatgtggcccaagaaggatatatgccatcaccaagataatatcccatcgtataatcgtgaccatttatgctatagttcacttcaagagccttgccttcagctagctttgcaaatagcggggatcgatgaagtacattgatatcgttatgagatccgggcatacaaaaaaaa

SEQ ID NO: 68002 - DNA, 431 bp, Oryza sativa
agctttggcacaaataaaggaattagctttattttataacagcctaaagacagaaagaaagttaaaaaatgaaatgattaaaaataattaactccctaagagcaagggaggaaatctacatagcaatttgaacttaccaagtccaattgcatctgagcctttcatgattctgagcctccggcaagagtcggtgaacatcctgtgattgcaccaaaagtaagacaacagataaatgataaattcagtgagaagagcaacactaacaatcatattcacagccagaattgctattttagttagatggtacaggtgtacttactcccatggaacatcaccaaccagcatccaatcaccatccttgtcttcgtaggttaacacatattcaccatctttctggttctcagcacctttcttacgctgtatcacattaa

SEQ ID NO: 68003 - DNA, 453 bp, Oryza sativa
  unsure (1)..(453): unsure at all n locations
tcataagattcactcaaatcttcccgaatgcctgtcattaaaagatttctgctcaggggggaaacacctattttcattgcaagagagaacatttatgtttttaagtggtgaaattaatcatcttggactgttattagatacaaacctgtaaatagaagtggaattaatgtctacaatagttaaagcggaatgattcttttttaattcttaattttaaaaataaaccctatcaaaacttatttacatgatctgaatcttttggctacgccagctaaactagcgtggcaaaacaatactgtcacgccggtctatctggtgtggcaacgttntttggtcacgctggtctagctggcgactggcgtggcagcgttatttggccacgccaccctcgcttgcttggggaacaaaactgtcacacccgctgcatgtgaattcaaaactgtacatttcact

SEQ ID NO: 68004 - DNA, 426 bp, Oryza sativa
  unsure (1)..(426): unsure at all n locations
agcttgtgaatcgtagtcacgttgcatatctgtgattgtgagttaccgggggcaaatggacacttttagggaaggtagaaattaaaggcccaggtaccttccaaaggcattttcttttttcggcccagatgacgctggcccacgcgcgcgcgactttttcagttttcggcccaggtaaatgttttggtcggtccatctacttccctttcttttccctcaactntacaccgagtttacttgatatcgcttccctccaatactaaaatcttaacccttaaattatacaaaaccatacaatttcggtcctataacagtatcagcaactcgcttcgctgacattgaatcctagtcagcaaaaataaaaataaaaataaaaaacatacaggcccacatgtaagtgagaagaaaagtatgccgcgcacatgt

SEQ ID NO: 68005 - DNA, 416 bp, Oryza sativa
  unsure (1)..(416): unsure at all n locations
tgaagaggagcatgagtacaaaagagttaaagcccctgttaaactttcacgcgttcttttgagggattatatgactgcaaggaaggacaaaaatgatgccggacagaagacgaagaagaagaggatacccttctgtggttgtgtccgtattaaatcaagaactgagccttaaccattaagtaggtagcaggaggaacatattcatgtcagcccaataggttgacagaacgtgatgctcttaggatctcttctgagatgagtaacactatgatattaacaagaaactcgtgcactcaaatttccctttcttgtcctgaaatgaggcagtgatgtctagtgtaatgagttaatattattaatgctgttattaattgaagcattgtgcatatgntgttcctcttgtattggctncatat

SEQ ID NO: 68006 - DNA, 427 bp, Oryza sativa
agcttaataaatttgtcgcgcagtttattatcggaatctgtaatttgttttgttattagtctacgtttaatatttcaaatgtgtgcctgtatacttcaaaaactttacacccaaaataaaaaaaatttcttgccacggtagaaaagctgattggtctgttattcggaccatataactattgctcggattccaatcaggataccgtgccacgggacttttcctagcaacctaggagaaaggttcgccgaactttagaaaggtttccatgtagtagtcctattgatgccgcaggtgataatgaagaagaagggtggcaggcaggtgaccatattggcgacaaaggagatagaaaggcaatttccgctggagggtgtgccgaggggtggtaaagtattaagtggcattgatggatggtcggacttgtaaa

SEQ ID NO: 68007 - DNA, 459 bp, Oryza sativa
  unsure (1)..(459): unsure at all n locations
tgatctatcggncttttccttttcattctgtgtctttatatacggngctctctactataggagtagaaacgatctacaccgtcaatttgtgagggtatgatagtacttcccatatcatcgntcattagttattnttctcctttctaaaacagagtccatcacaaccgaatcgatctcacatttgcaagcctcgtatgatacgtccatcattgctccattggcacattcacatacaacccttccgttggcccatagagagcactgtagagactgttttttttccctttcattttgccttttaatacaaagcctaagattttctccactagtatactcactcgaattttcacacacggccttggctatgagttcagatgaaagttgttggggtaacaaaactatgtaanaactcattcaatntttctccaaatgatgcacatctganggcttggtttgaac

SEQ ID NO: 68008 - DNA, 410 bp, Oryza sativa
agcttggtgatgccatttgcgtgggagatcaagtgcctatgaagtgttcgatgaaatgtactgagagtgacaataagccactgatggaacaccccaagagaaacccatggccacctgcctggtcaggatggaagaagtggtatatgacctggactacaatcaatcatcaaaggatgagattatattttgtcccaccctggcctccaccaagtctagtaagttctttggcatgggtgcatttttgtattggagctcttatatttcaaagggtggttttatcaaatgaaatggttgagttggagcccttgcctccaccacatgaagcaagtttcagaatttgccttttccaactagtagcaggaaatgttgcaattatgtcactgctttgagtataattgcatgcgatgaga

SEQ ID NO: 68009 - DNA, 434 bp, Oryza sativa
  unsure (1)..(434): unsure at all n locations
tccatctacatgtcaaattgtcaacacattggtcagattttttatcacaaatgcgctgaanaagtgacaaaatagtagtaactaattaaacgttgacacaccactgatgaagtgatgagcaccacatgcattcatcaatggtataagcatgcttatcactttagtgccacttaaaacatccttttgggacattgcttagtgcatggacattgcacccacaattcacagaattatgtaatcataactgaactctcaaaagataggttaactagcattaaagttgattacttgaacttgtgtgttaaagcatagatcatgataacataattccttcagccaaattaaaccacctgtgcctaagaaattgttcatgttatgcctcagaactgttaannaataatccctcaaaaaaaaagaactcagaaatgttagat

SEQ ID NO: 68010 - DNA, 425 bp, Oryza sativa
agcttaaataaaggtaacgccttctctttctttctctatatgaaccgacttagggcggccatgctaccggtgacgcattgcacatccctaagtttgctgggggggcgcatccgctctatagcccgtatcttctcggggttggcctcaatgcctcgggtagagaccaagaacccgagaagcttgcccgcaggtacaccgaacacacacttatcggggtttagttttatgcgggcggagcggagactctcaaaagtttccgctagatctgagagtaacgtttcctgggtacgcgtctttacaaccaagtcatcgacataagtgtcgcgaccgagaaaattgcattttccgaacgctagtgtattaatccccgttccaggaaaagccggtgtacaccacacaaacatgatattaaagacacatcttta

SEQ ID NO: 68011 - DNA, 176 bp, Oryza sativa
  unsure (1)..(176): unsure at all n locations
aactcagcttaacctagttattctaaagattcccccaatattctattaatctttagagacatgcatggagcatctaatataaattaaaaaaaaactaattgcacagttaggggggaaatatnctcacttcctctttctctcctctctcatcctttcactttaactataaaaaatac

SEQ ID NO: 68012 - DNA, 378 bp, Oryza sativa
agcttaatacaacaaccattcttcaagtgtttgatcaaattaaagaagcgagggatcttaaaattacaataatggatcactaactgaccaatcagactgagttcatctcaaagacaggaaattaacataaaacaactcaaatttttacaggagacaagaaaatttctggcattgagatgggagataacataacataccctttaaattaaagggtgtacaagcacaaaattcaatgcagttcgaacttctgcgatgacaatacaccccatcaaacactagatatgtctagaacataaaacaaagaaggcctttcaaagttgaaagctagaataatataaactatggcacaagcccaagaacccaatgctgaatctactc

SEQ ID NO: 68013 - DNA, 287 bp, Oryza sativa
tctttctctggtcccgcgctgcatctctgctttcccagttctgagcaagtgcctgcacaagtgtttgggacgaacatgcctaccaaacttcattccgcttcgcttgagtaccttccgcgataggcatgcgatcaaatatttaacgatgggtttcgatggaaggttttggtggataggatatggcggcccatattttgtgggtgtttggttggtgggcgggactgggatatggcggcccggaggggaatattcccctcagatgccggatggatgtatccgaccgattt

SEQ ID NO: 68014 - DNA, 419 bp, Oryza sativa
  unsure (1)..(419): unsure at all n locations
agcttcgcagatccctcatcgatggtggtagtgcactcaacatcctcttcgccaaaaccctatacgacatgcaaatccctcgcacagaattaaaaccgagtaatgcgccctttcacggagtcattccagggctatccgctatgccgctcggccagatcactcttccggttactttcggtactcgggagaacttccgcacagaaaacgtctgcttcgaagttgctgatttcgagaaaccgtatcatgccatacttggacgcccggcgttagccaaagttatggctgtcccgcactatacctatatgatgatgaagatgcctagtccgcgaggagtcatatccctgcggagcgacatcaaacaagctatcacatgcgacaaggaaagctgcgagatggcccanacccgcgagatcacgatc

SEQ ID NO: 68015 - DNA, 448 bp, Oryza sativa
tcgccaaagatggaccctggtggaggggcgtattgttttatgccgcgaggcgagagccttgccacaaagggcatgggtttcgccaattattgaacattgccaggagaaggcccagcgggccgacacgccttccagaggcttcgccagggacaaggccatgtcacttggcccattatgaacccatacgagcaaaagacactgtatacccataaagatgtccctattaaaagggcaaccatgtaaatttccctgtaaagcctaaaccgccatgtaacagggggatttgaaaaaaatttactaagcaatacaattgtctttacttccaaccactgttaaaagaaccacgtccttcgtacgtgacgcagttgtgattcgacaacaatatgtatactagaagtataggaatatattcttttctattttctttccacttagcttagataactta

SEQ ID NO: 68016 - DNA, 418 bp, Oryza sativa
agctttcaagctgacgatggtacgaattgtccctatgtggttctctacgatcgtacacgcaaatccctccaaattttaccgatatattggtactagacgacatcttttcacggtatatatataacaaaaatgattttgaccacctttataccaacatcaggtagaagtataatgttacatactccctcctccctccgtcccgaaaaaaacgaatgaaagactggatgtgatatattctagtacaataaatctggatagaggtatatccagattcatagtactaagatgtgtctatgttggttttttatgggacggagggagtacacgcgctatgattctagtagttaaagctcactattacagaattgcatgttctttctaaaaaaattcatacgcattttagtaaaaaaaacagaat

SEQ ID NO: 68017 - DNA, 405 bp, Oryza sativa
gcttgtctcatttaacttgatcctatggctccactctggtcttgtatgaacatgttatgtgcctctgtactttcaacacataactgaaagttatgcattattgttcaatctgtttgtcttgcatgatttgagaacttgttttcactcctcattttgactatatgatttcctattatgtgtttttgtctgatgtagttttatctgtgtgccttccatgatattagaaccgtttccgtgcttgattttgtgggggcagcttaaggtgtttctaatctgctataatttttttcatgcttatatagttggaaagtgcattgaagtccacaaaggaggcacaggacttgctccgcagtcaaactgatagtgcaagaacatcaatgctcaatgatgaagaattcaagtcac

SEQ ID NO: 68018 - DNA, 452 bp, Oryza sativa
  unsure (1)..(452): unsure at all n locations
ntaactattccaacttctcttaactntcgcgggttattttcatttatttcttcaaacttccaactttcccatcacatcaaaactttcgtacaaacataaacttacagtttttccgtcacatcgttccaatttcaaccaaactttcaattttgacgtaaactaaacacagcctttctctaacacgtatagacacaacttattggttgcctttactgctaagactagttgctgtactcagcggtaaacgcggttaccatggtaaaccgtgaaaaaaccaaataaaatctatcaaaaaattaattttgtttgaatttgtatgggtatcgcgcggntactattactgtactccaacggtaaatctagttgcattattagtttcaattgcgcctattaagggcgacaganacacattaagggtgatggcagctcatcagggtcgctcaaagtggatc

SEQ ID NO: 68019 - DNA, 403 bp, Oryza sativa
  unsure (1)..(403): unsure at all n locations
agctntggcattcctctttcgatatctgcgtctttgtgacaacagccaagttttgtccttataatccatatggataatgctctagtattttcagcatctaagctgctagtaaggctcaactgtttccttatgggtttaatggccgagctcttttccttttttaccaaatttaatggctggggttagcctgcagtgctgagcacttgcatcatttgggcctgggctgtaagcgctttgtgatgcatgtcgccccaaaaggcatgtcacgtccacaggaataaacaaatcacagggcagaagcatatgcatccgttacttgctttccgtacttcagtgcctgggtggaataatttataacaccagactgggagcacctcagctgacctacttataggagcccatg

SEQ ID NO: 68020 - DNA, 449 bp, Oryza sativa
  unsure (1)..(449): unsure at all n locations
taaatatatccacctgcaaccacattatttcttttagataagttgtaccatgaagntacaacaaatatgtgggtttcacgacaactatttagtaaaatttcttatgattggcgtgaaaagggggaggaatatgtgtgttttgcaaattaatttcagaatatttgcaataaagaagcataagaaattgtggatatgtggcacgcaaattggtgagttatatgtcaaatgctagaagcaaaagatagcccaaactattaacgaatcgtgtttgggataattatgaattattgtcacacaacgaagtgtgttatttattggccattgaaaaatgcatattcatcaaggaagtatgaaacngcatatagctatntaaaagctattggtttacttgtagtaaccatatcctaaataaataatgaccctttggattcgaatgattctgaatgatc

SEQ ID NO: 68021 - DNA, 360 bp, Oryza sativa
  unsure (1)..(360): unsure at all n locations
gcttcagctttntattttgctttttctttcttccctatataaaccggtctggctgattacggtgtgtaactataactcttttcttttaatatattgatgagcaatctttttgcgtgttcgcgaaaaaaagacacggtgaaaccgaaaagctgggcacagttgtctccggtgcaacaagagcacaccgaatgtttgtgagttgtaacattccctttttataaatttggacaaaaccagtaattactgtacattgtaagagataagcaatcgtgttgtcgtaagatacatgagtggcatattataaaagtgtcgcagaactaaagaagtggcatatgatcaaatattcattttttattaaag

SEQ ID NO: 68022 - DNA, 333 bp, Oryza sativa
  unsure (1)..(333): unsure at all n locations
cttctcggttcttggtctctgtccgaggcatcgaggcctttcccgttaagatacgagctatagagcggatgcgccccccagcaagcttatggatgtgcaatgcgtcaccgggtgcatggccgccctaagtctgttcatatcgaggctgggagagaaggcgctacccttatttaaactcctcaaacgctccgggcccgttacttggacggaggaagctgaacgtgctctcactcagttgaaggcgtatctcagctctcccncagttctggtcgccccggagccaaatgaacccttgctactctacttatcggcgaccccgcaagtgggtaatgc

SEQ ID NO: 68023 - DNA, 426 bp, Oryza sativa
  unsure (1)..(426): unsure at all n locations
agcttatgacctatcgtctntaacctagccgattctatcatgtatagtcacaaaagaatatgaacaaaccctaagtatgtcgtatcggctggtaaggcaaacaatcatataatctctaaatcaatcttatctaaattatagacaaactgtatagatcggacctaaccgagacagtatggacttagagattagatatgtttatatctgttgtcgaatagacaactgcgtcacgtcgaaaggcgtggttctctcaacagtggttggaagtaagaacaattgtattacttagtgaaaatttttttggatcccccccattacatggtcttagggggctatttataatcctattacaagctccccttttanggtttaggttttacaggggaatttccatggttacccttatgataaagacattattatggg

SEQ ID NO: 68024 - DNA, 457 bp, Oryza sativa
  unsure (1)..(457): unsure at all n locations
tgctttcctcccatggggcatggncccgccactcggcccgtgaggtctctattgatctcccattctccctgcctccctaccaagacctgtcatcctgtattcatgttccatctagacgtctggtgttcgatcttggagtgtgcaatggagaaaaatattgatcttggaagagagaaacaaaacaatatagttcatcccactggtggaatttgggtattgcggcggaatattaattcctctaatgatcttcagtgtagctctgaataattcgcgttcctaggttgttacaattggagaagattcgaattttctcaacatgtagaacatcggatcttgataattacttctgaatggaatacttggcccctcttcgttcagctgttctgaatggggaatcagatctatcaacctacatcagttgttagagcaacagagcccagcgtgagcaccatcagaa

SEQ ID NO: 68025 - DNA, 424 bp, Oryza sativa
  unsure (1)..(424): unsure at all n locations
agcttcttatttccagcaggaactactttacatatttcgttatgcatagttgggctacagaaactaaaaagaccgtatcttagctgatatatgaaaactaactagagcgagccatagtgtgatatagctgactgcaaacttacaagtattagtaaccaatagtttgttaacagaaaagctttgtgtggagtgtaacatgcctaaatcaataaaagtcaacaatgactntatattttaaaacatgttagatcagtataggtgacacataaccatggtaccatcaataccctggctaccagcttactaccaagaaccaagtaagcagtatcaaaactatagattggtgggaactaanactcaagaagggagtattactccatttgaagctaaatgtcaaccagctcatgtgttgttcttgttagga

SEQ ID NO: 68026 - DNA, 458 bp, Oryza sativa
  unsure (1)..(458): unsure at all n locations
ttggtaatgtgggtatactaaccaaacaactttttttgtcagaatgccacataggcttgcgtctgttcagtaaaaagttctataaagcctaaggattgcatggagaaaatataaaaacattgagatagaacaaagaataatgaaacagaaaatcaagtttataaatatagcatgtctcagtcttatgtccatttcacgtgtgtacgtcatgttctaaacccacgtctaactggataaaagttgttgtgttgtgtcttttttaccttagttcgtacggagtatgtaccttacaaactcatacaccaaaatgatagttntataaattgatatattaattaaattaaacctacctaacatatttatataccatcaaaataatntactttanattaaatatgataatacccatcatctcaatataaaaacattatagtacgtttaaaagatgagagggagga

SEQ ID NO: 68027 - DNA, 420 bp, Oryza sativa
  unsure (1)..(420): unsure at all n locations
agctttattatccagctgcagcctcctgtgttgattantcatccatttctcattctgacgagtgatgtcttggacaccaaatttcattaccttaagaacttttgcattcaaaatgaagaacttggcaaagttaaccacgggcgtcttcgcttgatatcttttgagcactatactcttaaaatggtgttccaggcaatgaacaggtccagggacataattgcgaagctcattttttgcagtactttgcaaagttatctggaaatgtcaagaaacaatttgtaagttatgacgtattacagggacaatactgtcagaatggatttcttctaacatctatattgattgtagtagccttaactaagataatgaaatgccacaaaattctttggagcagtcctgtactcactttgatgtacaact

SEQ ID NO: 68028 - DNA, 428 bp, Oryza sativa
  unsure (1)..(428): unsure at all n locations
acacatagaatactcagcttataattagattgtagctagacagcgacattgatattgttggaaatacgnacatnnccatacgtaccaacctcaaaatgtacctaattacgccaaaataggtactattattatcttgtccagacaatactcttaactatatagctatccataacagcttaacattgaaacggttcgttgatagcaatcctacatgcctccaacagtaatccaattgaatattgtcctctctcccttgaacaagcatagtacttacaattactatatctagcctggaccacttatgcataaaaaattttaagacagaaaatgacaaagtctgatcatattattcttactgtatatatgcacctaaattaacttcacagcttactaattaatgaacacacaatgccggagaaagggacttt

SEQ ID NO: 68029 - DNA, 352 bp, Oryza sativa
  unsure (1)..(352): unsure at all n locations
agctntacgcaaagctttcttaatcttgtacatggntagtctcatgatatttgatgaatgccatcatgcaactggaaaccacccttatacaagaataatgaaggtattgtgaaataccatcttatcatgtttttttttttttgacattagcatttaggcttttcttttttgagtttgtcatatgttataactcatcactatctcaagagttctatcacaaatcagaacataagccaaatgtgtttggtatgacagcatcacctgttataagaaaaggcaagtattcagttatctgcaagagctataaaatgcttctttttcttttcttttgngngggtgtgggtggggggaa

SEQ ID NO: 68030 - DNA, 473 bp, Oryza sativa
  unsure (1)..(473): unsure at all n locations
ggacacataaaactcagcttgacacagntatattctgtggatctagtgttttactatattaaattcgcactaagtttgtgtcatggtctaaaaaacatttaacagagcctaaatttgttatgacaagtgacatctttttgcaagttgagctttctcttgaagctgcaagtttagctcaaagaaacgcaagcctcggaataagtgactcttcagcaagcacgttaatctttttgttgcactaaatggtaaaaaatgataatatntatcaagaattgtgctgttctgcaattctattaagaattgtgttgttctgcaggatctgcaacaagagcgagggctntggctgaagatgcattntttcatccatctgttatgtctatcagatatgcttcaatagagcactattttgcgatttacatggtcagtattactctctactttacacttattacagtccaatttgtgtttgacac

SEQ ID NO: 68031 - DNA, 406 bp, Oryza sativa
  unsure (1)..(406): unsure at all n locations
agcttctagagacgagatgacttcattatctttgccctctctccctttgtaccatgagagcaagaggaagcactanaaacctccagaaagtcccatatggttatcagagcgttgactttttagtgcatatgtaatcttttgatccaatggctattatttatctaaactctttattcaatgggtgatatagttttgatgatgtggcgtgctctcgtgtaagaaagcttggtacttccactatataagataagatcagatttgggaagtgactgcagttaatatacagctattgcttatattaccataaatgcaattgtattttgtatacaattatattggtcaatggcagttattatatggactcgtgaggattactaacataaatatttctctttcctcctccctg

SEQ ID NO: 68032 - DNA, 373 bp, Oryza sativa
  unsure (1)..(373): unsure at all n locations
tactaagcttggaagncggggacttatgaaaaatgactcctctgtcttaccgcgacgagggtacatacgctattctgctcatttaaaaatgtcaagaaagcatccatcatcggaaaattccaccggtttacaggcccacatgccgcaaagtcacagatgcttgtccttgacggaacattcaagattacacaaatgccctcacacacatgctgtactttgacgtttgggatgagntttacgtaaattctgaaagactaaaactgattttatgtgaaaatcctgtagaatttgcttttgtgcatacatagagaatcaatggaacatgtacaatagtacatcctctattctaaataaaagatgagtgctctctccg

SEQ ID NO: 68033 - DNA, 416 bp, Oryza sativa
tctataaaggtccgcgcgtcggaggaaggagacgagactaggctataagcgagactgatcggttgcgtctggacactgcgcgcttctcttctcttctctctctctctcgcgattacgtggaatctaaatctaaatcaatctttaaactcatataaaattcaaatactaattgagttgatgagataatatatttatccattgtattagtaaagggtacgagagacgaaaaccaactataattccttattttgactaaaagaaaacttggtggaaacgctctcgcgtgcataatcgtacacgaataaattgaacccctctagcaaaatacttcaatccatgcatacgtgatacgtgtaagtaatgttatttgggcatggtttggtttccaaagaagttggtttcacatatctgagaat

SEQ ID NO: 68034 - DNA, 419 bp, Oryza sativa
  unsure (1)..(419): unsure at all n locations
agctggcatatacgtgtttcttcccacatgcatgccatctgcacattatttgcagcaaatcagtggtcagaacgatctctctccatctcgttgagacgaaagaaatgtgcgtggacagaaaccaagcgacgacacagtgctctgctggtgataaggagattgcagggctgggcactnttttgctccacatatgcatgctttctacgattcggagctcagtgcagcccanaggtcacattggattctcttcactacactccatcttctaacctaggctgcattacggctaggtgcatccattgccaagttcatccaatatatgccagctccattgcaaggaccatgtgcacactcctcagtccacaggaggcagatggctagctagcttactctttagtcatacatacactttataatag

SEQ ID NO: 68035 - DNA, 377 bp, Oryza sativa
  unsure (1)..(377): unsure at all n locations
ttgacagtacaagcagaatcaagtcaaagattggnttatgcttacggaatccgaatatcgcaaggccaagcattacagctgcaataaccatcaaattgtactgcctaaaaggaacaaaacaaaagggaaatcacaatgaatacgttcagatttttccaggtaaaagttcagtgctgattgggttattacgcagccatcatacgcacatcttgtccatcacatgcttgatcttcttggagttttcgagcgcgcgcgtggagaaactcattgcagaagaattcagcttatcctcgatgacgtcgatcttctgctgcacttgaactggtaggaagacctgatccaccccgatgttcttggctgcagccaagctacctgag

SEQ ID NO: 68036 - DNA, 395 bp, Oryza sativa
agctttacatctcccaatagtctcactatttgttggatacgtagctcacttgtcctgttagtgtggccaatgatttgtgccttccctgtgtggaccattcatgacctctgttcatatactagctagcacagtataatttaggaattgataccttggtatccaatgggaatggcatctatcatactatatcaaatactccctccgttttaaaatgtttgacaccgttgacttattatcacgtgtttgaccgttcgccttattaacaaaatttgtgaaatatgtcaaactatatgtgtacatgaaagtatatttaacactgaatcaaatgatatgaaaagactaaattactattttaataatacgaatggtttaacacgtattataaaggtcacggt

SEQ ID NO: 68037 - DNA, 445 bp, Oryza sativa
gtcgccagggttcatcccagatttaatgtactctctttttgataagacccgacgaagttctctaatattggtagttactcgatgaaaaatactccaagcactccaaatctcattggcggtgtgaagatgagaaagacgatcattatccgaacgagaaattccactcaaaagaatattgggagcgttgcagttgttcaaactcagtttttaaagtagcagtattaatttgttcaagaatcacatgctgattagaaactattctccaaatatcaagatcctcagcgctgatatgagatggcattttactacaccaataggatgaatccgctccatcgaaaacatggggcttacgtgtagacttattagccatggcaaatactctcattcggctattatcaccgaagaaacaaggctctgatccacttgtatgatcgaatacaagaac

SEQ ID NO: 68038 - DNA, 389 bp, Oryza sativa
gcttggataattcgcatcaagaaaattttacccctgctatcactgcgtaagacaccaatcaatccggagtttaatagaacgcgctgtctcttttggctttcaattcaccctctgcctaacctcaacctagaaaaggataaagaagctctaccctttttcgaaaggcaagaaagtgaaagcacttctgtctttcaaaaaaagaaagacattctagttttggtgtctttgagaggctttattctttgaagtgcctaaagtcaataaaagtgaaaaaaagttgaaggtcgagcaaagtcgtcttcaacgctctcgaaatgacatagatagagacggaatggaatccaccacatattaaccaggccgatactgtagtagtcgctccctgctat

SEQ ID NO: 68039 - DNA, 459 bp, Oryza sativa
  unsure (1)..(459): unsure at all n locations
tgccgctgctgccgcaaatcaactcaagctcctcgttttatcatgatagagtaaagccccaaaatgggtacacagcttaacatgagagcaagcagactattatacgtgtaactaagccttcaaaatgggggtgtgcatgtaacttatccgtcatagagcgggttcgcttgtaaataggcccagaccaacgcctctttgttctacatggcatctcgattcttcactacacccaatctgtatcgactcccattaattacaccttttctaggttacgagtgtggaaagagacttctttcttttcatattatatagaatagtcttctcttcgtgcgtttctggctttttgccttcagcacgccatggaagcggtgcccctaaaagaaccgagttgaggagtcattccctaaccctatagcttaattgcttcacagactatgatcaggtttnctctactataac

SEQ ID NO: 68040 - DNA, 426 bp, Oryza sativa
gcagctgcaagcttattacttctcgcgatgatagcacaatttgattgactctacccaagacgagaatggagcacctattaaatcttggatggaaacgtcttttacctatttcacctgggcaaactcttattaacaactgtctcccaacttgtctcactataaaacaagatagaacgctaaccggtaaaatattttcaacacaaaactcctctcccacaatagaaagaaacataccttcttcatatatattccaatatgctccctgaggaaactgggttcatgagatatggtcaaccaacaatacgctctatcaagtacattggccaaaccttaataattactctatcccacacaaatcgtctacctataacgaatacctacccccagaacaatcaattcatccgagccttccggggcgaatccctt

SEQ ID NO: 68041 - DNA, 341 bp, Oryza sativa
  unsure (1)..(341): unsure at all n locations
ctggctgtctccgataccttcgacagcttgttctgtagcagtaccttgaccaactccaggcccaatagaagcaagacctacgggcaatccagcagcagtaacggcagctgcagcaattactggatacatgatgagtttctcgtgtcaaacaaaagaaatggttaaggatacaatcgaccaagaaatgcatatttctaagctctattggacagaagtaactataaagtacatattgaaacgataatctgaattcttcgaactgcttcgagatctccttgttagnttgcaatcattagaggggttgggactcactattctatttctctttcttgtccaccaac

SEQ ID NO: 68042 - DNA, 135 bp, Oryza sativa
cttaatccaggatccccactcagaaagcaccgagacaatgcacatttaacttggcgcaaattaacccaactttgcctcttttttttttgcccaaaaatataaaattgggactgtgacagttggggttgcaacttt

SEQ ID NO: 68043 - DNA, 314 bp, Oryza sativa
  unsure (1)..(314): unsure at all n locations
tgccttcttatcagatctctatgtcaatgatgcattctgttcagcttcacagatcacatgcatcaactgagggagttaccaatgttttaaagccttctgtcgcaggattccttttgcagaaggttactactcgttcaccttacattntcaagtctgatgcttgaaatttttgaaagctatacctaaaccagaaattttagagtaccctttcttttctttcaaaaacaatataaagttctgagcctcaatgtttatcattaatttaaatcacaggagcttgactaccttgttggagctgtttcaagccctatacg

SEQ ID NO: 68044 - DNA, 359 bp, Oryza sativa
  unsure (1)..(359): unsure at all n locations
agcttgacctccatgtagatcaagtgattatgatacatgacatanatgataatagtacacgtatatcagtttgaaaaaaatagtttattaagtattttcatttggggctctagtctggtaactaatgtccttacttctaagatctaacatgaagtctaaagctcaaacatagtcgacacttgacacatatggatcattaacttgttgatcagtcttgggagttaaaaaaaagggatatctgccacaaaaaaacatcatatactactgcaactcatgtagaattgtagtaactacatctagagtctagaacctgtaaagctgcccttgtgaataactaatgttcttataattagaactat

SEQ ID NO: 68045 - DNA, 361 bp, Oryza sativa
  unsure (1)..(361): unsure at all n locations
tactcagcttgtatgaacccaaaatgcaatagctgaatgaaacatgctaaacactatttgtcgatagggaactgcccttggntactccatgcgttaagctaatatagctcctctagtattctccctaaaaaaactgctattggttactccatcagaatgtgaagcattgaaaaggtaataaatagttcaaaccccatcaaagattcaaatgcaactctgctatcaattatggtcaggtaactctgctatcaattagtcccttaataaagcctaaatgcacattaatgacgcatatatgcatgagaggagttcattcaatanatatgcatttnctataacaaacctctaaccttcctatcat

SEQ ID NO: 68046 - DNA, 402 bp, Oryza sativa
cttaagtcacctgcggcatcaagcttctcttccagcagcaacaaccatatctatttttgttggcgcgacagtaagcttttgggactctgcctgcctagagggaggagactactcgatgttgcgccgcttgtttacaaagcctccaaaataaagaacagaacacttcaacacgctctgcacactgaccaatggctgcttgaccttgatcttcatgcgatcttgaactggacgacgcacatgattgatcaactcgtcgaggtctggaccgctgccccggcctttcatctcataaagcaccaggagtaccccatatcatggaagcttaccagccacagagaatataccgctgcatccgcatacagagtacaactcctcggctcgacagctacaaacttcaacgcc

SEQ ID NO: 68047 - DNA, 359 bp, Oryza sativa
agcttataaagaagaacttgaattgattcttgacatgccattccataagaccacaatgcttcagctagtctagtatgctactgccgacggaaatcatacatcttcgccttaattaacttgatcaaacttttgttagatgcctcatcctgtccattagcttgcgcataatatggcgaacaattcaacaacttgatgcccatgccgtcggcaaactgaacaaactcattacacacaaagattgatccctgatcggttgtgatagtttgaggaacatctaattgtaaacaatatattctttgacaaatagattgcatctctaaaatcaaccttctttaaggaaccgattctacccacttact

SEQ ID NO: 68048 - DNA, 459 bp, Oryza sativa
  unsure (1)..(459): unsure at all n locations
ctagatgaagaagatattggagacaacatttatcaggctgctgncgaattgagtgacctagaaaaaacaccatcggctgcacccaaacagactcctccaacttccgctgctccagctcacttttcacgtgtgatcttgttatctggattgtttcttgaaagaatcaatcttgaatagccgattgcttattaatctcgtttttgcagaaaaagaagactgccgtgaaaaagaaatcggccccaatggtatttaaaccaattccatcggtaaagctcttttatatctttaagtctgattataaccgatgtcaactaatcactttatccttttcagcctccttcttcttcgcctcctgggcaggcagaaacaagcaatcgcactccatcggccgcaagtagtcacaatgtcgaagaggaagaacaccagctgctcctgctatccagtaagtttatcttcaaa

SEQ ID NO: 68049 - DNA, 417 bp, Oryza sativa
agcttctccaggtttcatctcaaacttaatgtacttccttttaaaaagatcacgacgaagttctttaatatttgaagtttcttgatgaaaatttttcaaagcgttccaaatctcatgagcagtttgaaaatgtgaagcacgatcaaaatccgaacgagaaatcccactcaataaaatattgcgagcttttgcaattttgttcaaattcagtttttaaagcagcagtactgatttgatccggaatcacataaggattagaaactttcctccaaatatcaagatcctcagcctgaatataagattgcatcttactacaccaataaggaaaatccgttccatcgaaaacatggtgcttagttggtaacttattagctatggcaaaaactttagatcggttaaaatccaaagaagaaaacg

SEQ ID NO: 68050 - DNA, 442 bp, Oryza sativa
  unsure (1)..(442): unsure at all n locations
tnggatgaactgattaaatttagatatcataagaagaatattacccatggcaaatagaaattggtgttatatttgtatttgacaaaatgataatgccaatatatctattatagtgaacaccatgcctttntttgtcatgctttttttggctttgtacaaccttggtcgatgtagaggctaagagtttatcacttcctatatgtatgaaaaagtgaaactatgtgtgtgtaggtaaatttgaaatgaattctaacatgtatatatatgaaacattttgcaattgtagtgcaggtatgcctaagatgggtgtatgagtgtatgagcaaggtgactgcataatcgtgaagagcttcaatgagaggaggttgcgagagaatctangtatctntgattgggagctcactgatgttgaccaccacaagataagcacccttcccgagtc

SEQ ID NO: 68051 - DNA, 429 bp, Oryza sativa
  unsure (1)..(429): unsure at all n locations
ntcctgtgcagggaggatgtatatacgacgctggtggttgtgtgtcaagcggcaagaaaccaacgacgactattccaaatgcgacaagaggagacacacgctgttccaatgacatgtggggcccacggctcgaggttctacgtgatgagtggaagtgacaagtggaggaggtggtttgactggtcagcgaggggaggaaggctacggtcaacttttgggaacggtcaaagagggctgggctttcttctcctcgtgacaaaaatatgttgtggctggctcgctgcctcctctatccttttccggatttccctgtctgtgttcttgcgacttcactgtgatggtagacgtacgaacgcacaacatctctacacccgcaataccacacttacacacatatgaatatgatccgccctgtacacatgcttgaaa

SEQ ID NO: 68052 - DNA, 387 bp, Oryza sativa
accttaagtcacctgagctgcacttcaaacattaactataattttatttttatcaagacacaaaacttccgccgacctgtcaaaaaaaaatcaagacacaaaaataaggtttcctgacctgttcctttatctgtgagttttacaataatttcacttataaaaggtcgtttctttggatcggtcttcacacagtttaacccactttcgatgcatctctttgcctgtaagatgtcatcttcttctagtgatgggtaccttgacgttatctgtgatgattttaaccatttcctctcgacctgcagaacaagacagcataactcacatgaaaggatgaactatgatatatatcaacatctttctccacatctgtaatacatatctcttaca

SEQ ID NO: 68053 - DNA, 236 bp, Oryza sativa
gaagccgacttctgtaaacaaaaatatgaaagccgattacaaaggttaaggaatcgagctacttaaagacaatgatggacactctgcatgggagtaccatgagatgccacgccctaaccgcgagctagatgaacattcgattccaacaaaaccgggttttatgccatataagcaaccacctcctcgataaatcctttgctatatgacccagtcaaagaggagattgatcggctatt

SEQ ID NO: 68054 - DNA, 395 bp, Oryza sativa
ctctcggttcttgggctctggccgatgcattgatgcctacccccagaagaatcgagctatctagcggatgcgcccccccaacaaacttatggatgtgcaatgcgtcaccggctgcatggccggcctaaatcgtttcatatcaaggctgggagagaaggcgctacccttgtttaagctcctcaagtgctcggggccgcttacttggacggaggaagctgaacatgccctcactcagttaaaggcatatctcagctctcccccggttctagtcgccccggagccaaatgaagccctgctactttacttatcggcgaccccccaagtagttagtgcaaccgtggttgtggagcgcgatgaaaacaatcctcatttcgtgcacccccattctgtgctaa

SEQ ID NO: 68055 - DNA, 375 bp, Oryza sativa
aaagccagatacattgaccggacaaaaaattggccattcagatgataattccatctaaaacaatcactttattgattcaactgaatatgtacaatagaagcacacaattcatgccactttgctagattctgaccaactaaagcccttttaaaagaaacatttagcggaacagatctcataacattagcaactgaagaacttttgcttcgaacaatagcatagagagatggatacctatctttaaacgccaagttacctagccatttatctttccagaatctgacttattccccattatttagaatccaggaacccatgttaaaaaagtattcttaacttttataagacctgaccaaaaatgagaatcaccttgtt

SEQ ID NO: 68056 - DNA, 413 bp, Oryza sativa
tgccgttcgccttgggaacgacgaccgggttcttcagtcactccggatggatgacctctcggatgaatccggcctccagaagccgcgccacctcctcgcggatgaaggcttgacgttccggggcctgccgccgcactttctaccggaccggccttgcgcccggccgtacggcgagacggtgctcaatcacctccctatggaccccgggcatgtccgccggtctccaggcgaagacgtcggcgtttgcccgcacgaaggagacgagcgcgtcttcctatttgtcgtccagaagaccaccgattcgtgtggtcttggacgggccgtctgcccaggccacctgcttgatcgggacctcgtcgcacgtgatcatccgcttgctcggggcggctgggacggaggcgcttagcctctcg

SEQ ID NO: 68057 - DNA, 419 bp, Oryza sativa
agcttcgtcaactcctgagctctggtcttgcgactgatgctgtagccgcaaggtaatcttaacgacttgaccctcccgccgttcgtgctcaaacgcagcatgtggcctggtgaattttataagctcaacctgcccgcacgattaacatcgaagtattaagtacgattttgtcactgtattcgcccttgtaaattactagtagctgccttttagacgagcattccaaccgctccaccgggatatgaatgcccccctggccgtcagttcttccctgagtttttactctactctcgtagatctgtaacatcagtgctggctcgcgttgttcatatcaaactgatctctgtaaatactgtaacactgacagaaaagcctttaactttgatcttttacctttacctgcttttggatgatccatt

SEQ ID NO: 68058 - DNA, 435 bp, Oryza sativa
  unsure (1)..(435): unsure at all n locations
tctagctgttggagctctgatgccagagagcttccctctttttgcagcactgcaattntatcattcaaatcaccatttgttgattctagttccttaacacttgactgtgccttcttcaactcagttaggcacttggaatgttcggatactagcattttcttttcttctgctgcagctccacgttctatgttcatactgttcattagctcctctttctctgcaatcagaccatctatcttcacgcctaaaagtttaagtttgctctcaagtaaatgtttttcttcagtcaaggtgctattttcagctnttgttttagcaataagtgccttcagttgagaacattcagtacctaaattctgctcacatagctttcaggtatcattctcccttgagagcatcagattctcattcttcatcttctcaatctctgataac

SEQ ID NO: 68059 - DNA, 457 bp, Oryza sativa
  unsure (1)..(457): unsure at all n locations
gtttatctcatcgnttattgccattacggtcggggcggttattactctgtcggtgctgattctctcaggggcgattgaatttatcccgatgcaagtgatccctatcgccgggatgattgccggtaacgccatggtatccgtggggttgtgttacaacaatttatggcaacgggtcattaacgaacagcaacagattcatgagatactgagtcttggtgcgacgccgaagcaagcttcagcgatattgattcgcgacagtattcgcgcggctttaattccgacggtcgattcagcataaacgcgtggcttagtgagtttaccacgaatgatgtccgggctgatatttgccgggattgatccggtgaatgcgattaaatatcagattatggcgacccttatgctgctctaaccgccagcttgcgaccattttgcctgcttttaactatcgtaggttata

SEQ ID NO: 68060 - DNA, 466 bp, Oryza sativa
actcagcttggtaggagcattgtgcgatcgtgccacagacaatggtatcattttcatacaaatattttcaagaagaaaatagaaacaaactgtcctgaaaccttaaggataggcatgaaacctcaaggataggtaaaagttgaggagataacgaaccggattatgtgactgtaaccaaattccaggattgttgggattgtctggctggtatgggtccccatgaaggaaatctggcaccacaacgaagtaaccaaacaaagcaaccttgtctgctatcttccttcacgaaatatcgaaatatttaaattcgtgtcagtttataaatgatgggtattgctagaaacaagcagatgcacttcatatagagcacacaagcaaaatcgtagttcaatacccatctgattttgtacatagagctcgactaatccaacctttatcatgagatcaacattatactgtgtatttt

SEQ ID NO: 68061 - DNA, 429 bp, Oryza sativa
  unsure (1)..(429): unsure at all n locations
agcttgacttccacaaagcatttgatactgtcaggtgggacgctctgtttaatgttcttggggtaagagggtttccggataaatggatttgttggatgaaatctctactctgcacaggaaaagctcaggttaattatcatcaacagagaaaagggagaacaaattctatacagaaggggagtctgtcaaggggaccctttatcaccatacctattcataccagttgcagacgttctacaaaaaatgatccaacgggcatacagcacaatcgtcttaattcaccccctagatattgaaagtgaatcaccaacacagcaatacgcagacgataccttgattctcatanaaggagatgcggatcaagcaacaacactcaaagaaattctggattcgttagcagcttttcaggcctacagatcaactaccata

SEQ ID NO: 68062 - DNA, 279 bp, Oryza sativa
tgagcctcaaacccaaagaagctatttagaactttcagtcctctcagactaaggagaaaaaatcaaacaaggttatgatagaccaagttagcaaattaaattgattaaaaatcacactccattattatgatgatagcccccgactgacaacggcaagaagaaaacttgatgttgacagtcaagataaggaaatgcaatgattaacttaagcgtagaaacgacgaagatgttcaatggtccaagagttgtcgacaagagtaccgtcttcgcgcttgagtc

SEQ ID NO: 68063 - DNA, 422 bp, Oryza sativa
agctgtcattgtcttttacagtgtaagaaagaaccccattgatcacaacgtagcacgtgaattagttgacatttgtcattgacccaaataaaaaagaagacacacagaaaagctccttatagtaaaagtaacaggagatcctgaagcctgaaggtacacagtatgtgagcataagtgctagtagagatttctgctactgtcgatgtaccagcgtttaactgaacatatgtgcactaaaataagcaaagaataagtgaaggagggcacctttaatttggtcctactacatccttcataagtgataattaaattctgatcctttctttggtataggactttgatttagtataagtgccgaacaaataaattaataacagccacagatatgttcagcaactgtcaatagattctaatatttttcc

SEQ ID NO: 68064 - DNA, 383 bp, Oryza sativa
ccattaaactcagctggtgacaagagagcttgcctcatctaatctggaaactgatgcagaactatatatgtgcagcaacaattatgcagtcctacatgatgcagcatcaagacctacctcttctgcttatcgttgccacaatcttgaatcctctggattcagagaaaaaatgaccagaagataaattgagggaattttccttaccgaaacagaaatcacaatacaactaagtgctggaagcataccacagcagtagaaagcctcttaaagtttctagccctctgaattccccccagcatatctttaatcattgtaagccttattcaaaaagaaacacataagcacaattcacacagtggtaaacaggtcaacagaactttaca

SEQ ID NO: 68065 - DNA, 427 bp, Oryza sativa
  unsure (1)..(427): unsure at all n locations
cagctttatctcatcgattatttgtctttctgtcggggcgggaattaccctggcggtgctgattctcttcaggtcgattgaatttatcccgatgcaggtgatccctatcgccgggatgattgccggtaacgccatggtagcggtggggttgtgttacaacaatttaaggcaacgggtcattagcgaacagcaacagattcatgagaaactgagtcttggtgcgacgccgaagcaggcttcagcgatattgattcgcgacagtattcgcgcggctntaatttcgacggtcgattcagcaaaaacggttggcttagtgagtttaccacgaatgatgtccgggctgatatttgccgggattgatccggtgaaagcgattaaatatcagattatggtgacctttatgctgctctcaaccgccagcttgtcg

SEQ ID NO: 68066 - DNA, 426 bp, Oryza sativa
  unsure (1)..(426): unsure at all n locations
agcttcttcatctaaactttntatatcactgccatgcatccatggcatcatgtagttgaaccaacagactggagctttgaactttatgtacacatacattgcctaaagagaggtgcatgagtcgattctgctgacttttaaagggtgctaattgtctctttaattaagacccctagccgcgtcaaccagtgcggtgcacgggctattattactaaaaattaaaaatttatagccataggcagttaataactttaactatgattttctattaaaatatataaaaatatgtaaatatttatatttactanagtactttntaataattttttaccagaacattgttcaaaacgattaaaattatgcaaccggagggaattgttattttattgaaagaaaggaccacaccagtcactggtggagaaaccc

SEQ ID NO: 68067 - DNA, 476 bp, Oryza sativa
ggaccttgaaactcagcttactttctcaatcctgtaaacttattacacaccacaatcactactacaaaacctataataggggatgtccgatcatattcaccggtttatcgaaccggtacatataaggctttttctgtcctcctaagtcctgaccccttgtacgagtctaaaactaataacagcacctaagatcttatatgtgccagtctatttaaaaacggatttgctatcctactgtctacagtttttaggggtgaaaactgtcaatatgctttgagatttgtgctgtggaggggtgaaaactgtcaaatttttaaccgtacgatatgctttgaaatttgtgctgtggaggaaaaaatgataaaaaaacccgatgctcgcaacaaggatcaaacatgagacctgtagcttgcatgcttgttcactaaccaattgatccattccaattttcaaaattatatatgagttacatatta

SEQ ID NO: 68068 - DNA, 379 bp, Oryza sativa
agcttcgttcaatccgtctatctatgccttataatttgctactctattccttgatgaagaagaccattctgttcatcaaaatatattcctgcaaagtgtgcgataaaaatatttcccttaccctgcaagttggaagcgcctgtgcttaccatcatgtgggttcattctttgagaaacggtattttgttctcttggttgcatcagtccttgggatcaccttgctcaatctaaagtagggacactaacaaggataaacaaaagcttacatgggatccctattgatccatggttaccgtttatcatgctcacttgttcctgagagtttgatttcatttgcacaaagatgtttacgatttagatacttgggctgataagaaca

SEQ ID NO: 68069 - DNA, 467 bp, Oryza sativa
  unsure (1)..(467): unsure at all n locations
tcgagaagaacaattgaagaaaagagaagagagaaacttctcacctagattntctgtcaaggaggaagtcagctaagctttctttcaatacctgcagtggcaggtgctgcgtgcacacaaatgaaaccagctactacgagccagcagttttgttcactctttagtgcatgatgaagtagacttaattatagtttagttccgtagtgcaagcttcctaattcccatcctgatgctcgttggtcgacatgactntttcaccactatgcttctcttccattggagctagcttctactgattgttaattaattactgtcaaattagctatagtttactttgcaaatcctacgctgacttcgagagatgcttgctttattagtggcagatggcagtagttcaactgctatgcaattgccactggccttgtgagaggacatgatagcatatatgccatcagaaagtaataagg

SEQ ID NO: 68070 - DNA, 377 bp, Oryza sativa
  unsure (1)..(377): unsure at all n locations
gaccctaagtcacctgagctgccactatatgataagtcattgattgtcatttttaattaaagnagaatttcataccatatattttgactcatgtatacaaagttttcatacgggtatttaatgtcgcgcaacgtgcgactaagtggctagtccagctgtgacggggaatcacggtcgtattccagcagtacatatatacactattatatatgtacttaataaagtacttaataaatacgggtatttattaagtggctatgattaatggaattataagcagtacatatatacactattatataaaccctaatcacatgagcagtagataggcacatgaagaagaagtagtagtactccctccgtcccaaaaaatactc

SEQ ID NO: 68071 - DNA, 335 bp, Oryza sativa
  unsure (1)..(335): unsure at all n locations
ttttttccatttgggatatctgaagcttgatggatcgtgtgtgaatgaggataaaactctccctccattgttggatattctataggacactataagcatcctgttgttgaagaacctaccgaaattggaatatattgctagttcatcctacagcactgttgtgtatggatacagagacaccagtactgatgttctgcctcctcatctgatcactctngttgtgaagaattgcctgagcctgtcagagctacccagtttaccttttagtctgaggcatttggacatagatagaagttgaatgtcaagtcttgcaaccatgtgtactcatattgggc

SEQ ID NO: 68072 - DNA, 413 bp, Oryza sativa
  unsure (1)..(413): unsure at all n locations
agcttataaggccagtcacgttcttacttagctccngcaagncantctaggtcttccatatgatcagaagattgacatttggtctctcggatgcatcttggctgaactgtacactggtgaagtaagttttcaactattcatctttacttactaatgtccatttgtcggtactatattacattgtcacgacatgcttacattttgtctatggaaattgatgtatttactcagtcgaaggaaaagaaaagtacaaaccaggatttgtccatggttaaatgaattattgtgccttctaactcatcccgcaattgctgcagtcaagggtttgattgtgggctagtggctcatgttctttctagtataactattcagttcatcccaagaaaaataccacctcctcaattgtcatagtc

SEQ ID NO: 68073 - DNA, 300 bp, Oryza sativa
  unsure (1)..(300): unsure at all n locations
tattatatnctcacaaaagcgctcgggaccaaagaacattcttgcccgactatgggaaatggttgcaatgtgtccttgaagcatggactcccgtagtacaactccccatacaagaaacgaaaagtcacccacgaagaaagggacgctccgttgaatggcgaacttaaagttgagggcattctagaactataaactatcattaatgctatggtggaagaaaaggttaacaaaggtctccccgacatgaatatacccccaggcacaacacctgctgtgcattcaactactcgtgcacaacac

SEQ ID NO: 68074 - DNA, 364 bp, Oryza sativa
  unsure (1)..(364): unsure at all n locations
ttgaccatggggacattgttttgctatattaacggcaaacaaatatgagatttgccggatttatgataaatataagcattcacaaccactcttctgaacatgttagaaatgatgaccgagaggtggttgtggtcctcacagagggacgcggcactaatcgaacacgactctggggattctttaagcgaggatgaatccttgggaattntgaaagagaagctctcatgctcatatgtggaatgttttctctcgtcctccacagtcgatgtcgtaagcttgtccgtggccttgagggtcttcttctcaagagatgcattatgcaagaactgtgttgtttcttgatgataaataaaacaacgttctg

SEQ ID NO: 68075 - DNA, 192 bp, Oryza sativa
  unsure (1)..(192): unsure at all n locations
atgtgttctgcgacctgtaatttatgtgcacacctttcgggatgtcatgaccatggcatanagcagcttatgatcgtacataatcccgttacatatggaataccgttgtatgacgacggcgcgacgacgactgacgagctcgaaggtgaccccgacaggtggtgtccacctgtctgtggctggggaggggag

SEQ ID NO: 68076 - DNA, 384 bp, Oryza sativa
agcttccgcaacgccggcgttaccctccttttggtgacctctacgaccacactagcctgcttggtgcagtccgcgacaccgacgtcgtcatctccgcaccgcagtgcagtcgctccaggtccctgaccagaccagtctcatcaccgccatcaatgagatcggcggcggccgcgtccggaggttcatcccctccgagtttgcctggacccggggcgcggcgccagcgccgcggtggagccggtcaggtcccgttcatctacggcagcaaggtgggcatctggcgcaccgtgaaagcgaagggcatctcgcacacgtacgtggtgtgcaactacttcgtcggattcgcgctgctgtcgatcgggctgttcatgccaaaagcggcac

SEQ ID NO: 68077 - DNA, 431 bp, Oryza sativa
  unsure (1)..(431): unsure at all n locations
gagctgaattataagaggctatattgtaccactttgtattctttatatatgaagagatgaagagagtcgagttgaagaagtcggaggaattccatagttgtcggtaattatgtcatatttcttttattctgttaattactctgttttcaatagaaatatctttctgagtaatttagatttactcgtgagaattacctcttggttagttcctaatcagcatacgcgattattggtcactataatcaacttaaatataatgattactttagtgagttataaatactataatacgtattattaatcgattagacgtggtgtttaggtaattaatattcagtaattgttgcgtatcccacattatgtntgaggtggatatagaggtggtgacagcccttaagagtacttaagtcctccatgtcccggtatgtagt

SEQ ID NO: 68078 - DNA, 400 bp, Oryza sativa
  unsure (1)..(400): unsure at all n locations
caagcttgtaaagaccaaatgtggagcttcatttacaaaaatttgattactttttaacattnggncatggaacaatccgttgtagtgcgttgccattgctgtacagatggcctccatttcttacatcttgatgtccttgttcttgtgtttctaagtacttcctccgtttcacaatgtaagtcattttagcatttttcacattcatattgatgttaccaatatgaatgtgaaaaatgctagaatgtcttacactagagtgcatagagcatgcttatctggttttcgatgcgtctctagaaattggacgaaaaggctaaccatcagtgaatgtgaaaaattgcaacaccgagatgcaaaaatttaatttgtaaacacagacttacatgtaaatgctccttga

SEQ ID NO: 68079 - DNA, 431 bp, Oryza sativa
  unsure (1)..(431): unsure at all n locations
actcagcttaacctgacaacacgggcctaagacacttcgcgtttgggtttttttgcagccagctcggtgcccgtactgaccttcttcttcgcagncctactaaggtgagcacgatctcatcgctgcatacttaatttgttgctgtttctttgtacaaagagaggggatcatatcctctcctataaatgatagcataaacagattccagaatttacagaaaagaaagactctacttttgtaaatttgctagctgtttttttagaaagagatgggatcctctcccatttctatcagggcatgaatagcattgctagcctttctccgcattcatgataagctaacaatgctagtgttatggtactactcctangtgtgttcttttaagggggttaaaaatactttctccttgcatgtaaaacagagtgacgaat

SEQ ID NO: 68080 - DNA, 399 bp, Oryza sativa
agcttcaagcaacttccatttgtatatgaggttaaaggaaatgcttgcataaactatccacagtaaatgtgtggtgtgagaggggacgaaatgtcctaatatttatccaattcagaatcacagggcatgggcatggcaggcggccatagccgcagcggtttttctttcatcacagcccctcgcatcgtgtatagccatggaatggaaggcaagtcgttcgaaaacagcaggtaggaagcatcaggtgggcccactggtcggacggcaggggcgagtggtgaacagcggaggaaagtcgctgcagctgaggaaagcgtgtggtaaacagctgcgccggcccacaccacagtgagacgtggtaaaaatgaggatgacgtggataacagcgggatcaaacac

SEQ ID NO: 68081 - DNA, 337 bp, Oryza sativa
aaactcaagcttggcgatctcggcctgggcgggcgtgatcagccagacatccacctttcttctggctgagccccagccggacctgcaggtcgtaaagctggatcgccgtctgcaccgacagccgcacccgccggtcgcggagccccttcaccgccctcaccttgctgtgacggtccttgccggcgaacaccctcgacacgcgcacgatccgcgactccgtcgacgccgaccagtgccgcgagctcgccacggcggcggcgaacacgctaaatctatctcatgctcacggtgctagctaacagaatctctgcacacagagaggatcctttacctaatc

SEQ ID NO: 68082 - DNA, 396 bp, Oryza sativa
  unsure (1)..(396): unsure at all n locations
aagctnaggattgataaggactgngagtttctgacaattttttcattctctgctgagaacgagagcttataatatcgtttgagaatttatgtcttgatgatgtaaccagtggcagtgccactggaactggatgattgtactggacttggactttaatgtgataattagatgaaagctgtgggatgcactctttttcctttctagggttttctcacgaggtgtgagtttttacctagaaaggtttttaatgaggcaaccattgcactacacagctactattatttttgaaagtgtttgtgactgatcacttgagtttgaactgtgatttgtgaactgttagacttagtatttgaaagtgttttgtgattgtggatttgtgacttgagttgtgaactg

SEQ ID NO: 68083 - DNA, 437 bp, Oryza sativa
  unsure (1)..(437): unsure at all n locations
aaactaagctgntccttgttagcacagaggggctataatcctatctatttttctttttttttcacaannatgcgngatgactttcttgttgctaagaaaaattacttgataataaacactgtcacagtataactcagtaacctagcagatgatcatctgctttatgttctaacatgctgttttatctattttgtgtcctctctgacgtgcttgcgctgtgtccgcctttgtattactttttttttttacctttgaaggttaatatattcaggccggcctccttaaaaaataactggctatctttgctctaggtggtattttcttgctgaggttaaacttctttgatataaatgaatgagataatgtgcattctgatttctgaatctgcttgtcatatcatgttcttccagtcgactttcatctgttcaaaactcccc

SEQ ID NO: 68084 - DNA, 389 bp, Oryza sativa
agcttgagtgtcgagctgtacagcaactttctcgacggtaacagtcatttctcgtctcgtcatagctagtaagcctcagcgttgaccccttcatcacctcactgtcgcggagctcgaaagagctatgcggcattcctcgcgcgacaaccccaccgctggcttccctatggtgtggcggcgagatcatagcagttgggccagatcgaagcgacgaggagcagtggcaacatcgaccccgacaaccctttcaccctaccaccaccgctaccttgtcgagctaaagtaaaagtttgggaagaaaatttagtctggcatgtaagtcacacttatcaagatttttgatcattaaaaaaaagtacggtacgaaaaaaacgatacaattacatcgt

SEQ ID NO: 68085 - DNA, 428 bp, Oryza sativa
gggcccatatcccaaaaagtttaagccatatgtctgatttctctcacaactctcggagcagaattaatgaccatgggatcgactgatggattatgaaatttcggtcgcctatagaagaggaaaagcttattaatataaaagtaggattgacggatgtgtaggtgagggatatactccctccattccaaattgatatacgtatagtttgttttaggttattcctaaatgatctacatatttgtgttcatttattgagtctattcgctatttgggcattggagtaaatggacattgatgcatgtatccatacacacaagtatttataacctacatgcaatatcttgatttgctattggttaagaaatattggggatggtgtatgcatctagtttatcgctagagtaaatatagtatgagagagttattag

SEQ ID NO: 68086 - DNA, 403 bp, Oryza sativa
  unsure (1)..(403): unsure at all n locations
aagcccngagacttatgaatccaaaacatgcaacattancgagagtatctatgtgtattatccaacncaataagggaacaattgaacattacagaattctaagtttaatgtggcggttgtaattaacggataatgacaggtggggggtacgtgcttagctaacgattggaacatgcatgcacgtccttcgcaatagctagctatatcatgcatgatctgaacttaattaagctgcaactttctcccctaaaaaaattgcaagtggacacctggtcagcctatgctaattaattatttgctagttaaaatataatatgcaatattatccaccatatgtgtgcagcactagtacacaatagtatcatgtaattaaagtactatagccgcaccatgcatgtgatgt

SEQ ID NO: 68087 - DNA, 404 bp, Oryza sativa
  unsure (1)..(404): unsure at all n locations
nggatcttcttggaatcaatgcacgaaacgctcgcggtattttatcgaatcggcgcctggaatctcgctctcgctcgcggggattcaaagctntatgggaggaaggataaaaggcggattcaaagcgaaaaaatcgggattttcggtagaggataacaaaaaaaaagagcaggacacggatatcggaggggatttgcggaaagacaacattatttgtgggtgtggctgggaagatgagacgggcgattcaatcgcatcctaatcgaatcgatccaaacaaggcaagcaagaaaaagagagagagagagagagagatgattcttttgatgagagtgtaaaaagcgaacaagaagaagaagaagacgacgacgatgaagtggcaagtgcagccagcaaaggtcgtc

SEQ ID NO: 68088 - DNA, 408 bp, Oryza sativa
gtgacctgaggcatgcaagctatttgggacgctgtatttggagaagatgatttcgcaaaaccaatcagtcgtcgtggaacgcggtgggcggaagaggcgaatcgcgtaacgatttttgttaaatttgtaaccggccatggatccgaggcgcagccactgggagagctcgtcggaggacgtgacgaggccgctgctcccgctgcacgacgactactgcgcggtgggccggcgctcctgcgccgcgctgaggtcgctgctcgccaacaagtacctggcggtcgcgtcgggccccgtggtgtgcgcgctgatctgcggtctctttgatctttgcggtcatcgtgccgcgcgcaacatgctcggggtgctcgcctgggtgttcctgtggtggattaccgacgccgtgccgct

SEQ ID NO: 68089 - DNA, 431 bp, Oryza sativa
  unsure (1)..(431): unsure at all n locations
tgtgttttactggtccattatccatgcagaaatgagaggtaggttaaaangngagcaaggaaaaaagaaaggcaggcagtgtggctccctctgcttttgttggtgagccaacaagagacaaaaacatggccacactttggagagtttgggagggtggtctctcacggcataaagtcctaaaaaaggagggaataggaggtgatancggtgggtttgacaccggctgggcagccaagaagcagccactagtcctcccagacctggccaggagggtcttcatcaagaggttgaccctgccacttggatgatgacacaatcagttccaacatttcgttcatagttgattataaactaanatgcttattagacatatanattaattataggtaaaacttttatatatgtggggtcttcacgatctaaaagcaaac

SEQ ID NO: 68090 - DNA, 381 bp, Oryza sativa
  unsure (1)..(381): unsure at all n locations
agctnagataagnaaagcattttaaggaatgtcaaataatttggcatgccaatttttttatttaaactactccacattccaaaatacttctatattgatttctgctcatattttgaatgtatgtacacatctcttcatccaaaaacattttgggaaacacgcagaaatcggttgagttgggcaccgtcataacatagacggttagaatttcagactcgccatttgatcggtaggcctaatatatgagccgacatggtgtagattccgtgtgtgaggctgaggagttaggtgtgagcgaaacctacatgtgatattgagctaaaagtatacgagagtcaacgtgataaattatattgatgccggacatgagtacatatagac

SEQ ID NO: 68091 - DNA, 408 bp, Oryza sativa
  unsure (1)..(408): unsure at all n locations
ntgatagtttccctcacattcaaatctttagttgcatatatacatgttngctttggggaactaaccggcaggtgaaactcttgtcatttctaacccccgccgagttagcctgttcttgctccattgtgcagtatgaggaggcggctgtcttgtctgttcaaggggtcaggctctccataaagttgtcatgacgagtctagcactcgctcatcagctgatgtctcgatggaagacgccgacgctccgcgacaactcctaagcgacgctgaccttgaccttctcagtgatcgggagagagaagcctacaacatgctgagcgaccgggagtatgctcacacgcgagaatactcaccggagttactgaaaaagataggtatggatgttgaatttcgttctattaagaaagct

SEQ ID NO: 68092 - DNA, 340 bp, Oryza sativa
gaatcggagggaatactgagttagaaactcattacattaaaaaatggaggtgattttcaaactaagtacccccgccatcctaaaatataaggccgaactaccactaacacaaataattaaaaaacattagcaccttctcatttggattactataataaacacaatgcatgcacctaatgggattatagatctcgaggatagaggatttaaaaaaatgaatttagaggtgagggaggtgctagttaaataattacatacatgcatgctttgtatgatgaatcatcgaaaaaaaagtagttgtgtgttgtgttttgggatagaaagagtattatagtgttat

SEQ ID NO: 68093 - DNA, 418 bp, Oryza sativa
  unsure (1)..(418): unsure at all n locations
tcgccctgagacagaatggttntggagaacacatcgtttgtcatacattgtcaaatgaggtaactactacacaacatgatatttaagacttctcaagcaaaggatgtgatatataagaagtcaactcttgaatcctgaatgtgccaaaatgttatgagtgctttgcaatggtcgttaagaagtgacaacagtgagctaaaacctattttggccagttntgaataaaaaaagttaaaactgtttttctcttaaataaacagacagtaaacatgttgattaagaaaaaaaaagccagaaggaatgccaaaagagtgggatgaccattgcttaacattcaaatgggaactatacggcaatgacaaaagtaaaacagacacctttttcttgtccactagtggagagaatatttaatgtcagt

SEQ ID NO: 68094 - DNA, 388 bp, Oryza sativa
  unsure (1)..(388): unsure at all n locations
agcttgataagtggacagggaatctagtgatggaaccaggcattgtattgatggngctgatttaattatatatgaagtgacagatgcagattatagccgccgtctactgtttgggtaaggcactttaatttttttattttgaactggtcttgctcacatttaaaatgacttggttacattgtgttactgcataaccgatcaggcttccatttgtggaatatgatattttgtaattcttgataggtacattcccgttcgttctgatgggatcattggagaagaaaggctctctgaaccatctgatataattctccctggtaattttaatatctgaacctattacatactggtctatgttcacatttttcatgcaactacatgtattaat

SEQ ID NO: 68095 - DNA, 420 bp, Oryza sativa
  unsure (1)..(420): unsure at all n locations
gcttcgnctcattaccgatcaactcctccgcgcgctcgccttgattaattattgatttcgattgatctcggtgctgtttctgtgtagtataattaatcatcattaatttgatcatgatgttgtagttgtaggtgatcatggcgctgcgctgcatgctgatgaaggcgaggacgacggctctccggccaccgtcgtcgtcaggacagacgtcatctccggcgagcatactcgccggcgccctccgctccccggcggccgtgctgatgacgccccacacatcgccggcggcggcggcggtgaattcttnccgccatctcttcaccctctttcggaaggtgcgtacatagttcgtcattgatcgtttgcctcgtaaatgaactaatttactttctccttccatcacacgttgtaatttcaaaa

SEQ ID NO: 68096 - DNA, 410 bp, Oryza sativa
  unsure (1)..(410): unsure at all n locations
cctgangcatgcaagcttgtatatataaatgcaaaccttcccatatagngnatctcntttcagtcgaggctacatgcacaaattggaggcacgcattgtatttgtagctgcaatatcttccatcatcatccatccaaacatatacatatagaatcatgaagcaaaaatcgttcatgtcacgccgctggggaaaccctgagttgattactcccgcgagggcgacgccgcaagagagcaagcccctctctgacctcgacgaccactgggacctgcgctacctgcagccaggcctcgacttcttccacgcggtagacggcgatcattggccggcgagaccgggggacagcatcaaaacggccctagcagaggccctggtgtactactacccgatcgccggccggttgcgggag

SEQ ID NO: 68097 - DNA, 438 bp, Oryza sativa
  unsure (1)..(438): unsure at all n locations
aactaagcttngatggcttgaaacaagctcctagagcatgggatgatatgcttatttactttntgcttgcgaaaggttttacaatgggaaaggttgacaaaacgctttttgttcttaagcatggtgataatcaactttttgttcagatttatgtggatgatatcatctttggttgttcgactcacgctttggttgcagattntgctgagattatgcgcagggaatttgagatgagcatgatgggtgagttatcatactttttgggattgcgaattaagcaaacacctcaaggtacttttgtgcatcaaacgaaggatatgaaggatctnttgagacgattcaagatggagaattgcaagccaatttcaacaccaatttggtctacagctgtgttggatcctgatgaagatggtgaagtctgtgatcaaaaggagtata

SEQ ID NO: 68098 - DNA, 395 bp, Oryza sativa
atgcaagctttacacccccaaaatcgtggcacggtattgcaaacattatagaattttatagcctagttagttttccagaactatacaaccaaactaacggaattatggacaaggtggggagccccaactgaaagaatgaaccattcaaatgctacctacttgccagcttgctagaatacagttatagctctgaaagaattgcaggaatatagtgtgaaagctcagctgtgagcgactgaaagccattgactagttgagtgtggaattcctggtcttcttcccctatcaatctaaaatgcacacggattgcgcgcttgcagacggccatgaattccagcaatgcagcgatgagctgctgcagttcttgagatcggagcctagttgcgggctcacca

SEQ ID NO: 68099 - DNA, 400 bp, Oryza sativa
ccatagaacagtctctgcttgcaagattagactttgtcccatgtgggctcgcggccacgcagcaaagagcacccgtcttgactaattttgccaatcacgtgcaagtactactgactttttgtttgaaggatcaaaaaggttactgacgaggcagataactggttacatccaagtcaaggaacagaggacatcaaacgcatagtatcacctgttgcatttccagagcatatgtcagcaatatttgtggtatttcttttgcccaaacggaaaagtcactatgtttatctttaaaaaaagggttatcatgttgaattaacaagcatgaaaacctgggtgcacaacccaattcatatctacccatcaacacctcttggcatcatgcaaatcaacatacagcata

SEQ ID NO: 68100 - DNA, 399 bp, Oryza sativa
agcttgcctttaggtgtgtgagtgtgccagttgatttgattctgcaatcaacaagaaataaagacaaagaaaccgcggttaaatccataaacgatagccgatcggctagttgccgatgacatatcatttatttttgagacgatgtcatatgtgaattaatcggcaatcatggataaataagaaagaactaaatctattcgatcggctatagatgttaacaatatataattcttatgtcgatatatacttaaatcaagtgattgggatagatcagttaccatgccgagacagtataaatcacttagatcgaaatatatattaacaacaagactatatatgttcatagcatagctgatcagatagatctagcatgtatcggctaatactccgatactactc

SEQ ID NO: 68101 - DNA, 440 bp, Oryza sativa
actcagctaaagtctgtatagaaggcatacaccttaacagtccaaataaggttagtgaacgaacttgtgatcttttgatatttgatggcacctttgtatatttcgaatagaaaaactgaacagaaagtcgtcgaaccttatcaatgagccccacattctttcgataaccatctattatcactatgaaattctcatctgcagacttttgtgcaattagatcgcgtaccaagtcatgaactgtacaggatgacacctcatcattgtagttgatttcaataggttggatgaatcttctaccaataagttcgtcgaaatatcttgctgcaactttctccatgccaaggtcctttgttacattgataaaaccttcagccacccatgccttcaccaaagcatccttgctgattttgtagccctcacgatatttattaagatagagg

SEQ ID NO: 68102 - DNA, 407 bp, Oryza sativa
  unsure (1)..(407): unsure at all n locations
catgcaagcttatgaatatccaaatgaagganctggttattgacgatttcatggtctttaaatttgagctcaataatacttggatcaaagatccatttgttactgccactagaactgacagtctcacttgcagctgaactattcaaattaccaacatcctacccttgattgtaatttaaaaactcagatccatttatatactatggaggaatcaattaagtgtgaccacctaggaccgcactctacttggtgttattacctgagtttctgaactatgtctccatgtcattagacaaactgattcagttattcatatccagatattcacttatgtccttatgtcgttaaataatgtaatacctttctaaatttgtagcaaagtctagagaaaaacagaacaaaagtgc

SEQ ID NO: 68103 - DNA, 430 bp, Oryza sativa
  unsure (1)..(430): unsure at all n locations
tattaatagttgactaaaaaaagagtcaaagcgtcttgttatatgaaatggaggaagtatgtcccaattttctgtagctcaactggatttggattagagattttgaagtaactccctaaaagatagccatcaacatctacttgtctgaacatcggagttgattgcccatacagatgtaaggtgttgtgtcgtgcattgaactacaacaacagagttggaataatttcatcaaatgaaatgctctataaatcaaagatgagacaaaggagcaagaaattatataagctaagagagatcgatgaacagcgacagtatgcatgcacagaggcagatcatgccactggttcagcacttcagccacgcagcggtgtgattntctatgcatggcttgttggttaggaggcatcangagttctcatttgacttgatc

SEQ ID NO: 68104 - DNA, 393 bp, Oryza sativa
agcttggacattctcaaatctgcacagctctatttccacccacaagcatccatttttctcttgaggtaaaaaaggcagagcatgatgaatcatcttgctgttatgggctatgaattgcaaaaggccatgccctgaacggcattgcactagcaaggagttgccactccaggtgattattccttcctgcatccgcagctgctcagcttgggtgcaggaggcggccataaactaagctcaagtggttgaaggaggccttcctccactacttcacaaagtggccctgtgccaatgtgttctctctctgcctgcagcagcaacaaacaaacacttctttccagggaaaaggagatcctcaattatgagctcttcattaggcaaaggttagtgctctta

SEQ ID NO: 68105 - DNA, 432 bp, Oryza sativa
  unsure (1)..(432): unsure at all n locations
tgtcgagcttgtgcaaaanaatggcctggcccattaacagctgatttggcccatgaaaaaccctaacctcaccgttcctctcccactcccttgtcatttccttccctagaccccttctcacgccgccagcccatcacaccgagtccaccgcctttcaacgcgcgtgcgcgacaggcgacactgctcgaggcctatggcgcgaccgcgcgaggctccctgcgccaccttcctcccctgtgctttcctccccagcactgctcgacgctccctgcgccgaccttccctgactcgatgttgttcatcacctcaccgagacaccaacccaccgacggcagttttcgctgcgacgagcccaggatgaagaggttttgggatgtgttttcttatttttcttatgcatgtagcaatagcatgttgtggtctgtgcacttg

SEQ ID NO: 68106 - DNA, 395 bp, Oryza sativa
agcttcctaaatcctgagagaaaacaaatttttcattgtattgaacttcccggtaatatgaatatctccaccgggtcagcatatagaagtataccatttgcttgtaaaaaatgtaacccttttttaacgtacatgcacctagctagctgggttcatattcatttttctaaccaatgtttgcaattcagcatgcacaaacacaataccgatgaaaaagaagttgaaataaaggagatttttttggggagagaaaatgacaagaggtcttcggagtccaagggtgctgcaggttgctggcagaagcagctcttgtcaatggtagcacttttttggcatttcaaaatcaaattgcgaaattcaaaaccagctgtaaaaaaattgagccaagcgaaatt

SEQ ID NO: 68107 - DNA, 250 bp, Oryza sativa
  unsure (1)..(250): unsure at all n locations
ttacacctacactgtatgcccctctattcctagcctctctagttgagatgaataacaaaggccgttatgatagctgttgatgatgagcgctgttggcatgagaaaagacagtgtcgattttggagactatgccggcgacgggtggctntgctgaccatgatggaccacaccgatcgcgcggagtatgtctgcttgatcctctagcaccgaccgtctgattgaccgtccgtgctgccgtgttagccgcaca

SEQ ID NO: 68108 - DNA, 387 bp, Oryza sativa
agcttcgtgcaaggagcgtataaacagttcatttcgtcgctccgcgaagatcaagtgaagttttctcggagatgacctaaacccaatccttcccgggagggtagtttcgttagcttctacatcgtgtgttgtttgcttgtgtgtaagggtatggtttgcatcactggtggggatgcgaccatactatgttgtttgcttaaacaacttgaatcataaaatccattcacaacagatcaataggcaagtggtttagtacctcctctctagtaacccctcccatttccccctctttctggtgcctgcagcagatggtctgcatgagggacaatttcatcggatcaagaccccgtctgtttcatggggcaactcagtgcaattctaatagta

SEQ ID NO: 68109 - DNA, 424 bp, Oryza sativa
tcttgaatttaggaaaatctattggaagaatagatgtactctcagatggatgtttcttggagaggaaaatacttccattgcaactaaaagatatagagtcaattttatctctcagattctggaccatgagggtcaggtggtctcttctcatgagcagagagctgctctcttttataaaagctttaaagacagaatgggtgtgtccaattatcccacaatggctcttggtctgagagacctttttcctattcagataaatcttgacagttttgtggaccctttttctacagaggaaattgacagcctcattaaaataatccctgctgataaagctcctggtccagatgggtttaatgggtttttcctcaaaaaaaatgttggcacattattgcccaagattactataggctgactgctcattttc

SEQ ID NO: 68110 - DNA, 384 bp, Oryza sativa
gagctgcagctggcgcgcagagcgaaaaaaaagtgtcttgtttctcggggctaacaatgggccgttgaaaagggcccaggaatatattggtgtccggctgtccgcgccgcacccgcggaggggcgttgcgtctcgctgctataagtttagtaccacctccgagattcaaagaagtgggggaggggaggaacaatatataatgggcacccctgccctcgttgcaacatacttacctggacggggtcgacggccgatcaagaaaagccgtggcctaagccaatgggccacattgcacttggtgggcgcgttggcttaccatcttcccaagcgggagagtggacgtcataatttggggtagagggggtacgcgttcgagcggtccct

SEQ ID NO: 68111 - DNA, 393 bp, Oryza sativa
gttagcgctgggttatgagctcttaccaaatgggagcctgtaggaccgactcaactgtgatgacaacaccccgcctctcacttggcaagtgcgcatccagatcatcacggagatttgctctgcacttatcttacttcacaagcaccggcctcacccagaggtgcatggggacctggagccaggcaacatccttcttgatgcgaatatgcagagcaaactcagcgattctgggatttcacgcctccttctggagtgcagcgtcactggaagcgacgcacactacacctgcaggcctatgggaacaccggcatacatggacccagagttcttcgccacaagggagctgacgccacagactgatacttactcttttggtgtaccatcatgcgtctc

SEQ ID NO: 68112 - DNA, 393 bp, Oryza sativa
agcttgcagtcatcagagcatctagtttgtgatccactgcttcactgataaataatgattgtcgactgactaatcctttttagttattgatgcattctaactctttgagctggttgtgatgttcactttgattatgcagcgctgaccaatacggaagccgtttcatacagcaaaaacttgaaaccgcaacagttgaggaaaaagacatggtttttaaggagatcatgcctcaggctctctcgttgatgaccgatgtatttgggaactacgtggtgcaaaaggttttttttttttctgaaacttagtggtgcttctcattagggagctgggccgaccattttttttctcatagtactttgtcttttaaggtttgtttagcagcgtcatgactta

SEQ ID NO: 68113 - DNA, 431 bp, Oryza sativa
  unsure (1)..(431): unsure at all n locations
tgtgtacgttgcccgttgaagagcgcaccggatagaatgtatacaccatatctgcatgcactgccatgtatatacacgaaatgcaacacggccgcaccttgatgaaagcctaccaaactcctaacaaaattgtcaactagggaagtttgttcgccgtcaggttttaagtaggggactccgcgagcaccaaggtgtgccaccaaccgcacgacacattcagtgggtggtatgcgtcgacaggaacactgcaaggcacgtttctgtccatggaatcgccgagaccgagctgcacgcgcaactcanaagttataaaaagaactgcaacggtgaatgtttntcttctccaagtgcagagctgaaatacgcacctgtccgtacttgttccatccccagcagaagacctcgccttcatctgcatanatgtcaccaca

SEQ ID NO: 68114 - DNA, 318 bp, Oryza sativa
  unsure (1)..(318): unsure at all n locations
agtaaagaaaggaaattaaattanagatggatgtagtgatagaaatagagtttataaagnggganagnttaacttntgtggtgaattttttgnatagtaatgaatagaaaaatnttgtanaaaattaaattggttaaacaaattgtagccattatttttagatacatattntgtccttgtcattgatgatacaacacttgaacattcaggctcatgtttttgcactaatagcacagtaccattcccacttgaaaagggatccaaaaggctgttgtttgtactgacatttgcaggggggggtggagcggcaactgaaag

SEQ ID NO: 68115 - DNA, 438 bp, Oryza sativa
ttagaaactaagcttgatcctgcaagctcctgcaattctttatttgtttttgtagccttttttacttcccctcaaggacataaacaaatgatttgggttgtttcacacaatgcatgaattgaaacgaatcattaatcataacatatcaattaaattggacatgactaaaaaggactggtgcgtaaacaagttaaagtttctctcctaaatgcataaatgaagtagatgttctattgtatatttaaataattttagaaactagcacatatatgtaaaatcaacatacttctatggttctaccatctaaattgttgcaaaattgttgagttcactactcagaaaaattatgtcaatacagcaggggaggacctaccagtacagcttctgcaaatgataaaagtagaaatatgtgtctcaaacttcacaaaataatgcctg

SEQ ID NO: 68116 - DNA, 353 bp, Oryza sativa
  unsure (1)..(353): unsure at all n locations
cggtttttaagtatggaggcacgaaaatttgcatataaactaggcagntagcataacagtaaaagacctaaatcttcatcatcaaattgtacctccatcgacactatgtcagcaacgatctccttgaagaccgatatgtggttcaacacagaaccactctcctgcaacttgtgcgagaacaacttcatcttgatatgcatcttactggctagatatttagacatgcagatcgattccagtttgagccaaagttctgcagtagtcttttcctgcaacacttcttgcaaaatatcattagatagatgagggtggatcagcaacagagccttacgatctttccgcttctcctcagc

SEQ ID NO: 68117 - DNA, 414 bp, Oryza sativa
  unsure (1)..(414): unsure at all n locations
ntgcagtatattaattgataagcaacatcactaggggtttaactctttgattgtcctagtgacttggtagatttggaaacataaaaaaaaggttgcgtctttaaagggacctctcatattaccaatgttcttatgcaagatacttcctccgtcccgaaattcttgacgttctgagatttgttaaccaaattagcttcttattgtaatgactaaattacccctatttatttaattgagttgtcatttcaataagtcatcatacactcaacaggttaccaagaatccctacatacaattaattaatgaattctttgaacactcattggcagatgacttgatagaatggacagatagcctatacttttctaatcaagttctccactgtaacgacattttttgtgggatattgttgga

SEQ ID NO: 68118 - DNA, 390 bp, Oryza sativa
  unsure (1)..(390): unsure at all n locations
gcttaagcaacttcattgatatgaggttaaagaattgcttgcatttctatccacagaaatgtgnggggtgagaggggacgagatgtcctaatatttatccaattcaaaatcacagggcatgggcatggcaggcggccatagccgcagcggtttttctttcatcacagcccctcgcatcgtgtatagccatggaatggaaagcaagtcgttcgaaaacagcaggtaggaagcatcangtgggcccactggtcggacggcaggggcgagtggtgaacagcggaggaaagtcgctgcagctgaagaaagcgtgtggtaaacagctgcgccggcccacaccacagtgagacgtggttaaaatgaggatgacgtggataacagcgggatcaaaca

SEQ ID NO: 68119 - DNA, 183 bp, Oryza sativa
gagccccagccggacctgcacggcgtaaagctggatcacccttagcaccgacagccgtacccgacggtctctgtaccccttcaccggcctcaccttgctgtgacggtccttgtcgccgaacacccttgacacgcgcacgattcgcgactccgtcgacgcccatcagtgccgcgagcatcccac

SEQ ID NO: 68120 - DNA, 406 bp, Oryza sativa
ctgaggcatgaacctttgagctatatctgccgagtcctatcagctccctgtgattaatgaggaaccgacaatgccgggccacggtgagcctcaattgatagcttatacttgtgaggtgtaagctccgtcggtcgacttggacgaggagtcatcttcacaactatgtcttctttgggccattgtatgaacgtcttgcgcgcatcgcccaaagtcatgatttcattatttgggggcacgggcagcggatagcctgatcaggtgtcctttactggatcgatggacaccttggcatacccagctagcaagtctgcgccgtggaccttgtttgtaaccgagggcttgaaagccatgctctctgcgacttcaggagcgaaagttgggcggactctcgctagtaagacacact

SEQ ID NO: 68121 - DNA, 363 bp, Oryza sativa
aacattaggagactcgtacggggcgattcacagttcgtatgaccaagatatgatcatccgaagattaatgctgttatatggagattcgcggattattataattaagctctgcaactataaaacatgtgtaagcgctatcttggaaaagacaggaaggctgcgcccgtgacatgcggacccctcaagtcatccttaaggaccgccgaagaccgggtacacaaagacggtccacgggtctacggaagcggaccccgtgttgtaaccgatgcgagtggccacataccgactccactagacaccactcgggttgcacacgtggaaaccacgcggcttccgagcggacacactaacacggcaccacac

SEQ ID NO: 68122 - DNA, 406 bp, Oryza sativa
  unsure (1)..(406): unsure at all n locations
gcatgcaagcttgggagtggctagaaaaccctaaattatgaaagaactttagnggttttgccaaagggtgacctagggacaaaatccatatatataatggctaggtgacgtcatctagccgttactcacaagattgaactggaaacctgctatgaggttccgggcaaaagtgccaggaacttccgggcagcacttatgaaaaatctagctaaacttcggtgcccggaagttccggccagaacctccgggtagccctctctgtcccggggagaaaataaactttggtgtccagaggttccggccagaaccttcggataggcctctctgtcccggggaaaatcatttccaagaaaaaaaaagaaagttccaaaaacctttatactcatggatatgactaagagcactt

SEQ ID NO: 68123 - DNA, 280 bp, Oryza sativa
tgaagccaccggcaacaagccacaaagtatattatttataagaaaaaaaaccaaatcatgcatacagggggccgatagcacttatccgacttttggttcccacggggaaaccatgcgacgtacatataaaaaagaatcccatgtaaataaaaaagagaccaacttacagtcacaggaaataagaaaatggcgaaacccactaaacaacagaaatgaaaaccaacacaaccaggtcaaacttacaacgcatcgcccagattggaaacacgagaactaaaac

SEQ ID NO: 68124 - DNA, 401 bp, Oryza sativa
  unsure (1)..(401): unsure at all n locations
tgcaagcttcagagagtgcagttgaaaaagnatgtgttatngagttatcagnactgatatcagttttagttatataaatggtcattctgaaattcgagtcacttttgcaggagttagtagagcagcaaaatggtgcagaccaggcaagacttctgttgctttgagacttaattccaagtgaactcgtgcatcaattggtcctaaatatgataacttggaattctgcaggtgatacaagtggctacgtcaagagaggttgttggagaaattggggttctttgctacagacctcagctattcacagttcgaacaagatccttgtgccagttgttgcggttgaatcgtacagcttttctcaacattgttcaatccaatgttggggatggaactatcattatgaa

SEQ ID NO: 68125 - DNA, 414 bp, Oryza sativa
taacgtgaactaacggctgtatataaggagatgtacatatgtttgttgcacaatatgcatggccagaccggctagaagacacttattagacgctcataacccttggattccctttcatccctagaaaagaaaatccgtgttcccttctgttgctttttaagttgcttctgcttcatctatatatgtccaggatcccttcttgtctgtatatccaattttaagcatggttggcgctgccgtgccacctacataacgtgagttgaattgatctttctttctagaggtgaatttgctctgaaattttggtttgctcttcaatcatcataatggccaataaatccaagttgctattatcccccccccccccaccaaaaataataatccaagttgctaattggaagcccacgtcaacat

SEQ ID NO: 68126 - DNA, 366 bp, Oryza sativa
  unsure (1)..(366): unsure at all n locations
atgacgnttgggagggtgggtanggcaacgtctactggggcctttttctgtgattgatcacaggtgaggaggtcctctttcaatcttgaaaaagaaaaaaagaacaggaagaaatctgagaatcatgcaggccacactgcacaaactttagtttgctgtcttcttttttttttctaattgattaaaaaaatggccaagcattggagggacccagcgatgttgatgattgttgtttaactgacatccacttctaacgctgatcatggtctagtggaaacacttgtatatttttctgctatattcaaagaaacatttatgttctttgtgaggtcgcttgaaaaaaaaagtctagtggtattaaattaa

SEQ ID NO: 68127 - DNA, 332 bp, Oryza sativa
ttttttttttttttataagacatgtattcaatgatgaaaggacctgttcactgatcgtactcgcatgtaatacaattatacaaagcatgatatgatctgttcattgtatcgcacctatccactgatatatttatttcgataaaagaatgcttatcagatgaaagcttccattgggccgcactcttaaaaatttatatcaatattcttatccaaatttcttcttggagaaatatgtggagcatgaatatgccttgctttacttttcacggttttgatttctgaatgccttgcgattacacaacccgagatgactctttggatacctgtaccaa

SEQ ID NO: 68128 - DNA, 392 bp, Oryza sativa
agctacacttatctcagtcaagtatacatctatgtgatccaattacaccgagagcactcccaaactcggcatcactaaaatgcacacagccaaacacacactcaaacgctaaaagagagatcatagagagtattaaggaccatcaatcataaattgcataaacattattctttctccaaacctataattaacaaatttcttagataatgttttgacagaagagagcttaggtacggacatataggtgagcggctcaacgcgtttcaagccttcaacgtacagccggtccaacgtacgattctcatatataccttccttgaaataaactcagaccttattaatcaaattttcttctttccctctcaacatcaaggtcaaaatccagctaaatt

SEQ ID NO: 68129 - DNA, 377 bp, Oryza sativa
aactcagcttggttcgaaaccaccatgtggatgcatatgtctttttttttgataatagaagccgcctgcatctccatatgaccagcccaagtcccatcctctagcatagattcacaatatttctcaaacgggtcctcgtcctcaatgaatggctcaaaatccacacggcgcttctgtaagatgcatacaagacagaatatgaagtgataataggccaatgcttgcttgcagcaagccttttagataaaagaacaacccagcctggcagcctgtactttacgcccagatcagatgtacacagccaaagtttgcagcatgtgcacaccttattgattcaatggcaccctaattacagctcttaagtcacagtgttacaa

SEQ ID NO: 68130 - DNA, 57 bp, Oryza sativa
agcttgctcgggcagctggaggaggaatatgatatatatttatgggtgggactctag

SEQ ID NO: 68131 - DNA, 366 bp, Oryza sativa
ttagctgataaatatgtgcgactcttgtatacctaccaagcgtggtcatatctaaaaactttaatggatcatcaaattgtccaaactactaaagtcgcttttagatagattaagttaacatcaagaaaaaaaaaatatatggcttttgttggttagtttgcaattagctcttcgttatacacatctagaccctttatttgagtcttggtgattaaagacaacctacattattaagactaatcatattttctaagtgtgcaaggagagttaagccctcggtaagtgaatatgttaccatgatttgcccataaagaaaatataatgtggtcttcgatgaacaaagataaagcccatgactctaattga

SEQ ID NO: 68132 - DNA, 389 bp, Oryza sativa
agctataaccaattggcctttgtcggatgtattgtgtctatccttaagtttgaccatgagaaagagaagccagcttctgtgcaacgagcattgtctgtccttgagatggaagttgagcagataaagaaaggaagttatgaccacttcatgcaaaaggaaatccatgaacagccacattcattaacaacaaccatgaggggtagagtgaaggatagtggtgttcttttaggaggattaaaggaaaaggagtacctcaaaactattaggcgcagtagaaggttagttttcattggctgtggtacaagttacaatgctgccttggctgcaagaccttttgtggaggaattaactggtatgccaacttattgtcctgactccttatgtagaaa

SEQ ID NO: 68133 - DNA, 383 bp, Oryza sativa
  unsure (1)..(383): unsure at all n locations
tgtgatgagaagaaagtcttgacaaatgatgtgttaatttcttggtataaacatggntgaatcaaatggtcacaagtgttgatctcgactcaagcttgaccccaagatggatggcgcaaggcaaaagtataatgtagctaagaatgttttcttagtcttttcccggtcttagtgtttggtgtagaccggatttgctagataggcgccgtactatcaagaggggtctatgaagcgagcttgtggatgatcttgtgccatattagttcatatgcatgtaggtgtatttggtgggcttgtctaaccaagtgtggtgagttttttcaagtcctaaacaaagagagatgtgggcaaatcctatatggttgggcagcctcatgtggtta

SEQ ID NO: 68134 - DNA, 223 bp, Oryza sativa
agataaacagcacattatagaatattgagacatttaattgttttttaatcaattatttaagcggtataaccaggcgtgcataggcacctctttctgtcttagaataattatcgacagcctgtattcattgattaatgttggaatcatttaaattttatcttaattgaaccatatcaaaaggtttgaagaactaatctatgaaggtttatctactagtgtctgt

SEQ ID NO: 68135 - DNA, 343 bp, Oryza sativa
  unsure (1)..(343): unsure at all n locations
taaaaacaggcatgctaaanatagactaccaccttcactagaatcttttttctttctgttgagttagaagtgtgtcctatcaacacaagtgaacaaaattcaggactgctaatctaagagctattctatcgtcgcaggggaaaaagggtgggcataccagtagaatcggccaaccggaggtacaggttctcagcaaaggtgttcctgatgtccctccacgcgtcggcaagctcccctgtccaaagcaaacaccttggctggttggacatggtgccggttgcggacaagatggtgtaagcgtaagccgagcacgaacagttgtggtgacacatcgtcgtgcact

SEQ ID NO: 68136 - DNA, 423 bp, Oryza sativa
tagcggacgattaaactctgatggcgcgcgattttctgtttctgtaacacgagcggttttgtgacttttgtgtgaactcgacaaggacaaaagattatgcgcatcggctggggcgtcgcgaaagcgaaaggaggaggaggagagagcccgtggaatgatgcgtcatgagtttcgttctctgcagtaaaaaatcgacggggcaggagaggcatcatcgtcgttctctgcaccaaaactcatgccatcgatcgcatcgcagcatttttttcacaaccgggggggcgcctttgataaagggtggtgatggctccctgctcattcacagctggagcctacgcctccctgctccctcctggggaactgttcctaatcgagtgattagcaataactaaattggctaatcacgtggattgacagccttaa

SEQ ID NO: 68137 - DNA, 382 bp, Oryza sativa
  unsure (1)..(382): unsure at all n locations
agcttctaatgagatcactatctgngtttctgttaatttattcagcacaaatgcaaggcacgggcagatatatataaagaacaaaagcagcagattattctagaacaaaaaccaagggcactgtttgaacgatcaatagacacacactactaaccgattccccatcacatagagggtgggaggcctgcagatcggagaaggggaagggtgaggcggcggtggcagtggcaaagaggagagagaggagcggctattctgtgggcagcgcttcagtaagaattatgtagggttttgtttcctccaagtttttctgcataatccctctagatggtcaggccacttggggctggaactgcccacccaagttttatgtgttactccc

SEQ ID NO: 68138 - DNA, 406 bp, Oryza sativa
  unsure (1)..(406): unsure at all n locations
ntcctgtagtagcttgtatatcatgtactcctattcaattttgtccacagatatcatgtgatgctaaggataagatgctttatatccttgtactcctgaagttggagcttattcagaagaaagttctcatatttgtaaactcaattgactcggcattcaaattaaggctgtttctggagaaggtaaaatggaaccactaccttacagtagtcaataattaaacacgtttgatgatttggtttcttaatttgttgtctgtaatttttttccattgttttatttcagtatgttaagtgcagtccaaaccttaattttaggccattgtctgattgctgtctgaacataaatcaaagtgaaaatgttgtgctagtctagaatacttggtacaagagtgtcgagtttttga

SEQ ID NO: 68139 - DNA, 356 bp, Oryza sativa
cacctcttttcctcaaatttactttttttggagctatcttcacgttcttttaaatcaaggagaaatactcccccattccctttttttttaaaattggtggaattaaattgcatctacagtatatagacttggtaggtgggtgcgatctattaaaaaacttgaaaaatatgagcatatatgtgcaacaactgggctagtgcgtgcattttgattaaaaatctatattccacaccatactttttatgccatataaaaaaagtagccacctatggcttctccacaaggaactacatgttggattatgcattccttttaatcttgccagttttattataaaataatcctattcgatttac

SEQ ID NO: 68140 - DNA, 420 bp, Oryza sativa
aagaaggcgtgcaagtgccaccctcactgatcaacttatctcgcccaagaatccaccaaagtatccaaagagatcatcccactgacaacatcttatgagacatcaacaagggagtatccactcgttctcgtattgcaaatttttgtgagcattactcgtttgtgtcttctcttgaacctctaagggtggaagaagctcttaatgatccgaattgggtgatggcgatgcaagaggagttgaacaatttcacccggaatgaagtgtggactttggtggagtgacttcagcaaaatgtgattgtcacaaagtgaatcttccgcaacaagcaagacgaggccggtgtcgtaataatgaacaaggcgaggttagtggcgcaagggttcacccaaatcgaaggattagattttggtgaaacttttg

SEQ ID NO: 68141 - DNA, 328 bp, Oryza sativa
aaactcagctggatgcctctcaaacctacggtagctgtacgttcttccacacattcttgggcctcctcatctcttcatctctctctgccctccatctatatttttctctttactgcctatgtccaggacaagttaatagaagtcacccaatatttccctcttggtgacctcccgaatacttttttattcccactataccgccatgcttctcttaactcttgatcgatacctcctctgctttacaatataacattctctagggttgcccaccatttttttgatgtcaacatctatatccacttaggcaaagcctcaaaatcttactctc

SEQ ID NO: 68142 - DNA, 107 bp, Oryza sativa
taggatgtgcatagactacaccgattttaacaaggtttgtcccattgtaccttaccccctgccacgaatagatcaaattggtgaccccaccgcggggtgccaccttt

SEQ ID NO: 68143 - DNA, 390 bp, Oryza sativa
taagcttcgcgtcactcatgagcctataacctagccacatgaatatatcaaactaaatttatgcgatttccttaagcttgagcgggtcataccgtaacaccatccccaccctgatgcattaagtgtatattggttacatgctaaatgtaatttcgtttgtctatgttttgcgtaactaggacaaagtagagtttctataagtttaccatatcctattgaggcaaattgtgtggctcgatcatattatcggcaaacctttgctatatatgcttattattctgggctgtgcacatctacttttgatgtagaggcaagacgttactcatttttcttaaattgtttactatgtagcctacccctacaatttaagtttctactctcacgccctgc

SEQ ID NO: 68144 - DNA, 412 bp, Oryza sativa
tgaggcatgcaagcttcttgcttgagtgtgtgtgtgtgtgtgtgtgaagtgtatcactccttaaataagcatgtatgacggttgtagagcatgcgaaatgtctgaaatgccccgcaaccgccatcagcaagcaatcctagacgtccatatgtaaggccgagctgaacggccgctgccagggtttggctgaacatgggccagcccagcagggctccaaattcgggcagagagactaataggtgggtcctattgacggttgtggtacttatggcggttttcaggacggttacacctgacatgtgggtccctctatccttgagcttgcttaggagtgagttttccttcatttcttcttcatttatgtgctaatctctgcaaacaaatagtactccaagtacaagtagaaatatat

SEQ ID NO: 68145 - DNA, 431 bp, Oryza sativa
ggagctgaattataagaggctctatcgtactatattgtatactagaatatgaagagagtagagtagaagaagtcgaatgaattccggagttgtcggtaatcttctctcatttcttttattttgtttattactctaatttcaatataatattcttcctgagtaatttagatttatcttgtgagaattatctcttggttagttcctaaatagcatacgggattattgttcactataatcaactaaaatatagtgattgctttggtgagttataaacactaaagtagatattaattacttagacgtggtgtttaggtaattgttatccagtaattgctgcgtatcccacagtacgtttaaggtaggtgtagaggtggtgacagccatcgagatcacttaagtcctccctgtccgagtacgtagtagagcaatat

SEQ ID NO: 68146 - DNA, 384 bp, Oryza sativa
  unsure (1)..(384): unsure at all n locations
acccggaccttaancgacgcagcatgcactatgaaacgctgttatgagtttttgaaatttatatcctcaatccgcgatgaatttagagaacatcgcaataaaaagtgccacaaaatacattacctgctgtttggatcataataatacccgctcatggaaccgtcgctacatgaaaagcatacattgtaaaaaccagctatggtcaacccacagtccactccaacattgacaaagtactgctctttccatctctacatgtagcatcagaataatgctaaattgttatggctttgtaattcaataaatggtgcacatacatgaaaggtcagatggtgcagcaccatgaatatgtaagcataattgctgatgtccaccgacttgcca

SEQ ID NO: 68147 - DNA, 326 bp, Oryza sativa
aactcagctatataaaacatcgagtattttaacactttataatttttataacaacatattcaatgttcgatttagtaaaattgatttagtgttgtcaatgttactacttttttatccatgtttaaagaagtttgatcagagaaaaaaacaattgagtgtgaaattccattaacaaagttcatttttagctctaaccaaactcttctgaggctagtattttatttgtcatgtgatttatattttcctatctatgatcatctttttcaaaaccagtaatacattttctaacaaacaatacttcaacttaaaattgagaaaaaaaactc

SEQ ID NO: 68148 - DNA, 381 bp, Oryza sativa
agcttctggaatctggagccgagccgattttatggcggttctcgtgcggcccgccgtgctgcccgtctgcgccatgacgggcggcggcggtaacgacaagcggtcgccgccgcagcagcggtcgtggtggggcgggaacaagcagagattgccgcaccagccgcggcggcagccgggcgggaatggtggccgaggaggaggaggaggggcgctggaccaggtgctcggagtgctccgccgcgacggcgagttcctccaggcggcagccggcgcccccctccgcgacatcttctggctccgcttcctcgagaagaagaagcagcagcggcggcggaagcaaccaaaacctatacccaaacctccggagcagcagcagcagca

SEQ ID NO: 68149 - DNA, 414 bp, Oryza sativa
ccctgtagctacgctacgcacatcgatcgatcgccggcaggagttatgcgcgtgtacatgagccctgccgtttggcagtttgaccaatattgcgaccgatccatccatccatcgcgcgcgccatgaatgcgtgcgatcgatcgatcgatcggtgcagcgaaagccgtgttccgctcgtcgcgtcctcgcgagcgatcgagcgcgtggtggcgtgcgcgcgcgcgtggacttttgctgcgtcgaggcgagcggtgaacagtacgcgcgccgcgcccgcgcggccggaggaggtgaggtgatcgacgagctcgcgagctcgccgtgcgcgtgcggcacgcgcgcgcgcactcgttcacgtgacgggcggtcagggcgtggagccagacaacgcatgcgcgcaccacagatcggatc

SEQ ID NO: 68150 - DNA, 389 bp, Oryza sativa
tagcttgagttgtactcatgttgtcgaagttttttcgcatcgcgcagtattctgccctcctgactgatctgaagaactgcctgaacaaattgctctgcatttgacgatcattagagaggaaattcatgtcaaacgaactgaatttctcgtcttcttgtggcagatggtttttcttgtcagaaatggtgaaccgagctgacagatcgatcttacaatgtataacgacgccggcgtcttgttcagcacgttcatgtgctgcctgacgaacgacgtctcgggagtaaatctgaacttcgtctgatctgcaatgcattgcatagagttaattatgccggaagtagtatgttctggtattttccgcacctactcgatgcatgtggtataaaata

SEQ ID NO: 68151 - DNA, 416 bp, Oryza sativa
  unsure (1)..(416): unsure at all n locations
tgctcatgggacatccgtggaggcggtgactcgtccaactttatggnctggtacatcgaagcttggggcggcagctcgtcgaagctttggggtgatgaagcacggatttacccgatgggtaacgggtggcagggaggcagcaccgatcactggtcttcagtgtcgaggtcgcactgctctaatggttgttgcaccacccaaaagccaagttcccgccgtgtcttgccccctcccaatccaagctcatccagccaatatctcttatgcatccccatcgccgcgagtagatgcatggccaccaacgaagaagcaaggaggagatggtggagaggccgccagccggccggcgctaataggagcagaataaggaggtgtgttaaacgtggagagaggggagaagaagaggaaagattgac

SEQ ID NO: 68152 - DNA, 389 bp, Oryza sativa
agcttggcatacaattgatgttcccgcatctttcccaacaccagacggagatgctgctgatggtcttcctctgattgtgagtacaccaggatgtcgtcaatgaaaaccacaacaaacttatccaagtattctatgaacactttgttcattaagtttatgaagaaggcaggcacattggtcagaccgaacgacatcaccgtgaattcatacagtccataatgcgtggtgaacgcggtcttcgggatatcttcttcacgaatacgcaattggtgatatccggagcgaagatcgatttttgaaaagacagtggcacctttaagctggtcgaacaaatcatcgatccggggaagagggtacttgttcttgatagtgacttcattgagagcttt

SEQ ID NO: 68153 - DNA, 393 bp, Oryza sativa
tgacattacggaccactgggtctagtaccagggggtaccgccccgggtggaccactcggtcaggatgatccgagcggtcaaacttgattgcaatctctgaccatcgaagatattggggcgtgtcgggctgaacagcattgatctcccgttcagtcaacttttgcttccgtttagactcataagccaaggggccgccgaagatatggttgagctccttgcgggggtcttgaaatcctgccggggcgtcgccgtcgtccttcttcctcgacgtgctttgttcttcgtcggagttcttccgtgcagtcttggtgtattgatccgcgaattgcttatagacgaaacaatctttggccatgtggttggagttaggatggtgcgggcattgggagttca

SEQ ID NO: 68154 - DNA, 395 bp, Oryza sativa
  unsure (1)..(395): unsure at all n locations
agcatgcaagctagcagctccaaaatgatactgtatactattntttgaaaaaagnagangctgtagcaccaatcaaaactgacaaggaaaatgttctgacttctgaacaataataagatagcagaggaaatggactcaatgagtaatcaaacactatgaacatgttctcattagtttcatacaggctacattgttggccacctaatgcgttaactaagcttggtgtaatattttctcctttctcactggtagagggcaggagcaaatattgtttgctgtcaaggcgtcaatacatgtgaaccaggggctttgggtctcctttgtcttacaaatggaaagatgtgacataaagattgtttcattctgtaggtcatcttagatcataatcgcacaaa

SEQ ID NO: 68155 - DNA, 426 bp, Oryza sativa
  unsure (1)..(426): unsure at all n locations
ntaagattctgactaaatcattcnttctaaatcattaatatgattaaagagagncaatatagcagatccgctgatattgttaagcccggacgacgaagagcatttgctaggcagatcaataatttttcacacgtatggccaatataatatcataatagcaacatgggcaaatggagccgccaggccgcccgattagaggtggttccgttgcttaagagagagtttgtcagccccataatctttcgcgcttagcagacgcaacaaaaaaaaaaatcgaaagttcagttttaaaattatattttatgtctcttattataggttatatttcactgtaggcttttaattcagtaaaacgcatatattaaagttttgcatacaaattgtttnttttctaataagtgctgcgtcttataatgagcagtgggc

SEQ ID NO: 68156 - DNA, 347 bp, Oryza sativa
  unsure (1)..(347): unsure at all n locations
ggattnntaaaacatggtgggtgtttgacataaacttcctcctgtataaaaccatttagaaaagcacttttcgcatccatttgatacaatttaaaaccttttgaagcagcaaaagccaacaaaagtctaattgcctcaattctagcaacaggagcaaaagtttcatcaaaatccaaaccctcaacttgagtaaaaccttgagcaacaagcctagctttatttctcacaatcaaaccatcctcattttgtttatttttgaaaacccacttggttccaataacattatgtccagaaggtgggtcaactaaagaccaaactttggttctttcaaaattttcaagtgcttc

SEQ ID NO: 68157 - DNA, 367 bp, Oryza sativa
  unsure (1)..(367): unsure at all n locations
tgactgtcctgggaggcttacgcccaaacttgccgactatttcttcgnggcgaattcctttggtgaatgcggcgatgatgacgtcgtcggtgatgtcggagatcttgttacgttgttcagaaaatcgccggatgtaatctcgaagggattctccggacttctgaatgacgttgtagagatcatattgtgtgccgggacgctcgaaggtgccttggaagttggcgatgaagtggtcgcgtagttcggcccaagatccaattgtaccacggggcaatccatggagccaagatcgggcggaatccgctaaagccactggtaaatagttcgccatggccttgctgtctcctcctgctgcgcggattgcgag

SEQ ID NO: 68158 - DNA, 183 bp, Oryza sativa
  unsure (1)..(183): unsure at all n locations
tanaaatatagannaagaanaaattagagtgnntaagtttgagtagggggtgaagaagtagatngaagtatngggattggatattgaagntataggtatgganttaagtttgagaggganaatgaaggggtntatggttnntggatttaaaagagaaaggtatgatatatggtggattaagat

SEQ ID NO: 68159 - DNA, 377 bp, Oryza sativa
  unsure (1)..(377): unsure at all n locations
nttgttttctactacttgtcatccccaaactgatggacttactgaactggtgaatagaaccttgtctactatggttagggctgtttcgaagaaaaatatcaagatgtgggaagaatgcttgcctcatattgaatttgcttataatcgttccttgcattctactacaaagatgtgcccatttcagattgtgtatggtttgttgcctcgtgctcccattgatttgatgcctttgccatcttctgaaaaaatgaattttgatgctaagcaacatgctgagttgatgttaaaactgcatgagacaactaaagaaaacatcgagcgcatgaatgctaagtataagtttgctggtgacaaaggtagaagggaattgaaatttg

SEQ ID NO: 68160 - DNA, 387 bp, Oryza sativa
taatattagctggacctggaatgatgaggtcattttcatattttagagagtgaataacagggccagaatcacttagtttaatgccattgatgtgttgattatgaagaaccttattgagttgatcagaaagttcatttaaagcaagaaaaaaaagataaggagaaagaggacagccttgtcttatacccctgttagcattgaaagaaccataagattgaccattaatgattacagaaaaagaagaggaactaatgtaggatttaaccaggttaattaaatgatgatgaaaaatctttcctttgaagagcagagtcaataaaattccattccaatctatcaaaagctttagaaagatcaattttaagcataaaggcattctgagagtaa

SEQ ID NO: 68161 - DNA, 432 bp, Oryza sativa
  unsure (1)..(432): unsure at all n locations
gcttnctcggngggtgatggccgtgtttgatcagcgtgacgaggatgattatttttatggcgtggagcacggtgccagaggggtgataccagatgtcactgaggcgattcttaatgagcttgccggtcacacatgcctagtgatcttccacaacgggagcggcggctacatagatgtgcacgagtgcggtgttcctgcaattatgggactctcgagcaaaagggtactgaggacatcccacgtcaggtttgggccctggatcgggtccgatttgcagaagattgccggattgagcgatgtcgctatgtttgctaatccttttaatgttcaacccctgctgcatgaataggctgaagaggttgctaggtccactggtgttccaaaacctgtcatgagcccctagatttgtaatgagttgcatacgttctacaa

SEQ ID NO: 68162 - DNA, 411 bp, Oryza sativa
  unsure (1)..(411): unsure at all n locations
tgaggcatgcaagctttcagcaaccaaagaacaacatcagacattngtacattttttaagcggcagcatatgtccctgaagacagatgaaatgaaaacaacttacacaagtttcacgaagcgctacaattgcaatgtggatatgtgactgatactatagcaagacaatgaaataaccttgactgttctgaaaggaagcccttgagcaaaaacaaactcatactatataatatttctgccctctctgaaataagaaaatcaccagtgctctgatccatgattagtccaaataaattatgctcataagttctataacaatcctgaggaagggatctaaagtacaacaatgatatgcactgccaatagatattatgaattttatgagctccattgcatcctccatgagcaccca

SEQ ID NO: 68163 - DNA, 441 bp, Oryza sativa
  unsure (1)..(441): unsure at all n locations
aactaagcttgtacttatgcanaatcttggatcaaaagctgagttgaccctgttcgccttgggagtactagaaaggagcttgtcacttccagtcagaaaataggtatgtttattgaagattgtaaaatatctaaaagtttagcaagatacatgataacaatttcaaatgtcaaactaaaaaatacgtctaacagagccctaaagacaggttataattcaatagttagcagatggtagatagccaatatataacaattaaaggaacagaaaatgtaatggcttatcatgtggttgcttttatgatcagtatctattagactatcactagtacttgagaaaaaagtatgggaggacaaacaatggctacaatttgtacaaaagtcaactcgccccgcttatagataaataaacatacacatgagctaaaagtaaaggcatgag

SEQ ID NO: 68164 - DNA, 383 bp, Oryza sativa
cgagcctgcaagcatcattctttcatgacgtttttaatgttatcataatagagtctatatacagcaaaagaagtgcctcacctttggctgccagcgctcatattgtgagtgtaatgttttcccaatagtttcaagggcttttggaggtgccatagaaaatggatctgaagataaataaatgaaagagctatgagaaaaacttatagcatctgttcaaacgcattacgagtacaaagatgaatcaccatgtttattttagataagctttctcactctagaacaatcaacaaataataaattttattgatcaagtcccttttctccacaacttacaggtgcatcatcttataacgcagacccggaaattttaatcctcttcaacc

SEQ ID NO: 68165 - DNA, 424 bp, Oryza sativa
actaagctgagaagatccttgatgtgagcgtgtgcataaagaacactgatgcttttcttcttgacatacgaagatgactgttgaacttagtgttacagcttgttgtaatgcttcactttgaggaaaggagatgttgctgtccaactcgtctaaaccgagctgattggttgataacttccaactcccgaacatgtagattaaatcttgaacttgatacttgagaattgtggagtacattatggcagcgctgagaagccaaaattgtccgtgaaataattgaagttgctgaagtaaaacatctgctccgaagcaaagatgaagacaatgactcctggataaattgattgcttcagctttgtcaattttgagagtcttgtatttgtgtagctcccgactcttctgttaattgggaaacaactgaaca

SEQ ID NO: 68166 - DNA, 403 bp, Oryza sativa
tgcaagctttaaattgctcaccaaccttcagaccagcgccatatatttgtttacatctcactggctactccactccaatgcaataacctcctcatcttcaagctctcatcagctagcaatccatattctcagcagagaaaaagatctgcattttcactgtgctttgcagagaaaaaggatggaggagacgtacaccgtgaaggtgggtgaagcaactccggccgccggcggcaagccgtcggccgggccagtctaccggagcatctactccaaggatggcctcatgaagctccctgaagatatcctgtccccttgggacttcttcaagttggtttcttggcatggtgccggtcaatttgacaatgcattattcaatttgctttcatccagattgtgctaattt

SEQ ID NO: 68167 - DNA, 360 bp, Oryza sativa
cattgtgcctattaaaggcacagctatcctccgctatgacggttggcttcaagagagatggaggggagcacatgatgcgtatacggtctcaccggcgctgctactggccacgtccatggatgactacagaggcagccaggcgggcagcatcgacatataatcatccgactttcgccgagagcatcgagactcatccaccccgagccgtacgcgtcatccacattcttcaacatccatctcatagggactcatctatttctctacaatcacttaacccccgtcatgcaagaaacgacatcatagaagatctaggctgcaagttgacaccggtcgaccgacacctgtgacatctacatcaac

SEQ ID NO: 68168 - DNA, 357 bp, Oryza sativa
  unsure (1)..(357): unsure at all n locations
agcttaggaatattccctctgnnnntaattatgtccattgatnccaagatatgctggatcatttgatttgttatatttatttattttattgtgacttgatttatcatcaaatgtttttttaagcatgacttctaattttatctatttgcacaaatattttaaataagactaatggtcaaacgtttgtcaaaaaaatcaacagcatcatgtattttaaaaaaagggtaaagtacgccagagactaagagaaggaaatatttatttccggacgctggatatggcagaacctatcgctgccaccgaaagggctgtatcaccaaaagaaaacagcgggcgaatatatatatatatatatat

SEQ ID NO: 68169 - DNA, 437 bp, Oryza sativa
acatagaaactaagcttcgacatctaccttgctcgacgtacttgcatcagctgtttattgcggcatacgtcccgatgtgtacgtgtcaccttattttaggaaggaagcaatctttcatacttggagtgaggagatatatgggttcgggatctcaggatcttacacaactcagaggtcccaagtttttttcattcccggtccatcgaagttaagggtgaaaaaggggcggcgttagactagacgcatcagaaatgacatggacgagtcggaagctggtgggaggactctatgctgcagcaagtgtgaccagcacggccatacttacaagaaatgcccaaagactgcacagggtccaagcgtccaggatgttggtccatctggagaggcaagtgatggaagaagaccagcttgggaatgaacaacaaccaagcgagcac

SEQ ID NO: 68170 - DNA, 391 bp, Oryza sativa
  unsure (1)..(391): unsure at all n locations
agcttcatttcctcaagatccaatatgatattttctcctttttgcctcatgagagtgngaatgacatgtatgggaggctcaatgtcattgtgaatgatctcaaggggcttggggcaaactacaccgatcttgagattgcccaaaagatgcttatggctctaccggagaagtatgagacccttgtcaccatgctcatcaactccgacatgtcaaggatgacacccgcaagcctcttggggaagatcaacaccaatgacatgtacaagttgaagaagaatgagatggaggaagcctcaccttccaagaagtgcattgctctccaaaccgaagttgaagacaatggtaagggcaatgtgaatgataccaatgaggacttggaggaagagattgc

SEQ ID NO: 68171 - DNA, 423 bp, Oryza sativa
tccatcaataaaataataatacaaataattcactataattgtttgattgatcctaaatccatctaacaacagaacctctagtatataaccgtcctatttagatagatgcatacatagccataatccttccatagccatttgatagactaaaccaccgattagccaaatatatatgtatcccataaatgctatgttggttaactcctaaataggccacgatgacaatagaaaaattaagaaactttagccttagcatgattgggatccattagcaaacacgaatagtacattttgttgcgcatatttgattgttgtttgaatattggtttttctcgcgtattatagaccttgtgtatcgcttagtcgtgaggcaacgtctgcaacttccaggaggtgaaggttgatcaagattatatcaataat

SEQ ID NO: 68172 - DNA, 391 bp, Oryza sativa
agcttaatatcccgcggaaaaatttcgatgtctgaagagcgaagccgccatagaagaaatgggaaaaaacaacaacctcgtgtgtatcgggggatggaaaagcctcaccgcacgctggacgccacccgatgatctccttggcagggagaacgccgtgcgccaccatctccttcaagttctcctccgtcacgtcggacggcgcccattggccttcaaagctttctttctcttccgccattgattttacccgaatgcgttgatttgattcgagggatggctagggagaggtgagggattgaggcggtggattacgggaaggattttgatgaacttttcgaaggtggattcgagtggaatggtgaaccctagtttgccggcgcagctttgtact

SEQ ID NO: 68173 - DNA, 363 bp, Oryza sativa
  unsure (1)..(363): unsure at all n locations
tccacccataaaattntttgcaaacgggtataagagggtatttttgtccacaagggtaaaaattatttttcgtgtagtgccctcaaataaatatacactactacgaaaaccatttttcgtggcggctattttgggttttcgctagtggaatttagagcagccacaaagtaaaggccagtgaagatcaagatcttcgctagcggttatcaaccgccagcgataattcatcttcgctggctgtcgtcttaagctagctgccagcaaagatccattttcgctggtggttggcttaagacggctgccagcgaattttttttttcgctggtggcccgtgcctgacaggtccgacacgtcgtcgtcagc

SEQ ID NO: 68174 - DNA, 390 bp, Oryza sativa
  unsure (1)..(390): unsure at all n locations
agcttgagtgtgtgcgattattgagctgttactttctattannnnaaaggaacgcgcatatttttgtgtatgtttcttgttttctactaacaatggcagggatatgcaagataattggggatagctgtgctcaacatcgacatcttcgtcgagacatgaggagggatcaacatgaccattatgaaataagtgatgatgttctatgtaagatcaaatctgcactgccttatttctagggaaactatgatcctcgtgcttacattaattgggagctagcggttgatagtgaatttcaaaagcatgtcttgtcggataaacaaaaagttatgtgtgcctcttatggtttaattaaacatgcttctaatgattggaaacatctttgtatgcata

SEQ ID NO: 68175 - DNA, 422 bp, Oryza sativa
tcatgttccgctttacatttaagctgagaaaaagttctatccaattaagcttgtaaatatcggctgtgagagtttgactacaacaagaaagtattattggtctcccagagcaagttaacatcgtagccactccaaatcacggaattactaaactgtgggagtttttgttcaagcatctaagaaagttcacgatttccaaaaagaatataatttagttctgaacaaactggttcctgctcctgcatacagtttaagcatgccattgggagacttctacatgattctgattgaatagttactaattgcatggtcaaactttaccttgaacatgttcaaagtgctccatgacattagcttctaattatactggtcgaatctctattgaacaaagcttatgaccttaatgataattctcaagtaca

SEQ ID NO: 68176 - DNA, 390 bp, Oryza sativa
  unsure (1)..(390): unsure at all n locations
agcttgatgaagnngcctatttttaactgtgtatttcacattatngaatttattccaggagagcggaagtgggaggttgatgaaccattaatccgaagtagactttcggaattaaagaaccctaaggatcccctttggttggcagttttccctgaaggcacggattacacgtaaggtgtctttccattcattcaggatattattacatgtttgtataacccaccctgtgatatgggcactcattctagagttttctaatcaattgttgaaatattatagattagaacttttgggtaacacaaatagtccagagttctttgtacttttcgaaaaacaactgttgactttttgactatggtgcataaatgctgattgttcaaattgaataat

SEQ ID NO: 68177 - DNA, 435 bp, Oryza sativa
  unsure (1)..(435): unsure at all n locations
ttagaaactaagctttataagacccacgagcatcaggaacatatcacatttatttcaacttatactcacaggtaaaattagcgcacgatttgcacgggacaaccgggcaagccaaataaatcatgatttaacaaacagatctacacaaaaattaccacggaactatccgatcgagcatccaggaccaaaacaaacgatccgatcaaccatccagctacacaatcgatcagatctagcccgagatcgatttcaccttcccaaccaccaaaccaatcaatcgcctatatacagatcaaaaccagaacaggaggaggcggcggcaccgtatatacataccttgaatagagatcaaagtcgtcgccgccgacttgacgagacctacgagtcgcaggagcggctgcggngatcngggaattggggatcgatntgatcgga

SEQ ID NO: 68178 - DNA, 407 bp, Oryza sativa
tctagtttataataagatcaatgttttagtcaaacaattttccccatctctttaaaaagcatagcatggctttttctcccagttgtatgtggattcctctattgttttgcacattcagagtttttttcacataatttctataaacagaaaccagaaaatataaatgattagccaactaacttgggctacaattttaaaatgaaaatagagacatcaccttatgtttatcttgaccccaaatttcaagaagaccaacccattgaattgcattaacaccttttgggacatcttctgatatttcattcagagttctcacatcaagattatagtatctatccctcaaacgatgtttgtaagacctccaacctttgctaactttcattatgacccaatctcttgtagtagct

SEQ ID NO: 68179 - DNA, 380 bp, Oryza sativa
  unsure (1)..(380): unsure at all n locations
agcnngcaagggcaaaagttctaagnacttttaactntcctttagntgatggttctatgattgtccatcctaccgagtatgatcatgatcacgctaaattttttattgctcatattataactcaacatgattacttgtttataggatggttgagcataaagggtttagtgctttgatgaaatggatgaacaataactatgaattcattggcaagaagtccataaataatgaaagaatgaaattttatggatctgaaaaggaccaactcataaaacgtcttatggaggctgagtccataaggttaactatagatatgtggacatccaatcaaaaccgtcagcatatgtttttggtggctcattacataaatgctgtttggg

SEQ ID NO: 68180 - DNA, 416 bp, Oryza sativa
  unsure (1)..(416): unsure at all n locations
tgaaccgggtgatttagnttggttgcacttgcaaaatgtttgatttccggaattgagaaagtctaagttgatgcctcgtgctgatggtccttttaaaattattgagaagattaatgataatgtatataaacttgagttgcctcccgagtttggggttagtaccacatttaacatttcagatttgaagccatacttgggagaagaggatgagcttgagtcgaggacaacttcaattcaagagggggaggataatgcggacatcactacctcggatatacacaacaatcctccaacgatcattcaaggaccgataacaagagctcgtgcacgacaattaaatttagaggtgagctcgttcctatgttcttctttgtatgaattcgagaatagattgctacctaatgattatattatga

SEQ ID NO: 68181 - DNA, 397 bp, Oryza sativa
caagctagcagagcttatatcaaaatcaaactcaaactcaaaggatgattttattcattcactggatctggaggtaggaatgcaagtgggtagtcccgctacccgaataaaaatcgcttactagttcatgtcctatatggtagtacaaaatatggaagaaaaattaaactataactgagataagcgggctaaaaaaactcgctttcctgccccgcttacatcgctatctggaggttggcagcgatgaagtcgaccgtgaaggtggagttggcgtggatgccgccgaccttggcggtggtgaggacgacgtatcatgggagctctacggggaagaaggacttgacgtctgcctgctgagagaggtcgagctcggtgtgagtgaggatgaccacgttga

SEQ ID NO: 68182 - DNA, 433 bp, Oryza sativa
ctcttactgaagacgggaaggatcgagcaagaatgagttcaaccactttactttataagccacaccggcagatgcatgattaatgcaaaggggtcaaggggtaataatatatgggttaagttttgcacaaaagcatcatttaaaagtcacttagatgcccaaagccattttataaagacgatcctagagctacacagtattattaaacaatgccgtgaacccacacgaaccttccttaacccaaagcctacgatgatttataccgaactggcaacccgaccctgggtcccagctcgtcccaagccaacccatgccaaccattccacattttatttgttgagcaaattttaagaaataaaacacttacttgggtacattgctcggcttgcccataaccgaaggcgcggctattcaaatatgatatactctgatc

SEQ ID NO: 68183 - DNA, 401 bp, Oryza sativa
gcatgaagcttagccactgcacatctataaaaatgttgggtttagtatttcattttggcaattgataatggagaagcacaactaaagaaaatggaaacaatgcttgcgtatcatatttgttttttaatatgtgtttggctaaagagatgtgatggatcacgataaaatgaaccaattttcaagggtttgagggatggaatggtgtaatctccgaagaagaatactcccttaacatcccgatgaactctctaccttaaaaatccgtaaaatctaaatcgagagcgctctcgatttagtcataatgagcgaccttatcatccaatcaaccgttgtccaaatatgtcttgaagaatcatactttactataagtataattgatcaagcaaatagaacacatattt

SEQ ID NO: 68184 - DNA, 301 bp, Oryza sativa
gatgtgccaaaaccaaaatcatttattcatttacatgggcccacttatcttatattacaacccagaaggaataagaaggatgtgtgggacagagaaacccagattagtatttttatggaaaatgctacacacacgaaccacacattcgactctgtcagacgaatactacgtcgatgtacgcgcccgcagcagcatgcagcacgaattctcacaccggctcgccatgggttgctacacccgtttggtcgtaagctggttggatggatgggtcggacctatagcatgaatctatttttattac

SEQ ID NO: 68185 - DNA, 378 bp, Oryza sativa
gggatattccgaattactaaggctatgttatttttgaactcattaaaatttcacgatggacaaatagcttcaagtgagaaaaatgaaaaaaagagagaaacttttgaatttacattgattatatatgaacgggtattccatatctataatattaccttagaaatagcaattgtatatactaccattgctctgtaatattgttggcttaattagatacttaaatttacagaaagtgcaaccggagcaatcaacaaaccgaccaacacgtgtttccaatgccaaaaagtaccgagggttcatttcatatgagcgagagagtatttcttaccgggatccaaatgagcgtgtataagattggaaggaagttgcaattgaatc

SEQ ID NO: 68186 - DNA, 385 bp, Oryza sativa
  unsure (1)..(385): unsure at all n locations
agcttacaggtaggagtaattcaggggaatttaccatgttcatgtcgncgtacaagtcatgaactgacagtcttcagttgcacgcgttaccttttttttttccttctcttttttactttttccgatggcttataaattcgatagatccagtgatctcttttcagttttcaccatgcgaccaggtacaacttgtgagttgcaaatgattggccctgcaagttgcatggggcagtcaacctgttgcactttaggcagcttgtagtacttgtggttaattaagatcttcaagtggcaactttgcatgcatgtcaactgaaccgcatgactggatcatgtacaaaacatgttatccagtaaattctgacgtgttagctagctggatcta

SEQ ID NO: 68187 - DNA, 426 bp, Oryza sativa
  unsure (1)..(426): unsure at all n locations
tatcctaaactactagaattgattgaaatgatctatactttatactacgtgacgcgcgttntttttcttcttaaaattaaagcactttcggtaaacgcggcggtgctcaatggctttgctcatcttgggcaggttacaacacgggaactcttctccggccccagttgctctcgtgacgagtgaaaaatcagtgaattaggcaatgcccaatggcctcattttctgttgtcttatcggttttataacagaacaaacacttaatggtgggactaaatgaaaattgttaggacaggaaaaaacaaaatttcatcttaaaatagaacatatgtatatgtaaagaaatattattaggaagtaaaatgagtcatttctaataagtttccccgcgttgttggtttcagggcctggttatttcgcgaaaagaaa

SEQ ID NO: 68188 - DNA, 374 bp, Oryza sativa
agcttgctgttgcttattgaattttaaatattcctcctgcgaggcctatccgagttataaaaaacctcaaggtatgtggagactgtcacaatgcgttcaagcatatctccgcaattgagggcaggctgatcctattgcgtgattctaaccgatttcaccactttaaaggagggtcttgctcctgtggggattactggtgatggctaattagatttcttgtgcaatgaatccctgaagaatctgtagttgacaacgcaacaaagaaggtgcaatgcatgctacaaacaaaatattataggcatcttgatgactcactcggtccacaggccttctactatgccaccatttcaaaaagattacatgagttggtgaat

SEQ ID NO: 68189 - DNA, 421 bp, Oryza sativa
tcgaacgccatcacatgtcggggtctggatgtgccgtttattcggcggggagggctgcaacgttctggacgtgttggcgcagacggagcagtctcgcctccacccactccgcggtgcgcgcctcgctcctgagctgggtggtgaagttgcgcaggaggatgccgagcgtgatcgccggggcacggagggagccgcccgccttgacggacatcttgccgatgcggatggcgcgggaacggaggttggagatgccgcgggcgttcgtcggctcgaggcggagtcgcgggaagacgaatatgtcgagcgcctccagcacccggcaaagcgtcgcaacagcgcgcaagcggaggatgttgttctcgtaaactacccactcgtaggacacctccagagccatgagtaccgagagcatactgcgcgc

SEQ ID NO: 68190 - DNA, 398 bp, Oryza sativa
catgcaagctgtatggataaatcaattaaaaaggttctcaatatttacttctcccctagttatacaataagctgcatgtacatgacagaatctgcagctagaaatcaagagaaataggcttgcaaaaaacaaggtgaacctaaagaaatttgtattcatgagtggcaatggcctgaccgtggagatctgaaccaccctaattgctgcggcgtatgccttctcctctccctattcctataccagctattgttaataaatctgctgttctcttccaatttacaaagattccttgtacagaatatcttctatatattcactattatggaggaatttttttagtgttgggtacccattccactctgtagaactcaaaaacgggtgtaatttgagaatgagtt

SEQ ID NO: 68191 - DNA, 315 bp, Oryza sativa
gctggactaatggcggcttgtacgcagagatatttggggtttctttttatccctctatgcgcgacgatagatccgcccttggggagtacggaatggaggcgacgtgacgcgatgacatacgacgagttgagaaggcgctcatcgttgcgaggatgatgacgacgatgatggtgaaaagcccccactctgactcactgacagtctgcatcctggcgtcaccggcaggcatgactacaacggtgggaatttctgtggcatggcgtacataccggacgctcggtgagagcttccacaatgcgaatactagtctcagta

SEQ ID NO: 68192 - DNA, 393 bp, Oryza sativa
  unsure (1)..(393): unsure at all n locations
agcttgaaacgatgggtatttaaccntnggttttttatatatggagatgcacaaatagtgcctctgtctgaaaaagagacaactcctatccttccaacgcatgattaaagaagaggataaaggaccaaaatacccatcattaataacaaattagtattggtagataggtatataatgggtattgaaggaatacaatttttcgatttacgaaccgataatggatgagaaagtagaaattaatttattttgggacaaagtttgaattccacataatgatgtattttgggacagagggagtatactccaataaaagtgtactccgaatcttcgggtgggtatttcttttggttccgtgggtctttcaatggttcattaaactacactcttttttta

SEQ ID NO: 68193 - DNA, 423 bp, Oryza sativa
  unsure (1)..(423): unsure at all n locations
tgtcncagtactcgtccacaagctctcacttcgtttattatctgtcatgagncgcncattttagaagaggatgagaaggataaaaaagaggacgcgaaaagtccaaataccccccccctcccctgccccgaactttgaaaccggatattctaccttccctaaactttacagtaccatctatataacccctaaggtgggtagcataggcgcttctatctaatacatatatatattggatgcgtttgatcacgtgacatacacattggacatatatattaaaatcttcacctgaatctttcttttcaccccttggtagctctcacttactaacaactaccaatatattaatagtatgagatcaatgtataaagtataattgatgacttacaaccgacgatatgcacatatgtcatattacgtatt

SEQ ID NO: 68194 - DNA, 421 bp, Oryza sativa
  unsure (1)..(421): unsure at all n locations
ttaaaatagagctagctactatgtaccaacatttattttatatgattnttacaatacatgctaatgtcattggtgatggttaatggctaaggcacaaatccaacagtgaatcacgatgctgagattcaatgtgaaagcgcaactgtccttgtcgagggacgatggaatcacgttggaaagccctgatgttttgttgtgcacccgccgccacactcaaggccgagccgacgacaattgaaaccgctcgataatgagggagctcttcgatgagaccttgctgcacaccgtgcacccctttccttttttccttccatgttgaccgcagacgcaggccaacaatctcctagtgcctcccatgcatgcttagcaatatgtttgcttgcctgcaggagatgcatgctcctatcctagctagcgtgct

SEQ ID NO: 68195 - DNA, 412 bp, Oryza sativa
  unsure (1)..(412): unsure at all n locations
tatctaagtgtaactggagtagtgtctaatgtaactatttatacgtgtagnctaacttgatagaataggagtatgcagtcacttagttgagagggccaatcggtttatataaattcattaaccattcaaaaaatagtttgggattttactgttagcaaataaagccatgctttgcttttgtctctgaagctaattntgaattcttttatatatggntcaattttaattaaaactttatgggggcatgttatctttttacacaactctcattctatgatagttgagaaaataaacaaaaatgtgttgaaaattattcttaaaaatcaaaaatcaaattcaaaattaaattagtcaatcttcaacggttgatgagaaagagcatcacaacctatgagaatggagaggagaaaag

SEQ ID NO: 68196 - DNA, 384 bp, Oryza sativa
  unsure (1)..(384): unsure at all n locations
caagcttancctgcgagaggaggacatcaccgatgaagatcttcaccaatttttgtctgaatgcaatcatctgcgggaggtggatattactgactgtaggatgcttactaatctaagggttcctggtcatctcaatcagcttaagagtctgctcgttgcgatctgccccttactacgagagatcaaattgagctgcggcttgacagccctggattatcgaggcccattcataccattgcaacttgctataccgtcgcaaacaacaaatgtttccatcagtttattaactttccattctgctcttggatacatcttcagtgacttacccagtactctgactaatcttgagacgctaactttaaaagcaaacaagttgagggttgc

SEQ ID NO: 68197 - DNA, 420 bp, Oryza sativa
aaatccaaagtcatggaggagctagctatgagccgcagctgacaaatgcagcaagaacagaacagaaggatttcttatgtgcaagatcaaaataaagaaagcagcaaagctaacctatctatgatgaacacttccccactgacaaagtgacaatagtgattccgagaaaccaatcggagaggacgcattcgatcacccgacaatgccgagagcgccatgatcagtaggagatcccgacgagggcaaccatggtgtaggcgacgagctcctcccgcgacctccgctcgcctggcgacaacgacgacgagcgcccgtagccagacagctgcggcagctgcaccctgcgccgcccgctcaggaacatccgcatctcgccggcgaggaactccgccgcgccgcggagcgcgacgcagacgcgcg

SEQ ID NO: 68198 - DNA, 327 bp, Oryza sativa
  unsure (1)..(327): unsure at all n locations
ttcacttagacgacagtgccgatgggtgaggtcatgaacagcctgtgcggcgtttggaggttgagctcactatcgatgcaagcgatgattaaactctggtatgatcactcttatctcaatgccgaaagggcacagtacttgtattccgtcgcaactttcctggcaaccaggcatggctattaggggcggggctgctgcttataatgtcatcgtcctcaccagaagctgaanctctactgctccaatcgtagctaaagacggcgtgcgatttatctttattacacattgctactatcaggttattctaacagacactactttttagtc

SEQ ID NO: 68199 - DNA, 430 bp, Oryza sativa
  unsure (1)..(430): unsure at all n locations
aactcaagcnaatcgagtgtcaggagacaatcccaaacctgggaaagcatctgaaagctcttgcatctncaaaggatgcgatccttgtcgaccaagtggttcatacaaaaattcaatctgagcgaaaaccccggtctcagtcgctaaacgagatgctagccatggatgatggaagattcgattacctcagctcccccaaaaccaaggagatcatatgcgcggaactaaaatcgcggcatgaaagaagttgctctgtcgacaacggaggcgatgattcagtaacatgcagttcccacccaatgccggtggcaccaccaatgaggccctacgatgtgaatggaactcgcaaggatgaagctgctctcaaggtagtagcacttatgccgagcaagcagaatgggaacaccaacttgctgaaaaggattctggc

SEQ ID NO: 68200 - DNA, 396 bp, Oryza sativa
agcttgtcctcaccaccaccaccaatggatgccccagccatttatctccattgggtcactattttacattatagcatcaattactctggatcaacaccaccatgatctttggtaaggcaaatttccgccaatgtgtcttccattgcatcggcaagctcttgatcatgtaaacaatgttgcattcgttcatctgcttccatccagtctttaagacaaaagattgactcaactgtctcggctgtcaggcatgaccttcgttcttttctccctaatgattccagtaacgctgaatgcttgctcggaagaaacaaaggaggccggaaccagaataatatcttgagcaaagtgagctaacacaagaagagttcgctctttctctttccaccacccaaagag

SEQ ID NO: 68201 - DNA, 421 bp, Oryza sativa
tcttgcaatctttcaagccaacacagatgtatgttctggtgttctttattgctggccgaaatcacctggtgcagctatgggatcattatggataaagatctaattctcatatatttttaggtataaataaatagaaaagttcatcctattttaaacccaatttgaaaataaacagagaatttgttcatcctattttaaaaccagcctttaaaatttggaggctaaaagcctaaaatgttagatcgtttaccaccccctaattgcagcttttgttctcctgctgattcctaattttttacttcctgtcactgttgttaatttggactacccggcaacatgaacggcgcacatttggataactcaaatctagaatcaaatcattttctagtttcatgacccctttgtgatgggtcttatccta

SEQ ID NO: 68202 - DNA, 171 bp, Oryza sativa
tttttaacacgggggggggtacaactgaaccccccgcaacgaagagaaggaagaagggacgggcgaacctacgacgaacgggcacgagccagcacgcgggcgaggagcgggagagagggggcaagaacggcagaggttagaggaagcccccaggagaaggctgagggagaa

SEQ ID NO: 68203 - DNA, 390 bp, Oryza sativa
agctttagctactggtatcttatttgtggttgtgagtcctgcactggatcatgttgaaagaaggcatcacaagtgtccttctttctcttgcggccatcttaagggtgtatcggctccattccgtcgggcagctgatccacctgtgtgcggtagcaaatcttacgagctggtctgcagggataccaatgctacaattctcattgacaatgcaacataccatgtgaatgaaatcaactacgactacacacgcttttgggtcgtcgacgccaacatagccggtagcacttgccctcttccgcagtggaatcatcttcttgatcagtacaagcgcaaagtctcaagccacaggattgagatcgaattggctcctggtgcatataatcatgctta

SEQ ID NO: 68204 - DNA, 360 bp, Oryza sativa
tatcaaggcatggaggaaaggagaaggtccactttgactctctttagcagcccgaatctaattcgtacctgttaacaaaaaaaaattgggtaggatgactcctgaaactattgaaactgactctatcagtggttttgaatgatggttttgctgatgtggcagtgttgatctggtcttcaacccatgtggcgttgacctgacgcttatgtgacattagaataaaaggtttacttatgagactcattctgtattcacaacaaaaatatattgtggtacccactgacgtggcgcctatgtcatgctttcttttcaaccactctttccacttcctctctctacttatttctctttctctttccc

SEQ ID NO: 68205 - DNA, 448 bp, Oryza sativa
  unsure (1)..(448): unsure at all n locations
attacggacctataaaactcagcttgtatggcggntngcattctcgggattagtgcctacatcttcatgacaatctaatcctgttcatgtaaatcgccaagttatcatatatgctatataatctagatcaatatcgntatctgaccccattggctagtctctatcatcaaagacagccgatagggttagataccaacattgaattagattatatagcatatctaccatctaaaaaaggcttttataagcttgtttagatcttgtgtttttcttcgtgcttaatgttgcatcagttaagtttgatctattaagtaacgtgtagaaccataatatctaacttgttttataattgctagtagagatagcatcagagattcagccgatcttacctggtttagtcatcttgtttccttggatacttacttgatatgctaaacctgccctttat

SEQ ID NO: 68206 - DNA, 334 bp, Oryza sativa
gggtactggaggttgccgcgtggaggaataggtgcatagatttgttgattaggtgatgcctcttccaactatgacgtgatctctatggagacaaacctgttgcgttactatgcagctagttcatgccttgtctacattgacacttgctttgctaagtttaagctgtttgtcgttctttatctagcttgtaatatatgtcctccgttggctttcatcggagtttactttgtaattggttatagttgtgtggtataccatgtgttgggttattctactatctgcaaatgatgtgctattggctagactctttttttagagaaaaatgtattttttt

SEQ ID NO: 68207 - DNA, 378 bp, Oryza sativa
  unsure (1)..(378): unsure at all n locations
tgatggcngccggccgtggacggcggcaacatgggaatttgattcagaggccacccgtgggtgaacgggaagcggtgagcacggagcagtgttcttggccagcatggagcagtgggtcggtgagcccgggcccaccagtgaggcgacacaggagacaggccggtgaggtcgacggatgcagaggggtcaccaggtagtggggttcatggggaatagccggctggcggcgcattcgcaggaaaagccaccggtagcgaagccggtgtcaacgatgtccgcggggaaggcggtggatccaagaggagaaggtgggggaagatgtgagcgatgccacactgaggtggtggccgccgctgatgcagctagcggagattggac

SEQ ID NO: 68208 - DNA, 417 bp, Oryza sativa
cctgtctccacaagatccttgcgaagaaataatgtgcagttttttgttatgattcttccaaacttgtgtggatgtatatgtgatattcactaatattattccactctaaccattcgtgggtgtattattaattagtgcaggacttattaagtctgtgcctccccaaggtggctctggagcatccaaatggcacgcggacattcatcatgaagtgacaaaccttccaggtataaaagagaaaaataccctacaaataaaacataattaatctactatatgattattttttaattctacctttgaacgtaaataatttttgttgttggttcgccagatgaattccttttcccgtgctacttaatttgttccaaatttgctgtgtctttctccgagttaattaataatataacgaacaca

SEQ ID NO: 68209 - DNA, 418 bp, Oryza sativa
  unsure (1)..(418): unsure at all n locations
tcgaccaggcctccagatgcagtctatttggttattattattacgacgaacgctgggtntggggcgtttgtgatttgtgaaggttgaaatggaagtgcaaaggtttcagctaaagccatactgagtgcttgtgtatagaggactcagttgcatacttgcatgggaaactgaaaagctcatttcttagctcttccaaattttttcttcaaacttttaacttttccatcacatcgaaactttcctacacacacaaacttctaacttttccatcacatcgttccaatttcaactaaaagtttaattttgacgtgaactaaacacgcccttattcagtattaattcagtattaatatattggaatgttccccttcccaagggctccacaaatttctggattatttcattgtttatttaactt

SEQ ID NO: 68210 - DNA, 380 bp, Oryza sativa
  unsure (1)..(380): unsure at all n locations
agcttcaacgctctaggagctctcgtgctgttggcgacaatatantcactggctcaccctctctcttccagcctggctctttatggcccatttgaatagcatgaatggaaaaacgaaggaatatgaccctctctcttctagtctggctttttagggcccatttgaatagcacgaatggaaaaacggaggaataggaaaaacgtacgattctgacatgaatgcaggggtaaaacataggattggaaaatacagtaaaaaacaggaatgaccgtttgattggaccacagaaaaaacgtacgaatcggatgagatatgatagactcaaaggaattttttcaagagggtatacctcttgctaactttcctctaaaatcactata

SEQ ID NO: 68211 - DNA, 418 bp, Oryza sativa
  unsure (1)..(418): unsure at all n locations
taatgttttcacttaattactctttcagtatacaaacttattgttgnactgggtcattctaggtatcgattcataattcattttttgtatggcagactgggagacatctattctcgatcaattattaagattcaacagacaaagcaagcaaattcaactggtcttttagtgttggaaaatttgactccttggttcatgaaaatgctcaatatttgtgcttttgcatgctcaatctgggttgatgcgttgtatgaaggggagctatggtaaattgtctaattttgaagtcactcaattatatgtttcctttntgtgtgaatcatacaccaatctcattatatgtttaattggacatatatcgngttttaactgttttatttgcattaccaaatattgctgtagcgttagcacatgcatg

SEQ ID NO: 68212 - DNA, 345 bp, Oryza sativa
  unsure (1)..(345): unsure at all n locations
agntttgttgagacctaaattatagatgttattaaaaaatttnagtgcttgnaaactaagtagaataatggaacaaggcaatgataaatcaagtaagcaaattgaattgataaaaaatcacactacgttattatgatgatagcccccgactgacaacttgaaggagaaaacttgatgttgacagtcaagatagggaagtacaatgataagcctaagcgtagaaacgacgaagatgttctatgtttcaagagttgtcgacgaaagtaccgttttctggcttgagttgataggaacctggccgggtgacttcagagatgataaatgggcccttccatagaagagata

SEQ ID NO: 68213 - DNA, 415 bp, Oryza sativa
  unsure (1)..(415): unsure at all n locations
ggaactataaaactcagcttcaattatttggtctgttttttttgttttgtttgtttttngnncgtgnttttcccgaacgcgaactgatctattgcaccgtgcgcctcctgcagccgcccaggccgaatctgaccgattggtgatctttatggtcttttttatcccgaattttacgcttaatatggggaaaacagaaagggcatactagcctatggctaaataagaaggaagaaatgggctttcggtgcaaaatcaagaaaaaaatttcatcaacttttaaattatagtgtatagcaatctcaatattaaaattctcattaaccattttaatcgacaatcgtaatgtgtagcgagagataagcctatcttaccaggcaactgatatttttnttaaaaaactacaattatagtagac

SEQ ID NO: 68214 - DNA, 404 bp, Oryza sativa
tgcaagcttgagctgaattataagaggctctattgtactatattgtatactacaataggacgagagtagagtagaaggagtcggaagaattccggagttgtcggtaatcttctcctatttcttttattctgtttattactctgaatttaatataatattcttcttgagtaatttagatttatcttgtgggaattatctcttgggtagttcctaaatagcatacgggattattgttcactataatcaactaaaatatagtgattactttggtgagttataaacactaaagtagatagtaattgcttagacgtggtggttaggtaattgttatctagtaattgctgcgtatcccatagtacgtttgaggtgggtgtagaggtagtgacagccctcgagattacttt

SEQ ID NO: 68215 - DNA, 414 bp, Oryza sativa
tcatggacttgtggataggacaccagtgctttgttaccttggaaagttgccttgtcggctcgtggttcttgtcggaaggacaaggtttggccgcactaagaaccttctcgggctcgtatgacgtcgacgttccgttctccgctacggcgggaggatccttcgacatggaatcccccggggttatagccacggcgttctcgtttccggtcattgatggaccacccgagattagtaccgtggtgtaaaccgagaagacgatttcgccgacttgagtccacaccagcattgttgaagtagagactccttggatggggccggtgttgacgctgttgtcgacgaagcttgatgtcatatcagtaaaaccttgagcaccaaggccctctacctggcgcgccactgtcgacagtgggtacc

SEQ ID NO: 68216 - DNA, 404 bp, Oryza sativa
  unsure (1)..(404): unsure at all n locations
atgcaagcttgcattaaacacctaagttcccgtgtcttgctgatttcnttagtactcaccctggctctataaatatatatatagttactccgccctgaagagaagataaagtgaagtgaagattatggtttcgttctggttcccagccgtcgcctgtggtgttgggtgttagtccgttggttccgctgctgctgctgttgttggtgtttcctctattgtgtcgtcaggtgtattctcgggctgtttgatctgcaacctatagtaaggtaaattattcctctatttatattaaggagtggtatgattcatatttgtcaccgtgggtaccatcactatgtcctgggactggtaccgatatcgcggcttcttaggaagctgttctcgccagttatactactacacgc

SEQ ID NO: 68217 - DNA, 402 bp, Oryza sativa
  unsure (1)..(402): unsure at all n locations
aattatattggatccttttctatcttttcttaagcatcttacaaactttaatttactttgtgtacaccctaattaaaagcttccatccgctttggatcttcaccatctgatcttgtgaaataagagattttgccactaaacaatgattgtaccatctcactttttctagttctggataaaccaataattcagagtttccgataattttgttcatctcaactcacaatatataatcaactaagacaacatgcaatgcacaatcacacgaaagtgcattatatattcatctcggtcaatttgttcacaggaatccacattggttcttctatgccctagctacctatattaagcgcttcagtcctaaggacttncttgtttggtggcatatgtaccaatggtata

SEQ ID NO: 68218 - DNA, 204 bp, Oryza sativa
gctttcgccgccgactacttaatgttgtcggcggaggaggaggcgagggctgcggcgctggccagcccgctcggcgagctccttccgccggtggacttctgctgcgcgtacggatccacgctcctccacgcccgccccgacgcgtcctccatggtcgactacattctcgtgcgtcccgacccgctccagtggcactccgaggta

SEQ ID NO: 68219 - DNA, 434 bp, Oryza sativa
  unsure (1)..(434): unsure at all n locations
tacggaactataaaactcaagctcattctgcttgctncctgaataataataattataattataataaaacacatattatctatgcatttcgagattgcacatttgaaaacatttcacaagatttcaggtgaaatagaaggtcatgaagaataaatggaagaagccaatatggatgcattcagataactcacagagagtaacagcgcagagtctgctccatggaactccttgaaggtcacataagcaacttgtgatgtctctgattcccttcaaattagtaatttgaacagaaatcaatataacattgtgattcatgaataattcggcattatggagagagcgtaccgaccttcccatttccacgtattcgacctcacccgagaaagagaagaactccttgatggtggcagcagtcgccgacatgagatgttgtg

SEQ ID NO: 68220 - DNA, 387 bp, Oryza sativa
agcttgtgcaacaaaatctgatgcaatttttacaaccgtgaacaaattatttgcacaactaaatataacacctcggcatctcatttggcaagtcaaaatttctcataattcaacacaagcattacatattttggaataattttcaactgatagcagccctcaaattaatacgtagtgcaaacttatctccctgtatttacatttgatggatctttttttctttagaaatggagaataaccttcctcctttataccttaagggacaaacatatcttctaacattcgccctatatatatatatatataaatactatatatatatatatatacatatttatattagcgggggatgtggtacacaactgtatgacccaagactcaccccat

SEQ ID NO: 68221 - DNA, 422 bp, Oryza sativa
  unsure (1)..(422): unsure at all n locations
nttcagtntcagaactgtagcaagtcatctgctgttcattgattcntangnaaataagtggacatgtaaggattgtaaatggtagtcattgacagtttctntttttctgaaaccatatggacaataaccatctgctataaatattatttcttagcttgtaaaattaaggtcaactttatttcttatcatgttccatgatatgtgtaaagagaacatgacaatgtttttctcttttctgtaagaaagacgggttataattaattatttgaagaaccttttatgtggatttttgcacaacagaactgatgaaccatttgcaaatgttgaaattcaaagttgccggctggattgagatctgatggacattttgtatactgcggttgtcaaaggcgacaactgatggattgtttggttatttgggg

SEQ ID NO: 68222 - DNA, 228 bp, Oryza sativa
agagcactgtgaaggataccattcgcatttttgacacaggcggatagtacgggacacaccatgaggtcttggcttacacaaaccagtgcctccaacggccgggaccttttaggacgtccaccacgaaaagacacgactcctgaactcaactcagaacataggaagggatccttaaatgatagaggctccctcagatgagagaaaaaaaccggaaatgcactatcggtt

SEQ ID NO: 68223 - DNA, 447 bp, Oryza sativa
ttacgcgaccttagaaactaagcttacagattagaagtatcagtgccctaagaagacatggtttgacagcgaaattcagttgacgaaaagatgttccaaatcacccattttgaattaaaagacgtcaaataacatcatgatataccatctaagaccaaagagtagtgatcaccttgcttagctataatgattttgtagataggtattaattcttgaaatcaaccatgtttcaatacactcaccggtattactaacacctgttgctgtgaggaagaatggttcagaccagaagtgtacacataggctgttttcaaagaaaatcagttgatgcagcttcaaacaaaaatgcctcctcaacaaacaatatccccactttatgctttcgccttggttcaatcacttcaatcctatcattctgaaagatgatattcaataattcaatacagg

SEQ ID NO: 68224 - DNA, 325 bp, Oryza sativa
  unsure (1)..(325): unsure at all n locations
tgcaagctagaatgtgtgttatttcatggctanaatatattaaanagcacaggctttactgcgctatagctgagttaagaccatgctgtcaaactgtggattaaatcccttcggtgttaacatctttacagggctgatgacattgatcccatggatcattttttatcgacccatagtttctgatgcttataataggatcattttatgtatttatccaccatggaccaaaagatatgaaatgttccatattatttctacagctatttaaatatacaatcatgaatattagatttgtgattttagataccttttctagttcatacaa

SEQ ID NO: 68225 - DNA, 397 bp, Oryza sativa
  unsure (1)..(397): unsure at all n locations
acacttagaaactcaagctttactgtanacngaaagcatttgcanagtttcatactttcttcatacacataaacaataataaattcgaaaggaaaatatttatgaggagagaaatttggaagagaaaaaggaggaagaaagagaaaaggagaagaaaagagagggagaggatcatgattattggaagaaaaaaaaagaagaaaaaggggaggggcgtgcacagcaccgaatggaggcgcgtaaggtggtggttgggttgggataagatatgctgttttttttacattttgagcccttataaaaaactaattttctatatgaatctttgctaatcctatttcagtaattgtagtgtgtatagatgctactttcttccacatgtgtgtacttaatcatc

SEQ ID NO: 68226 - DNA, 381 bp, Oryza sativa
  unsure (1)..(381): unsure at all n locations
tgcaagcnntatactannaattaatacnagntttttttgttcttttataaacaaaagactagctttctgttgacctgttaaaatcgacttccatagcatttcttgaacaaaggaaatatttctgttaatatgcttgtaccacaatcataacatctaattagggtttctctccctccatatatttaccacgttggctattctattttcatcatgtgatggaatgcactcctcaactactttctacattgataaagaacaatttttcttgttggtagcttgtttaacactcccaaactgcgattcacgaattgaggatcctttggccgcttgctggggtggaagacgaccttatggggtatctgcatctgcaagctgtggata

SEQ ID NO: 68227 - DNA, 400 bp, Oryza sativa
  unsure (1)..(400): unsure at all n locations
tgcaacttcatattccactgggcgtctgggtatatatgtgtgtgtgtgtgcgngcgagtgtgtatgattctaggttgctatcctctccatcaaatctgcagttccataagcatgtagaagatgagctccctgtcattctcttccctaccaatcaaccgcccaacttggcaaccatccatcctggatttcaaagcatgaagaaacttgcacggatcaaataaggcctaaaggagaaatggagaactccatcatattcataaagaaatgccacctgacactacccagcacaccaaatctttgtgtgcctctgaagagagggggtggggttcaccagctgctaccagaaatgagcagcatcttctgtagaagatttttctccaataaatggcagaaagttata

SEQ ID NO: 68228 - DNA, 387 bp, Oryza sativa
  unsure (1)..(387): unsure at all n locations
agctggataaagataattttttctgngatttacttgataaaagacaggggcacacgctggagacttctaaccaaatcttcactcatatatgcttctagaatcccttcatgaatctcatcatcttcctgtgcttctttcagatcaacctacaaaacatatataggtcaagtaaatgaaatgccaattataattttacaataggccaatctacaagaaaaaaaagcagtgttctatgctgtgaaggtattttaaaagtgacttgaagagatgcatccagtgttacctcaatattcagttgttcaatctgtggagcacaacgcactaaagaaaagattgacatgatacttgagattttgccaaaatcaacgctcaagtttgaagtcctta

SEQ ID NO: 68229 - DNA, 403 bp, Oryza sativa
tctagaagaatcctgggtggggggtgcactcttggtcttttgcctgcgctgcttttgctgtgtcagagcaagataataatagagccgacttcctactattagccaattttaaagccaacacatataatagattagttataagtttggctacaattttcttcttctctctatgtctcacttatacattaattgtatttgtctaagaggttgtgttaagctagctcttgtatgagagccaacacccttaactttttgtcacatctctcctctacataagcctataatagatttatagctcactattatacttactctcatgcgactgatgactacattcgctgcatcagtgaggaagaataatcaaacgtgaagcggatactctctacatatgattatatgatgg

SEQ ID NO: 68230 - DNA, 384 bp, Oryza sativa
agcttccaaagcatggactattctaattttttattgatcgagggtagtgatggcaccaatttggatgaatcggtcgagaatggagtatttctcgcgtcagttacagcagggagtacgtagtaacagcagctagtgctcgatcgaattcgtcgacttgtagtggagtagcagctatttcagggaaggaaacggcaaggcagctatcttcgtacgcctcgttaactgcaacccatcgattgccacatctacacctacgtatacaaatacacaaataaatactgcatacatacatgatacatacatacacggccgctgctgatagctcctactccctccagcccaaaataagtgcagccataagtttccgtgtccaactcatcttat

SEQ ID NO: 68231 - DNA, 435 bp, Oryza sativa
  unsure (1)..(435): unsure at all n locations
ggacctataaaactcagcttggattcccgtgatccgtgttacaacgtgattattttatgctttcacaagtcacagacatttgtaacgccacaattaaaaatcttacattagttcctccaaaataacaaatagtaaaagttgtcaatttggcatttgttatttagaaatatagagtagcaaattttaccaaaaaagtgcgttgggagccgtgctctctctcactttactaataaaatgataaaactttaccatgcatctaaacaccaactagcaaattttcaatgccaaaacttttgccacaacaaattgatcaaaacatgcccatactactacttgtttaaacggcttatttgcttcatgattaaaattatttttttcttaaaagaatctcttcaaccatattgcttgcacatcttanggttatttattaaaaca

SEQ ID NO: 68232 - DNA, 456 bp, Oryza sativa
  unsure (1)..(456): unsure at all n locations
agcttgtaagatggattcctcttctactctctcgtgttgcaagccatttaacctgaacgaatcgccggacacgatcttgaagttcatcanggagctgatgatgtctcatccactcctccatatctctttgccggagcctccactcttcaagccttttactgatggactgcaagtatgtctacaagatgacaaacaaaaaggaagtaagcaacatctctgaaccaacaacctcaattggttgcaaatgtggaaaatggcttatgagcaaagtgatagttttatgttcctgtcatcagaatttaaaacaatgaaaatggaaatttctgacttgaagcattcattgatcacagaaataggacatccacttatgtgcacatattatatgaacgtacaatcttgcattactacatttacagtaaactgaacagttacaagaaaatattgtccttgagcatt

SEQ ID NO: 68233 - DNA, 447 bp, Oryza sativa
ggcatgcatacagctacatcgatcataacgtactatatatctatcttgcatatcacacacaatgacacaaaatcatatgtcaaatacttggattaattacgtatagaagtcgtcgtactgtattctgtggcggcgataaaggccgtgcagtcaaacggctggaacgagacaacattcttggcgaggtcgtatagcacgagcgtgttcagcaacgcccagctacccagcaccgggacgccagtcgacgagcttggcgtcatcgtcatgcagatcaacccgaccgtcatagacttcgccaggtatcttgtcgggggcagcaacaagtcgggggcgccgccgtcgaatgcaatgtcatctgtacgttctgcagtgtctgcgtcgcgccgcccgccgcgagctttaaacatatgtcgaggccgacgcccctgatgcgttgcgatggcttct

SEQ ID NO: 68234 - DNA, 374 bp, Oryza sativa
  unsure (1)..(374): unsure at all n locations
agcttaccaacctcaaacataatatcatttatgcatactttctagcaagaacttatcacattgttcaaaaaaggaaaaggaattctatatatacaacatattacgacttaactctagggagatcaaaaattcaagaaactaaaatagatgaggccaacaccagacatcaaggatagaataagatagaaaagaaactctaaccaaactatgaactggaccacataaatacagttttgaccagggaaatattgagtttgcagatgcccacgcnccagggttccatcacaaactatctgccataatgtacaggctaatcagtattgcacacacaaaacttatgatgtgcccagtaaccacatggtatacaccaacta

SEQ ID NO: 68235 - DNA, 423 bp, Oryza sativa
  unsure (1)..(423): unsure at all n locations
gcttcnagccgccgccattattggcccgggaacgacaagatgcttagagcaagctctatatacaagggatcaaggggtggagcatctggggcctcctgcacaagaagagcagcaccaccaacagtgtgggtgccactgtcagtgcgttcgccggcgaggcacgggcggcgccaccggagctccgggcaaggggttacgacggccagatgctccggtgcaacagcagcgtcagcgcaagaagctcattcagtggaattggaagctcattcaatggcggcaggttggggatgaggagggcagatgaagttttgcttgagaggaatttcagcgccaggtactcttcgtcttcctcctgcaggtatcagtttcacaaggatgattacttcaactccattgccaacaattctggagctggagcttgaa

SEQ ID NO: 68236 - DNA, 349 bp, Oryza sativa
agcttgctgcagataactctgtgtttcttgaaattcactcaaaacattttttgatcaaggatcacgccacgaggagaacggttcttaaggggagacgccaaaaaggactctatccagttccatctgcatctcctccatcatctgcaaaagtagtttgtgctgtcacgccatcctttgagagatggcatagtcgcttgggtcattcctcagcacccattatctccagagtcattagcaagaataaattaccttgtctagatgagtccaataaagagaccggttgtgatgcatgtctaaaggccaagaaccatcagttaccttattctaaatctttgagtatatcgagtca

SEQ ID NO: 68237 - DNA, 368 bp, Oryza sativa
  unsure (1)..(368): unsure at all n locations
gatacgctgtctatggcgccgatgactccaattnttcatcggcaaggaacgatagttgattccaatgaagacgatggagatggagattatcccatgtatgagatcatgcaagaagactattctgtgtagtacatgtaggtggataggttggtgttcaaataagcctgcttcnggtccagatttgcttctttttatcacaacttgtactagtcaaatttgaccttatatgtcaatgcttgtgaagcgatatacgtcttatattaatatatatcttattaattgtcttaaaaaacttattgactatntagatggtatgcaacaaacgatgggatggcccctcaagcaaatgataagctatctcatgtaac

SEQ ID NO: 68238 - DNA, 334 bp, Oryza sativa
tgcaagcttcataaaatttcaagaaacaatcaatcttaatttttaaaattctctcccctatggggatcaaagaaagccggccggccggccggtagtggtgctctctgtcgtgtgccatcttatggtggatttgacatgtgtgcagtcgcgaaagatcgcaagagatctggtcgcctccgttcgtcgccgggagccatcgatggcacgaaaggcatcatcatggcgaggaatctctggcgagcgttagatttctgccgtctcctcctcagctgatctctggtagtgatacccgttgcctcaaataatcgatcgaatttttgagtcttacccaccc

SEQ ID NO: 68239 - DNA, 454 bp, Oryza sativa
  unsure (1)..(454): unsure at all n locations
tgcattanacacctaaattcccgtgacttgctgagtactaaagtactcacccttgctctatataaatatatatagttcctccgtcctgaagttgaagatgaagtaaagtgaagattatggtttcgtcctggttcccagccgtcgcctgtggtgttgggtattagtccgctggttccgctgctgctgctgttggtgtttcctcgtccgtatcgtcggatgtattctcgggctgtcttgagctgcaacctaagttaaggtaaataagtcctctatttattttaaggattgcaatgattcatatttgtcaccgtgggtaccaacgctatgtcctangattggtactgagatcgcggtttcgtaggaagcggttcgcgcccgtttttctactatacactcctgtcangtgctcgtgtacggtggtgccagattggggtgtgacacaatggaatgtgag

SEQ ID NO: 68240 - DNA, 378 bp, Oryza sativa
  unsure (1)..(378): unsure at all n locations
agcttntcatggaggagaatgagcgccttataagctttcttccattctggccatgagaacgcgtacatgaagcagcaacttcagaatgtatgtcttcgtgttgttgagctcacatcgtgctacgggtggaaaaggcgctgccctttctttgttttctcgcctgctcatatcatctctgatcattgtttgcagccgacattgagcaatgatacaagctgtgaatcaaatgtgaccactcctcagaaccctctgagagatgcaagtaacccgtctgggttagcgaaaattcctttgaatagtttcggtttgggcaataggaagcggctgccctctaaggaattgtttgccattttctgattaacataatatatgatattt

SEQ ID NO: 68241 - DNA, 245 bp, Oryza sativa
  unsure (1)..(245): unsure at all n locations
catgcatttcaataatccactggtcactagtttgngcacaaccagcatatgcaacaagcaattctgtatcatacttctcatcagtgacaactgcggctttaccttcctcttctttcttaccttntggtatatactttccaaatctcttgtctttgtcctgtagcttccaacactcagagatatcatgtccatctctcttgcagtatttgcatgacttatacctgcctctagactttgatctccca

SEQ ID NO: 68242 - DNA, 385 bp, Oryza sativa
  unsure (1)..(385): unsure at all n locations
agcttgctgtctactaatgtgatcatgtcttgtattttaatgatctatttgntgctcatttcaaaatattgaattgttttgtaatatcacaccatgggtacttttatgctttattactgaagcaactaagaacataaatggatgatcaggtggcatttcaatatatgtttctatgtattcatctttgtcatttgatggcttgcaaatcacttcatgtgcagaaaatgatgctaacttataggtcacacaccactacatgtgcagaaaatgatgctaacttatacgtcacaccagtttgaaggcagctatcttctttacaattgcttttagtgctattatgtttctattattagtactgttgtaacanaacaaaaatcttattatg

SEQ ID NO: 68243 - DNA, 439 bp, Oryza sativa
  unsure (1)..(439): unsure at all n locations
ntctttcaatctttacctattataaaaatacaaaatgtttntgctaaagctcggtatattgtccgaattaccacacattaccgattcccacatgcctgtatctatctcaattctcgcgtaaagcaacatgtcgtccgcgtccacacagggacgttcctgcttaatacattcaagatgctcatgacaagcggtacgtatgtgcacgccgcatctcctgtatttaatttattcggtttccttaatttctttgtccagtctggtgatctggaccttgcttgacacaaccaaatacgtacatacatttttcaatctatatcgagcatgaaacatacgcactactaagaaaatcatttttgccggtgataaatagaattttgctggtggccgacggtgccgccaacgaactanagccagtgaaaataatgtattttcagtagcg

SEQ ID NO: 68244 - DNA, 360 bp, Oryza sativa
  unsure (1)..(360): unsure at all n locations
agctnttcatgaaaccgatcttgttcctgtggaggggagtcgttctgcggaagaagtgtgaaagggtatcattaacatcaggccggatcacatccggcctggtgtgctaatgcctgcaatgaatgatagtcgcgtcttatcatgccaccattataaaattatcgctgttttgcggtacgctatcgccaggttatgccagaatcataaaaaagcaggttgggagtcgtcagggtgcagcacgagacaaaaatggaaaaccagagctggttgaaaaaactcgcacgccgcctggggcctggtcatgtncgtaatctctgctttatcgnggtattggctttttccaccttgctcacctggcgt

SEQ ID NO: 68245 - DNA, 415 bp, Oryza sativa
agcttcctcacagaaactctcaagagaggtatgctttctctcctagcatcaggccagagaccgagctcaacgacccaatcgattgatttgataaaacaagcgcgaggacaagatgcctcgctcgaactagctagcaggtggatccaaagagctcccttggcatcactagttgaacgacatggcggcatgctcccttgaaaccgacgtgcccccaaccgatgccgtgatctgcaggcaaggcaagacggcgatcgagcaattagcagtccttgttgaaaccaccggccaccaattcagtagctagcaaatagcattagcaagctgcgagatcagttgcattcaagagatctgtgcatcgagatcctactacagatggtatccgttaaagatgaagtacgtatttgtggtggtatac

SEQ ID NO: 68246 - DNA, 355 bp, Oryza sativa
ttgatactcattttggcttgcaagatcacatatttttcagcacttaacatttctcatatatttgtcttccacaagattcttgatcttccatatatatattatatgtcaatgttgtattttgagaactgtagccatacccaaaacaacatgctttggtgatctgacagagtacctattttattgtgccttattaaaaaaatccacacaatatataattcttgtgcaaatgtttacattccacttttagaaccctagcagagttattagcagtgctatacaattgttagcctagtgatcacaatgcctcactagcatttccatgttaagagttcgactacttcttgtgggatagata

SEQ ID NO: 68247 - DNA, 219 bp, Oryza sativa
tcagactaatctatgcctctaactcagtctaccgagaggatctggctccggaagaagtctacacacatttaataggtcagtaatttcttctaacctcatggcagcctacaggcgacccgtgatggacccttggcctactaacggtgccaccgacgactgctactaggggaacttatcaggatctgctcgtggctttatcgctggcatcccttcaaaacg

SEQ ID NO: 68248 - DNA, 330 bp, Oryza sativa
agaatactaagcttggcttgcgagctcaccggcgtattgtgaatccttcttgttcataacggcgttgaacaagttattgcatcagagatggaagtattgcggcggcgacgattatctgcagccatcacatgcctttgttgagctgggatgagagaaacgcaccacagctctatacatagacgtacttgcattcaggcttacacataatatcacatggctatgacttttcggctttacttggtctctgcttggtatggaaatgtccaaccacgaagactaattttcgcgtttatagcaaatatacaaagtagttgtcaggaatttatatac

SEQ ID NO: 68249 - DNA, 417 bp, Oryza sativa
  unsure (1)..(417): unsure at all n locations
agctagccgtatgctgagntcttcgacatttatctganaccaagctagnctgcagatggcaccgttagaagcactgtatggacggaggtgtcgtactccgctcttttgggatcagacaggggaacgccagttgtttggtacagaagttctaaatgaggcagaagagaaagtcagagctgttagggaaagattgagaatcgcgcagtctcggcagaaaagctatgcagacaaccgccgaagggagcttgctttcgaaacaggggattatgtgtatctccgtgtccctccgctcaagggaagacattgcttctcaaccataggaaagatggcaccacgctttggggaccatatctgattttggaccgagaggtgaagttgctaccaccttgagctctctccacatgctgggattcttat

SEQ ID NO: 68250 - DNA, 426 bp, Oryza sativa
  unsure (1)..(426): unsure at all n locations
agcttatcaaanatgaaacaatgtctgatgatcatatcttaaggggnttcatgattgtatccttgaattgcttcctgtgcccaaattcttctcttcaacctagcacgaaatatctgagtgtttttgaagatcttagttgtattgacaatttggattggagcagtcttgtctttgattggttaatgaaacatctaagcaagcttgacaagtcaaaaacttttggaggttgcttctactgtctggtggttagtattatttctctctttttttcaattgtttgttaaaactattttttctgccagttacttattcattttaatttttattgtaatacgtgaattatttgtgatttctgaatattggtatgcgattagtaccaaaagatggtccaagaataaaagtatggaaagggcaatgatccaaata

SEQ ID NO: 68251 - DNA, 412 bp, Oryza sativa
  unsure (1)..(412): unsure at all n locations
gtcttatatgtccgatgctactttttatacatcatcttagtttgtgtttcctattggttatccgtacgtatgtattttctattaagcgagtgattcatacagtaagctggaggcagcagtatttgaccgtacgcagtttgtcgtccaatcgatctgggttaaactgcgataaagaaagaactaaaaatcgtcaaatgaccatgaggcgcgccagtgggcagctcgtgccgaacgtgattgcttcatgtgacattgtgacccaatangcaacaggtctagataaagcagtagactcccttgcaatgaggatatcggatcggattcacacaggcacacggctagcatattaatcgtactgttcagcttgagttggaccggtaaactgcgagcatggcacgtagtctacacgtgt

SEQ ID NO: 68252 - DNA, 397 bp, Oryza sativa
  unsure (1)..(397): unsure at all n locations
agcttcttccanaagtgagaggggaattgtcttcccctatcagattctattntcttgggaacgccatggagactcacgatcctagcgaagtagagctcggctagtttgttccctccataggtggtcttcacaggaataaatcgagctaccttggttaatcgatccacaactacccatatagaatcatatccaccttgggtctttggaagtccggtgatgaaatccatcccaatttcatcccatttccattcaggtacttggagaggttgtagaagtccggccggtcgttggtgctctgccttgacacgctggcacacatcacanagggccacgaactctgcaattcccgcttatactaaccaccagtatttctcttcaagtctagtacatcttccta

SEQ ID NO: 68253 - DNA, 221 bp, Oryza sativa
cgagtgccttgtagagaacgttttcttttttttacccctgtattggttacgcccccaaggattaaaaacatgtggttacaaaatatacctaggacaccgtgaaaacacaaggggctggtccgatttttcaagaaatactaataataactctgctagacaatacttactttgactagcttttattctggctaagactggaaactaatactctgatcagggct

SEQ ID NO: 68254 - DNA, 325 bp, Oryza sativa
  unsure (1)..(325): unsure at all n locations
aagctngaccaaggggacagcgcccagctatattagcgcttttacttttacgagacntgcagnatttatgattaagataagcatccacaaccatccttctaaacatgtcagaaatgaggaccgagagggggttgtagtcctcgcatagggacgcgacactaatctaacaggactttggggaattcttaagcgagcatgaattcagggaattttgaaagaaaaactttcatgctcatatgtggaatgctttctctcgtacatcaaagtcgatgtcttaagcttgtgcatggtctataagttcttctctcaagaaatgcatcatgca

SEQ ID NO: 68255 - DNA, 436 bp, Oryza sativa
  unsure (1)..(436): unsure at all n locations
agctttgcacccacacgaaaagctctgacactgaccanagtttttctgacaggtttcttgatgccagacttataccaccatatgttgacttgaaattagctacattgattccaaacgaaagttgtccaagccttggcatagatccagcttcaaacatcagacccgtatgcgtagattggaaagtgaaaggctccaactgttggaatccatggatgtcgctgatggcaatagatctttcattttggtctgggtctaaacatatgtacaaatttgtcaaactgggtatacttccaaggacctgaagatcatcttgatctatgtccttaatagtaagagccaatcgccggatgctcacaatggagctctgccatatgttaaccatggaaatgctttctctctgagacaaaacntttaatgctattagaggtgtaacaat

SEQ ID NO: 68256 - DNA, 353 bp, Oryza sativa
acctgaggcatgcaagcttggatgggcttgcccaccacctctgtctctctcattaggatgccgggcgagcttgagcttggacaggctcgctggtcgccttcctcttcctcttcctgactctcccgccttcgcttcccttgcatagaggcgccgtgagctcgagcacggataggctcacccattgcctccctcaccgccacccctaaacagcttacgcggttgcagaaaaagataaaagaaagaagtgggacactgacatgtggccctatatgtttttctatttatttttgctggttaggatatcatgttagtgaaaaccagccattcgtaatgtcatgggacctatcttaaac

SEQ ID NO: 68257 - DNA, 408 bp, Oryza sativa
  unsure (1)..(408): unsure at all n locations
cacccgcaagtggattgtatcggnctctgctttctgcagcgtactcttttatcaatgggtgagaatttacaggtaaacaactaatgattttatgtaccttaccatataattttcagtgtaattacatgataatgtgctcaaggttgttagttatcctttttatgcaggttcttattgggaaagcaaaagtcgaaggggaggaagagctcangaaaattgttgtcgccctgaatggtcttgctggacttgctgtcattgaacaaaataatcaagaggccatctctctgtataaagaagcactagctttggcctgtgaaaattttgatgatattcgtgttgaccctttgttgaatcttcatatcaaccacaatcttgcggagctgctcagagctagttctgagtatttgc

SEQ ID NO: 68258 - DNA, 443 bp, Oryza sativa
  unsure (1)..(443): unsure at all n locations
agcttagctagcactactntcagcgaagctcacataaagtatctatcatatccatatcatatccctccatcgatcacaggctcacatctcgtctttaaccactctgttacttgcagcagcattgcgtgctcctgatttgacagggtaagaagcctccatcgcgatgccacacagcccattcgagtctgacgacacaccacgctgcattctgatgtaccctctctcgccccaatcctcgccccacgagttcttgacgatccagtacttggtgccgtctcgagttataccgtaaccgacagcggcaacaccatggtcgagatccgtgccgcattctccggtgaagacaccctaatttgaatattcccaagtgatatatatatgatggtattagtatctttgagtataattagacacacgcacactgaatatgtgtagatcatgtg

SEQ ID NO: 68259 - DNA, 308 bp, Oryza sativa
  unsure (1)..(308): unsure at all n locations
tacaccgttgntggcaaaatcgtcacatgaaggacctccttgtctttattngnttttgttgctccatatgttactgctgattttgttctcctgaaattaaaattcatacgcagattgtacctgaacaggttcacataactgacaaagccagttcaaacccaaattggccaagttagtttaaaaagttcaacataaattcaaaattttgagaaatcttgntcgattnttactgattttagctagctagcttgatggtaccgggttgtatacatctctagttgcagatattggatgtttttatttgctta

SEQ ID NO: 68260 - DNA, 356 bp, Oryza sativa
  unsure (1)..(356): unsure at all n locations
agcttggccacctcgttgtctgtccccactctctggcagtcggctcatgcctttggtggggatggcagcgagctcctgctgtgctgcctgcacggcgccgaccatanggcgcgggagtgtgcggcgatgactggcggcagtgtggaggaaggcgttggcattggcggcggcggagggacagggatttgaagagggcggaggagacaccgagccgtgacgtccgttttccccttatgcactttgagcgatagccgtagcctcgcgtcgcacaatgagacctgaaccgatccctcctcgtgatctcccccttccgctcactcaccaccatcgcgggagaagctacttcattacgcatg

SEQ ID NO: 68261 - DNA, 350 bp, Oryza sativa
aaaagaagctatacaggattctaactgatacaaattcaaaactaatctgaataacagattcgctacatatgctcttgtcacaataattgcgtaagagaacatgcatcacaacgtaaaacaaaatacgctccagatctattcaattgttcacaacatggctgatttgacttacataagtttttcaaaaattgaagtttgaccataagaaatatatcgcaatgctgttccacatgttgatgaccagtatatagcttataatctgagaaagtgttcaagcatgtaccgaaagcagagcataaacatccatacctctcatagttgttccggttcgcacagccaaagaagtctga

SEQ ID NO: 68262 - DNA, 330 bp, Oryza sativa
  unsure (1)..(330): unsure at all n locations
agcttgtagcctcctaatatacgagcattgccgttatctatgctttggagtttggtctcttggaagcaggccaaggtgcactttgtgtcaagcatgagctcatggactgcgttgcagcgtgcaggtgaatttatgcctctcacattccaggagatgagatctagactttgtgccatttaaaaacgaagagttctctatatctggaccggcccttagcctctnttaaaaaaggccactttggggcgcatggcccattaacgtttggcggcccaattcgcaagtcagtgttgaaaaggcagcctttgggcaggcgcggcctgatacgcacgc

SEQ ID NO: 68263 - DNA, 442 bp, Oryza sativa
  unsure (1)..(442): unsure at all n locations
tcatcgcaccccaacgacgtagcatctccgactctacctgatctagacagacgtataagctggatgccaccaatacaagaaaggagacaagaagaagaatgcctcgccaagcacataggcatctagtgcatcgagctgacacaggagtccaccaacagcaaatggtgcatgggtaaggttctccaagacgatgcccccaaggaggaaacgacttgaaataccaccaccgcccgtccggaaaccggatcacagttntcacctggagattggtagcggtggagaaaaatgccataacgacgcctccaagaaggaaacgacgccaaaggtgtcgccgtcgtcgtgccaaccaaaggctaagcaaggctttcgccaacgatatccgtctaatgccaccactgacccacacaacagccgtcgtcgaaccaccacatcatcttatcag

SEQ ID NO: 68264 - DNA, 324 bp, Oryza sativa
agcttgtcaatttcatagtaaacacacatagctaccagcgcaagcactgcaaaccatccctctgacttggccgttcttgtgctgggggctcgacatactcggtccattcccacgaggacagggcggctacaaattcctgttcgtggcgatcggcaaattcaccaaatggatcgaggcaacacccacgggagaaatcaaggccgacaatgccatcaaattcattaaagggatattttgcagatatggactgcctcaccgcatcataacggataacggctcccagttcatcagtgtcgatttccaggattactgcatcggactggg

SEQ ID NO: 68265 - DNA, 394 bp, Oryza sativa
aattgtcaaatgttaaagtggcaaatagttaaattccccattctaaagtgggtattggagactcacataggaaaaattcagtaacattaataacaaatatttaaaagaaagaagagaagaacaaatattagaatctaaagagaaaagagaagaggctgatattagtagagaaaaatgaagccctcatatatgtacccacactcgcttttataaacacacatcatctttgaatatatcttgagattaacgaagttatcacaaatgcatcacttaaaagaataattagccataaatatgagcaccgtgtcaaatctaaaatttgaataccgatagacaagtttcaactccagtagcctaatcagttaagtacgctcattcctcgataatctatttt

SEQ ID NO: 68266 - DNA, 338 bp, Oryza sativa
  unsure (1)..(338): unsure at all n locations
agcttgatgataatttagcanactactgttctttattgaaaaatgaaagaatacgaggtgcttagggtccttagacatcttagtcagttatgtgaaagcactaattcgaccaaaccaacatgggaccataaacacctcctattgtgtgatgatttgataaccaaggaacaatctacaaataacctactaagtatgtattctattaaactaactcaaataataataaaaaagacatgttacaagctgttgagcgaccctggttgtattacatgattaatccatgcactaatccaaccaaaccacccaggatcgcatagcacctcctattatatgatatt

SEQ ID NO: 68267 - DNA, 443 bp, Oryza sativa
  unsure (1)..(443): unsure at all n locations
cagctggtttaatggtactacgctgcactactcattcttgtgtgtctccttaagaatgccagactccagctngatatcatgtncaattggtaagtgttgttaatttacaaagccctcctgcaaacacaaatgcaagctntggctataactgattttttttatttctataaaaacaagagtgatattttaatttacagcatcaattaccagttctggaccatgatggttgcgatgggcttcagcgaagcaatcaggtacatacacaataatggccattaactcgtattatatatttgcacatgctatcgatattacatacaaaagtttagcagattattatatatataaggatatcatagttctccttttttaagatattacttaatcgaactattcatgcacagatgaatggtgatactcttaattgcttaaataaatatttt

SEQ ID NO: 68268 - DNA, 357 bp, Oryza sativa
agcttagggaaaccgaattatatgcaattttgatatggaatccactgagtaaacataaaattgaggtgtcagttctcccttgaggagaaaaattgaataccaaattggattaatctaataatagatgtgaacaaacctttgctttaatattcagcaggaaaagagtaatctcttgatcaggtaaaatttgcttgatacccaccagaaatcctgaaagaactccatataacccagaaagaggcgtgtaactgcagaatcaaatattttttcattgtcaagattcattcatgaaaaacaagttaaaaaaagtattcattcattgtatatcctattttgaaaaaaatcacaaaattattt

SEQ ID NO: 68269 - DNA, 361 bp, Oryza sativa
  unsure (1)..(361): unsure at all n locations
caacgaagctatgcagaggtagatattagctanccaattattgtttattaggttgtcaatctgccaacgagcattactaatcaatgatctaactaatataaatatatcctcgatatatatatatatatctatacagatgggacaaaagtgcggtttctattctaccagaatatttgcgtatcttttacataaagttgctcaatgaacttgatgagatggaggacagcttggaacccgatgagaagtacagcatgtcttacgcgaaaactactgctaaatcttgttttctcaaaaaaaacaaaaaggcatcctaagggatattcgtgccctcgtcaacattttgataattttcctgccatgc

SEQ ID NO: 68270 - DNA, 373 bp, Oryza sativa
  unsure (1)..(373): unsure at all n locations
agcttccggtgcctgcacattcatacgtttgtgatgtcacatactctnttcatctaagaaaatccaatcataagaataaatctcgacgagcactatgtccactgtgttcgaatttttccttagaaatttttttacaaagggattaaaagcaataaaggatcattttggacctttaccttatcaaattattggccatggacatcacattgagttgacctgtgaaaatttagcttcaaaccaaactctattaatgtagaagtaatattgaagttatcgatggattggtagggcacattttgtaaaaactcagagtgacctacngttattttacttatatttctttcgtcccaaaatatattaatctagtatcaat

SEQ ID NO: 68271 - DNA, 333 bp, Oryza sativa
agcttggtgcacttcactactatgtgatttgtctttggaaggttccaaatatgtgttaaagttgtccttccacgtttgtcttctttggcactctcacctgtaaaattaaacaagaacagtagtggctaagcccagtttttcaatataaacatttagttggtcctactagttttagctttcttcattgtattcgtacctgacatattcaaggagtcatcatcttgctgctctagttcgatctcatcatcttctagtgcttgtgactcatgcaatgggttatgttcactgatattgccatctccactcttgtatttggcactgatttttactaca

SEQ ID NO: 68272 - DNA, 419 bp, Oryza sativa
  unsure (1)..(419): unsure at all n locations
ngatgatcatggcacgaggatggtcttcattggctactatcaatgatcaaaagcctacaggatgtatgatcctgtggcgcgacgcctgtgtgtgtcgcgcgacgtcatttttgatgggacgacgttctgggactggggcagcaacactgatgaagaaggagatcaggatgcctatgtggagtttacggtggagaatttcacagtcccagtccaagggggtgagacacatgcccaggatgcagcagtcactcctaccatgctagcaacatcaccaacatcaagcaccggaactgcaataactctgccatctggtgttgaaatctgttcctctccaactgatgctagtgaagggactaatgaatggcccacgaggtacagaacaatggcaaacacgcttgccactacagctccaatccttg

SEQ ID NO: 68273 - DNA, 389 bp, Oryza sativa
  unsure (1)..(389): unsure at all n locations
gctggacatggaatttaacaccattaagtcttcttaacggaaaggtggcaaaacataagctttagctaanaaacgaggacagaatcataaacctggaaattggaaaagtagaagatgcccctatgagaatttaagccacccaaacaagtttcatctatgagaatttaaagaagatttaaagtttcatctaattgatgaacagaaagaacagacgagcttgtttagtttgcaaatttacatttattatttattccgtgcacaagaacataataacatgatcttgatacactactaactatatattataaataagtttctaccaatgatttcatttccctctaattaactgtgactcgaggacagcagctttgcaatgctgctaactacgc

SEQ ID NO: 68274 - DNA, 449 bp, Oryza sativa
  unsure (1)..(449): unsure at all n locations
tgtacggtatttgaacaattagattgtacattattaataagattgtttttaattcataaggtataacatcgagtggaacgtaaaaagaaagtcattatgtttgcacgaacatagcatttcacaaaaagaggccactctcatgtttcatgcaatattatgctaatatcttgatagaaagatagatggtatccaagatagaacatcttttacagattgagaaatctgagaaaattgtaccaatttttatgtgagaagtttgacaaataacttaacatattatgaatgtgtctggcaagaattattgcaaccactataaagcacatgtcagttaagcataaatgcataatccttgctgtacatggccctagataattcaattaccttggttcatctattataatatatntaagggaacaaagttatgaaaataataaagacaagcattaata

SEQ ID NO: 68275 - DNA, 360 bp, Oryza sativa
agctgttatcttcatcgtcgatccccttcttgctcttgttcttgcggctctcaacttcttcttcctttgccttcaatgccaagacttccttcttgatgcttgtcattgagccttggttgatgtattggatgacctccttggactcttgcacatgcatgtcacgggcaagaatgcgtccgagcaaatcatgaggtgtgagagtcttgttgtccggacgctcacgaatgatggtaacctacgtagaagtccttgtagtgatggctccaaccatctttttgaccacaaccttattggtcatgttcttggagccaagttccttgatctcattgacgaatttgctcaaccggcatacatggtact

SEQ ID NO: 68276 - DNA, 371 bp, Oryza sativa
  unsure (1)..(371): unsure at all n locations
tggctgacataggcgagaagtgaaagttagtataatttgtatgagagacataaattctcatagctaggatcnctaactgtatacatcaataaaagactaaactgaataacggattcgctacatatgcttttgtaacaataattgcgtaagagaacatgcatcaaaactgaaaacaaaacgtgctccaaatctattcaatgtttcacaacatggctgatttgacttagataagtctttcaaaaattgaagtttgaccataagaattatttcgcaatgctgttccacatgttgatgaccagtatataggttataatctgggaaattgttcaagcatgtactgaaagcagagcataaacatccatacctctcgt

SEQ ID NO: 68277 - DNA, 321 bp, Oryza sativa
  unsure (1)..(321): unsure at all n locations
gcaagctggtcaaggaagaagtagaaggctggtgctaccatttacactctatatttggnggaggctgacctagatatggaggagtccgaagtgatgacacggaacagggatcccgctgcaagacaagacataactagtgttgaagccagcgaagctctccttatcaccaggacgagggaggccggtgctgacgatcgcctcgggaaccacaagaatagtgaataaataccaacataatgggaaatctcgactaagacgactactactagagagatgatgagggtggacccctctttcttccttcatcaacgacaagctact

SEQ ID NO: 68278 - DNA, 440 bp, Oryza sativa
acattaagtgggtatcacacgttataatggactatgttttgaatgtatgtgtcgcacagaaaaagaaactggtagggaactgaagtgtggatatatgatatagttatacaggattagatgattaataggatgtagaataccaaccatattgcatttcataccaacatggcactaacaacatacgaagctcatgctaaaatgccctatatcaaactcttatgataggatatgatatgccatcagtaatgaagtactgtagctagggtcacatgctgcaccaaataatcacattaatgctctcgagcaaaagcataccatcttcatcagtacaactatgtgatttaaatcttttcagtcaaccataacttcagtcatactccctctgttacatttgcttgtcacattacacgggctgtacaactttgacacaacttttttaa

SEQ ID NO: 68279 - DNA, 317 bp, Oryza sativa
agcttcttacaatatgggaaaaaaagagataacctacatgttagtgagctaaaatatatagatatattaattttgagatattggaattggacaaaatattctaagaacccacttgtcatacttagcaagagtaaaaccctataaaaattaaaatactacttgtgcttacatgtcatattcaacacgtcaataggccctggtatatatattgataattatggacggtggtcattagtggttgtttatgatttctatttacatgagcaactatttaaccctctaaatagtcaacattaagtaggcattgtgtattttta

SEQ ID NO: 68280 - DNA, 462 bp, Oryza sativa
  unsure (1)..(462): unsure at all n locations
taatggacgtttagtatataatagattagcccggatttattagaatttaagctctactgttattccatgtcttagcttgattttactaggtccttacttagcagtagaagatcttaatgatttagcctatgcattaactagactgaacttgtccgaaattaaaaaaaggataaactaaaccgaaattcccaaattaagaagaggcgggtaaactagattgaaactcccaaaattgggaagacgcaataaacctgattgaaatgtctccaaatattccaaaactgaataactctaattcagttaaacactaaatcctaaaaaatttcccaaatcagaatcaaaacatcacgaatcaaggcagtgtgggttttcatcangaagtggcatcacgcccatgttgtgaagtggagcaatacacttgtccacttcaaaaaacacacacttagaaacaatacactcgtc

SEQ ID NO: 68281 - DNA, 386 bp, Oryza sativa
  unsure (1)..(386): unsure at all n locations
agcttaacaaatcagaaaactcgctgaactgtgaggaagtttttaactcagcaagtacatgatcgatcatagcgacagtaactagagcataccttttcttgcagcatatcccagatccttcaaataatttctccacagagccgaaagaggcaggctttccaattgaacagtgtcaccttctacaagaacgaagaaacttgatcacttgaacttgcactggtttctctattgtgacaactgccgcgatgtcaagcaataatcggataggatgatatcaaccaccacacaagtggtgtcatctttcagcccagtttctttttagagcctgctgcataagtaaaagtaaaagcanaactagatgcgcaacattgtaatgagtcattatg

SEQ ID NO: 68282 - DNA, 302 bp, Oryza sativa
agcttagatgataggaatatttcccctgcttactttatggattagtactatagtaaagtaagattcttcaagttaacacatatttggataggggtcgcttgttatgactaaatcgagagtgctctcgatttagattttacgaattataatgggactggtattcttgcccctactttcagatgcaattgtgatattacccctattttctaaagtttgtaaatatacccctactttcttcaaaccgaagtgtttagctctactttggatgaccgcttggtcaacctatgataaagggggggggg

SEQ ID NO: 68283 - DNA, 430 bp, Oryza sativa
  unsure (1)..(430): unsure at all n locations
agaaactcagctagtccatcctttctaacatatagtctctataatntttatttttataggctttaatattgaatccattacccacccctgcacacacgtactttctccatcctataaaaaataaatctagaaccagatgtgacatattatagtactacaaatctgaacagagatatgtatatattcattgtaataggatgtgtgtcacattttatgctagattggttttttatgggacggagggagtacgtgcgtaacgcgctgcgaccaagctcgctagatagctgcggtgccaacgtcgccggccggcggccgccgtgttgtggtacgttggtacgtgatgtacgcatgacaccggcggacgaacgatcgatcgatcgatggaggagctggagattaacgttgggagacatttctcgtgatgggtcta

SEQ ID NO: 68284 - DNA, 360 bp, Oryza sativa
agcttgcaagtctgctgtctgcacatgtgtgctaagtgcccaagtgacagatctaaacagtgtttaggagtagtagtattttgtaatcactggtttgcatggagccatctggctgtgttgtttttttaagaccgactagggcctgttcactttgatgtaatttttaaccatactattatttttggtacaagtgctaaaattatggctatgttaggttggtgttaaatgttattaaatacatacgaaatcttgcccaaatttggcaattttgcttaaattctggtaactcttctaataattaacaacaccaaaaccttgttagggtgaaaatagtagcatagtgaacaaccccgagtcttg

SEQ ID NO: 68285 - DNA, 350 bp, Oryza sativa
agcttgaggtacaagatgttatccggttttactatattcatgggcaacagagactgagaaaaataatattctggatgacaaatgtcttgtcaatgaaagatacaacgaaaatggcattctagcgaatgcccatgacttgagaatggtatccgagagaaatcatatttaacgaatggctatattgtagcgaaaccaccttttaagtatcacacatatgctaatttctcaaactacataataatgcgaggggtaaaaaagaagaatgataatgtacaaaccataagctttcacctcatataaaatgtcatgtactccttgtggtcaacttataaaatttgcctatcatccat

SEQ ID NO: 68286 - DNA, 434 bp, Oryza sativa
  unsure (1)..(434): unsure at all n locations
ctgcanacgaactattctcacgactgcgtttcttatggccatttctttacacatatgtctcgatagcattgaggccgcctttcttggccttcttgatcaaatcgggccacatctgcacaaggatggaacaaagatcgcaaattcaaattccaaattagcatcttcaaatcataacaacgatcaatcaaagatcgcattgcgtgatggatagatagatatatattatacaatatatgcagtgaccaaaatatgacctcggaggtgctcctgtggtagtgaatggagccagagatgacgatgcggcgctcgcctgtgaggatgatgctctcggcgtcgtaagagactatgctgtatgcgacgcccgggatcgtcgccgcgaggacgaccagcatcaccgccaggcangcgcccaagctgcacattgtctttgcatg

SEQ ID NO: 68287 - DNA, 239 bp, Oryza sativa
ctgcggcatgcaagctatgatgacatgaggttgtaacgtcctattatctaaatgtcgctgtacagcgaaataagactgataatttgggaaagactgaataaatgggcattgctgcaccgctcatagataatgtttcaccgcatcattaagaaaaatagagtgaagtctatcaccggtccttaaacttgtaccgtcgtgacatattggtcccaagactatcaaattaaaccgtcacagtt

SEQ ID NO: 68288 - DNA, 372 bp, Oryza sativa
tcgccgtcgtactcgccggcacttgtcattgtcgcctttcgtgttttgtcggttagatggagagacagggaaaagatgtgtgtgcttactgcatggggagagggagtatatatatagcccgggaagccgcgttcattttgaagtttgaagcctgcgcgtcttgtgcaacggctggagagtcagtgtcagtgtgtaatttgaaagcagcaagtgcgcgtggttatatgctattactttgctaagcaaattaaattaaacgcagttaattaattaattacgtgctatgggtatatatatatgtagaatcgcgtttatatatattaagcaggtccttgatcgattcatcatgtcatttcaatttctatgatgctg

SEQ ID NO: 68289 - DNA, 444 bp, Oryza sativa
  unsure (1)..(444): unsure at all n locations
agcttaggtatatacgctatcgttatgttatattgtggcattattatattgcttccgtagttaggcaaggccgtagtagacatattnttattagtacttggtgagtactccctcaattctaaaatgtatgacaccgttaatttttttcacaatatttcactatttgttttattaaaataaattagtataaatatgtaaaagtataagttaaaattatattttatttaatgataaattaagttataatatatacaaatattttaaataagacaaataattaaatgttataaaaaaattaacggcgccatatattttgaaatggaaggagtactaaaactgatgtttacaacacgaacgacataatgtgtctaaaatatctctgaaactgaccaaccgcaaattattgtagtccgctccgaatctgaagtagaactacaacttttt

SEQ ID NO: 68290 - DNA, 405 bp, Oryza sativa
  unsure (1)..(405): unsure at all n locations
tncttacggataatatgcagtttcttacagcaattttctttgacaagagattcactcaccatgaatggatgagtcttaagtaaaatctaatataggatggtgctggccacatcttccaacccaccatagttcaactaaaactaaaataaactaaatctcacttttaagggtacccgcagatcagcctgcacccatctgtactcggtgctcatgaattgctaacaccgactacagccttcacaaagaattttgcactatattttctatgaatggttgctatactggattcaacaaccaaatgaaaaaagcttacatgttgcagcagccaaaattgatctacagaaaaatggaaacaggggcttcctcngttatgcaacaaaacttgcagaggtggtgaggcgagca

SEQ ID NO: 68291 - DNA, 369 bp, Oryza sativa
  unsure (1)..(369): unsure at all n locations
agcntacctatatgagcccattttannatatattctgggctccagattataataagctacttcaataagttgggtgtttctttcagcttactcccaataatctggattataataatcccaagctgaaagaaacagggcctaaataattactccatatttcagttcttgatatatcgtttgacttttcgtcttatataaaaactctctatgatcagcatttttattgctattagataattagataataaaacatgaatagtattttatgtgcactaatcttttaaaaaaaatatttaaacggatggggaacgttggcataaaaactaaaattgagtccaccgagggagttccttcatcaatatataatct

SEQ ID NO: 68292 - DNA, 435 bp, Oryza sativa
  unsure (1)..(435): unsure at all n locations
taattcttttgatcaacgattcagccagaccatntngttgttgacatatggaacatagngctgaacctgaattcccaatgccatacaataatcatcaaaagcatgggatgtaaatttggcagcattgtccatacggattgattgaatcctatgttcagggtaatttgccttcagccttataatttgagacattagtttgtcaaaggtatggtttcatgtcgatagaagacacacatgagaccatctagtagatgcgtcaatcaaaaccataaagtacctgaacggtccagatcttggcacaatagggccacagatatctccttgaatgcgttcaaggaatttaagtggttcaactctgattntgagataagatggtctcaaaaatcagttcccagtagcacatgcagtgcatacgaaatcagaggatttgagaaa

SEQ ID NO: 68293 - DNA, 352 bp, Oryza sativa
  unsure (1)..(352): unsure at all n locations
agcttctaccttacaatngttctgcaaattgcacactgctgctatatctagtagatgttcagtgatgtctcagatgatgcttcaattgttgtctactgctgctgctgctgttcagtgatgttgtccttggtttgatcaagtgatcaattggatatataatctgatccgagatggttgacgcgtgaggagaggctccatcggttgccatgatcgaaacgtttaggcgagcattcatatggatggataatgagaggttaaggttcacaatctgaaccccaaatttatgtaagcaatatccttgcatgacaaggactggccgaaacgggatcgagttatcacaagcgataaacct

SEQ ID NO: 68294 - DNA, 426 bp, Oryza sativa
  unsure (1)..(426): unsure at all n locations
tacagtacataccatgaaatgctngatcggaggatttattcaatgttgtgatctacagctctattattgctgcgttatgcaaggctcaagctatggacaaagccatggaggtacttaacaccatggttaagaatggtgtcatgcctgattgcatgacatataatagtattctgcatggatattgctcttcagggcagccaaaagaggctattggaacactcaaaaagatgcgcagtgatggcgtcgaaccaaatgttgttacttatagatcactgatgaattatctttgcaagaatggaagatgcaccgaagcttgaaagattttcgattctatgaccaagaggggcctagagcctgatattgctacctatcgtaccctgctttaggggtatgctaccaaaggagcccttgttgagatgcatgctc

SEQ ID NO: 68295 - DNA, 297 bp, Oryza sativa
  unsure (1)..(297): unsure at all n locations
agctttggagcgcgnactgaagggccaagtatatcnttttgtcagngagcaaagcgcgtctgaaattcgcactggaaacatgctgacgagaattatcatcacaccatgcataacatgatatattgcctgtcctggaaacagatcgcctgacaaatagcgagtcaacttaagcatagagttggaatgataagacggcaacgactctggaagggagaaacccattgacctcaggtactaggaatccacgatttctcgtgaacctacggacgatgaaccgcgacactcatagagcaaatg

SEQ ID NO: 68296 - DNA, 226 bp, Oryza sativa
tggtgaagacaggtggtgccgcctttatatatcttcgacaatgggcattgcctgaaggtcacgcatatccgtttgggacgcaaaacagatgacgctggcgcacagattcaataatgctcgcaacatccagcatccaactttcatgtgcgggaaaataaacttgacaagcatttgtccttacctttatattgggatcggcggactaccttcatataatatggcagac

SEQ ID NO: 68297 - DNA, 336 bp, Oryza sativa
agcttgaaaccagtatctactcaaaggagcgcccggaaattcactattaatttccgaacttatttgtaaataaaatcctcgtccaggaatcagccgagatacacaaactgacaatttaatatacaaatccatcataataataacgttacatacttacaaaagaaaagaaaaaacagcagcggaattaacggtctagcgatggcttctgctccactcccacaggcagctcaactggggtataagccaaacgtcttctccttctggatcctttatcttcaactgaggtttgatgattattgcaagaatgagcatatgacatactcaacaagccacaca

SEQ ID NO: 68298 - DNA, 450 bp, Oryza sativa
  unsure (1)..(450): unsure at all n locations
gacctatagaaatctaagccttgacaatacacgtatcacaaatgtgcagcgtgatctgtgctacttcatccaccatgagtgctgncatgtctaaggagatttcttcgacccagagggtgccctagtggcaagtgacgaattcaaggatcttcgggagtggaacactgctatgccataatgtaactagatgacgttatttgaagtgacaatgtaaaacaatattgtaatatatatattttggcaacacttttgatttatgcaatataagtagatttctcagtaccaaatgctcgataatattccaatatatgtacctgcaagaatttctaataaataatgtaaaagtaatttacggccaaattatatttaaattgcaatatnttctacctatcttcgcaggcggaagtnttctttttttgcaagcagacgatttctattttcgcatgcgga

SEQ ID NO: 68299 - DNA, 365 bp, Oryza sativa
  unsure (1)..(365): unsure at all n locations
agcttccttccatcttgtttcctcgaccgtgttctccttctcgacattntttttccccttcgaatttaattttttttgttgccgtatgttttcaacttctgaatttgcaccatggacgttgttttttaaaagtgtgattaattagtctttgttttcttttgtcatataggatattaacagttgtacctcaatgcactattgactntattttgttttaatgtataactttgacccgtttttcttattaaaaatatgcttccatagtctgtatttaacttcttaaaatagaaaggaaggtgatgtctgtatttaactctctaaaatgaaaagatgatcacccttcacctangcattatcagatcatg

SEQ ID NO: 68300 - DNA, 421 bp, Oryza sativa
tcttaaagaagttatgacttcctgtccagttttggctctacccattttcaatcaaccttttgtcctagagacagatgcatgtggtattggaattggggctgtactgatgcaagaagggagacccattgcttatttcagcaaatctctggggaagaaagcagctagctcttcaacatatgaaaaggaggctattgctatcttataagctctgaagaaatagaagcactatttgcttggaaatcaggtggtcatcagaactgatcaacacagtttgaagttcatggcaacccagagacttacagaaggaatttagcacaaactattgctgaaattaatggagttcgattacagtattgagtacaagaaggggaaagaaaacaaagcagctgatgcattgcctatgagggatactgatggagac

SEQ ID NO: 68301 - DNA, 333 bp, Oryza sativa
agcttagcttgttccttattcgcaaacattctcttcatgcgctccgcaattgggagataccacaccacctttgctgggcctcccctctttaacttacttccttcaccttcactctttactcgtttgtatcttgatgccccacagatagggcagacatccaagtcagcgtattccttgtaatacaaaatgcagtcgtttggacatgcatgaattcttttgacctccaggcccaacggacataatacttgcttcgcttcatatgttgtctgcgggaaaatgttcccctctggcaacagatcctttaacagctcaagaaagtttgtaaaactcttg

SEQ ID NO: 68302 - DNA, 241 bp, Oryza sativa
  unsure (1)..(241): unsure at all n locations
ccttaaactaagcctcctcttgcgaacaagattggcaaactaaatggtggtggctatcaagctagacaagtggatgggttcagagacaaaggactttatacaggttcaagcctncttaatcaagaagtaataccctactcctgtccggggattgatccgccgagtgtattattgatcgtacgatctgggagaaaaacgtgcccctagaggcacccggacccctccctatataggggaaggg

SEQ ID NO: 68303 - DNA, 459 bp, Oryza sativa
gacccggatccttaagtcacctgcggcatgcaagctgagtgcgagctgttcatcagttccccgacggaacagtcaatcctcgtctcgtcatagctagtaagcctcagcgttgaccccttcatcacctcactgtcgcggagctcgaaggagctaggcggcattcctcgcgcgacaaccccaccgctggcttccctatggtgtggcggcgagatcatagcagttgggccagatcgaagcgacgaggagcagtggcaacatcgaccccgacaaccctttcaccctaccaccaccgctaccttgtcgagctaaagtaaaagtttgggaagaaaaattagtctggcatgtaagtcacacttatcaagaattttgatcattaaaaaaaagtaccggtcgaaaaaaacgatacaattacatcgtgagaaatatatacagtaacacttgttttaatttacaaaatat

SEQ ID NO: 68304 - DNA, 440 bp, Oryza sativa
  unsure (1)..(440): unsure at all n locations
ttctgttgattaaagtangaaatgtatgtgctatnttttatctaaccgcgatactgtgaatgatgtatttccattaaaatgatatatcctgaaattataccatcaagaggagatatgatcatatgtatttccatgttgttatattgatcaagagcgatcatgtccacatctagcagatttgtgggcccggctagataaatggcacttctggcaggtccggtgaatagctaagtactgatgatttgctgcatgtgtgtgcttatcggcaattagctatgactaggtactaatttcccttctttanataatcatggaatgcacacatgaaagtaaatcacaggcaaacaaccaagtatttccttgcgcgtgacttgcccattagttctcaactacagtactccgcacaattcatctttataattaatttataaaaaaagcgc

SEQ ID NO: 68305 - DNA, 414 bp, Oryza sativa
  unsure (1)..(414): unsure at all n locations
agctttcttcttcggagttctcaacacgtgtagtttgaggaaagntgcatgatcctctgaaatgttctgtccgtacatttcttaacgaacaaactatatatcctgctgttacttaattcgaaggtctttgaagactatgaaatcatgctagcttgctaatgttcaactgtaatttccgcacgaacttctgatccttggtgttccaatttgtaagcatgcagtttggccatcctatttgttccataccgtaactctgcaatttcatgttctggagtctggacaaagcaacaagagttgaaaacagaaatgtttgaaatcttgacagggttttagacagctgaatgtgatactttgggaaaaaaaattgtggtggaagagatgtanaatggagttactgcattttagatttgcatg

SEQ ID NO: 68306 - DNA, 441 bp, Oryza sativa
tcagcatgggagtcctttcgtcgtatgactaaactctttcggacatgtatcgtatgagccaacacgacaccaagttaatttcgctcgctccacgatcaaaatttacttggtgggggcatctgtttgatggtattttggtgattatatgtgtacacaagacttactcatgatggacaaagcaaacaagcagtttgtaagttggctagcttatcatttctacgcaatgctcggccatgtatatacacgcaaatacatgcatgcacaggcagctgggaatatatatactgggaatatatatacttggattagtatatgtgcatgtataattaaccaataactagccgtgtgaagattggctggtgaggcaatcacgcgcatgcatgcatgtactacagtagacggtcgtatgtgtgtgcacgcctgggtgattaagcaacctat

SEQ ID NO: 68307 - DNA, 277 bp, Oryza sativa
  unsure (1)..(277): unsure at all n locations
agctctgcagcagcggtttgtggaggatatacnaaagcagcagcagcagccgcgcggcgcacacgaaacgagagagaaaaacaaaaggcggtagtagtagcagccgcggacccggcgaatttaccgggatgcccctgggtggaggcgaggtgggcgcgacgccgtgagtgaggcggacggaagacggaactggccctgctcgcacgcccgggggaagggggaatattcttctgcgcgcgcggtggcgtggagtcgctgacgaggtgggcccaccggc

SEQ ID NO: 68308 - DNA, 294 bp, Oryza sativa
caatgtgagtaaacccaatctatttgaataaccgtgctcgcagttattgagcaccgggacatgcattacaacttgctagactttaaaatcttaacctgtgggggacgggatattgcatgatgaatattatgctgatggagccacatcccgagaagagggaaggtggacattctcagaaaaccatgatgattcaatggcgggaagctatccttgggatcaccatggatggtggatacaaccgccgctgttaaaaggaacactggtactcaaatttgatcagtccatctatggtta

SEQ ID NO: 68309 - DNA, 371 bp, Oryza sativa
  unsure (1)..(371): unsure at all n locations
agcttaaaaattgacaactccaactgatttttatttctgcagcgntnctatntccaattcttatgtttcttaattactcttgcacgattttttaaacattactattcaacaatcattaataaaatggatatattctttctgggcctttagcccgactagcagcgtacggccgacaaaaaaaaatatacagactttatacatagataaattttatgcataacatttatacttataaactttatacatataacaatttatacttataaacttgaaacgaatttaagcattgtgtagtccagccaaaacaaaaagtttatacatagaattttataaccaattaactaaaaaaatatacgtatgggtttttaaca

SEQ ID NO: 68310 - DNA, 131 bp, Oryza sativa
  unsure (1)..(131): unsure at all n locations
aaccccgccgcttagttgaaaacctagtgactacatatttttctgtcccnatattgttttcttcactaccgacagtggaatcactaagatctgtattgccaccactcgtagctgggacaagtcatgagtca

SEQ ID NO: 68311 - DNA, 407 bp, Oryza sativa
agcttcttgcaatgcatatattatcaactgtctgcttacatatggctggtgggaatggaacagcatgatgccaacttattagctagacaatattataagcatttcaaaaagaagaataatgccattgctgttttggacagtatcttttcacttttatatgtattgttccaagttgttacatgtgcttgtgcttttggtatttggttcttggatggtggtacttacatgccatgacacttgcacaatgtacatgcaccgaaacatactcgggtgcacatccttaactcaaactacagatatgcttcctaatatattacaataccctcaaatggagaacacgaggcatccagcttgtgctatcttcatggaagatataaaggtttaactaccgtatactcatcctatat

SEQ ID NO: 68312 - DNA, 235 bp, Oryza sativa
atatttttagccttctgtatggaatgcacacatggtcttctttgcaaccacaacaacagcttgccctacactctgtgctgttctcatagctaaccaaataacctcgtaggactgacatatatggtctcttttgctaccacagcaacagctcgccctacatggtcttctgtatgcttgactaacacctgttacttgacacatatgcttgactgaacttggtgcctgactgaattat

SEQ ID NO: 68313 - DNA, 186 bp, Oryza sativa
  unsure (1)..(186): unsure at all n locations
agctntacctcttatcgggactaccggctgctatgcangcaggccgggccgcgatgcggaggcggatgcggatctgatcggcgacgatgcggttggggggattatatttatacattcnattctaattttctactatatattatctattttttattacttaaatatctattttctattctttatata

SEQ ID NO: 68314 - DNA, 412 bp, Oryza sativa
  unsure (1)..(412): unsure at all n locations
ntagtacgtacatgcttctgaagtagttgtcctgagctgnttcacattgnttgaactntgaataataacacaccagcaggaccggtggctatgaccaattaatgaactaatctgtggtgcgggtcatttggactccaaaccgagctgcagttatcgccattgactatcagagtgcagtgttggtttttactatttttgttcgtgtatggatagtaccgaaatttcagaaaattacggtagtttgttcttaaatattttttttaaaaaaaaatagtttaaaattgaatattttttaccaaataaatccaaaaatttgggtaaaataatttcttatcagggatctgatagacccaaaattcccaaattttcgctctgtagtttcaaaccatgctcatgatattggaaaaaaacg

SEQ ID NO: 68315 - DNA, 410 bp, Oryza sativa
cgggatcttaagtcacctgcagcatgcaagcttgaagcatacatccgtttgtttttttcactatcctcgttgtggctgtagagccaccgaaaccaggttgagccgcaccactctccggagcaaaaccaaaaaaaaaaaagtgcgtagtatgttttgatccagtactgaaagacgaacatacaatagattttttttttcagttaatggtgtctctatacagtatggtttgtagtaaaaatgtactactactgagcaggaatttttttaccggtgttaggccctgtcattcgaaatttcgatacaaattagaaaggattaaatgtagactaatgataaaactaattccataattttagactaatttgcgagacgaatctattgagcctaattaatttaatgattagcatatg

SEQ ID NO: 68316 - DNA, 66 bp, Oryza sativa
tggccattgtgccaaagactgtcgacagccaccacgttttttggcccacctcgcaccggtggagga

SEQ ID NO: 68317 - DNA, 380 bp, Oryza sativa
  unsure (1)..(380): unsure at all n locations
agcttgctgaaatttatgttgaagcccgctgaaatnnattttgattattnncngcggggtgatcttatgctactacggactcaacttannaaatttattagcaatgttaggagaactaaagaatntcttggatgtaaagatcttgcaaaggttgctgaattaatggttcagattggaaagaacagaacttatcacttggtgtataggctcattgagttatcattgatacttccggtggcaatggcttcggttgagagggtcttttcagctatgtgtcttacaaaaagatttgcgaaacaaaatgggggatgaatgactaaatgactagatgatttgttacactgagaagcaaattttagaagattattgatgaaaaatca

SEQ ID NO: 68318 - DNA, 417 bp, Oryza sativa
  unsure (1)..(417): unsure at all n locations
attcaattatactaatattataancttcttgtagaaaatgttttagcattatgcgatctattctntaacctttagtttgagaaaacaaaaggctaattaagttgtatcttcacaagaactacaatcattcaaaaagaaaataaaggcattcataaaatatttcggcgtgctgaatttcagcatgtcaattaactagggtgactacgtacatatgtatataagcataagttgactgtcgaaagtgagacaacaaagaatcacgaccacaacccccaccccaaaatgcataataattatagcagattagatccacatgttcctttcagtgatagagaacacgtattagtaccaaattatgtgacggatatttgttgaaaatggcggngcatgttatgaacaggcacagggtgcagtgca

SEQ ID NO: 68319 - DNA, 393 bp, Oryza sativa
  unsure (1)..(393): unsure at all n locations
agctttagagtgcanatagaagttcaaatataagagaaaaatttgtttttgaagaaatcaaatttaaagtaccaagttgaaacttaatgatgaaaaaaatcgttacacgagaaagaacaggaaatatttaaagtccaaatagcagaacgttaaaaaaaaagcaatccaactaaaagcataaagtttaaatgagaagacggaaatgaagcgtcaagggagaaacccataaacgtttggtacaaggaaaccatgatttttcatgaacttaaggaagatgaactgggacaacgaanaanaaaatggaaacaaccaaaaggacatttgaagaatagatgcaagaaaaacgttaccaaatcaaggaatccaactaaaaagtaaaaacttaaacttatg

SEQ ID NO: 68320 - DNA, 445 bp, Oryza sativa
tgcgcggccatggaggaagcagcagcaatggtggacgatgctgccgcttgtgtcgtcacgcatggtggtggctagaggaagaagaagaaaaggggggtagcgagtggtgagagctgagaagtgtggtgaagaagggtggtgctgtctttatatagcgcgacaatgggcagtgcccgagggtcacaataaacgggtcgggaggcaaaacggatgaagcaggcgcacaaattaaataatgctagcaacatccagcaaccaaatttcatgtcagggaaaaaaaacttgaaaagcatttgttctctccctttatcattggcgatcgagcggcctagctttcatattatatggcaaacagcacattggtatagtactcattaattccttgggctcaaatgttaattactagctagcacattttgtaactaaggatgtttactgtagtact

SEQ ID NO: 68321 - DNA, 198 bp, Oryza sativa
cagatggatcttatctgagtcgtatgatgaagcaccacatgagtggatatataggaaaagaatccagatctgccgaaacgctcatgttatgagcctctacgttctaagactacgcgtgacgtcactgggattatgttcctcatgtagcattctcatctaacgactctatggaaatgcgtcggagcttctacatattat

SEQ ID NO: 68322 - DNA, 404 bp, Oryza sativa
  unsure (1)..(404): unsure at all n locations
aaacaagctattgcgcttactcctgtaaattatattgaagcacaaaactggttgaagattacgaagcgctttgaattagaataagaccactctcctttttcaaaaaaagggggtgtggttgttgatccattaatcaaataaattaagtcggaagatcgaatcaagaatttcattatatctctttcctctgccgtctattttatattatatntcataaggataaacgatagggtctaaaatagaagttataaagcgaattaaaaggggcagtataaatattgctaatatatcaggaccatcttattaataattctaatgaggtatcctggaatttggaatcgaataaaaaaatctatattatgctcaaggaaagtataattagatagggacttatactcttaaaa

SEQ ID NO: 68323 - DNA, 457 bp, Oryza sativa
  unsure (1)..(457): unsure at all n locations
agcttatagatgcagaattgcagatcagtctgtngcattatctcaaatacacacggtgcagatcgaacatataaagcccatgagatccctccagaaaatccatacaagtaatcagggatagcttatggagaagcttatcaaacatagtcaccatgattaattacctgcaacccttggctgtgcacatcccatttggatgttgaggccggctgaatccattattaaaaaaaaatgattacctgcagccctatcaatttttttgtactctcatagccatggattagacggtctttaagaatttggacctgcactcgggttggctggtactaatatactcctatatgaatctgtacaaaaaaaatgtactgaactctctgtattggaccaagcagctcatcctaatttcttgttgtggttgggtttctcacttatgtgcgagtattacctgaagtgtttt

SEQ ID NO: 68324 - DNA, 363 bp, Oryza sativa
  unsure (1)..(363): unsure at all n locations
gctgnngatcttgtcaactaagacatcaaatngngcttgttacttgatcttgctgtctgcgtcaacagattcacattaatgaatcagcatgtagaagataatggcttttgaggtattgattattggtaccttcaacctcctttatagccgaattcctctgtcttgccagctctgccttgtcatttttccacagtttggatctgcttctctagttgagatatctcggcagctcgcactacattaacttcggttaatcaagagtacagagataacagctcaaatcagttgggcagagtttgcgcgaaccctttgacgagccactcaattcaaaattggactcctggagctcagcaattcgatccc

SEQ ID NO: 68325 - DNA, 368 bp, Oryza sativa
  unsure (1)..(368): unsure at all n locations
agcttagtaaataatttgtgtgtttagcctactattctggaggccggggtgtatgagttcgtataattcagaggagcttcctatttactccgaagtggtagtttaggtgactaagcatgtccaatacaacggtattgtgccacgtggtgggttcccgttgtgtccgccaccacggcgttaagtttaaggcgtgggcccgccacttaacggttttaggtcatatatcgagtatggcttaagatggagtaacacatatcgtgctggtgtaaggctaaatcatgaatcttggaagggctttgttgtgagtaataaatcgtgtacttatgtatcgcgtgccatgcttntgcatgattattatttcacatcat

SEQ ID NO: 68326 - DNA, 402 bp, Oryza sativa
tcagataaatggacgagtcaatttgtcagacttttcatagaaacaaaatgtttgtggatcgaatcacaagaactaagccaaccacgggggtgaattgttggtatacccacatacccaaaatttttgcggaattaaagagtaccctctaatttatggttttcacgccaaactcaccaatatcacaaattcacagcccaactcaccaacatcacaaattcacagatcaaataaacatcacagatcaaaatgacaacacaaattcacagatcattgatatcacaaattcacatacttcacaaaattaattatccacagctgcaccacacatctacaacgacatcacaaaaacaagtcctcacatcagcgtcttcaacgctgcatcagcccgttcgtcagtgccgt

SEQ ID NO: 68327 - DNA, 404 bp, Oryza sativa
  unsure (1)..(404): unsure at all n locations
agcttgcaatttccacccgacgttcgtatttttctcttcatgaatgaactgtatggtcggttcaggttgcgttatcggcccgccacttgaagtaactctgactgtgtcaatccattgtacgaattgacatttccttacatcctcctatgtacatccattttgggatagttaagttaatgatagtactgaggagtgatgaaaagaatagttgtaattaccacgaaatcatcgtcgacaatgtttggacacacgaaacacctttgtcctcgagttcggtgccttacggaccttatgacctgacaacggtcaccacaacgacactccggacgctcacgccacgtggggagtcctaggggatntacgtgccattctaaaacctcagcaacaattcgacggtcatgctc

SEQ ID NO: 68328 - DNA, 429 bp, Oryza sativa
gattcactgccacagagccagtggatcagtagcagataagagatgtggatgttgagtgcattgaacgttggcgagcttggattgtccttgttttgcatgattgaccatagcagcacccacattctcggcatttgctttcatcctttcaaatagccggttctgggtggctaagatatgtggtaaagaaagcttatcatcacattgatcaccttctgcgattcgacaacttcctctagcatgacctgatggctgagtgccagctcaagttagattagaagggattgtttcggagcaccgacctccggtttcccggacatggatcgagtattagtcatcctgcactcaaagtacaaatgagtacatgagcaagctaagcaagatatgacaaaacttgagatagccgaatagagtactagaatttatgttcta

SEQ ID NO: 68329 - DNA, 329 bp, Oryza sativa
  unsure (1)..(329): unsure at all n locations
agcttgacaccacagagattcaccctctctatcattcgatgataccttgcaacttccatctccaaacatctcaacactactacctgtagtatactcaattaattaccgctccttgttgtcatgtctgntattagcgtgctgttctacgagagattaatctctctggcttaaatttctgtctcaattcttaacatgcataacagattttaatcggtcaatatataagctaagctaaactttgttgtgttcctttgcttgccggcatgtaagttccgaagaattttgataaactctacaatgtttggccaagaaaatttctcatatctagc

SEQ ID NO: 68330 - DNA, 408 bp, Oryza sativa
gttactaaatgtgaagtgaaggcttataatttcataattttattgcacatggataataagtattgtttttgggatggagggtgctaatgcactcgatcgataataaaaatatgttctctgaatcgctcagctttcaacgcttagtgagggttatattacatacacattgaatctccttattaatatgcctagtacaagcatttttcaagcacacgagaagacctactagcacttgctacatattaccagtccaaaagcataatatttcagtacaagccatttcatgccattgcaaattagatggaagctacagcttcagatgcaaactcaacagctacagaagcaatctgagattaaatagttaacgttgggagcttacttattattagtatgtcaagtactaacttc

SEQ ID NO: 68331 - DNA, 317 bp, Oryza sativa
  unsure (1)..(317): unsure at all n locations
agctnttgcactcacaactacttaantgttatgttgtanagcnnaaagatgntatcgagaagaaacttgtgagtttatttctatcgattctgctaaatctttgtcgacaaaattctcctttgaaatcacttgatttttccacctccaactggtgttgagattcgtgctaataatgctccaaaaaattaaaggtagcttacccaccaacatcggggcagtaggattcgattcgatataattacaatgtaacttctatagatatggtgataagttactagttcagcgttcttttaatagtgtcatgggttcgagttttt

SEQ ID NO: 68332 - DNA, 376 bp, Oryza sativa
ttagaaactcagcttattcctcagagcatgacatgatcgcatggctttttattctcattgttgcacttctcacatgtgccacttctagcaagagtttatgtgattaaatttgttgagttgcttgcaatgttattcacatattcaagtgatgctgctgcattgtgttcagaccaatgtcaccacagttccaggttacctgtatggttcctgacatggaagttgctgtctgcataccatatattttcaggttataattggtggcccattttccccatatatcgagcataatcttccggatagaacattcctaacacaatctctcggaatatctgcatgcgattcccgcttcaggagcatcacaagatgcattggttgg

SEQ ID NO: 68333 - DNA, 262 bp, Oryza sativa
ttatcatatcgaggatgccaccgtgtagctaaagggttgatatcatctactcaaattaacaactggatcatcacgagtatgcctatctaacaagccatatcatccatacaagatcgaagtatcttattcacctgtaccgtggaaaacaaaatctctagaataaaataaccactatgctaatgttcatacgattgcaacacaagctaaatcctgcgcatcaacaaagacctcacaggttataaacttcaccggaatcaccata

SEQ ID NO: 68334 - DNA, 421 bp, Oryza sativa
agcttcttacgaattctatcatccaatgtgctcagctagacaacttggaatgggccaactcccaatcggcttattctttgccgacaagatccaatgccgaggagaaatttcatcgaccttgatgatgcatcagctactcaaccttcaaggaccccctctgggcagtattgacaacatagaactttgacagatggtggggtgaatggaagctgcatctattccaccaaccagcttcaatgtatatgacagacctcttctcagatgttgtccctcaagtaagtctttaactccagttgatttaaatagctgtttggccgattaatctcaactaatcctcttgatttgcagacaacagaatcctcttctccccgtcaaagcaacagtggtgaggatattcaatatgccccaggtttaattccta

SEQ ID NO: 68335 - DNA, 349 bp, Oryza sativa
  unsure (1)..(349): unsure at all n locations
agcntgactgaannaaagatgctcnattgttctatanngnanacnacaataggatgagagtagagtaggagtcggaagaattccgaagttgtcggtaatcttctcctatttcttttattctgtttattactctgaattcaatataatattcttcttgagtaatttagatttatcttgtgataattatctcttggttagttcctaatcagcatacaggattattgttcgctataatcaactaaagtatagtgattgctttggtgagttataaacactacagtagatattaatttattagatgtggtgtttaggtaattattatccaagtattgctgcgtatccacatatg

SEQ ID NO: 68336 - DNA, 364 bp, Oryza sativa
atgcaagctgcaagaacctcgagtagaacttttcctggatctttgcttcttgtatctacgctcctggatgctgatggaaagccgaaaagaggacacccactcctagttgaagatgatgatcaagatcattttgttgatatattagatagacaagataaaaaaacatgatatagctggtgaccaagagccgactgaggacatcgataacctgttggaagcaccaacccgatcaatgcacatcaacgaccaaagatacatacctagaatttggcagaggatactggagtactggtcgattcccaaggagcagccattgacagacgatgatctccttcctgcactatgcatgtcaatcatatatagc

SEQ ID NO: 68337 - DNA, 407 bp, Oryza sativa
  unsure (1)..(407): unsure at all n locations
ttatgataaatttacagctatatgttcccttctatgtattaatactataccattagtcaaaagttccagaattatatcttacaaattcataatataactaccccgcagcaacacgcggggtatcaactagtttatactattatgggacctaaaattgcacgattttgcatagtttaggggtgaagatttccggtattgtgactagggatgtcatgcaaactcgacgtaaagttgcgggataacaggtgaacttattccgcagcattacgagcacagcataagtgggctgttatatgggccagtagcctggcccgctagccctgggttcccttcccctctggtcgatctcccacagaggggcagncaggcgccagcttgggcanggtacgcacggtgcgcaccatcga

SEQ ID NO: 68338 - DNA, 379 bp, Oryza sativa
agcttatctgcttcatgtaaatcgagtgtgtgtaactggtttctgtcttcttataaatatagccaggcaaccaaacctttccaaaaaataaaagaaaagaaaaaacacagctgctactgccatgaagtcattttttttttgagaactcatgcattttattaaaagggggaaaaaagcaatctgtttctgaactgccatgaagtccagtccatcgctttctgccagtaagcacaatcccagcctcctagggagtactcgctgaccgtgctaccgtggcactgctctgtgctctggctagtgcgtatgggcaccaaaccaagtagattcacccactgtggtggttttaccaaactaccaaaaatacccaccccgagagcaa

SEQ ID NO: 68339 - DNA, 443 bp, Oryza sativa
tcttcacatcatggtcagtaaacatagcttgatctagcagttcattgagaaggtcaagaggcatgagatcttcaagcgaaacctgaggcacattgtggagacgaacaggagaaatggcagctattggctcggcttaaatcatattgctgacattgcacatgaagaattcaaggccagttacctgtgactgaaaccaaggttagcaagaagggatgctcagccacatggttcaacaacattcatgtactcgaacgccgttaacttgccctgggcagtggactggaggaagaaaggagcattgacaccggtcaagaaccaatgagaatgtggtaagctcaatgtctgaaaaatgcacactatctatttagcatagtgatactgaatcccttgaaatgcacacgatctattcagcatattgaagccgaatgcctgaaatgcacaca

SEQ ID NO: 68340 - DNA, 396 bp, Oryza sativa
  unsure (1)..(396): unsure at all n locations
agcttctgataaactgagaacttcggctatcccatcacttactcttcatatatttcttgctgaaagtatccctgatcccactgataacgagtatgcccaaacaattcaattggggtagctgctgacccataccacataatttcggcaactactatagctgctaaaaaaacacgagcgatactactggaaagtacagattcaatattgcccatacataatcctttgtatagacgtcgaggtggacggacactaaaatggaataagcccgctaatatgccccatgtacccgcagcaatttgatgagaagttatttccccggtacaaaagatanaaccttntgcatccacgccgatttacagttgactttttcattagtcatatgatcaacaccatatt

SEQ ID NO: 68341 - DNA, 339 bp, Oryza sativa
agcttgactgcagaacccatgctaaaggttcacatgatagcaacaagtaaaaccattaacgagatgaaaattagcccaccgcctcttcttctggtgttgataagagtactgctaacttcttctcttgcaggttgttgtgacctaaagctcgaaatgcgttgcagtgttctgttaagacctatgttttcagcagccatagctggactgctaggaacagaatcgagcaaggcaaatagagccccattgaaccatgattgtgaagcatttgaactccggttaggcggttgctcattcactgtatgaataatggtagcatctgcaatgttcagaagtaataat

SEQ ID NO: 68342 - DNA, 353 bp, Oryza sativa
ggagatattaattggtattatgttcttgtcctcagctcttaccaaaatggttgtcggttcattcagcagaaactggagaattgcaccattgaagaaaaggatttactttttgccgaggtccttcctcattgcttggaattgatgactgatgtattcggaaattatgttattcagaaagtatagtatttccttttcttatatgattcattttatggtaatttctttatgaatagtacacctattgaacttgaacaattgtacccccttttaagatattacagtatcatagcagcaattatgaaaaataatttatatttgtatgaaatgaaaataacatgtagtacatgcagttc

SEQ ID NO: 68343 - DNA, 252 bp, Oryza sativa
caccaagcagccatcgccatgttgcatgcattattctcctctgcgatggaagagcacagaatgtccttactcctttctactctctccatcctattataagtgcagccataaatttccgtgcccaatatttaatcgcccgtcttatttcagaaatttataaaaaatatttataattaagtcatgtataaagcattgttcaaaaatactcatcataaaaatatttacacaaaacggatgggcaaaattgggcac

SEQ ID NO: 68344 - DNA, 300 bp, Oryza sativa
  unsure (1)..(300): unsure at all n locations
taacaaatggatgatttctatcacctaaacaaagatctgttctctnggctcatatataatgatcattgtcaaagggaacatggatcttcagtgaaaacaaatactaaattacatgcaagtattcaatcttacatggttcagaacagatcactgagcttgctactcaatgtttgcttgtgctcgcctatggttttgcaaccgctgttggattccatggaagagagagaagagagctcaaatccgggtgggcagcttgttggcgacgacgagcgggttctgcttggcatctgctcctttccg

SEQ ID NO: 68345 - DNA, 394 bp, Oryza sativa
agcttaattataaaatctttggttcatgtttatacttttatgcatgcttgttatactgtagatgggttcatcttctttttattgcaatacatgacatgatatgctatatgtatgctaagctcttaaacattaatgaacatagttcctatgcttgatgaaatcattgtcaaaagggggagaagagatgagtcttggaagaagatttttggagttgttgagaagagcatattttctagttcatgatggaatttctttcttttataaagggggaagaagtttcttttggattttttagcacgatgtgtacatctgtacgaagtgtgctttctaccacttttggttttatttcttcaaatacaaaaaccattttgatgggtttggcaatgtgttcata

SEQ ID NO: 68346 - DNA, 408 bp, Oryza sativa
tgcattgagagcacttgccacctttgtggatgaacttatttttgtgctacccccaccgccgaggatgaggacatgtggattccaatcggtctcccgatctatttatgagaaaaggctatgaagattgataattatctagaggacgaataaattaatacttagcttgatagaaaagaccagatccgacaatcgtcaccactactgtctacacatggtaagggatcgaagagtcgaggttgttgccctcctacttcatttgccatcgcagcgtagacatagtagagggatggcgtagacgttagctcataaccactgttctagcactgccaccctcacatgcttatcataaagattcgatgacgactcgcctccctcaccttacacacctccaacacacatacatatctt

SEQ ID NO: 68347 - DNA, 420 bp, Oryza sativa
agcttcagccgccgtcttgcacatggcgtctttttcataacatccctcgaaagagatgacaggagatagccaagaacaagttgatcattggcttcctaatcttcgaatgccgggttcggctttgtcacagtcttcccatcgacggtgactgaaatctcggcgtctagagctttcacagcgccggtgaggtagccctggagacgggctccgcgcactgcagcgctaacttgcgctttccacagtgcatgattgcctttccgagtttctctgtaacggaatgggcctgaacgaggttacagctgccgcgcctgaggaagacgacgacggcatgagtggtggaagatagatgccatctaccgatgtggaaaacgctctgattccatgtgattaaatgtgaagcgtgaaccctttggcttggcc

SEQ ID NO: 68348 - DNA, 401 bp, Oryza sativa
  unsure (1)..(401): unsure at all n locations
gcttggaaggaagaacgntaatattttataacacattttgttagacacttttggcagaatcggaggtcctcgaactgaagagggccggaattcttctttcgaggagtatcaacatgtctttggcctacttaaatagatttcctgtgctatttagagagttccactcgtctctgtaatatcatgtatataggatcaccctcacttgttatgtatattgcattaccctctctttatcttaataaaattcggtatacgttcttattcgaggtatcccctcgacaccacagtgtaataataagtatattatattaccctcttttatcttaaaaaattgggtgaggtcttccgcgacccataaaaaattttcttttaggctatgaaaatgaaattagctaacaatt

SEQ ID NO: 68349 - DNA, 353 bp, Oryza sativa
  unsure (1)..(353): unsure at all n locations
agcttataaatagntatatttctagatttgtatataccacaagctgcatgaagtgcatgctttgattatattaaaattttgaatgcttcatgagccaaagtagaccaccatatgcgagaaacgagaaaaaaaaactcatctttttagaagcgacttgtgcttcacacatatgccacagttgtctgacacaagcccaacatactcgttgggggataactaattacatggtaattatctaggatggactggattgggttcaatgcctnccagaccatttaattattcataatgcaacagattatgtatagatatcatcaacataacccggccatagctaatcaaatgggtttgat

SEQ ID NO: 68350 - DNA, 428 bp, Oryza sativa
  unsure (1)..(428): unsure at all n locations
gagctggagggcattngcaagtataaatgaacgntatattctgaagaacccatcactgattcacaattttacgtagaaaattgttgagggagaatntaccctgttcaattgcatatgccctcaacaatatgggtttctctcatctcatcacctgtaatttgagaccatctactttggggggttatcgataatactcctattcacagtcacccaagttgatagctatgaatgagttttaatctggtattaaattccaaagagtgtaatgataagtttgcaaacaaatattccggagctttcatatgctttttctaagcccagaacatgggttccaattctaaaattgatctcatatggtagataacacagatggcatggtataacatataagtgtggatgcatagtaaaaaacagtggttgtgaattta

SEQ ID NO: 68351 - DNA, 266 bp, Oryza sativa
agctagatatgcttatattaaatgaccttgttgtttattggcgaatatacatgaaacgaattaagaagcatgcatattatgttagatcggctgaaaccccaatactatccttcttatgtctaattgcaggctagtttgcattgttctaagcactactagggatgatgcatttgacagtatgaaaagaagcatgcagtctaagacaatcaagcaattaaacactttttaggatggtagatgccttagcttaatctagcaagacaatt

SEQ ID NO: 68352 - DNA, 381 bp, Oryza sativa
  unsure (1)..(381): unsure at all n locations
agcttgagactagaactttattataattattggttccttgcttanaagtggcagaaaggatgaatcaaaggatttgtttgctgctctctcggcaaatggtttagcaccggatgttgtgacctataccttaatgattgaaaatctcatagaagatggcttgctcgaagagtctgataatctatttctttcaatggagaagaatggctgtgttcctaactcccgtatgcttaattgcatcgtcagaaagttacttcaaaaaggggagataggcagggctggtgtttatctgtccaaaattgataaaaatgacttctcccttgaagcttccactgctgagttactgattttgctggtttcaagtgggaagtacaatcaacatat

SEQ ID NO: 68353 - DNA, 422 bp, Oryza sativa
  unsure (1)..(422): unsure at all n locations
tgtcaatttcatagcanacacttaaagctactagtgctatcactgcaaaccatacctctcacttggccgttctcgtgctgggggctcaacatactcggtccattcccacgaggacagggtggttacaaattcttgttcgtggcgatcgacaaattcaccaaatggatcgaggcaacatccacaggggaaatcaaggccgacaacaccatcaaattcattaaggggatattttgtagatatgattgcctcaccgcatcataacggataacggctcccaatttatcagcgccgatttccaggattactgcatcggactgggagtcaagatatgcttcacctcggtttctcaccctcaaagtaacggacaggtcgagagggcaaacggtatagtactacaaggaatcaagacccgtgtctacgac

SEQ ID NO: 68354 - DNA, 188 bp, Oryza sativa
  unsure (1)..(188): unsure at all n locations
agctngcgctggcctggtcagggagagtaattgaggtggatgacgacagggtagtggcacttgcccggcgagagggaggggaaggggtgtgaggaacagaaggattggatgagagggaggtggaggcggtgcgccggtgcctcgctggagaaggtgaaggggaaggggaagagaggctgtgaggggtg

SEQ ID NO: 68355 - DNA, 245 bp, Oryza sativa
gcgcaacatatattcttcttttgtaacgccgctcagatacttatatacttccgtcttatccaaccactcatctaatatatcatgccttcactggatgaccaaatggttgagcgccatccacgaatcatatatgcctttgttggctgatgcatatgtgactacatagctcaatgcctgcttctcgacatacctgcacatgtagattgcggatccgtcttcttcaaaccttcatagtaacgccttat

SEQ ID NO: 68356 - DNA, 175 bp, Oryza sativa
  unsure (1)..(175): unsure at all n locations
tgcgaaganatgatgaactctacggacctcttactacaagcagtttctatacgaaaatgtatttgttcgtttcgctcgtaagatatacttctgggtgcaaaacgaatacatgcagccatttctgctgatgagagactgctcatacgtatccttgcgttagtatttgctagcccta

SEQ ID NO: 68357 - DNA, 318 bp, Oryza sativa
agcttggaagaattggaagttgaagctcttcaccgagattgtctacccgcccggcaatcatacgccgtttgatgaataccctcaaataaccgaagtggtgtgggaggaattctgctctctcatgaacacccaagagtctatggaatcaagcgaggcacatcgcctactgcaacaacggaatgaacacccgcatccgctgggcaccgcagagtacatcggcaaggaggcaatatgggcccaagaaaatgtatccgctgcagcagcaaatgtcccttgcccgttttcagacatccctgaacatagagctcgcaactgggc

SEQ ID NO: 68358 - DNA, 335 bp, Oryza sativa
agcttccgctgttctattattatttgggcggtcggctggtttactaaagtagatttagtttataatcgtgttcatcttatttatgtttgctatgtataaccatgcttttgatgaaagtgtgaatctattgcacatcgaactatattcacatgagtatgaggtaagaatatttgagatgttacagaactttagccatttttgtcaagtctgctgaatatttaacacatatggtcgccgctttacagtggtttgacaggcacatcttaagctgaagttgactggcaggctaaaggcccaaccatgtctacaatattcctctctcaggcatcggatat

SEQ ID NO: 68359 - DNA, 231 bp, Oryza sativa
agctactgcaaggatctccaatgacggcccaacattttctccatactatttgttctctgattctcaactacatgctatctgctgaagcttttcgacttccatcatatctctctctggagaggtgcaacgacccatccatttatttgaagaatctgcaatttcacatctgtcgagaggctgagagtatctaaccgtgaaatgatatcacttctaagagatatgaagtgccta

SEQ ID NO: 68360 - DNA, 318 bp, Oryza sativa
gaactgatattttcaaacctctaagaaaccgccctaccgtagactgatgatggatgtagctatggaattgcacactcgcggtgacctactcactatggagcctagatgagcataaagttacatgtacctagcgtaaaatacatattagtagagcatattagctaaaaaactagagatgagagttctttaacagacgatgtatcagccgtgaatattcgtgttacaacgtactaatgactataggtcgatgactacaaagataataatactcacggtatacgaacctgatacgtgggtgctgtctatgaatgaactttg

SEQ ID NO: 68361 - DNA, 367 bp, Oryza sativa
agcttccttactactcactttttgacatattgtgaatactctactgatagatcgttcttttaatcaaaaccacacaattcaataaataatcattgtattcactgtatgattaaatttagagtaaattttacaaaaatatgtatatactttgatcaaattatcacaaaactatatatttaataccaaatttatcacataactacatatttaagttggagtatcgtaaaactacaaatttaataataaagctatcataaaactacatgtttagagtcaatttagtcacaaaacttggatgtttataattgaaacataacattattagtgctaaggatttaaatcctaaaatatgtagttttgtgatact

SEQ ID NO: 68362 - DNA, 423 bp, Oryza sativa
  unsure (1)..(423): unsure at all n locations
tcatggtgatctcgttcgcctctcctcggaacatgtttgtcttgatcttngccttccgttctctatttggtcttgatcttgccttccgtttctctatttctaccagtgcaagctcgagaaattaaaccacatcaattcgtttctcttttcagtttgttctgttttggtatgctgcggaagtgccagtttctgaatttgtattagctagatgccttcttctgttcttttcgctgctcctgatgcaatatgcaggatgcttcttctctacacgtctctctgttntctgcctcgaaagaactctctgtcctattgtggctttgtttactcgatgctattttttcgttcaatgatttctgcatgtgtcgctccattgaattacttggtaatcttctgattcttacctatcaaagaaacttccatctc

SEQ ID NO: 68363 - DNA, 421 bp, Oryza sativa
agcttgatctcctggttgaaggtccgatcatgtccaacatcgatcgacttgaagaatgtaacgccgagctagatctggagcaaaagaaactagccgatctcccgaaggctattgaagaacagaagtcaagattaaaatcggctatcagaaatgttgccgatatgactaagtccttgaaaatcatccctggaaccgatgcacatgatgctcaagcaatcgatgaagtagaacaaatcagacaacgtgctgtatcggcaatccaacgatacttatctcagtgactttctatgtaataggacttaggaacaattttttgtatcggctaagaaattctgatacttatgtgccgattaatatgacctctatattttccccaaaccttgttaaaaattgcaactttgcgggttggccccctatttac

SEQ ID NO: 68364 - DNA, 426 bp, Oryza sativa
  unsure (1)..(426): unsure at all n locations
tntaccaagctcttacaagttcttaccaaagcaagctttttattgacatacaccgactcaaccaagcaccccaatggagtttagatgtattgagccttggcaaacacttgctgtacggctgcaatcagatccatggagctctatgtaagcttaaatatgtatcaaatggataccanatgctcaaatcagagaatgcaaaantgaataatggttcaaagtcaagtaccgtgctggtcctaggcttgaacggactaaaatcgcgagcctagacacaaacgataccactagatagctctagaaacaactcatgcacactctgatatgtgaaagccacatcaagatacaaccgatattctctttgcttctctcttatatctttatataactacctatcccatttatccttctatatttgggtgcagcttt

SEQ ID NO: 68365 - DNA, 405 bp, Oryza sativa
  unsure (1)..(405): unsure at all n locations
ggaccctaagcgactgctgcatgcaacttgaaggtaaattctacaatttttttcttatttcncccacaaatcgggcgctgtttcccgctcttacaaaaatgtttgaccaattaataaaagatgtttcacctcataaatcaaaaactttttaaacttatcaattggtgaaaaacatattattcacgaatgacacatgctactctcacagatgaaacatgtaacatcaagctctaacatgctgaacataaccaattccaagagtcgcaaacaaaaaagaagaatcaccacttgaacattaagtgcaacacttttatccatcctaaaaaaatccacatccttggctgataatcccaactcataaaaagtccatgtcaattgaatcttcctgtctcgggggcttcacaa

SEQ ID NO: 68366 - DNA, 338 bp, Oryza sativa
  unsure (1)..(338): unsure at all n locations
ctttgatgtgttcacagagtggaaaactatggttgatatatttactgacagaaatgtgaanatccttcgtactgaccatgggatggagttctgttctaagatatttaaatcatattgcaagtctgaatgcattgtgcgtcactacaccggtcctcacacaccttaacaaaacggcgtactgagcgattaacaagaccattatatcataagcccgctgtatgtttgctaatgcaaatatgcctaaacagtttaggcggaagctgtttccactgcttggtatcttgtcaatcgatcacccagttatgccattgataagaagactcccattgaggtatggt

SEQ ID NO: 68367 - DNA, 356 bp, Oryza sativa
agctctcatatttttaataatgtttttttgaatctctgtgctcatccaagggtaaaatggtcatttttatagaaaatacacggtcaactaacggtcaactgacgggaggggtatgcaagggatcaaaatctaattttgcgggtatataaggaagtaagcaaatatcacgggtatagaagggattagaaaaaatttcaggggtatataagggattttctcagtgaggaaacttgatcactagctataatactctctgttgtacataaatggtttatgagcctcaccaaaattgctaaattaaagctgcattaatactgaaaaattgtcttgagagataatatacgtatactccctcc

SEQ ID NO: 68368 - DNA, 367 bp, Oryza sativa
  unsure (1)..(367): unsure at all n locations
tattgtagttcanaaaatcatgtaactcacaatacattatattctaattagatctcaatgctgaatcaaccaggtcaaaggtcatgtatgtacccataggaatcaggaatgcatgtaccagatcattccacttagccacatgattgaactaaattctattgcgctcactagcatccatcaatacccctcaccgagtagccaaaaatgaaaaaacggaagtaatggagatcatcccccttagccacatgattgaactaaattcgattttgcgctcactagcatccaccaatatcccccccccctccgagtagctcaaaaaaatggaaaacggaagtgccattagcgagtctctcaactcgcgagcaca

SEQ ID NO: 68369 - DNA, 168 bp, Oryza sativa
cacacggcatcggaagtaccctaatgaaaatcacataaagacatccaaatcgcaaacgcagcgacaagacgcgaaacccgaacgcaagtgcaacaagaaaacccacacacatgaatactgcaagcactacaactagtaccacaatcaactatgagaacaacactaaac

SEQ ID NO: 68370 - DNA, 434 bp, Oryza sativa
acactataaatactcagctttacacactttcgtggttgtttcttcaattggatcttatatttcctgggtctctgaaaagaattcgagtgataatagtggagagtttaataatgcttcatttgaacaattttgcaatgaaagaggtcttgaacatgaattttcttctcctcgtgttcctcaacaaaatggtgttgctgaaaggaaaaatctagttttggttgagatggctagaacgatgttggatgaatataaaactcctagaaaattttgggctgaggcgattaacactgcttgttatatttcaaatcaagttttcttgcgatctaaacttggaaaaacttcttatgaacctcgatttggtcatcaacccaaagcttcacatttgcgtgttttaggtgcaagtgctttgtcttgacatctggaaattggataag

SEQ ID NO: 68371 - DNA, 334 bp, Oryza sativa
agcttagccatgcttagaatggtcttcttcgttattatgggctcattacaaatatgaaaattgattattaattaatctggacagaactttaatacttgtgattttgataaataaaatggtggaaaacatggattttatgtttgggcctcaagtggtgcacatatggtgattaattgtataccgataatgggagagtgcgcccaaaccgacctaaggacttcactcaatgtcagttcatttcgtatacagtgcaaccacatgtgctactatatgatagcccaagcttaataaattatctatggtttagccttacattctggtacgccggtgtgta

SEQ ID NO: 68372 - DNA, 316 bp, Oryza sativa
attttgttcatcactagcttaaagaggcaaggtatggactctaacctctaaagccatgaacctatatacactattcaccctattacacctataacacggtatatcctgttaaatacataaagaattcacattaactttcaaaatggtgaaatcaaatgtggtaggtttagaaaaaatatatcttcaacctatcctaacattaacgttatataaaataccttacaaaagcatattacaatatatcctaaggaaatctatactaaaccacagaaacttttaaattcatacctctaaatgaaatgagatgaaaagaaaa

SEQ ID NO: 68373 - DNA, 339 bp, Oryza sativa
  unsure (1)..(339): unsure at all n locations
ctactgaggaactgactctcgtattttatcggattctgattcaaaaaaataatcagtatataccctacgagatgagatgtctacagtaataataactgagtaagtttaaggaaagctcacaaagcatgctatcatgacagcatggctattgcctacaagaaaatcttgcagtatgcgggtcaatttactctttcttgatggtatccgtggctctntcttgttgagagccgatgtgacattatacaactcatacagcgactggttgatcttggcgctcttttgtaaccggatacactcattgcaagatcttcggttgtgctcattacctggcaatgtaaa

SEQ ID NO: 68374 - DNA, 368 bp, Oryza sativa
ttggaacttataggcaatgattctgcccttatttattattatattttttaatcaatcttctctacaaaccagattgatatttacgcttttttacgcccttgtgagataatcctctgcctcactgaaccttcctgtgtttaaaggaaaaggctagtgctctcagttggaagatggatcacatgggaagggggaacacataattgctacatttcaaaagccaaatgctcccaagtttatcaagccaacatttcgactattcaaggacaaccttgtaagaatctaaatattgtcatcttaccttgatgtgataaagcttgccatatgaacaggtggcctccagagaaacctcctcatgaaccatgttacat

SEQ ID NO: 68375 - DNA, 428 bp, Oryza sativa
  unsure (1)..(428): unsure at all n locations
agcttgtanacagagatctnggatagtaatctgtaagtctggcttcaccattaaacccatagtagacttgccaatcaccagaanttggatcctgaaatcatcaatatgtagtatagtgtcatctttcatatatatatatacacgaggagatatcaaaaattgaatgtaataagattgatccgtgattaattcaaaaggaattaaaggtatatatatacacgtaccttggatactctgactgtaatgtattggttgtcgctagaggtggtggaaacaaggttaatcaccatttctggaacgatttctgagctaaatacactttctaatccaggacaacgcatattaagacaggcattagaatcctgagtctgcattaattggagcacagatattaatacttgaagaaccaaatcttatgatagtccata

SEQ ID NO: 68376 - DNA, 390 bp, Oryza sativa
acttcactgcatcttacacattttgcttgcaaaagattagcaggaccaatgtcagttaccgaacaggtatctccgcaaaaaagaaagtgatacatgacaagttctgagactgaaatacctagccatctgtgtgtgaaaagatggtagcaaactctaaataattctagtgtcaaccaaatatgcatcctcatcaatgaataacgtcacagccggcatcacaagcctgtcagatggaacgaatatgcaaatagtagcttatgcaatagcgacttagcatgatactggaagggactacattcttggatgagaactaattgaagttatcatatccgcagaaaaacaaaaatcaccacggcacaatcagtaacaaggaagagaacaggtcatgat

SEQ ID NO: 68377 - DNA, 331 bp, Oryza sativa
  unsure (1)..(331): unsure at all n locations
aagcttgtggaatatgagcactatggatgtaagcaagatactaagttgcagaggaaaatcttctttattaggaagagcaataatgataaggatgacttgagcattntgatctgtcaagagctacaagtgccatgggacctaggcggttggcactttcagaattttacttgccatcgtctttgcaacaagtcgaaatttaagaagaggagattgttaggaacccaattgtgctgccaatgggctgtcaccactctcaaagccatgcccaagcaagcaaagggagagcactatataagcagcaggagtagcatctaaaaaaggaagtttgatc

SEQ ID NO: 68378 - DNA, 337 bp, Oryza sativa
agcttcttccaaagcatacggctttctatatgtatatgactatctctagacagatggatcttatatgaatcgtatgatgaagtaccacatgagtggatatataggaaaggaatccaaatctgccgaatcgctcatgttatgatcttctacatcctaagtctccgcgttccgtcatctggcttatgttcttcatgtagcattcagatcgaatgactctatgaaattacgtcgatacttctacatattatgggtaacgtaggagacatccctattttcccccgggggtcttaattaccactgcttagctttcaattcgcctctgaccatcaaattaaat

SEQ ID NO: 68379 - DNA, 432 bp, Oryza sativa
ctggtttgatcaagctgctgagtattggaaacaagctatagcgcttactccgggaaattatattgaagcacagaactggttgaagattacgaagcgctttgaatttgaataagaccactctcctttttcagaaaatgggggtttggttgttgatccattaatcaaataaattaggtcggaagatcgaatcaagaatttcattatatctctttcctctgccttctattttatattatatttcataaggataaacgatagggtctagaatagaagtaataaagcgaataaaaaggggcaatataaatattgctaatatatcacgaccatcttattaataattctaatgagttatcttggaatttggaatcgaataaaaaaatctatattatgctcaacgaaagtagatatagatagggacctatactcttaaaa

SEQ ID NO: 68380 - DNA, 342 bp, Oryza sativa
agctctttaaccatgctctgctagcttgtcaagcatggcggctgatccagtttcccaacagtttgtgtgctcaaattttaaaggcaaaatattaccccaatggggacttgtgtgatactactttccttgtggactcttcacaaacttggaagggggtggtccacgggttacagctgctgaaacaaggtctaatttggtggattggatcaggaaacaaagttagaatctggagggataactggataccgagagagcatacccttaaggttttgggaaagactgttatattgagaaatcaaatgggtctcggatcttattgtttcacatcatcaaaattggaat

SEQ ID NO: 68381 - DNA, 358 bp, Oryza sativa
agcttattggtgacaaatataatttatatgtaaaactctccttttgagaaattttacggtcctcgagtaggtaccactcagatccgaccgttaatttgcaaagggcatgattggcatcagtctataaacagtaaacagtgcctacgactgacgtcatctctcctgttcgcttgcacaagcaaggcggctggcgtcgtcgatctacttgattttcccatcaatggagttcgaacgaactaagcaacaaccacgtatactctaacactctacttgatcgctggctgcgtgcagcatcaggagcaaacccctcgaccaagaacactagtcttaccatcaatggagaatgagaatgagcatg

SEQ ID NO: 68382 - DNA, 441 bp, Oryza sativa
  unsure (1)..(441): unsure at all n locations
actacgctttgtatatgagaaccttgatactacagnacattatattcatatngacttgatgtgattagctaccgaattgatctgggttaattaattaacggctaactcatttatctggaaagcactagtcaaaactatattaatgggtcaataaatcagcagcaacaatggctaattgcgacagcgtgtacttggtagttatttctgcctttttccatccatctacatgtccaatgatagactgaaagcatcatcctccaagtgcaaggctatccttctttcttttatcccttctcccttttcttttacaaaaatattctaatatttcttcttttggcttggaataaggtccacccaaactgtcagtggtggcatcttcttcccaaagccattttggagcatgtgttctttttaaatttctcttttttttttagctgcttt

SEQ ID NO: 68383 - DNA, 318 bp, Oryza sativa
agcttgcgacgtcattaatcgatgagttcgccctgctgggctggcgcgccatgctgactgaagtcaatctgtcaccgaaaccaggcctcgtggatcgcattaactgcggtgcgcacaaagatatggcgctggaagatttccaccgcagcgcgctggcgattcagggctggctaccccgtttcattgaatatggtgcctgtagtgcggatatggcaccataagcggtacttcacggattacgcccaattgtatggcttgcgaaagtgatatgtttcgcgccactgcggacgctaacacgcataaaggcagcatttttct

SEQ ID NO: 68384 - DNA, 414 bp, Oryza sativa
  unsure (1)..(414): unsure at all n locations
tgccaccagaggcttgatatngatgccagagtttcgctggatctttggaggctttaattgccgctgctgtcgccgggctttctggcttgataaccccaaccaacaatgttcttaattgcactttgccagaatctacccacgggcgcgcctgctgccagaactgtttacaatatgggcagaacggatcggcgaagacgtagacaatgaccggcgcatcttttttaccgtcgaggagccagtgggattgttccatccgttgccacatttcgcgtccggctggtgcgtaaatttctttttcgataagtgtgttactcaaggtttcacctttctcgttgtacatgtaaccagagatagcgtgcttaccatctggagtcagggagatggtgacgcccatatcctgatactttccgagat

SEQ ID NO: 68385 - DNA, 346 bp, Oryza sativa
agcttcgatattggaggatgtattgatgtacatgttatggtacgtggttaatgttcatttactatttcaagtcgcaatgtgaattgcattatgtttatatatatattttgtccttaagtcaatttttctgacggtgtgaacattttttccctgtcggttagcacgtcagaaatttatctcacaaacttgatgaccgcgcgattttctatgttgcatccacaggacaaagccgtcggagatgatatttctgtacgaaaacccatatgaaaattgatttttccgtggaccgttttatctgttggcgaatcctgtcgtccatccaccaaaaataatttctgatggtaaa

SEQ ID NO: 68386 - DNA, 422 bp, Oryza sativa
  unsure (1)..(422): unsure at all n locations
gcttctncctgtagaaccgctcaagtttcttcatgaaagctttctgctcctcctcagtccccgagtcatcaccaccacagctggaatcaaacatgaaggagttgcttgcaagactggacagcaccgggttcttcacgttctccccagctgacgctaacataaagctgtgtctcaccatcagcacccttgttatcaccattgctatcgccgtccgccctcatatgcccatcaccattcttcaatttttcaaccttcatttcagccacctcatttccgccagcatgcggcttaccgttactagtcacaggaatattctttgtcttatacgctgcggacccaccctcctgctacaccggcttcttcgttggatccatgccttcaggctttgctgaatccttcacggaataacgggatcgggaggc

SEQ ID NO: 68387 - DNA, 402 bp, Oryza sativa
  unsure (1)..(402): unsure at all n locations
agcttcgagacgtgtggcttggctgatgtctctgggcttcccgnttcgctggtccgaagtgacgatggaataaagagaagaggcgatccacgcacgctcgagacgataggggtatgatgttaggcaggccggaatcatccgctagagcctcaggctgggcctgtttatggaaggccacatgggccatggcccagcttgaagccacccatctcagcatatttggcagaaaatctaattataacgcattttctagagataaactttatggttttctttggaaaggagtggtgagttgtgatccaaatcatctgacctaaataaaaccagcttctgctagaacgaaatggaggccctgccggatcgtatcgtcatcccttctaagggcccacctcatatatatac

SEQ ID NO: 68388 - DNA, 362 bp, Oryza sativa
  unsure (1)..(362): unsure at all n locations
ntgtggtggcattccagatcttctcttgcctacatgttctcttaagatttccattagaaggcatagagctccagggttgggattgtgttccncttgttgctacaacaatatgtatcctttcattgctccttttcttccatgcttggtataagaacagattaacanaaaagccttcgacaatgtccatgcgagcccatcaacttgtctcctaccagcagttggtacatgcaacagatggcttttcgacgaccaatttgttgtgtactgggagctatggatcagtctatataggtaaattgttcgatgaaaccggtgagaatgaaaatcctatcgctgtaaaaggactgaaacttcagacacct

SEQ ID NO: 68389 - DNA, 286 bp, Oryza sativa
  unsure (1)..(286): unsure at all n locations
agcttggctcttgacacanacttgcttatgatcatctttcttatggggtcatgcaagtcaacaatctgacgatccttgattnttgagacccaactattgaaacattcagagaggttgttattgatgtaatctaccttgcactcctcataaaacttgcttctgctccaaatgtatggatgattgtcatctaaccacgttagggcttcagggcacctctcctttatctcgtccatgtggtaggtgaacttcacatttgtgaagctcttatcagctgcccacatatttt

SEQ ID NO: 68390 - DNA, 426 bp, Oryza sativa
  unsure (1)..(426): unsure at all n locations
ngctcttngtgtttgctggctgacatgaattgncgtttgtgcagaggtttgggttatttccgtatctgttgatggaatgaagatgtttagccaaatcagtctattntgtcaaattgactgaatttggacattcaaagattactaagagaagagtgggggtgtacttaattactttatatttagggtaccatcttgaattcttttgagaagtccagatggaattgaaccattgagttgatttcctgtcaaatctctaaagaagccatatgcccataaattatatacatatgtcagttacaaatgatgctaggcaataaagtaaaatttgacaggagttgccaaacttacaatactgccaacgaaggcaactgtgaaagtgcatctggaatcgaacctgtcaaattgttgttgacagatcccctgcag

SEQ ID NO: 68391 - DNA, 339 bp, Oryza sativa
  unsure (1)..(339): unsure at all n locations
agcttatttattttacttccgaaatcttattttcgtnaattttctaagaacttatgcatacttcctccgtcccagaatatatgtattttttaaggtaggcacgaatattaagaaagtatgtagagataattggaggaaggttgtggttggtgcacaataaagagtacgtggaaacaatggttgtgattggttgagaggagacgttatgtgaagaaatagcttcattttgggacaagttactgtgcaagaaatagctaaattttggaacggaggtagtactagtttgagaaaagagnatatttcgttgcatttaaaccttgcgggctttttgtgctatga

SEQ ID NO: 68392 - DNA, 436 bp, Oryza sativa
  unsure (1)..(436): unsure at all n locations
tactcaggttgacaatggcttggtggcatgtggcgtggagagttttataataaaggcatcgcccttgagactaggaagagagggagatagggaaagacgaagatgaacgctgggaagggagagatgggaggagaaaagctgacatgtgtggggctcacgtaagtcccacgctaactcaagcgccacgtcaaccaaaactgaggactatactttctatgaccttgcgaacaccagtattatgagttgagggacgttaaagatgaggaatgtaaagtgaacttattccgatgcaatttatttttttttgtaaaggttggctcatttatattccanacatccctttntgagctcaacaagattaatcctttcgcctgtatattccacccggtttggggaaaagcccgccattcgtagcggggcccgcgatgcttatgcc

SEQ ID NO: 68393 - DNA, 410 bp, Oryza sativa
agcttggcaacggtgactcaccacctgtttctgcgcgggctagccacatgtttccctcctcccacgccatcggtgccactagatgtgttgcgctcttcacctgtagcggcggccgggccatggccctcatgggtgcctgtgcgaggagaaaagagaaaaggggcaacaactgcctgatcgtgtgcatgggctgaagcctacgtgccgagccaaactattgtgccagtccaaagtgcaaattatgaatacatggtgttaagcctggacggagctagaaaattggctcatcagtatcgtaatgcattattaatgttacttgatttccagtgtcatcttcatagcctatacaatatagtcatggatttcattccacaaatatattatagcttcgtccttggtgttaacaccaa

SEQ ID NO: 68394 - DNA, 367 bp, Oryza sativa
  unsure (1)..(367): unsure at all n locations
atatttttgagattccgatttgtgttcttcaaagactgattattatggatcacatttcttttggcagggggatgatcataaaaagaagaacagacttactatatgggatatccgttgtcagcccaaagatcagggtgatctggcgattcataatttggaaatacaaaataagtgtcttttgagtaagtgagtgtttaagttgataaatgaggaaggtgtattggcaactttattgaagagaaagtatctctataatcaagctataacataagttgatagagaacatggngattcccatttttagtcacgcctcttgaaagttaaaagcacttctttatatatgggttcttggattgtaataacatgg

SEQ ID NO: 68395 - DNA, 414 bp, Oryza sativa
agctactcttattgtgctgcatgaacgatgtatctgtgagctcgcctataagagccttagctgctctcctccgcaaagctttccctatgtgctgctccctctccacctgaaccgaatgcatggccttaaacggtttaaatgttaggtttccacgctaagcaagctaagttaatgaaccatctattattcttcttcggatagaatgatgcgttactcctgcattggccatgtctatccataatgttcatactttagaggtagtttatttcaatcctctgcacactattatttttttctataattgaaagaagggcgatagacactgtacccctaactttggggctgtctgcgtaacattggaactccgtaatagtaatactccatatgcccaaagaaatagtagcaagggattgg

SEQ ID NO: 68396 - DNA, 454 bp, Oryza sativa
tcctgaatccatgataccccatcgttgtgttcacaggttacttaatccgactgaggacgtagttgatgcaagccaacacttatactattgcaaaataaaacacaatatttacagtatacagattacagggtgcagtttataaatgcgcagtcttgtgatgacaaatacatttagctggagtatattatattaggcctggtttagtttctaaccttttctttaaacttccaactttcggtcacattaaaactttcttacatacataaacttttaactttttcgtcacatcgtttcatttttattcaaacttttaattttagcgtgaactaaacacccttgattggtataactactccattatcagacgaacacctgtaccgttctaattaactcctccgcattactcccaagtcccaactgcttcaaaacggtgttgattctgagagccaaacac

SEQ ID NO: 68397 - DNA, 420 bp, Oryza sativa
  unsure (1)..(420): unsure at all n locations
ttaagcacagagcagcagctatcacnaactcgaggcgacacagttatttccggaaccggctcgatcacttaacccagactgactcggacttagccgatccaatcatagccgatccggactccagccgattcctactctggtgctgcaacgaacttcatcgttgggaccacttcgatcttatcctcatctccgaaactgataaaaccaaatgtgggtgaaacacatgcgccccaaggccggaatattcggtaatggttcggatntgccatataccactccgagcaagagtcgcgatctgtcgtctcccaaccgatatcctcagcgctntaaatactaaccggccgcctaaaaaagactcaccccgatacttcggttatcaccgccgaagccaccttcatcttctctctcgggcatatctcg

SEQ ID NO: 68398 - DNA, 377 bp, Oryza sativa
  unsure (1)..(377): unsure at all n locations
ttcattagattgtagttccacacccatatcaaaaatatctctgggcttaaatctcgttacgacgtgccatcctttagcttttgcatcttcagcataaaaaacctgttccacttgtgatgaaaagacaaatggatcatgatctaatttatcttcactatgtatctttcgggagaagttcacaagggtgaaatcaaattcatcctttttgatgccggctntatgatggacgtcataccaatcacatctgaagagcactaccttgtattttctatatgacaattctacgatgtccgataatctgccatagtaattaacaccatcatcagcaatgttaactacgccgctgttttgagtggagcggcccacctcacgcatca

SEQ ID NO: 68399 - DNA, 359 bp, Oryza sativa
cctcacgtacatcttgaattgagcccggaagtttggcaatgcaagacattaagaagtcgtatacttatgtgcaagtggtgaggacaacgctttcatctacttcttccgttccataatataacggattctgagattttacttgcaaacgttgatcgctcgtcttattcaaatcgttttgaaattattatttattctattcgtgacttactttattagggatagtactgtaaacacaacttttcgttttttatatagaatttgtgttaattagacgagaggttaaacgttgcaagcaacaactcaaaatcatgcatatatgctcccgtatatagtcccatgcatgcatgcctctttttata

SEQ ID NO: 68400 - DNA, 462 bp, Oryza sativa
  unsure (1)..(462): unsure at all n locations
cctgccacaaatataagctcactcctatactanaaatgcttgccagcctttatatgtttattttatcacatgaagttgttggacctaggccatggtaattatattttgcctgacgacattaatcgtctagccaatttacattatttccttgccaaaaaagaactttgttccaatattcgtgggattggaaagatgaagtatttacggaggctgcaagaattccatgttaataaagagcgcactgggtttgaacttagagaattggggtatttgaaagagcttggaggagcactacaaataaataatcttgaaaatatagcaacaacggaagaagcaaatggtgctgaattgatgatgaaaaggaatctaaagacactagaactagtttggggtgcagagcagcagaatagtggatctgagattattgtaggtctttagccaccttcttatcttagagcattt

SEQ ID NO: 68401 - DNA, 247 bp, Oryza sativa
aagaaattttttcgcgcacacggaaggaggagagaaagaaagaaacatacgaaggaaaaaaaggaaagtcggaaggagagagggaaggaagaaaggaagagaggaaggagaggaggagagagggacgggagaaagagaggaaaggaaagaaggaggaaagaaggaaagaagggaggagggagaaaggaaagaaggaagagaagaagggaaaggagagaagagggaagaagagaaggagagaaaggaa

SEQ ID NO: 68402 - DNA, 393 bp, Oryza sativa
ctgcagctgacagcgtaccagacttttgttttacttccgctttacatgtgtgtttttcggagcaattgatccgtatatagtcccgcgtcattatataaaacttgtatccataaacttcaccggtcaccaacggcttgatcttctcggttatgtgctctccatgctgatggactggtttggacttttcagaagatgctttcttgagtgttcgctcatagtccgatagctttatggcctccttggcatgtgcatacatacccctgaagaagttcctgacactccggtctataagaatccttctttctggacattcaggcttcaattagctgctgacttctaatgctacgtaatctcctagctcctattgcgtgcaatcgtaccctgggctcttgg

SEQ ID NO: 68403 - DNA, 457 bp, Oryza sativa
ctcagctgggctacatcgagcaaggcctgtatattgtcagagcattcttttatttttgtgaacaatagacaatggtagctattctcttttattttcaattgataataagtggggtttttttaatcgagtggatatattgcaggtcggggagtgtttgggatggcactgcctggatgtccaaagacgttccagtcaagtaggtctccctttgagcaaaaaggggcaacagctggtgaggctcaatcatcaatccaaaaaatgagagacgagcaccagcaacttcaccaattccaccaaggtgatgaaaacacagtgccagctggagtagcccactggctatataacaatggtgattctccctgggttgctttcacctgcatcgacaccaacaacaatgccgaccagctcatcctaaaagatgggatgcgtcatatgctcacacagcataatgaatatt

SEQ ID NO: 68404 - DNA, 352 bp, Oryza sativa
  unsure (1)..(352): unsure at all n locations
gactagcttgcgatacttcgatgacctagctagaactatatgcttagccatgcttaattaccactaactcagatgatgggataacagcagtattaaacctttttagtatcacgacgagatgcgtgctcgagacatccgaccatgtttcattggtcataaatatccaactaaaatgcgactgaatggtgggctatgggtgcatggttntgctaagcgcacccatggcaaataagaaccgggtcgcgggatgcactggaagacaacaacgactgccacaagcgggaatgggtaacttccagacctgaaggatatgatattctctggccgacgcatccacgcgacggtgggcgcg

SEQ ID NO: 68405 - DNA, 453 bp, Oryza sativa
  unsure (1)..(453): unsure at all n locations
actcagctgtttcatggaaacaatagcctaacagatatgttttctacgagatcctatgggaaagagagattgactcatcacaggtgattaaagattcttggtccagttcgagcgagaaatcagacttgggggacataaatcggtctctcgcaaaagtcatggcggctttgcgttcctggagcaaaacaaaagtgaaaaatgtatgtagagaacttgataaggcaaggaagaagctgggggacttgattgcttcagatgctgataattcccaaattcgttctgccactaaccaaatgaatgaactgttatacaaagaggaaatgcnttggcttcagcggtccagagtgaattggctcaaggaaggagataagaataccaaatctttttaatagtatggcggtatggagagcaaacaagagttgaatcacaaaactaaaagatntgcagggtact

SEQ ID NO: 68406 - DNA, 437 bp, Oryza sativa
  unsure (1)..(437): unsure at all n locations
agctntacctatctgcttgcttgtgccatattattgatatctggcctttgtctaccttgggtaataaatcgactagcttgtgttactttgatgacctagctagaactatatgcttagccatgcttaattaccactaactcagttgatgggataattgtagtattatacctttttagtatcacgacgagttgcgtgctcgagacatacgaccatgtttcattggtcataattatccaactaaaatgtgactgaatggtgggctatgggtgcatggttttgctagtcgcacccatggcaaataagaaccggttcgcgggatgcactggaagacatacaacgcttgccacaagcgggaatgggtaacttccacacttgaagtataaattttctcttgctgacgcattcaggcgagggtgggcgtgatggaacgggatggg

SEQ ID NO: 68407 - DNA, 457 bp, Oryza sativa
tgtttcagtggaaaacaaccagcctagacagaaatgtctgttctacgagatcctatgggaaagagagattgactcagcacaggtgattaaagattcttggtccagttcgagcgagaaatcagacttgggggacataaatcggtctctcgcaaaagtcatggcggctttgcgttcctggagcaaaacaaaagtgaaaaatgtatgtagagaacttgaaaaggcaaggaagaagctgggggacttgattgcttcagatgctgataattcccaaattcgttttgccactaaccaaatgaatgaactgttatacaaagaggaaatgctttggcttcagcggtccagagtgaattggctcaaggaaggagataagaataccaaatttttttaatagtagggcggtatggagagcaaaaaagaatagaatcacaaaactaaaagatttgcagggtactgtgca

SEQ ID NO: 68408 - DNA, 269 bp, Oryza sativa
ggcgaaacgacccactccttgacaataggaacaacagatattctcgcagactccgcattgacctgcctcaatcagatgcctctcgcctggcactgaagaaaggctgaaactgtgaactcggcgaggaactgtgttgccttgacgctgctctacgtagaaactggcgggcaggctgaccatcctcattcgcagcagaaaactgaatagacaatctgttaggacatgatcagctccttcgaaaaagaaacaagagatcctggtcatcggac

SEQ ID NO: 68409 - DNA, 449 bp, Oryza sativa
  unsure (1)..(449): unsure at all n locations
cgtagntcaatgaanagaactattcactactgttcttttttcttaanagtcataagttcttttgggctccaaccctaacttcacttccttgtctcttttgtaggttgcgatcgaattgccatacatcctagttcagacactggtatatggtgtactagtctactcaatgattgggtttgaatggactgttgctaagtccatttggtacctgttcttcatgtacttcacattgctgtatttcacgttcttcggaatgatggcagtatgattgacaccaaacgagagcattgcagctatcatttcaccagcaatctacaatgcatggaacctcttcttatgatatcttatacctcgacctgtaggttactttcctgccgcgtatgggttttgtttcatttagaattcattaccatattgttctaatgtgactcatgcatgtaactctcgca

SEQ ID NO: 68410 - DNA, 434 bp, Oryza sativa
  unsure (1)..(434): unsure at all n locations
agcttatgaattaatctaattgtttattttattatcacaataatatataaatattttagttgaaaagtctcagcgatacaatgaacattntaaaatttgtgatagaaagttttcaaaaaattgtcttgaaagttaaattttcgagttgacagttttaaaattcgagtttgaggttggaaatatttatatttgagttaaaagttttctagtttcgacttaaaagttttcaaaatttgagttgaaagttttcaaattctgggttgaaagttttcaaattccagttgatcaaatttganaactttcagccaaaattcgaaaaaattttaacacaaaatttaaaacttttaagtcacaataaaaaattttcaattctacaattgtaaagaggtgcgtgaaagattgataaataaacagactgaaacagtgaaaaaaac

SEQ ID NO: 68411 - DNA, 224 bp, Oryza sativa
caaccggacccaaaaccatagaacgaccaaaaaaaaacctaagagaaagaaggacaaaactacaaggcatgcaaaacgacccgcaatgaaaaggagaaaaaaaaggcgaaagacgcgcaaaccacacagaggctaacagcataggagaaaggaaaaaacaatgacaacacaggacaggcaacaccaacaaaaaacagaaaacaagcgcaaaaaagacagataac

SEQ ID NO: 68412 - DNA, 437 bp, Oryza sativa
  unsure (1)..(437): unsure at all n locations
agcttgcaactttgcaagcgaaattacattctatattcatcatatgcacacaanagtcacaaattaattccttttttttctctcgatttatgcctgctcggttgatttcagttccagtaattattgtagcaagttctgattcatgttgtacacctgtgatggatgttcttttttgccacacatgatgcatgcaactgtgcaagtagctttgctttcatgatttcatcacacgcacacacacacacacacacaaacacagagagaagataaaaaagaggagctcaagaggagaaaaggagatgcatgataatatgggcagatggcaatggtggaggaggaatataatcatgaagtgggggagtttgtctttctttaacgatggggttctcctctactctcttgcagctccactctcactactgactatactactactc

SEQ ID NO: 68413 - DNA, 450 bp, Oryza sativa
tagttatttcagtgttagtataacttaatgaatcagctatattgaactatttattctgtgtaatactgacatgttaatcctttgttttgtttgttgcagtgattttgcacgatctgtgaaacgcctgaagatactgggttaactgaactgaaggagatgcatgcgtgagttgatggagcacagctcggttttggttgcctggcatctgcgtgtgggtgtgcactgatgtatgtacatgttttcgttttcagtcaggatgttaggacgagagaaagagctttctgtcaaagactatatactgctagcttatatatactgtagttgggcacatctcatgtgtgcccagggctaggttttgagaatgtttacagagttctgtgtttttacaccttctatattgtttgcaaactgatcttgtactataatactacttttatttatatctctctt

SEQ ID NO: 68414 - DNA, 433 bp, Oryza sativa
cgagcagcaacagccacagcaacgcagggagaatgttttttccacgcgtgcggtctctcatatgtcacaaatctcggtggaaaacccacgaaccttccaaaaagcagcgatatccaatgggggtaataacacgccacgatgcacacgcatcagccattatgtgaaaggcgaatcttacgactgccccgaggcagatcattgaaccgactacaatcctatatattttcgagacgcacacacccggcaactagtgttaacggcacgcgaatacactctctttcccaccatgatgccccagggagaggggcacggcgaaaaaatgagggatgcctgcctcacctagaccttgccggaacgcccattatccgaagcctgcgaacatcaaggctctcctcacaagcaaaatgatacccaaccccggtcgcaccacacc

SEQ ID NO: 68415 - DNA, 460 bp, Oryza sativa
ctaagcttttaacgcgttctgcaggcaagccctatatctgcacttttatatctgcatagaagaattacctcggttaattgattaaactaaactaacctttcacagttggaccctgaaaatattgatgctttagtagcactggcaatcatggacttgcaaacaaatgaaggtaaatgctctgtcctaagtactaacaagaatcactttttcacaaattttccctgaagtctcgcaacttgtgtatagctggtggaattcgcagaggaatggagaaaatgagaagagcttttgaaatttatccttattgcacattggcactcaaccacctagcaaaccattatttctttactggccagcattttgtggttgaacaactgacggagactgctctctcttcaagtaatcatggactgctgaaatcacatgctttctataacttagccagatcgtaccacagtaa

SEQ ID NO: 68416 - DNA, 127 bp, Oryza sativa
ggacggagccacaccaaatagacgcaaacaagggaccgggcccaactaaaaacaaaccgacgaactactgggaccagggtaccagaacactaaacagacccgcgaagacacgcgggaccgtggaccc

SEQ ID NO: 68417 - DNA, 436 bp, Oryza sativa
  unsure (1)..(436): unsure at all n locations
tacataaatgtgcacgcaccattcttttgtctcttttctaccctggnntctagcttgctggagaagcgctcacgggttatggaggggccgcggaaactccttgccatgtgttcatgttcaaagccaaccagccactgatatggttgttccattatagcgatgcataggagtatttctcagggattaaaaaacctagataaaaatatcaaaaataatttatgctcgctaattaagaaaaaaagtaattttataatatttaagaaagtatagggagaaaccatatttttgttaagtgtaaaacttgttaccgagatatctcacgatatcaaaattttagtatctacaggtacttaatctctttaagaccataaactttctcttaataatgatgcatcactgtcaataccggtctagaaagtgtatgagaaccatgttc

SEQ ID NO: 68418 - DNA, 414 bp, Oryza sativa
gcgcgcggaatacgaaggagaatgtttggtaactccgcaccccacacacagactttgtctatccaaaatggttagacaagaaaacacgcaacaagttgggttacagaaatacgaattagagcaatcctgcactacaagcagagtaaaatggtgatttctcttaaaactctcgaatggtgatttaagaattcagtgcgaacctaatccttgctataatcaaatgttcggtaccgcatcagaggaacaaaaaaaagcgcctggcgtaccataattgagtcattcttgttgaagattgtaatttatgatgcatgaagccacaccaccttaatgttcaacggtcatgcattagtgaaataatagcccagaaaacgcatccaaatagctagaaacgggtgaatcctgaccaactacgat

SEQ ID NO: 68419 - DNA, 453 bp, Oryza sativa
  unsure (1)..(453): unsure at all n locations
aagaaactaagctttgggggacgggcccttggttcaccctcgcgcttccttcagttgaatagagcgggagngangacggcggcggcgatgatggcaacgaggattgggacaaggtggtcagcggcgctgtacttggaggcccaggcactccgtgattgcccccgcctctcctcctttattatgatatgtgctcgtggtgaacgcttgaaactctatgccattgtgccatcctggttgtaaataaagcttctcctttgcacttttacatccttgctttctcttctaaatgcctgcggcaaggaaaaaaacaaagcgaacgcatttagttgacttctttacgatcaagttgccatttttactccctttgtcccgcccctcgggctcgttccggtaaaaagggggaatatgcacttggtccgcgacacttangtggcgaggggcaaggccgtcgct

SEQ ID NO: 68420 - DNA, 435 bp, Oryza sativa
  unsure (1)..(435): unsure at all n locations
agcttgttggcttagaagaanctatgaattttttacacacataaaattcaagcttacggtaatctagcataaaccaatcaacggaacattccagatcatatctacagagtatcaaaaagggtttggatggattaattttaacaaaatcatagccaaatgaagaatcatgagttaataccaaaaccaaggtaaaacataaaacttacaaaactggaagatatcgtcgaactctagatgattgaatcttatatttattgcttaagtaatactacctctgtcccaaaatatagctatttctaacacatcattgcttaccctcgaggcgcaggcttcctctctatttatacatatggatgtggctgcccatagctacgaatcccacttgaactaggaaatctaatcacatagataacctcttaaccaacaatacgcaca

SEQ ID NO: 68421 - DNA, 410 bp, Oryza sativa
catgaaacaaatcaaacagagacgatgtctatcttttgatgaaccgctcagctcaaagttagagtcttgaagctcggcaatccgatctctaaggtcatgttcagatttcctagcaagctctttggcttcacgcaactggtctttggtcgcttcaagggttccaagctagggaactaatttttcaagagttgcggtcttcgcctcattcctgagatggattctctgcaccacaaatttatctgtatctaagcaaagtagctgacaggatgattgaagccgtgtatagggagacttacatttacaaggcgagtagcttggccgagtgtctttttcagcatacatacttcctcgtcctctttctggttatttattacgaaccactgtggttgcatttcgtcatcccaccactt

SEQ ID NO: 68422 - DNA, 428 bp, Oryza sativa
agctgaataacaataaaattatgatttctatatttataatgcaacatcttaacaagcatataggttgaagaataaacactaaacacatagacctattgcatttatcactctttctcaaataacctttagcacaaaataaccaagagaatttttttactttttcttttcttgagcctttttgctcatatttttctcttttattccgggtacgtccctgtcgtcgagactgtttccagggattcggcacccattattttactcacatcgaatacgtccttgtcgtcaagactgtttccaaggattcggtattcattttttttcatattttttattctctttttcacaatgagcaattaaagctatttgaggaataacacgtcaataaagcatatatataaagcatttatagatcaaaccatatgctagca

SEQ ID NO: 68423 - DNA, 453 bp, Oryza sativa
  unsure (1)..(453): unsure at all n locations
tgtatctcttctgccaatgctgacgacacacgaattattgcttacggcataccatagcacatgtccacgatatcatagcatggattaatgttcatacatgtgacagactttcttgctaccttgtcacacaacaaccaagcatccacataatccagagcctcagtttcataaacaaacgcatccatgtcatcattgcgacacttctcagctattgaattaagacgagtagtcatgattattctgctacccagatcattctttggaatggactttctgatgacttcccactcttcccagtgccaaacgtcatcaattataataagataccttcagaagttgaaaaaaagtaaataagcctcaatatattagcactaatacatgcaactatataataatttcgaagatatgagtccacccacatgagaagcttcctctttgagatgatncgaaaac

SEQ ID NO: 68424 - DNA, 458 bp, Oryza sativa
ctataaaactcagcttgttataattaagatcttgtctgtatcctgtcttgttttggattatcatatgacgaccggttatctggttttagtgactatatggtggtgctccaaaaggcccccagctaatagatttggatagaggggtcgatgtcgttgttgctacaccatgaaggttgaatgacatcctaaaaatgcgaaagataagccttaagcaagtgtcgtaccttgttctagatgaagctgaccgtattgttggacatgggatttgaaccacaaattctgaagatagtgaaagaaattcctcctcgtcggcaaaccctcatgtacactgctacttggcctaaagaagtccgacgaattgcagaggatcttcttgttcaccctgtccatgtgaccattggaagtgttgatgagcttgttgtaatagtgctattactcaagtttgttccttaactgat

SEQ ID NO: 68425 - DNA, 427 bp, Oryza sativa
agcttcgactgtgtgcatcaaaatttattcatttatcctgagcgcgcagctgtatcacctttaattacctacagtaattgactaaatataataaaagcttcaattatcttaaaaaataattaagcaagctatctcgctctctgcattgtgctacatagctaggtgaaatcaatcataagtaaattatatcagcattttaggctcaaatcaacaattaaagtacggctacactttaattactcaatcagaaaagaaccgagatctgtctagctttgtcgtggtattggtgaactaattattaatatgaattatatatcggcatgtcatctcctgccatctttgacactttagctagcgcgttcgaacatatgctccttgaatgcagccatattgctcatgcatgtacctgcattggcgtgggtctcta

SEQ ID NO: 68426 - DNA, 452 bp, Oryza sativa
tcttctcaagattccaatcttggactgctgcttttattatagtcttgttagtcttttcagtaccatattcatagcttgcatttcttatattcgagaaggacttccagttggacagaatactgacatagtgctcagcttcaagggcctcatctccagaaaattggaatcttatgatctttctattcaacttccactccttgtcaataaaatgtacagtgaaacagaggaattgtttacattcaggggcccaccttgttacggataagaaaactcctccaggtttaagtgctatttcctcttttagcttcatcttttcattctgaaaaatgctgaggaacttctcttcaattgcagcctgtggcacaatattatatgtatgacagatgccagcaaaaaacttccttacaattgcactggttgtcactgaaaacgggcaaaggttggagactaaa

SEQ ID NO: 68427 - DNA, 409 bp, Oryza sativa
  unsure (1)..(409): unsure at all n locations
ctgcagctatagggcaagctcctggcatttttatcagcgaagacgataaatgatgaagcctcatggcgaagagcgtgcatcctgcgcgaaggtcgataggcgaagagtatacgccgaaggaggatgacttcgccatatcgaggccagctccgggaaggcccaaggggccatcccagccgcttcggcccgttggccattgggccagcgatcgccaatttggcctattagaggcccatgcaccttaattacactatatacccatgtaaatgtccctttcataagggcaactatataaattcccctgtaaaacctaaacccaaatagaggggcctgtaatagggttataaatagacccctanggccatgtaaaggggggattttggaagaaaaattctcagtttaatacatt

SEQ ID NO: 68428 - DNA, 453 bp, Oryza sativa
tctttaaaatatcaaataaatctattttacaagtttgtttattttaaacctcaattaatcctacactaatgattttctcgttttgcataccgacacttctctattattataaaaattgaagatgttttcaccgaaattttggtacgtcatccgtggttgagttggttatatgtcctccgtatccaattcaacatgagtttagaataaatattatacatcactatcacaacccaactcaaccgttccacaccatcccatcacccatgtcgctgcctctactcggcgccgtgtgtgcctctcccccgattggcttcttttttttttggcttccttttctttgtttttttctccttttcttttctcctgataatccttatactcgccctctccttgcaatttcctctcttttctctttttccctcctttctctcttccaaatttcactcataaata

SEQ ID NO: 68429 - DNA, 417 bp, Oryza sativa
  unsure (1)..(417): unsure at all n locations
agctggggggaaacngttactattttatttattttagcatacacgttatatatgtaataatttattatcgtggttgaaatacagctctggaatctgaaagaataagtttgtgtaaaattagttgccgtatgttatatgctagttatgactaaagaatcacgtgtccaatcagatgatggaagcattatatctcaaactgctgcagtcatgttctaagataatactttctattgaaatgtcattggatcttgataattactgtgacatcagggtaagcatcaagacaggatggctggtggaaaagaagaatacaatgcgttcttctactctcttgtatcgactgacactcaggtgagtctcaccactgtgtctcttttggcatatcaatattctttgtttgtgaaaatcaccaacaat

SEQ ID NO: 68430 - DNA, 450 bp, Oryza sativa
  unsure (1)..(450): unsure at all n locations
tgattctagtatntgattgtcttagtgctatattgtgtttaaggttgatcactatctttgtgaatgacacctacgttaggtagtatttgattgcacttagaaaaagtgcaggatataaggtagctctaatcttcttatagtgttgttgtttttgttatgtctgtgtctaggcaaagcatttgagtgttcacttatggtcgcaatagagcaagtgtagtgtggcggaggtaccgatagaacaggatataccttcagttgatttgtgcaaaactgatgatttgataaaataatatttgccccaacacaaggagcaaagttgggaactatttttcaatatagtatattttttctttggtaaatcccatgtacatgccctctgtagcagaaaactacgggttcacaaatttcacataactacatggagcttgatagtactattaagtattaaca

SEQ ID NO: 68431 - DNA, 420 bp, Oryza sativa
agctgggataaacatcttgtctctattctcttagcgacatcagtatttatagtgatgactttttcgggaccaccggtcgcgtatatactctcaagctcgacgccaccaccgatgtcattcgagctttcgctaaagacccttcatggctaccatcgatcatactcgagcttggcactactaccgacaccgtcattttatgttcaccctaaccaatgccgtgcctattccccactacaagtaccatatttacctccaccgacgaggctgaatggcagggcgggcggagactatatggaaacgggtgtaccaacaccggcgcacggactgcgaggccgtggaccatttgcgacgcccacacacatcttatgcaccatcaccggttgcattagagaacgtgatacgaagtcgacgactacgact

SEQ ID NO: 68432 - DNA, 455 bp, Oryza sativa
  unsure (1)..(455): unsure at all n locations
tcctctgaactgatataccgngctgttgtaaatgatgatattacttacatgccatcatgattgcaatgtttactgttgctgatatatgattaacatgcatattcaccttttctcattatctattacaattgtgaaagccttgaatcatgtggatagctgattggccatgtttgcatttgaaaagcactagtcatggggcagcaaataattgacatgtgaaagttgttaacatgtgttaagtaacagccgacaatttctctttgtttttttaaatgcgccatcttacagttccttcttattcagattcctacaaatatgaatggcctgattgaatatatagcacatcctttctggttacaaaaatactgtccatcacatgaggtggacggtactccaagatgctgtagttgtgaaagaatggaggtacgttcaattaccatgtttgaatttataaa

SEQ ID NO: 68433 - DNA, 454 bp, Oryza sativa
  unsure (1)..(454): unsure at all n locations
agtcacctgcacgctgcaagcttgcgttgccggcggcggtgtcgtcttatttttgttnaagtagtaggagaaccgttttagttgtatctgcgaaatgagggatagtctccccctgtttatgccgatcacgccgaagtatgtttctggttcgaggccacacccgaaaatcatattgactggcatcgtgttgtcacctaacgtgaacggttggaggccgaggtgtcctttcgtttccgttccgcccgcaccaccgtacctgcaggtgtatttgcatgggccattatacggtgcgccgcagtccggctgcccgactattgtccggcaacgctgttcttcgcatgagttaagctcccggtgcactgtcttgaaacgcccgttttgtctctgggcaggagtatgggcttacgcactcctctcatggtcccacacgaactgactggagatgtcgaatgcg

SEQ ID NO: 68434 - DNA, 446 bp, Oryza sativa
  unsure (1)..(446): unsure at all n locations
tactcagctttgaaaatccactaaaatcttttagcatatttcgttatgtatatctcaagagaaattccacatgccaatttcgattattatttgcattaatttattagggtttcactcttgctttcacaccgggtttttctcgaggtgatttataaattcaatttaggcttgggaaaagaacttcagggtgtgacactcagccttctcttggaggtactctgccatctttttgcagaaaggtgtttgtgtgttagacatttgttgcaacgctatggcccgcctcgtcctcatccacatcgntgtcctgtgcataatgccttctacaatagcagttagaggtaaaggccttaatttgcgaagaaccgcattgtacgcctctgcaagattagtggtcattatgccatgcctagccccattagtgtcatgcaagagtgcccacttatcat

SEQ ID NO: 68435 - DNA, 259 bp, Oryza sativa
cgggaaacgaaaaagaaaagatatttttttttgcccacgaacagggagggagaggaaaggaaacaaaagccacacaaaaagggaagcaacaggaagaaaaggtaaggaaagagaaagaggagaagcagagggaggaaaaaagaaaagaaaagaaaggaaagggaacgcaagggaagggaaaggaaagaagagagatgaggagaaggaaaaaaagagaaaggagggaaggggaaaggaaaggaaggaaacagagcgaaga

SEQ ID NO: 68436 - DNA, 435 bp, Oryza sativa
agctgggcttgagaacatctcttcaatttcttttactatgccttacgtcttcctatcttcaaactcacatgcatgtaggcccatagtaataagctccagacttcttcaaaaagggaaactctgtaaagaaccaaccttttctgaatgttatgtttttgcattcatgtattcacctagatcaagtaacccttggattcatatatttgatatttattttatgttattatttctttcaggaagacttctgcgtggtgcacaacccgaattgatggacactctaatccagtattcgaaggatggcgatgataacaggttacttgcattaatgagtgaaaatacattcttgatggaagatgaggaaatagaggacttgccttgcaatgaagaagaggtgcatcttatttcttgtgcctcaactttagacctggttatttt

SEQ ID NO: 68437 - DNA, 456 bp, Oryza sativa
  unsure (1)..(456): unsure at all n locations
actaagcttatactttgtccgtttgagataagattatctgggggtggttctttgtgctcctggntgggaaaaaaatatcaaaaaaataaaaaaaaagttgtgtctctctcctcagcactagagagagcaagccaaaaaaaaaaaaaagagaggatccagcgagcacaccccaccattccccctttgtcaccaccttccaccaccggttcttgttttcgttgctgattgggttttgagttttgtggcggcctttgtggttaggctcgcgtctctacttcgactagcctaggaccagcactgtacactatacccttgagcgattattcaatttgctttgactaacgtggtttctagttntctcttgagcattgctttcagcccaccaacagctccaccacaaacccgactacagcttgacaggtcttgttgctacagcaccgatacacctcgctccac

SEQ ID NO: 68438 - DNA, 399 bp, Oryza sativa
catgcagcttcataaaacgtatccaattgttttcttttgcccacaggcagagttttattctttcacatcaaaaacaacaaaaactagcgcaaacatgttatagcgtattcggaattgtaaccaagccccccccatgggttctataccccgattcataactagaaagcttttctggtccttcacgaaccggagctaaaagtgctgaaattcacaatgcttaaataggaataaagcttgctattaatataaatgcccaaaaaatatcatattcgtgaagcagaaacataaatgtacttccattaatgtggaataggcggaactgaattagtcaattcaagtcagcattgtcaagttatacagaattactttcttttccttcgtgaaacaaagatcggtttt

SEQ ID NO: 68439 - DNA, 453 bp, Oryza sativa
  unsure (1)..(453): unsure at all n locations
gatactaagctgatcaccattacaagtatcctaatggggagggnttgtcttttgatgcagaaatagtgcttcaggatccattacgcgttcaaagcctcttgttcttcttcgcatccgttattttggcacaagtatttttggctctcaaaaagaaacaagttgaaaaggtccaattgtacgaaatgaatttctacgtcccgggatttcttaccatcaaagtggtaaaaagccgcgaattattggcgattgctagaattctctatgatccatcttggaaatctcttttttgtttagactactttttgtttgcgagatgtcttgtctgcaattccttatntctatcatctcatgcaaaacgaggagaatgcaaggcaagggcgagaacaataaaaggaacaaatccttttatgagggattgctggtcttcataatcctctatagagcacaagaaaa

SEQ ID NO: 68440 - DNA, 380 bp, Oryza sativa
ttattatctcacaactacatataatgggtgacacaaagcattgtacgaacctagtatgttgccactattataagtgaatcatttgtttatagagaatgtctgcatttctcaaccttttgactacgtaaagaattacctctcaatatatactgttctttagtttcacgatatttgacatcaatagaattgtactttgaagtactttcgtatgatgttaatctggtagttgttgataatatatcatgtaagaaattaacgcccaaacttttacattatggactgggtaaaaaccttgtagaccttatattttgaggtggaggggtattgaactactcccgatatattaaatgttggcttgttgatctatgaattgataagca

SEQ ID NO: 68441 - DNA, 335 bp, Oryza sativa
cacgcatgcaagcttggaccaatctctgatagtatcatttattgatcacctgagaccacctttattgtgcataacaaagcctacaaatgacggtaccatcaatgataaatcggaatttgggaggaaaactaaaaatggttgtgagttataacaaacatgagttacttattatatatctccacaataactgaggtgtgtacactacagcacatgacgtcttccagatcaaagttaattgttgctacccctcccccctccccaattgaattcctcatagaaatcaaactttgatgattctatttgaataaccggtcacaacttatgtgatcccaccg

SEQ ID NO: 68442 - DNA, 427 bp, Oryza sativa
agctggccacatcagccaagctgtttctttttctccccaacacattaatgcatggttgctcaatcggaactgcttgcatcgccacctctctcatatgggagagaaaacccacacgggatccctctctgccacaagcctcgtgaaagcaatatcagggtcatagaccacctgtcctccaccacatggaaatcctctcagtctaacggtagtccccttacatccctcagtgcttcccacgatcgaagtttgaaagcaaactagccattagaggggaaggagcaccaagaagagggaggcagcctagctggccaaaagaggactagctcgctgtcatccatgccgccaaccgtactgatgaccgtcatgtccaactgatcgagccaccaagcgaatcgatagcctacaagtaacaccgtaggccatgagc

SEQ ID NO: 68443 - DNA, 468 bp, Oryza sativa
gacactataaaactcagcttctaacagaactgctaaagttcataaatctttatgtttttttctgtgcacaattcatttgtttcgagcacgctgatgatttgggtttgcgtttttatgtgacggatgcctgttgaactgtcctgttttgtgtttttgtcaagttctgtgtcgaatctatgcgttcattcgcgctcaagctacatcggtattgtcatgcgcatatcatatgtcaagcggtaccaatttggtattttttttccggtagcttcatgtactatgctgtcagaattttgcgaacggtctaatgtaacagaagatacatctaaacgaaatttaacatttgtcacaactcacttttgcaatggctaggagtagagtttacatcgacctgaactcgtaggctctgtttggcaaatgggatgaggagtgtgggaaatggatgttatttccattcttcatatttctact

SEQ ID NO: 68444 - DNA, 430 bp, Oryza sativa
agctttatattgtactactatattatatattcttgacattttatccattgatacatcatacatgagcacacacaatctttgttgattatttcgtcctacagtacgtttgattaagcctagagctaagcaacaagcccaaagtagacatgctattaatgaacgtgataagacaacagaaccgtcctatatatagtctccgatggtaaaacgagaaaatgaatcatcagacggatatcataaccatcaacatcaaggacttgttcagattatagccaaaataaaccttatcaattttagcaataccaaaattttggtaagatgacaatattatcaaaatttctgtagaatttcttacgcatttatcaaatttgacaaccaactaaactgatatattttcttgacaactctatcaaaaataatataggtgaaa

SEQ ID NO: 68445 - DNA, 223 bp, Oryza sativa
gcgcggacaaatcaaggacacgagacgcggcgcacgagaccggcgccaaactggcaggcaccccacagcaagcccagacggggacacccaccgccagaggaacgaggccaggcacagcgggagcaaggcccaacgcgcgcgggaactacaacacagaggccacccgacgcgcaacggaccaggacaaggcgcgccacagcagcgccacgaccggacgaggagg

SEQ ID NO: 68446 - DNA, 428 bp, Oryza sativa
  unsure (1)..(428): unsure at all n locations
agctntactaagtggcactattttactttcttaaatagtcaatatttttatttattgataagatacaccatctggttactaatctgtcatttctggtttcttcgtcatgggcaaatattatggtctgtttggtttgatgtccactaccaaaactttggcgggtagagttgaaaaggtacaagataaagccaataatgtcctataagaaacaatttgtgtgcaacctcaattttttttataaagtataaatnttagtagggtagcaaaccaagctatagccccctttatttgttccctctcataatatgctaattctcctcctctgcgctctttacatgcaggcaaggttaatcgaggaatcaagattgccgcacgtaatgctgatttcaattaaacatttaccaagatangctagtatggtaatccct

SEQ ID NO: 68447 - DNA, 452 bp, Oryza sativa
  unsure (1)..(452): unsure at all n locations
tccanagttgaccgggacagcacacggcttgagtctatttagtctcgaatgcagaaagntctgctagactgacgaaaccacacgctaagtccctaacctgtcggtgttaaacattcgatcaattgtagtttggaacaaaaatagttttatctgatacaaaatcctaactaaaatagtgagtatatttcacaggaaatgattatacagtattccagggagtgaagaatccttctaataatgttacgcaataggaagaaaaaaaataaaacatcgtggtgtgtcatcagatccaatgacaacaatgatcaagatgattatctacaagacttcactcatgttggaaatattaagaatctcanaagctcaataacgaagaagcattaacgaacaagagacgggatgttttcttatagaagaatcattaatacataggacgtgtaaattttctaatt

SEQ ID NO: 68448 - DNA, 87 bp, Oryza sativa
ttaactcacctgcggcatgcagcttggagaagacgtcttggttgagtctggcttataccccagtatttcgcctggtgagatggagcc

SEQ ID NO: 68449 - DNA, 445 bp, Oryza sativa
  unsure (1)..(445): unsure at all n locations
gactnggtgtgaggaggctgngttagcgatgtctgctctgctaaaccaagggaaggggcttctttgacatatacccatggacaattcagggcatagtgtccttgctctctgcaatcgtgacaaaaggggacatcctcttctggcattggaagctcattgacctgtgtggcaaatgctcgatcaaacacatactgattttggtcttgacttccaactaatggtagctgtgaactaagcagcatgcttggaatggaccaagggtgtgccctggttaactctcttgaggccagtggtagattgagttgaaaacttgagttacttgaggcatacccgctgacattctttcctttttctctgttaaacatctgttaccgggattcangtgagagaggaaacaagccatgatagaatagaccacaactagagataggaccttaaaggaact

SEQ ID NO: 68450 - DNA, 413 bp, Oryza sativa
gcttgaatctccacacggtgtttttttctctagcgatatcagtacacatagtgatgactttgtcgtgaccaccgtcggcgtatatactctcaagctcgacgccaccaccgatgtcattcgtgctttcgctaatgaccctctatggctaccacgaacatactcgagcttggcactactaccgacaccgtcatcttattctcaccctaaccaatgccatgctagtccccactacaagtaccatctttacctccaccgacgaggctgaatggcaaggcgggcggagtctatatggagacggcgtcaccaacaccggcgcacggactgacgaggccgtggaccattgtcgacgcccacacacatctataccaccatcaccgttatgcatgggagatcgtgaagcgaaaaacgaccac

SEQ ID NO: 68451 - DNA, 417 bp, Oryza sativa
  unsure (1)..(417): unsure at all n locations
acacaaaaaccaactgaacaaaancaagaaacatacctatacttttctatgtcaagggctagccatactttaactgcgcttgcatcgcaccaaatcatggatttaccccttcacagaaagccatcctatacttcgcatgatgtgcctgagtctacctcatttgctccttgacaatacaccctctcacactctataaagcgaccatagtaatactggcatggctacatcaatatgcaactaagcttcaactcaaaagatacctgatttagcaccaggactcctacaggcaaatggccaaataataggctgtcacagacaatcgcgtatgtgtcatgtggacaccattcaaacataatgaaagtggagataccaggaccacaatcataagaatgccactaaaggaaaacatcgctccta

SEQ ID NO: 68452 - DNA, 420 bp, Oryza sativa
agcttgaacccaagtcctacagggatggttataatcgcattgaaactcctggggagttatacatttgtgtattgataagaccgttcacaatttcttgaagctcgatctcccccccagatgaaccatatagccaagagaaaccatgaaccagaatagaagagcttgccccacccatgagtaaatatttcatagtagcctcattagaccgtagatctctcttggtatatccagacaataggtaggaacataaactgaaacattctggagctacaaagatagttattaaatcgttagcaccacataaaaacattccccctagagtagctgttaatacgaataacagaaactctgttatagccatttctgtacattcaatgtactctacggatagaggaatacataaagttgaacataatataa

SEQ ID NO: 68453 - DNA, 451 bp, Oryza sativa
attaatactatggccgtgatctgtcattacgtgcgactatctccactattgaaagaaaaataagaaaggatcaaattttctagtatttactagaaaagggggctttctacatagggatcgtcaaaacaacgattttgccctatcagctgtaggaagaaaggacacttcacgagaatcaaaataggaagaaagaaagtatggcctatactactctatggatagagttctcaaattgatagagaaagcaccgtaaagatcaattagtgaccgactgggtcgatacaactaaaaaaaactgcttacttatcccatgatatggggcaaaatttaggaatccgcttatgtaatagagccgatccactaagggattaagcagcggtgtagtatcagatcccaaagatagtaagttcttttttctgcttatggcgaaaagtcttttctaggattctat

SEQ ID NO: 68454 - DNA, 390 bp, Oryza sativa
atttaccccaaaaatttctgtgtcatttccagagtttggacaagacaatccatagtgaaaacaagattgccacagcacgtcgagcaaaagcaggcttactgccacaaagagggttggattgcacctgctctttactttttcttcaaaacaaagctgaggctagctgattaaacatttcaaataagagtgttcatatttggtctagctttacagggtcaccattcactccatatcctagcagcaagatatgaactgttaagtatgggtagctatggatggatccagacacagcaaggatctgaagtactttcagcgttttcatgtacaatgttctcagctatacagcaatgtattgcagaattcacgcatcgatcatttgggatatggact

SEQ ID NO: 68455 - DNA, 434 bp, Oryza sativa
acagcttccttaaatgtgtttggagtgccgtctagttcttaatatctgagcttgatcgatcgttagtttcaaatcagcaactcgatcaaaagcaggtacatgctgcaatcaaccttattatcaccgacaagaaccatacgcgtcggtttcgttagccaacggcctggggataatgcattttgcatttactccctccgtcccacagaattagggattataagtttttgtttgtaacgtgtgaccattcgtgttattcaattttttaaaaaatattaaaaataaaaagttgtgcttaaaatactgtagataataaagtaagtcacaaataaaataaataataatttcaaataaaattaaataagacgagtgggcaaatgttgtaaggtaaaacttaaaatttcatatattatgggacggagggagtacgtacctaa

SEQ ID NO: 68456 - DNA, 454 bp, Oryza sativa
  unsure (1)..(454): unsure at all n locations
tgtgtagtgtcagctctcctgttcttaattatatgtgtcttatcacatacnagaatatctggcccacactgattgtgacatatgtaaatggactgtatcaaaacccacatctaaaagaacaaggttggaagaaaacatacatacagtataatgatgcatagctcatgccagatgaacatctatgattgttatattaccacataaaggggaatggtgattgaaacattagtatatccatggaaaggaagggtataagatatggatgaaaaaggaaaatgcctatgacttgacataacataaaagcttgaaatataacagaataacaacaggacaaatggaacatcacctgcaaagcattggtgatctcgtttgcaacagttatgtccctcgcactccttccaagggaaaggtttctaaatgatgaataaccaatcagaagcacgccaccttttat

SEQ ID NO: 68457 - DNA, 286 bp, Oryza sativa
  unsure (1)..(286): unsure at all n locations
tctaaaaaagaaaacaacagggggnttgaactgagaccggaaaccaaaacgaagacaactagcgcgggaagaacagttaggaaaaaaacaaacaatgtttattaccggggggcagggcaacccccacaacacaaaggagaacaacaaggaagttaccgactaagaaggaaacgaccgggcgttcccccgaagggggaccggtaactccgaagacgggaaaagcgacccggaaaaagaaggaggggggatcggacccatgaaaagataaaatgccttggggaaaagc

SEQ ID NO: 68458 - DNA, 463 bp, Oryza sativa
  unsure (1)..(463): unsure at all n locations
ccttagaaactaagcttaggttcttgcctacgggtcgaagttctccccagaatagttctcactggcgcagggntctcaaggctggagagcttctgtgttgattgccgtgtgccacgactgagctttcagagtgaagccatgccggtgttgaaacatcttcagttcaagttctatgctttccgggcaaccaaacaagagcctatgggcatcgtgcacctctcgagtctccgaagtgtcgatttcaggtgtgcctccgggtacacaacggatgctccgggcatccgtgagattatcaatcatgtgaggaaagaagccaaggagcaccgcaaccgtatcaccctttgcatcaacacgaaagagatcgtccatgacattgtggctggtagcactggtacagctggtaacagtgcggtaagtgtgactgataagaaacctgagcctaccggtnatgaggacattattg

SEQ ID NO: 68459 - DNA, 464 bp, Oryza sativa
aatactcaagctgaaagggatcgatgattccatagcttctctatgtttgatattaactctaatgggtgaaggaaatgaaacgatacaaattaaagatataagaaaaagactaaacgaacctatttagtatattcacagttgctctatttacttggagcgactccttttattcctcttacctctaagattcactttggatagcattttaaatactctcatgagacatgggttaccacttggaccacataatctcatgaaacatgtgttatcagttggaccacataaaatttgtcatcttctgttcctttttactgacaacactttccacatccatgcaatcaaagagataaacactatctcttcattttgtgcctagtaaatcaatgaagtcatttgtacctacattaaaagctatacccccattgatgacctaacatgtgtacactttcataagaagacacatg

SEQ ID NO: 68460 - DNA, 435 bp, Oryza sativa
  unsure (1)..(435): unsure at all n locations
agctntcagctcgccgcggggctctaattttttatttaattagagcaaatttcacaaaattataaatactttgatcaaatcattataaaaacaatagatttaagatggcgtatcttgaaactacatatatgaaaataaatttatcataaaactacaagtaagtttaaggttaagcatggctaaaaagcgaattttctgtacgtggacctatttagattacagacggaccataattggttgcgcccgggaaaataagttcattttcgcgtgtacggtcctcttaaacgaaccacacgtggaaaggagattatttttacatgcggacctattaagagagccacacacaaaaatacccactctctctccctctctctccatgctactcactttaaatattcacatctttctctcctctcgactctcgtctcttctctc

SEQ ID NO: 68461 - DNA, 451 bp, Oryza sativa
  unsure (1)..(451): unsure at all n locations
ttgacgatacatgcattacanatgtgcagcggtttcttgccatcttattcaccgcgagtgatgtcatatcaaagttatgttaaaacgacaaccgcatacgtcgaaagacgtggttactcaacagtggttgaaacagaagtaaagtgtattaatttgagaatttttacttgggatccccccattacatggccctataaggactatttatagcccctattataggttcttactactagggttttggttatacaggggaatttacatggttacccttatgaaagggacatttacatgggtatatagtgtaatagaggtttatggactcctgatgggccgttaggcgatcgccggcccaatggcctctaggcttgatgggccggaaaaggcttctctggccctcgcgggggcgcgcttgctttggcgaagtcgtctcccttcggcatgtactctt

SEQ ID NO: 68462 - DNA, 401 bp, Oryza sativa
  unsure (1)..(401): unsure at all n locations
agctttgcattctggaaggagtttctnnatantttctccatccaacgaggcatattatgttcagtataaacccatgacgcattgtgaatggcctcatggcactgtgctctgtgcaagcatgcactaattgaaaaagaattctgcaccattactcgggatctgaaacagatggacgcacgatcttcagagatagcagggaccctccttttctgttaactaagacccgatgcttctgactgtcaccaccaaagaactgaaactttcctctgtaaggagtggttacagaatgatatgattcttctccaccaccaagattccaagaagatcaccggtgcctccaggacatagaaactaaagaaggcgcattcaccagacgcaaacacaggacgcaaatgatgctc

SEQ ID NO: 68463 - DNA, 430 bp, Oryza sativa
  unsure (1)..(430): unsure at all n locations
agctngaacctttgctcgtcccttttgtttatctaacgaaacacagacagtgttttttgatcaagagctgctactatgctatatatctctgcaaggtatatgtactctctctcagattaaataatctttggcgcgggggcttacccttaccctgattcccacgatacactgcttttccttgccttgagcggtttgaaagatagaacagtaattatagcaccagtcacccaatctttattcaactcttattccagaagttttcacatgattttgcataagaaagctaagttcctcaaatgattcactcagtctctctaagtgtatcaaaatgaattcctcaccaattgttgcctttctgatgcctactctaaggttttaatatgtagagctcggttgggatcacacatggcatacttgcattctcatttat

SEQ ID NO: 68464 - DNA, 357 bp, Oryza sativa
actactggctctcatatgaaacacctgggggcacaatatctgacacttccaggaatctaggtggccacgatacgataggcgccgcttcaattgcatgtgaagcgaccaccactcttttcgcgacatacatggggtataagtcagcccacggcttctttaacaagatgcttgacagcattcaacgggcaccaatgccactccttgacaccactccttctgggagaatactaagccgggcatgtctagtgtaggagtagaatagaatttggttcacagcacgtgcacaatcattatccgaactatcgctgctctattttctcacgcatcagcagaccaaacgacaatcgacactgccct

SEQ ID NO: 68465 - DNA, 413 bp, Oryza sativa
  unsure (1)..(413): unsure at all n locations
ttaagtcacctgcagctgcagcttcgagtgaccaagattttgtttcttcacacggncctagtgaagttatcactgaacgtgttgcagaagctgacaagcattgaaggggaaatcagcaaagcactgcggtacaagatatataagcatcccttcttgttaaaaaacctcgcacatatcttgggagacaacatcagagaccaataattataaaagctcgcaggaggaatcctcagaaacatttccattgatggtaacacaaggcaggagattgggaacatgaatgtgctcataaccagactgatgaaggcgttcctcgacttacatagaacctccaacacagatgttgatttcttgctaccataagtcgccgggcaagcactagcaatgctagcaatggataatgtcacaactgc

SEQ ID NO: 68466 - DNA, 453 bp, Oryza sativa
  unsure (1)..(453): unsure at all n locations
tccttatcaccgagntgacgtacgagctcaactgttattgtctgaatccggccatggtcagcctcgactttcacttgccaagcagctcatgcctctccaccctgtccttcccctcgcaggcgatgatgttgacgatgtccttggcgaggcagtgctgctccacgctgatcctctccttgttgtcccgcggcaggttggcgtcgatcgactcgaacatggcggagtagtactccatggtctccccaaacctcatcaagaaaggcgttgtgttggtgtgtgactcctgctctaccaaagtagtcaccttcggggacagccctttcaccatccggagcagaccatcgcgtgggttgttgacatccacgctctcgtccggtgtgtggtgtagctggagtgtgaagtttacagacagtgcttcacctggcctgatctcagcatctcttcgtgacttgg

SEQ ID NO: 68467 - DNA, 425 bp, Oryza sativa
agcttctgtggccaatggtgcctataattaacagcaacagctcctggactatgctatgtggatcttcctaatacgcaaataatgaaggtaatatcattgccacttaatttctttcaaggtttttgttgctgttggtgctctacttctattaacagtttctgatattatttcgtcaggttactgcaaaccgcctgctgcactccaagcaaaccattcctcactactatctgacagttgatactcgtgttgacaaacttattaagtatggtttcaatcaaaactttgttcaagcaatttagtattttatcaacctgtacccaagaacatattttgtgaacctctggttgattactagatgaaccatttgctcttttttttttttggggggggggaggcctcgtttttgtttcaccatattattctat

SEQ ID NO: 68468 - DNA, 438 bp, Oryza sativa
tcctctctgtaggtgattctggttcctttctttctgttcagccatcacatatgttggtcgatttgcagtggacatattcatcttgggcatagcaaacctcatcggtggacttcccatcatctttcacagcgtaaaaactcaaaatcatatcttgactactagattctcttgaattgaataaatttctaatttatggggtttgaatttagatggctgagctgagaagcattggagatgtggatgagagggaggagcatggcggtcactactggttgcagctggggaggcgatccaagtaccggctgcatgtcgccatggccgtgctgtcctacctcctcttcggcctgctgccgccgctcatctacggcctctccttccgcggcggcgacgtgagggagaagaatatggtggcggtggcagcggcgttgcttgtgtgca

SEQ ID NO: 68469 - DNA, 347 bp, Oryza sativa
  unsure (1)..(347): unsure at all n locations
ctgagcagcaatngacttacacaaggcgatttttttctccacacacacccaagataaatctgaaaaaaaaattaataatataaccgctaagattgacaaaaaaatagcaaaatatatgcgcacgcaagaacttcccccaggaacacaatatgctacacgatgactcttattaaagaccgaaaaccgacagactcaactaactgacaaaccgagagcttggaaagcttagccactcactaaactcagcaactaaatgactcaaaaccatgacctggggttttttaaatcactatccggataagcaaatagcatgtaggtcaaattttccaaaacgccatcatattgaa

SEQ ID NO: 68470 - DNA, 363 bp, Oryza sativa
ttaaacaaaaagggggagctgctagagaaatacgaaaagtgaaaagaccaaaagaacacagcatccaataacaaaagaaagaatcaaactgcctacaagaccagaatccccatggaataaacacgcacaccaggggacagaagaaaacaacaatcgaacaaaacaactacactcggcgcaacaccacaccctctccccagattctacttattaaccggcggaatacggcacctgacgcgggggcagggctgcatcgggtaacacaaaccacgagaaggggaatgaacgcccaaaagataacccaaaatcacaacacttcgcgagaaaacccagcccggaccagccacgaacacaaacgacaag

SEQ ID NO: 68471 - DNA, 402 bp, Oryza sativa
gatactaagcttgctcccaacacaagccaccgataggggatatttatttattttcatctaaagaacaatcggaacccgcatcactcaaagacaagactaacctgcaacaaaaggtttataacagaagagtcagtacattaaacaattaatgtactggcagcacaatcaatcctaccatactacatgtaggcatatattaaaggaagcatatgtattcattttagcataaagcaagttttgttccaattttttgtaaggagtgatgcttattaacaaagacaagttaagttcattattagcttttataattcgcataaacaatctttatgcctactaaaatagcataagatacccatacacaactaaccattataattcaaccagtccatgatcacttttaaa

SEQ ID NO: 68472 - DNA, 461 bp, Oryza sativa
actaagcttataactgggattgaatcttaactgctatccttggtttgcctatcttatttcaatgtaactatgacaattgcttacttgtttataggcaagcctctatttggtacgcttatttcactcctgtacaatgggaagccggtattctaattttctttgtccatgccaagctatctttatttccattgtattgcttcattcttgttcaccactatgtgagcagaatataaggtcccgtttggcacagctctagctcccaactccaacttacctggagctagagttgtgccaaatggtacagattctatagtttttggagcggagttggcaaagatactccacacaattgtactacatggtggggctgggtttgtgctgctccacagctccactccaccccaaaagacccactaccctttaattgtttagtgtatttatgcaaaaataccactgaacta

SEQ ID NO: 68473 - DNA, 373 bp, Oryza sativa
ggacgcccccgcattgcaggatgacaactacccgaaccatgaggataggacatcgcataatatccttgcagatggaatgcggaatagagtctacttatggaatgcatgcagcaacaaggagagccaactgcggccatccatgcgcattcttgtaagggtactcgaagagggtttgcaaagaagtctaaagctgcgcaagtcaccaagctatgtgatttgggggtggatgaccatgactgatcagtgggtagggcacagcgtggcactcaccatgcctgtacggacaaaccaaagcaaagtacaagttagaccgatgctcctctctgaaatgatcagataacacagtcatgatccaccaaaaattggaacgatg

SEQ ID NO: 68474 - DNA, 322 bp, Oryza sativa
  unsure (1)..(322): unsure at all n locations
gcagcagcngaaagagcagcaaattattttctttggacccacaggaaccaacataatgagattcatttacaaatgtaataatgctctcacctatccatgccatgatcatttacatgaggacaggacagtcattcttgaaatgcaccggcttcctgcagcggaaacactgatctttctcaacagggaaccgtaggtgctgaggcaaaggcagagactatttagcttatgaggcgggagacacgcggacctttttcctggtatctataacaaagggaaaggaaccaccatttgactctttgattctctccttctcttgcacaca

SEQ ID NO: 68475 - DNA, 343 bp, Oryza sativa
  unsure (1)..(343): unsure at all n locations
acacctcagatgagacgagtaggcggtgacaactctggttgaccaccacgaacagaagcggccttgaaacgattatgaatgcacagcccacctctcatagagcaagaaagggtcttntttttactatgattcattgagaatatgactcggaggctattcggtgcaccgaatttacaccaaatactatggaaactctcaatgatactacccgaacacgatgaaagtcgcacgtaagcatcactagtgcacatacaagaagtatgcctaattagttgataataaaattgcgcaacgttcagtatcgatttcgaccgccaactagcacaactaataaagagaaaat

SEQ ID NO: 68476 - DNA, 344 bp, Oryza sativa
  unsure (1)..(344): unsure at all n locations
tctgacagtatgctcttcaactctggatacccaagcatcatcacatttgtaccagtgatagagtaacctgagaaatgncacataatgggcagcttctaaccgaccactaagcatgatcaccgcaaatatttcaaattctgatgaaaaatcagaaactgaatctgcatcactagcttctgatggaaatatacggtccccaaaactgcttctgagtaaagaggacgatagatatggcgccatgtcaagagaaaaaggaaactgtaaacagagaacaaccgttcttgacatttcttaactgatgaaagctcaaaccctctaatatgaaaggctgaaaccaatggaag

SEQ ID NO: 68477 - DNA, 252 bp, Oryza sativa
aaacacggactttcaaagcgatcgaagcaaaacgacgcgatcgccatcatcgaatcccgaaatcgattgaaacaaacaacagtgaaaatgatgaatgctggaatgaccgaccgacatgaacggaaattgaaaatgagaaccagtactcagaccgtacgagatccaaacactatatgctgtcctcgaaaccacggctctccgcagatatgacaacagcctcaagagcgggcgaaaagggctgaaagcctgcag

SEQ ID NO: 68478 - DNA, 447 bp, Oryza sativa
  unsure (1)..(447): unsure at all n locations
tcaagaaatgtcacacagtccgcgccatggccagatttacatatcatatggngcatgcgacactttggcgctaatctttataagacaatacacgagtaagagattgaaggacctattcaagaagttatgcaagcagaatcaacaaagaaagtttgatgccatatgggatcaactggatcgtttgaccactacacacacggaagaggttaggaaaaaacctatagttgccagacaggaggaaccggagggacttgaacccattcctaatgaagcaccaaatattactcggcgcaagaagcgtggaagggccacaaagtgcttcacagagtgggtagaatatgagccaacggagaaatggtcattgttgtacgatacagatggatcgaagcatggtgtgacgacaacaaatcttgctgaagcgataactgggtcatgaagaaacacgac

SEQ ID NO: 68479 - DNA, 418 bp, Oryza sativa
  unsure (1)..(418): unsure at all n locations
agcctttgggtcttaatcgtattttanatgntgttttgcggcctttagctgtcttgtacttcaactactgaactgtgttgntttccgctctttgttgactataaatcgctaaattttgtcttttgatcaacttttgtgcagcaaagaaatcgcaaacttccatagaccaaaagctaagtggtatccacatgaaaataaacttactgctatatttcaaggagatgagtgcagtcatgggccaatgactgctattgtgatgactttgggaggaaaaggagtcaaatctctggtcaatgcagaagaaactccactttctgtaagatcagaaactttccaaaagcttggtgcgacatggtcccactgtcattactctcctttaatgtgaacatccttgctatacttatatttacttgcagat

SEQ ID NO: 68480 - DNA, 447 bp, Oryza sativa
  unsure (1)..(447): unsure at all n locations
gaccttaaaactaacttgatgatactaatcttacaaacactctaatgnttttctatgtaatcaacttgtagcagtgtattaacttaagatttcaatagatatttataaaattatggcaggcattagttactgttgtttggttggtatactgaggttgtcaatatttataataattgtatgccttaacttatctacagttttggccaatgaaataaaaccacaatttggctagcaaaaggcaatcacacacgcgcttgtttgagtcatgatggaattggaatctataggatgaattgtgctaccgctctagttatacttatgatatggcaagatgatggaatttgctttaacctaacaaaccttaagtcaccgccataccgctcctttcaagtgatggtagggtattgtggagtatttntcctttccttttttcagcctgctactcca

SEQ ID NO: 68481 - DNA, 384 bp, Oryza sativa
ttctatgctgttgatatacaaatctgatactgtatatgaataatttgttgcaaatatacaaaagtattgacaaagtagtttagcgagctactgggtatgacttactcctatataagaaggaaaatcatgccaaagaggttaaacaatcttgagcctcttgctgttgaatcgaccaagatgcatttaaaacagatgatggaaccgtctaacccaatgaacttaatacaaaataacggatgatgtggtacctaactgtatgatgctaccaaatctctacagaactttgtaacttctgttcatatatatactatcgatattctcaaatactatccacagggttctaaaaggaccattttggcacagcagtttcagtcatctgctgct

SEQ ID NO: 68482 - DNA, 447 bp, Oryza sativa
  unsure (1)..(447): unsure at all n locations
tgtacgcaacaattaaacaaaacgccatccattctcgttacttcactganngagaactactgctactgttccattatgctaataatacgcatgttaagtgcactctattagctaattaactgtgcattacccactcgcagacaacacattttatattctatcgggcgagtaaaacatgccgagtgttgtgtgtgttaccattaattatgtagctaaatacacaggccaacaattttctgcttgtcttcatctggtctttaatttgaccttttgttcatatttcaatataggttcacaacttcacatatacgactgtcgtctgattcgtacgtttaaggtcatgccgggtcctaaaagtcatcatctctagaaggaatatgtttttttaacaaaattaatttgattgttttgttttatgtaattgcttcgctcgataagaaaatatgt

SEQ ID NO: 68483 - DNA, 55 bp, Oryza sativa
  unsure (1)..(55): unsure at all n locations
acctgcggcatgcaagcgcgggtgccaatgagngttctttttcctttancgacga

SEQ ID NO: 68484 - DNA, 329 bp, Oryza sativa
  unsure (1)..(329): unsure at all n locations
tgcagcatgcaagctcngctatccactaactatgagactactccattccgttcgtatcacaacatgtgttgggtgtgtactaaaacaaaacttattaaaacataccacgcacattgaaaaacaataccacatctacagcatataaactacagtcattaagaacatctaatatataataaataaaaatctgcaatggagaagaaaaaccgttgaactattctattgtgattgacaaacaaagagaaatgagccttagaacaaaaccatgacgccataaaaaacatataacaaaccgaggacggactaaataaacattattaactaatata

SEQ ID NO: 68485 - DNA, 418 bp, Oryza sativa
  unsure (1)..(418): unsure at all n locations
atttcattctttgaaaagctgcccgggcataaatacttaaaaacttcttaagccaaatagcatcagcgaaataggacataggaacctttgcaaaggcgcaatgagggaaagagaactacaaaatccttgcagaaggaatcattgtacaaggacatctctgttaaactcctgcatactgctgcttgagcttctaaattctacacatggagatgcaacatttaactgcggttgtcgccttttgtgttttttaatctagctgatattgaaaaccagccttaagttntatgtagatctggacctttgttttattattactagcactctgtatcatttaactgcgcaggcacgaagcttggttcagattctattaatcttactgcaggtgtgtgagaattgatccccatggccatgaaacggt

SEQ ID NO: 68486 - DNA, 108 bp, Oryza sativa
aaagaaaccaaaaacgaaagggaggaggaagaaggaaggaagaaaaaggagcaaggacagcggggaggaacaacggacgaagagaagaggcgaaaggggaaggcgaaa

SEQ ID NO: 68487 - DNA, 377 bp, Oryza sativa
  unsure (1)..(377): unsure at all n locations
tgcccacgccaagtaaaatcgacttgtgcctctttggattgctacatcacanataattctaataggtctatgagaggacaatgaagaaggaggcagagctgccagcagtagaggaaatgaaggcagagcttgcacaagttcgcctcgacaatcagaaaatgggtgcagcaaagcaggaactcatggggcaagtccaagggttcaaccaggactaggctcgatcagcagtggacctgcagcaaggtgcagcgttaaaagctgagatccacgagataaggcatgaaacacaacacttgagggagaaccttgttaaattcatatgcaccttcaaggctctgaaagagaacgatgtgtatatatagtcttcttgcagaaaa

SEQ ID NO: 68488 - DNA, 207 bp, Oryza sativa
gaaggaaccagcaaaaagacaccaggaagacaaagcaaggcaggcagcacgaaaaaaaaaagaggaaaagcaccagaacagcgacgaacaaggaccaaaggcacaaagaagcaacaaagcaaaaaaagaagagaacccgacaaaggggccgagaccaaaagacgaaggggaaaagggaacaagagacaaaaaaagaaaaagacgcac

SEQ ID NO: 68489 - DNA, 236 bp, Oryza sativa
ataaatggctttgtctacccccccccttgaatttttgtgagtgcttgcagaataggactctaatggctataataagcgttaataaaaattaggctttttttgggttatattataacttgtcaaatatggctttttccgcccattcagggaaaattgttattaagcgaacctcacctaaaattctgctctatatcttaagaaatcctaattattatgatcagtataaaataattttc

SEQ ID NO: 68490 - DNA, 401 bp, Oryza sativa
  unsure (1)..(401): unsure at all n locations
agcttgcagctgagaagggagtttgttttttggtgacattcctgaggcaggctttatgtgatgtgttacaagtatctatgggacaatttgatcagtgagaaattcccagcagagaatattcttccctatttcgacctgtaccccgggtacttgttatcagacgatatcaagcaatacattaatagtgttggggctcaatgcaaaggtgccaattccatgccttaaattatctacactttgaattggttgctggtactgtacaggcactctgatntgaattaccagctgtttatgggaaatcattccatctcatgagcagtattaggctaatatactatactgaacattccgccaggggatgcttaaaataggatgctcatgctactttttgacaaagtatt

SEQ ID NO: 68491 - DNA, 411 bp, Oryza sativa
acctgcggcatgcagctggaattaaaaaccagttgtgtgttgttttatcacatcaaacacagattctcaaatcaaattgttccccaaaactaggcatataatattattgctacaagcttggaatctgaaaacctgtgggtagtggcgattcccacatcaaacacagtttctcaaatcaaattggtcctatgtgtgtgaatttcacataaatacaaatacatgattacaactatcaagtgatatactttcaagaacccaatttacagaactataaacactattattatattcttatatacacataaacaaactaccagcccagtcataaccaacatcttcattttcattgattatgagagcatttcgagtctttacaagcttctccctgaaaggacatattaaccaaaagca

SEQ ID NO: 68492 - DNA, 463 bp, Oryza sativa
  unsure (1)..(463): unsure at all n locations
gacacatnaaactaagcttgccatgtttgaatggaataagtagtatatattacgtttatttgtaaccatgccattataagtttgtaatatttaagatatgtcatcctgacccacatgtcattggctcatatgggtcctacatgtcattgagataccgatggcatatatcaaactttgcaaaataaacactattaaaccgctttagaccggaggttcaaccggtcagaccgatgaaccattgaaccaagggatttactggttcaattactggtctgatctcaataactatggttcccagttccctagcacacgctcaaaatagacggagacccgtttgacgagcaacatgattgcacatactttttgctatcatgtttccagttccctaacacacgctcaaaatagatggagaccacatttgactatcaacattgaatcaaatcctgttagggtctttggcttc

SEQ ID NO: 68493 - DNA, 452 bp, Oryza sativa
cggatccttaagtcacctgagctgcagcttgacatttactctctttgttttcttgtctctcaccgcctgctgtttatatgtcttctcattattctccatgtcttccactcatgatatcatgcatgtcatgtactgatgtgcatattttcccccaaataaaacatgaacatttcaaagtttacacaaggttttgctagcttccacttatgtttagtaattagtacaatttgaaagtttccttggcgcagcataagtcaattgaagttcgctgtcagcaagcttttactccatatcgatttcagtcaatttatatcttccatgtattatggtagaaaagaatagtatccatataacttgctcctgtaagttcataaccaataactcttgctaatgacattatgaaaggttgttgttaactgtatatgacaaatttgcggtcacagtttgttgtc

SEQ ID NO: 68494 - DNA, 431 bp, Oryza sativa
  unsure (1)..(431): unsure at all n locations
tacagatacatacgacaacagcacacactattagtacttctgtttgcagacaagcaatcgtgcaactcatccgaaatatcaaanaccgagntacattgttatacatctctcagttacatcatgcatcgccgcgcagagttgctaaaaagatcgcttccttttcatctctgttccttgcacatgcaagccatcatagcaacagttatatatgttcaaggaggtatacagtcgagccctatgttgtcttcttgtttatagagctatgcctgaccaagctagcaatcgtcaacttgtgtgattcatcgtggcaccctcattattgcagcagtccacttctcttcccccaagccatggctactatgtacataaccgtgcagccagcaatggttcccacagtggttctccaaaatttcatgttngatgctcgtttc

SEQ ID NO: 68495 - DNA, 371 bp, Oryza sativa
  unsure (1)..(371): unsure at all n locations
ttgctctctggcctgagctatttttacaacatgaagttcttatggatgaaatcatgcaggctaaccatgaggggttgtagagatgtagctcagcaaatgcctgacttggtggttgaagtgatgaaggatcatcttgatgatgaaggggagatggagactgttgataaactgtacttgtatcgatcactggcaggagcaaggaatgatgcaccttcatntgtcaacatcttgtagtactgctacaggaagaagtttgttgtactcacaaaacaagtttgttctattaaaccttatcattgctattgtattcctgaaccctgatcagtctatcagaatcagacacagaagcttcccgcagatgattctcaaat

SEQ ID NO: 68496 - DNA, 451 bp, Oryza sativa
  unsure (1)..(451): unsure at all n locations
ctcagcttggcattgggccaaagactgtcgacagccactacgctttcaggcccacgncgcacgngtggaggaggaagagccggnaaggctcctggctcacgcatgcatagagctacctccaacggcaccgggcgcagcaggttttctccaccttgatgagccgaangtactcgtctccctctgcaacggctctagcaacgacaaggctgatgggtggtacctcgacaccggcgccacccatcacatgnncggccgacgggagttcttcaccgagttcgactccagcgttcgaggctccgtcaagtttggggacgcctccggcgtggagatcaagggcgttggctccgtcaccttcaccgccaagtccggtgagcacaggttgctcaccggagtctactacatccccgcgttgaggaattctatcatcagcgtgggacagctggatgagaac

SEQ ID NO: 68497 - DNA, 413 bp, Oryza sativa
agcttgaggtcagagatttccttttatttttatggattgctctctggcctgagctatttttacaacatgaggttcttatggatgaattcatgcaagctaaccatgaggggttgtagagatgtagctcagcaaatgcctgacttggtgtgtgaagtgatgaaggatcatcttgatgatgaaggggagatggagactgttgataaactgtacttgtatcgatcactggcatgagcaaggaatgatgcaccttcatttgtcaacatcttgtagtactgctacaggaagaagtttgttgtactcacaaaacaagattgttctattaaaccttatcattgctatagtattcctgaaccctgatcaatctatcagaatcagacacaaaaacttcccgcagatgattttcaaatgttgtg

SEQ ID NO: 68498 - DNA, 454 bp, Oryza sativa
  unsure (1)..(454): unsure at all n locations
agaaactaagctggccatgngccaaaactgtcgacagtccttgctgtttgcccacgtcgcacgtgtggaggaggaagagccggctctgctcctggctcacgcaagcatcgagctacctccaacggcaccggccgcagcagtttttctccaccttgatgagccgaaggtactcgtctccctctgcaacggctctagcaacgacaaggctgatgggtggtacctcgacaccggcgccacccatcacatgaccggccgacgggagttcttcaccgagttcgactccagcgtccgaggctccgtcaagtttggggacgcctccggcgtggagatcaagggcgttggctccgtcaccttcaccgccaagtccggtgagcacaggttgctcaccggagtctactacatccccgcgttgaggaattctatcatcagcgtgggacagctggatgagaacggc

SEQ ID NO: 68499 - DNA, 300 bp, Oryza sativa
gcaagccagctttcatgaaaccgacctgatccagtggatgtggagcccccgccgcaaaaatgtgaaagggtatcattaacatcaggccggaacacatccggcctggtgtgctaatgcctgcaatgaaagatagacgcgtcctatcatgccaccattataaaaataacgctgtgttgcggtacgccatcaccaggatatgccacaaacatagaaaagcaggatgggagtcgtcagggtgcagcacgagacaaaaatggaaaaccagagctggctgaaaaaactcgcacgccgcctggggcc

SEQ ID NO: 68500 - DNA, 312 bp, Oryza sativa
  unsure (1)..(312): unsure at all n locations
acccttctaggaggccgggcccactccccctccgggcaatgcgagcccgccactagaccactcngatgcgacacagaaaggactagcagcagctattgctatctgtgcccggtctcaccgggcgtttaaatcggactaaaactccctatgacacatcggatgatcggacgctaatctagagcattaaacatagattaataaaaagactaagttcataaatgagagctaattcgctagacgatttttttaagcctaattaacgcataattatcaaaagagtactgtagcatcacattgataaaatcatgcgcg

SEQ ID NO: 68501 - DNA, 449 bp, Oryza sativa
  unsure (1)..(449): unsure at all n locations
tgggcccataagntcttatctggatgtgagcctggatctcttttgtctgatagcgcacaaatctggctaatggntcttacttttaccccatcaatagcaacccatagtctctgctgatggattactggttatagagccttggttcagctgctcaaatataattggtaaatatagtaggcaatgtgaaactcatcttatcttgacccatagctgacagttcagtaatgtcgtcttgtaatttgtggacaaaggtattaacatcgtaagttggtaagctgtccagagcttacactgcaagtctacatctgatgtcccatgatgctgaacatgattggatgttatgtgtgccatgtctntgctcagattcgagatacctataccttctttttttttccttcatctgaatgtgtccctttgtttaactttcgtgtgcaatctaactgtatgct

SEQ ID NO: 68502 - DNA, 378 bp, Oryza sativa
ggatcttaagtcacctgagcatgcagctggcttcgctcaggttcttgtttgatcaacccctgaagcggagtcgcttgaagtcatcggctgttgtgcatatgttcttgagtggcgtctgagcatcgcaaattatgccattttgcgttgtgcttggttacgagaggtgattggatcccccctctgcacataaggggtcattctctagtgatttccccagtcccacagaggaacatgagcgccttcactggaaggaggctccactgtctggaggtgatgtccccatgatgtatgagcgccgcccctgtctactagcactgccagttgaactcaactggaatggcttggtcatcggtgctcccattggtccacctgctatca

SEQ ID NO: 68503 - DNA, 410 bp, Oryza sativa
  unsure (1)..(410): unsure at all n locations
acactacancaggcccacaaaggcactgttccattactgtatactntggccgaagagctccggagcaaggaaaatactggccggctcaacaagtgggtggcggaaatatctcccttcgaaccgcaatttggcgcccgcactgacatcaagtcccaagtcctagcaaccttcgaggccgaaaggacaccggcgttcgcccccgaaaccgagcccatcgaataacctcgggtatgtactctgacggctcgaggtcacacaagggggcgagcgccgcggtggcgctcacttcgctagggggcgtgccgattctggatgctgcaagactgccagttgacacaaccaagcacaacggacaagacaaagctgaactgatgggcctaagaaaggccaaagccatcgggggtcggcgc

SEQ ID NO: 68504 - DNA, 414 bp, Oryza sativa
agcttctctcttcttccccagtggttactatacgtcactcagccacagcaactgcatctgtctcagcaaaaaaacaccgggattagcgcggtaaccctgttgcaaacagcagccaagagtgtgtgtgtgtcattagtacaccaccagcagtggtctagttagcttgagctttctactgatgtaaacactgtctgtttggtggagaaaagagacaaatctgtcgtggacagaagcgggaaagttttctaaactcaagaagggacatcccctcgtttgtttaaacattttctaaactgttgttagaaaatctataaacttctttttgacaacatccctaaatccaacgtataaatagtatgggacaattgcttatttgaattccgtttcaaggctaactatcattttgatcctctt

SEQ ID NO: 68505 - DNA, 449 bp, Oryza sativa
  unsure (1)..(449): unsure at all n locations
tcgggaagggcgtcccccgcgcgtcgcctctctgctcttcctccaccctctcttcatggttgcgtcggcggcggcggaggcgagcggcgagccccacaagaagctcccctcctggccctcgatggtccgcgacttctccaccgacgagtcccacggcggtaagctagttccgacctgcctcgccgcggggccgccgctgagctaggctgctccagtgtttcgcgtcatcggctaggctgatccgtggcctccgtgcagagcgcggcatgtccgtcctgaagctgcggctcgacggcgtgcgctctgcctacgacgcggccgcggcggagctcgagaccgcgaagcgcgcgcgggaggacgcggagcangagctcggcgggaaccaagtgcaggtcgccatcgccgtggtgtccatccacgggctcgaggtctctacctctctttctcat

SEQ ID NO: 68506 - DNA, 266 bp, Oryza sativa
ccattgaactgctcgatatcaacaccatcatacactgcgtggacctcggtgagcatttgtaacatcctaatcattgtcaacctatataccatcagccctgggccactcactgggagagctgaatgctttgttcacaaagaatgaaaaggacggcggtgcaacgagagttatcctgaaaaaccaatgcggcagtagtagccatttggtaagaacaagagggcatgttgatgctcttcttgcgggaaacaacaggataaaaagctcat

SEQ ID NO: 68507 - DNA, 188 bp, Oryza sativa
tacaatgcctgacccgtgcaagcgtcatggaccatgaccggaagagggaaaggcatactcacctttgactaaagtgatgcaactgctaattacgctaatttgagagtggacatatgacttgttctgtattaaaggaaaatatactctatctttcacggagtgaccactactttttcattgcatatttg

SEQ ID NO: 68508 - DNA, 405 bp, Oryza sativa
  unsure (1)..(405): unsure at all n locations
agcttgagactagaactatcaattttattattgttcctcgcttacaagtggtgtataggatgaatcaaaggatttgtttgctgctctctccgcaaatgagttancaccggatgttgagacctataccttaatgattgaaaatcttatagaagatggcttgctcgaagagactgataatctatttctttcaatggagaagaatggctgtgttcctaactcccgtatgcttaattgcatcgtcagaaagttactttataaaggggagataggcatggctggtgtttatctgtccaaaattgataaaaatgacttctcccttgtagctttcactgctgagttactgattttgctggttcaagtgggaaatacaatcaacatatgaacggtctctcttggaagtaccac

SEQ ID NO: 68509 - DNA, 413 bp, Oryza sativa
agcttgctagaaccgttttgtttttgtctccaccacgcgcatgcttttttttatgtttatattacgactttatgtatcgcgagaggagaaaatgagagagtactaccttatgcttgagactgcaccataagaaataaaatgctgtcgtatgtttggtatgtacatgttggtctttgaatcctacatgttaaaagggaaaaatatgttttcctcagtgggttccaccttaattaaggttaagaaataattattagcattgtagcatatgctattataaaaaatatatatgggtccaaccttataagctctacgaacttaaacattgataatgtcatacgttattatttagcaggaaacttacgtgagaggagcagagtaagtgtctaactgcgcatgcacacatcgtgtataat

SEQ ID NO: 68510 - DNA, 446 bp, Oryza sativa
  unsure (1)..(446): unsure at all n locations
actcagcttataatattgcagttacatgtattggttcttttatacagcgctcgntctatgtaattcttatacagattgactgtaaattgtattgaaattattaaacaattcaaatttgtacttttaaattcatttccatactctgatattttacctgttcttgattcctgtgctttcactctgcgggtgcattcattgttttttttcttctgcatttcctgtaacttgagtcatatctgcacaaacattgacagaacaattgagaattagaagcaaacatctattttctttacaatttttctcagtttcattttttaagttctgaaatgacatggttccttttaatgtaattatatatcaaattcattgcattttgaattgaaatttataaaacaaagttctaaatttacctattattgattcctgtgtgttcactcgactgatgc

SEQ ID NO: 68511 - DNA, 372 bp, Oryza sativa
cctaatgacatgtgtctgctagctaatgacgaaggtttacactgtgaatttatctggcacacgctcaactaatttgctttgtgattaggcaagaccaccgatagcctaaaaactaactgttgtttggacgagccgtgccacgtggcggccttcagcatgcttcgtgccttcgtctcggagcggaggaagcgaaacgatagctgcgaggatctgacgtggcaagaggcgataggctcgatgacatggcggcggtcaaagatgccaaaatcaaacgcgcggtggaaatgcggtcaaagaagtctaccgtcggaggcggaaagttgactttgtggaggatttgcatatattataggtgaagcttccttccatctt

SEQ ID NO: 68512 - DNA, 443 bp, Oryza sativa
  unsure (1)..(443): unsure at all n locations
acacattntgcatatatgctaaagccacatttatttcttgaacggatgagccaacgctattaagtgtgcatagcgagaaaacttatccacaaccaccaaaatgcagttgaattccaatgagagaggttatccttcgataaaatccaaagacaccacttgccaggcatgttctgggacaggtaatggctgaagaagnnnngtttttttganttgttctgccttagcttgtcctacacatagaacaggaatccacaaaaagctgcaccgacttcttgagaccaggccaagcaaacagtctgcgcaatcgggtataggttacctgcactccagaatggtcaccaacagcagcattgtgcaatgctccatgaaccttctgctgtagtcccacattatggtccaaccaaatgcgccccttgaacctaatacttcatcttgtacactaa

SEQ ID NO: 68513 - DNA, 158 bp, Oryza sativa
cgcctaccttatgtttgagcgttgctgaccaaaccgagattagaattttgcacagaagagtgacctaacttatacgtagccctaaaggattcattcatctttgctgaccacactaaccagaacatataatatgtgttgcatccacgaaaagcactaac

SEQ ID NO: 68514 - DNA, 442 bp, Oryza sativa
  unsure (1)..(442): unsure at all n locations
nttggtaatcatcgtgagctgtctgcttcttgcttacttatttgaaagagcctccgcaaatcacatgcagcaataatattcaaagcgaatacaacaatcaatcacaaaatgtggtgggccaacagttcaaatagaaccatttgttatcattttgtggcacttcttacagggaaaaagtaggtcttgtatgcagcccagaagaatataacaggcatcattgccaagtatccacccagcacaactccagttgtgaaaatttcagccaactatcagctgtcaagtagtggagaacgctttactacatccttacatatagtcattatggtacctgtctgcgccagaaaatggttgaagtgaacatcatgaaaatagtttctacttactactgatgatttacgagacatagaaggatggagggaacaagaatgtgacataccatcat

SEQ ID NO: 68515 - DNA, 362 bp, Oryza sativa
  unsure (1)..(362): unsure at all n locations
tatgaaacttatgagactaaataactagtgccgaaaaatttgacactaaatttgaaaaaaaacaagtgttataaattaaaatttttatttgaaattttaataggacaacggatttttttatagtgagcattagtagtcctatcttttagaatgctcctcttttttatgacttttttaaaaaataaatacatattttttattttattatctaaaaataaattttgtgataaataatacatcacacaacaaccccataactataatagtctcatgcgacaaactttcatatntttagtaatttaattaataaatttccatggttatccaaagggtaaaatagtcatctttatagtaattagacg

SEQ ID NO: 68516 - DNA, 423 bp, Oryza sativa
  unsure (1)..(423): unsure at all n locations
gaatttnatgttgtttattataggngaatganatgtatgggaggctcaatgtnattgtgaatgatntnaaggggcttggggcaaactacaccgatcttgaggttgcccaaaagatgcttagagccctaccggagaagtatgagacccttgtcaccatgctcatnaacttttattgttatgaatgacacccgcaagcctcttggggaagatcaacaccaatgacatgtacaagttgaagaagaaggagatggaggaagcctcatcctccaagaagtgcattgctctccaagccgaagttgaagacaagagcaagagcaaggtgaatgaagtcaatgaggacttggaggaagagatggtccttcttgctagaaagttcaatgatctcttgggaaggagaaaggagagaggaaggggctcgaactc

SEQ ID NO: 68517 - DNA, 399 bp, Oryza sativa
ggagtggagcacgaaagggtgggagagagcagattaaggataaccacatcctttgtcacaccgctggccgaacttcaagaaaaatggccaaatagcaacaatctagcggggccgaaggcaacaaaataaagatgttcaggtaaaaggtattggaaaatatagctctgagaaatatggcaaatagtccaagatccccctagctacttccttcaccttcgagcgtgttctaacgtgatactgcctacagcctggcttttctttctataaacgctcgatgaattctgaaacagctggaagagcaagtttgctggcacagtagcatatggatattccacccgggctagagcaaagcatacgcatataccggcgctagacgccttcaccatcggaacaagacac

SEQ ID NO: 68518 - DNA, 446 bp, Oryza sativa
actaagctgggatgtagtaggagattgagagttccgcctttatttatggagaagcttaacgtccgaagcgattagttcttgggttaagtgtttgatgcttcatttcgtcaacttgcagatgttcgcgcggggctgcgcaacgcagggggagtatggtcatttttctcctgttctctggcgatctctagtttattttgtcccatgatgatgatttattgatttggacccacaagccactactaccaccacagaaataaccggccatttcatcacagtatcacacaactcaagccgctaatctgaccagtgactaccttgtaatcctcggcttccacctctataaaactcacatcttccatgatatttttctcgcaaacaccatggctcaaatatgttagactaaactacgtgatgctctttcttctaataatgacaaaaataagtat

SEQ ID NO: 68519 - DNA, 324 bp, Oryza sativa
aacatgtgagggttgtcagctctttgcccgacaagcccacttaccagctcatgagttgcaaaccatcccgctgtcttggccgctcaccgattggggtcctgatatggtcagtccattcaaaaaggcaggcggtgggtatactcatctctttgcagctggggataagtattccaagcggatagaagcctaaccagtcatcaaaatcactgcggacaaagctagagaattcttcctcaatattgaacatcgggttcgcggcaccgaatcatactattactgataaccggcctccatataccggcggaatatttaaagacatttgtg

SEQ ID NO: 68520 - DNA, 388 bp, Oryza sativa
ggaaagggatgggctagatatttaggctgtgttctttcccatgggttcccaacccatctccctcggtttgcgcgtgcccgcttttcaaactgctaaacggtacacgttttgcaaaaaaattatattggaaagttgctctaaaaaatcatattaatccattattccagatttttgtagctaatacttatttaatcatgtgctaatctatcgctccgttttccgtgcggaacacagccgcggccttaggctgtgttcccatctaccagatgggaactcatttcccctgcacggaaaacggagcggaccattagcgcgtgattaattaagtattagctaatttttttttcataaatggattaatgtgattattttaagcaactttcgtata

SEQ ID NO: 68521 - DNA, 372 bp, Oryza sativa
cacaaagcgaggaagagttctgtttaatcgcgcgaacaggacattcttatatagcgctcggaaccaaagaacatcccgccccaactcagagaattagtagcgatgtgccctgaaagcaaggactccctcgagacagctaccaatacaggaaacggaaagtctccaaggaagagaaggacgctcgttagaaggccgaacttaaggatgaggtcattcaagaactagaacctagcatgaatgcaacggtggaagaaagggttaacaaggtcctcgccaacatgaatataccccgaaaccaacacctgctgtgcaccaactcctcgtgacaacacgacacgagtacgtaacagataggagtagttgtgcatccac

SEQ ID NO: 68522 - DNA, 337 bp, Oryza sativa
ttttaaagattagtcgtgctaaaataaactttcatctaaagtttaggatgatatttggactcttctcttgataaaatttaattcttatggtccggattaccggcttgctcaattgcgccggattgctgtttcgtcatggaatgaagattgaaaatagtgcccgatgttatttcatttactttacatgtgctagagataaccctagataaacttttgtagtaattcacagtggtggtgtgggatttactttacatgttgatcctttttttttacatatcttttgttcctctaatcgtaagagagggttataatgtcatctttaatataatcaggcatg

SEQ ID NO: 68523 - DNA, 464 bp, Oryza sativa
acactaagaaactcaagctttaataacgccccatattataacgcattcagttattttggctaatggatgagtctagatactgaacgctgctattgtccatgcatgcagatgccaaaagttaatgctgtctatataataatccatatagcaaaagatagctttgaacagacaagttatcaaccagaatgcttctttttacccttgtttgaattaaacgatgatccatgtctccatcatcactttcatgcaattataatggcagagtgagtagaaaggaaatcttttatttcttgtctagataaagaagcagatgtatatagtattgaaattaaaataatctaatcttgatgctgctgtgcatgatgaaatcttacattctaaagagagtagtatttgaagttcattgatgttagggccttaagagtcatttgttattggaaacaatgatgacctatatgctttat

SEQ ID NO: 68524 - DNA, 425 bp, Oryza sativa
agctatactgtgtgacattttttaagatcattgcaccaactcctaataagttgagttactgcggtataaaaggattttaaggtattgggcacttgatcacgcgcactttggcctaagcaaaaagtgcctaagttcctaaaagaacgtgacaggccacacctgaaaatatgggttgcagacatattaggcctaggccaaaaaatatgccttcgacaccctttaaaggatgacgcatgtaacatgctcccgagtaatagatcttccgggtgatatagaccaagtatagctcatatgaatagcttctgatctgagcgattatcctttatgggatactccaaaatagatataacaattgaatcctgactggcgcaagtattctgttgataacccctaatgagaataatgattgcttcaatcttcgagca

SEQ ID NO: 68525 - DNA, 430 bp, Oryza sativa
  unsure (1)..(430): unsure at all n locations
ntgtgggatcggcgtcgtcgatctgcatcttgttcactttgccatgaggggcgggcttcggcatgcgtttagcatggtcatgtggttcagcctcaacattgtgcactgctctgttgatagcggccagatcgcccttttatgcaaccgaaggttgaagccccttgatgacgatcggacccggcatcttgagcttgagataattgtggtgggagatggcatcgaacttgttcaaggttgtgcggcagaagatggcattgtagttatatgggatgtcgacggcatcgaacagtatttgctctttgcgcctgttctcacttgtgccgaaagctaccaccagttgtacttggcccaagacttgaactgcttcgccgccaaaaccacnaaatgaggcccgtgcctcggtgagggctatggtttgcaaccccatctt

SEQ ID NO: 68526 - DNA, 419 bp, Oryza sativa
agctttactgtgtgacatcttttatgttcttcgcaccatccccgtatttgttgagtgactgtggtataaaaggatttcaacgtctcgagcacttgatcacgcgcactttggccttagctaatagtgcctgatgccctagatgaacgtgacatgccacacctgataatatgggttgcggacatattacgcctatgccaaaagatatgcgcttgacacctcttagaggatggacgatgttacatgctcaccagtaatatatctttctggtgatttataccaagcataactcatatgacgtgctcctgatctgaacgagtatcctttatgggatactccaaaatagatgtaacatttgaatcctgacgtggcgcggtattctgttagaacccctaaggggatgatgattgttcactcttcga

SEQ ID NO: 68527 - DNA, 199 bp, Oryza sativa
cctcagtggaattgtgtacctcctggcatgtttgctggagcctttcatgccaacattctcaaaagatgtatgtctcttgcttcgccgtacaagttactcgcatatttgcacatatctttaatgagaatctaatatgttcgttgttctctcacgcaggttctgcagcagctaaatctaagtccagaagagcacctatcat

SEQ ID NO: 68528 - DNA, 418 bp, Oryza sativa
  unsure (1)..(418): unsure at all n locations
taagaaattgtatctttattaaccaatgananaggttatatatcacttaagttgatatgtggcttatgataatctaaatactatatagattgataataaaaagctaaaagtaaggtgatgactttatgagagaaaaaatgagagaaataatttggacaacagattaatcatttaaaggctagaaacaattgatatgatgtggtctaatgagagaagatagaacacattaactaagtagggataaagtatataggatattgtagaaaataaatagatatatgctgaaatattatgtaaattatgtgggatgatgatttaacatgttcgtatctgaaaactttagaatatgataaaatatagagtaaatttcacaaaactacatgtactgtaacaaaattatcgtataaactacaaatgt

SEQ ID NO: 68529 - DNA, 406 bp, Oryza sativa
  unsure (1)..(406): unsure at all n locations
ctttactggcnaacagctgtgaagtgttttttatatctttttagttgaaccttgagtctttgatagttatattgattctcttttttttgtaaaacaaataagaatcctgatattaattattgttcttccagtactacagtgttcaacgttagggaattatcttaaactggtgctctggtaaaattcgaaaggtacatatggctatgtgcctcataagaaactcctcatgcaatagggatgattcttgggagaaacaaggattttgttcctaaaagtcactcatttggtcttgtatagatgtatctaggccatgtttccttctggttaattccctcaggttcctcttgttaatgctttctacatgattcttgaaatacattattacttttaactgtggtctacctca

SEQ ID NO: 68530 - DNA, 366 bp, Oryza sativa
ctatcttgaaaatattatatgtcaggtagatcttctgataaattggcagaggctgctgcatttattagatgagctagtagttcactgaaaccttaaattctgattatgagaatttgcattacttgatttgtggatatgcaactatgatggtctcacaattattgatgcagattccagtgtttagatttagtatttaccattaatcatgacaacctttgttgctgaaaagattgtctacttaaagactcaaccaccaggcaggagtcaggcagtttaactctttgtgattgtttacagattagatttgatttaaaagtgtctgcccctgttactggggatgtgttttttatttaattgaatggcata

SEQ ID NO: 68531 - DNA, 448 bp, Oryza sativa
  unsure (1)..(448): unsure at all n locations
cgctgcagcttaacttaatggctgaaaaagttcattcttataactactccatctgttgacaaatacagataattntaagcccttgtgacttgtccaaaaatattaatgagttgtaagtactttttgtcttatcaatcatttatatttcaatcgtatcaccaatcactttctggatctataatccctatattcgtgaacggatggaatataagacatattttaccaaaccccttttacctgagtgcacttaaaattttactactggtaatgtaaaaatctataaagctgtacctttaataataaaattaaataaccttaactgatgaatgggggagcatatgaaaataaaaaaaaaggtatgcacactgaacaaagaaagtaattgataagatattgtttttacgtatatacgaaatcatgctttttccatgcatatangagacttttg

SEQ ID NO: 68532 - DNA, 415 bp, Oryza sativa
  unsure (1)..(415): unsure at all n locations
gccggngacgtctgtgagcgtanggatgntttctcctcaccctgtatccatgttgctcctagcaagggtggcgtctgtcatctccttgttaaatcaaagtgcttttgattgctattctgtgatgaacaattggcatcgaagattattggttttgatatttggaacttatttttgaagtggttttggagatgattggattttactggtgatctacaagaactgttgtctgtgatttggtccaatcagaccgggctgtgtgtgccggttagaccggcgttgattgagcggtcaaaccggccagcccgcggtctgactggccgacttcatgtcagtttcgatttcaggctgtttgtttggatatccgcgatctgttcatgtttatggcttctagatggatactatacatatataatac

SEQ ID NO: 68533 - DNA, 149 bp, Oryza sativa
taaagttttttggctgcgcgtttttacaaccaagtcattaacataagcctcaacattacgttctatttggctaccccaagaaattcgagtagtacgttgaaaaatatgacctgcattctttaacccgaagggcattgatgtataacaat

SEQ ID NO: 68534 - DNA, 327 bp, Oryza sativa
  unsure (1)..(327): unsure at all n locations
tcagcttcgattcaattctggaatgatccacaacnctgtgttttctgaatttcgcaaanatctgtgcaaaaatggcccttctggcctaacagagttgccttatctaactagcatagccacccacctgccaaaaagaacaaaaatattatttacaggttcaagtcctaacaaaatagtgataccacttcaacacaataacaagctcatggtacatttatcaattgttatgactggttaacaaatgatcatattaataaccgccactaaactcatgtaattagttgagtattcatgagggcatgtcctcacatggattctcatatcttt

SEQ ID NO: 68535 - DNA, 383 bp, Oryza sativa
  unsure (1)..(383): unsure at all n locations
gtcatacctgtactgctttttctattagccctttgttggcaagctgctgtaagtattcgatgaaatctttactactctgtctgccaaattgaatcatgtattcattctaaaaaaatcccaaaaatggataagagccgagaagtctatattatgaaccttcgattctaaaattcaaattcttctacattgaatgtatagctgcagcaataaatttggatcagcctttctactccctgcatctacgttgagcangtatctttangtaaccgcacaatacctaacctaatttattgataagagtgcttattataaatcaattctgcaattttttcaaaaattgattttgcattttaggtgtcaaataacaaaaccctcctatggat

SEQ ID NO: 68536 - DNA, 323 bp, Oryza sativa
  unsure (1)..(323): unsure at all n locations
attacaacatatacacgttaaactaaggatattaggcataacaagcgtttccttcttgtaaagaaataatagtgttttgattgagattattcttttaatggaatacagaataggatgattcaaaattcttttttcttcttgacttttcccactcacgaaaatacacttcttggaattcacactctctaatgagagtggaagaaattcaactttcatataataatcttaatagaaantcatgtgatgatcaatgcatttcctggagtctatattattcgcatgtctagaattctaccaagagaatacctccccattttatgtaa

SEQ ID NO: 68537 - DNA, 391 bp, Oryza sativa
  unsure (1)..(391): unsure at all n locations
tgtcggcccgctcatgccatgtttgtctancgtgccggtggggaagcccatgcacggtccgatagtcgggccgggatggcacgggcacaaaccccagtcgggccatgccgtgcttgggccgggccaaaacgctaggggtgggcagaaaaagaccgaatcgaaaaatcgagactaagaaattcggtcatcaattcggttctaggcagtgaaagaccgaatttcgttcgatcaattcggttagtctcctcggttaaccgaatagaccgaanataccgaattaacaaaaaaaagtctaaatgcgacctatatccactaagtttaataggattaaactctaattttcacgtgcgtactttttctatgcatgcaacctaataagagtcattactca

SEQ ID NO: 68538 - DNA, 435 bp, Oryza sativa
tcgggcaatttggcgaagaaaaactattcggataaattacagaattatttcaaatacaggttaaactaagtatattaggcataacaagcgtttcgttcttgtagagtagataattggattttgattgagttatttttctaagggaaaaaggaaaaggaggattcaaaatccttttttcttcggactttcccaaacacaaaatacctccttgtattcgcactctcaaatgagagtggaagaaattcgactttcatataatatcttaatagaattccatgtaatgatcaatgcattttttggattctatattattcgcatgtctagaatcctaccaagaagaatacccccacttttatgtaattgaagtatgattgacgaataagaaataaacataatactggttattagtgtcgcataaaacccgaaatggggcgt

SEQ ID NO: 68539 - DNA, 400 bp, Oryza sativa
gcaagcttatgccattttcaatccaatcgtggattttatgcctgtcatacctgtactcttttttctattagcctttgtttggcaagctgctgtaagttttcgatgaaatctttactactctgtctgccaaattgaatcatgtattcattctaaaaaaattcgaaaaatggataagagccgagaagtcttatattatgaaccttcgattctaaaattcaaattcttctacattgaatgtatagctgcagcaataaatttggatcagcctttctactccctgcatctacgttgagcaggtatctttaggtaaccgcacaatacctaacctaatttattgataagagtgcttattataaatcaattcttgcaatttttttcaaaaattgatttttgcattttt

SEQ ID NO: 68540 - DNA, 416 bp, Oryza sativa
  unsure (1)..(416): unsure at all n locations
tgntacaaactagaggtgacataatttatagtataaattctgcataacttattacataactccaagtgcagaaacacagtacatggcccttcactgaaaacataganttttgaacaaatggagaattggtaaatgatgtttgagaaaagcatctagtattgaacatcaaatcaatgagaatgctgccagggacctaaccaaaataaatacttaaatgcagtcttgaattgctgaacgtgtcgaggtgtaaaggtatatctaagtatctaaccactggatgactgaagaaccccacgcacatctgtttcattaaacagcattgagaggccatttcatcaaattcatatggtgncatagtatatgatacataagtagtcagctggcaccaatattttttttcactgaacaagacattt

SEQ ID NO: 68541 - DNA, 420 bp, Oryza sativa
catgcaagcttgcatttttatgtatctgcatttctcttgtttatattagtcataattcataaatgaacttgggcaatcttattttctccttttgttccattgagctttcatatgtttactgttgcatatttctgaagagcataaagtatattgctcattgtgactgagattctggttcatatgtatccaaatatcttaattattggttggttccacatacatgatataacattctgaaactgaaaaaagcaatccacatgtgcattatttagtttcctatagctgagccatcccatgtgcattgtttggtgccaatgctacatgttatcaacttatcatattatcaaactgtatgttactggttatatcggtttgctttgtgatgatattggctgatggaagagcactctggctatacat

SEQ ID NO: 68542 - DNA, 400 bp, Oryza sativa
  unsure (1)..(400): unsure at all n locations
gcatgcaagcttttatctccagatgcccgcttagctctgatcaatcatgtgntaatggcgctcccactctacttcatgtccgtcttggaactaccaacctgtgcaatcaacgaaatcgaaaagaaatgccggggttttctttggaagggtgacgaagatgctgcaggctcgtgcagcttggtggcttgggagaagctttgcctccctatcaagcgagggggattagggatcagaaacctacgcctaaggggaattgcgctttgcactcggtggatttggctgccgtgctgagccagagcgtccctggacgcgcgttgcacctctttctgacagaaagtcgctgcattgctttcccgctggtagccacagattgctggggaacggagcctctacctcgttt

SEQ ID NO: 68543 - DNA, 351 bp, Oryza sativa
  unsure (1)..(351): unsure at all n locations
taaganactaagcttaagagctcgcgcactcttttttttctccattttaaacaactctgggtagctattcaaaaatagacctactgtatcaagcatgcagcaagttggaagcttctacactcccacaatatttgctaaattatagtaattgcaaccaatttgactcttaggcttttacaagccaaactaagcaatctacccgttgagctttctttaattgaggatagaaaagagaagaataataagttaacacttcccaccgacaccgtatcactgtatcaagtcaaactcgacattcaggcaacagacacggtttcatgtcatacactatcaccatcataaatattcttc

SEQ ID NO: 68544 - DNA, 399 bp, Oryza sativa
  unsure (1)..(399): unsure at all n locations
agctcggccattacgccaaatactgttgttatctacgacgcggccaggcccacgtcgcatgggtggaggaggaagagccggctctgctcctagctcacgcaagcatcgagctacctccagcggcaccggccgcagcggctttcctccaccttgatgaaccgaaggtactcgtctccctctgcgacggctccagcaacgacaaggctgatgggtggtacctcgacaccggcgccacccatcacatgaccggccgacgggagttcttcaccgagttcgactccagcgtccgaggctccgtcaagttcggggacgccttcggcgtggagatcaagggtgttggctccgtcaccttcaccgacaagtccggtgagcacaagctgctcancggagtctactaca

SEQ ID NO: 68545 - DNA, 412 bp, Oryza sativa
  unsure (1)..(412): unsure at all n locations
tgccgtagttggagatgagacatgatagaggagagactatattcaaatccttcgcaaagcacatcgtttggtgctatatttggattcaatgcagctatggaagtataactcgagttcaaatcttaatgtccataattacgtctgttttttatgttcgtaaaaactacaattttatcggggagagcggttctaacagttacaacttctttcatcttcaactcctctcaaacaagatatatttttacaccaattctaagatgatgtaagtacaaaatacagtaaataaaatagaagataaaaattgaaaaatccagcttttccggngattatcagaaactagctccctgtacgaggttcgttggatttgtctataacctctatatattaaaagtactcgatcgagtggtacgtg

SEQ ID NO: 68546 - DNA, 386 bp, Oryza sativa
gcttagagaaaaatacatagagatgctgtcattatatttaaagaaaggggatactgattgttgaaaagtccaactatgtggcttagtattgcctataagtaaacaagccctaaagaagaataatactagcacctaacctcttgccctagtccacaatcatttttactgactgtaaattactagcgaagtacaaccataagaaggtactgtactagcaagagaacaatgaacaaactaagaaaggacatccaactagaaacaatggaaagttctagccatctaatccttttgtatatccctatttaaatgtacactccatggaacagctaggcatatgcatcatcaacccccatcaattgtaagggctataatacaatttcagtttt

SEQ ID NO: 68547 - DNA, 377 bp, Oryza sativa
  unsure (1)..(377): unsure at all n locations
tcactccctctatagtatnttgaaacatactcatcaattattgttctgccaatgtttaccccactctcctaagcaaccaatttatcttacgggccgattgatgaattccacaaatcccttcatgaacttctctcctagcaactgtagattgatcattatctaagcatttcaacaatactccatctatttttcggcgatataatatatgaacgcttgccgccgaatcttccgatcaatcttaagtgtaggatctttcaaatatctaatcaaaggaatacgtcaagctatttctatctcatgggcacaaatgtccgaattcacaatttattctgccttttaatcaactgtaacgtgccccccaacctcctgtctgggat

SEQ ID NO: 68548 - DNA, 401 bp, Oryza sativa
  unsure (1)..(401): unsure at all n locations
cttaccaaccaggacgtcaaattgagcttgttatttgatattgctgtctacaattcatgtttatgatcaaaatctactgccttaaaaagagagaagttcagattgtcagctggcggtaccttcaacctccttcaaggccgagtccctttgcgcagccaattctactttgtctcttttcaagacttcaatttgtttctccatctgagccatcctggtggcttgcgctgtttgaaatccaaatgttggaggatacagttatgacaacataaattaatgggacagatctagaagattaccttttgatgaaccactcagctcgaagtttgaatcctggagctgggcaattcggtcccttaatttcttctctgtctttntggcaagctccttggcctcgtgtagct

SEQ ID NO: 68549 - DNA, 423 bp, Oryza sativa
  unsure (1)..(423): unsure at all n locations
tgcaagcttgacacttacctttattgaattatcattaatttatctcatcaaaataggctcattcgcgaaaaaatgaagtgaaactatagaagcatcatgggcctcccggataacagaatgaaggcgccttttctcaagattccatatactaataacacctgacgatcctccagaggccagaagaggttgcccatctggtaaaagaatatatgaaacacttcagctcatgtatgaaatctgtatcatagaaaaaaaatgcaacagcagcatttcctgaactgaatctaacatataattattangtggtgccaaaactgccagtcccatcttaatatgacaagctntctaacaagtcatttgagtattcacagtcaagaacagattacaggactaaaccgacaggcaaggaaaaatgaatatatc

SEQ ID NO: 68550 - DNA, 374 bp, Oryza sativa
  unsure (1)..(374): unsure at all n locations
tcggcgtatcacatcgaatatacggacatatatntaatatattaaacatattctaataacaaaacagatgacataatccgcttattaaccacgagacaaatttattaagcctaatgaatccatcattagcatatgtttattaagcctaattaattcggcattagtaaatatttactgtagcaccacattatcaaatcatggcgcaattaggcttaaaagattcgtctcgcaatttacatgtaatctgtgtaattagttttgtttgtttatatttaatactccatacatgtgttcaaacattcgatgtgatggggtgtaaaattttgccagggaatctaaacaggcctgtagaaattttctgtcacatccacttt

SEQ ID NO: 68551 - DNA, 398 bp, Oryza sativa
  unsure (1)..(398): unsure at all n locations
ctcagatacatcatttgttcttcacatgtgattncactttaaaatcataatctgttttcagacaaagtaaacggtgataaactggagctcattacattaagcaacgattttgtttgcaggaagcagtagtactcccaccgtttgtggcattcgctgtcagaatgaatcctggtatctgggagtacgtcaaagttcactctgatgatctttctgtcgaaggaatcacaccgtcggagtatcttaagttcaaggagaccttatacgatgaaaaatggtatgcatatccatgatccactaatccagtacgtagtagctaatgcgaacatttccatatacagattgaagaaaacangagccttgaactcgaaaaaaaaatggtcgatctgaccatgtgcatt

SEQ ID NO: 68552 - DNA, 381 bp, Oryza sativa
tcgcagaaccctcatcgacggtggcagtgcactcaacattctcttcgccttgaccctggatgatatgcagattcctcgctccgagctaaaaccaagcaatgcgccttttcacggagtaattccaggattatccgcaactccactcggccagatcaccctcccggtcacttttggcactcgggaaaatttccgcacagagaacatcagctttgaagtcgctgatttcgagacagcataccatgccatactcggacgcccggcgttagccaagttcatggccgtcccgcactacacttacatgatgatgaagatgcctggtccccgaggagtcctatccctacggagcgacatcaagcaagccgtcacatgcgacaaggagag

SEQ ID NO: 68553 - DNA, 390 bp, Oryza sativa
  unsure (1)..(390): unsure at all n locations
acaanctatantacaaagtgtagaatgctacaccgactttcatctaaaatttaggggggggtatatgaattttttccttctatttttctaacatataagtgtactttatatgtaaaaaaaactttatatgtgtactatagttggagaaagtgtttttatccagggaaagaatgttatctttttttatgccacctaaatagtccttaaaaaaataaaagacatcgacaagatagattaatatgaaacattactccacatacatatatcacggcggttgtggagttggtcaagagctatcttgtctcgccattgccaattccaattccttcgctcgcgctatgctcgatcttgtggtcatgacgacggggcaatcatacctacacattaaac

SEQ ID NO: 68554 - DNA, 437 bp, Oryza sativa
  unsure (1)..(437): unsure at all n locations
agctntcatcaacaactctatgtgtggaatctcttattaaaagngncaaaattatacttctagaagtatttttagttttggtacagatcacattgatgtttcacaaatatacgaaaacatattgattcggttaagcacatgtgcattgggatagtttttgtaaccaaaccgagtatgtggattgacatttataacaaaacaacttaaagagtggaatatcaactttcaagcgacttatggaatgtttttttttttgcattttttctactaaattttcacattaaacccacttagcccatgtttttatttcgatattagtgttcgttggattccttttactctactacttcgtcccnaaaaaatccaatcataataatgaatatggacacacatgtgtctagattcatcgctagagtttatctttgtcggtgatatgg

SEQ ID NO: 68555 - DNA, 104 bp, Oryza sativa
taccactacaagagtcaagaatctttgtcacccgtttcttaatataaattatataaaggataataagtcttatacaaagtaagggaaaaatttaaaaaaggatg

SEQ ID NO: 68556 - DNA, 387 bp, Oryza sativa
tatagcacgcgttgcaacagctccaactccaacgagtgcactaccacaaggtgtcaatgcaccatttcagtcccatccacctgctgacgagacagaggccagtatctgcgttgtacctttggatgttccaatacagcagctgataaatcaagtacaagatgaagaacccgagtgtaagaaagttattgtttgttacaactgtagtgaagaagggcattactcgagggactgtcctcaaccaaggcaaaatcggcccccacattttcgccaatttacaggaagcaaacatgccaatcgccaagttttcactggagcaaatgcagtacctgttaagcctagtgctagtcaataacaaccataatactcttatatcggtgttcaagtact

SEQ ID NO: 68557 - DNA, 435 bp, Oryza sativa
tctcgagttgatctaccaacttactttgaaacaatgttttatggtgagaagaagaatgcacacatatctagaggttagtagaccaagatttataatcttttgacttcaattctcacaaatcaaggtccatatgtgacttataacaaggtaggtaaattatactccctccgtctcataatataagggattttaaaaaaaaattatgacacatcctagtactactagtttagacatagatagcctatctagatttatagtactagaatgtgtcacgtccttttaaaatctcttacattttttttatctcatactaagcaatagccggttttagttgtctttaaaaccagcttagaaactgaatttattgttgattgcatttgcatagtgataattaacctccatatgtgtagaacatctgaacttcagtatattaaa

SEQ ID NO: 68558 - DNA, 450 bp, Oryza sativa
  unsure (1)..(450): unsure at all n locations
gcatgcaagcttcanatgtgccatacctcatctcaatttatcttttgtttggctctccaagcctttgcatagcttatggtgtacttgaatttgttctcgatgtgcctaataattgattttagttcaaagccaatgttaccaacaacactgttgtacatctcacttgccacaaaagctgaagtgatgtttcggtgatacttctccaccccttgtaagtagcacttgtgctcggtcacaatgctaactttccaataatcattccatttacccttatatgcatggacacgtcacggacaatctttcttcatgcacctcactttatacacataatntgttgacttgaccaccctatactctctctgaaggaaactgcccaatgcttcactggctccttcatctcatacttatgagcataccttgcaccctcaattacctcgttctccttatact

SEQ ID NO: 68559 - DNA, 414 bp, Oryza sativa
tcttcgattgatccgactccaccaagaacacgatagtatggcgacttgacaactcccatcagctgtttctagagctctgaaaccgatagtgactttcagccgatgatgactttgggcttaccaaatttcgtcgttaacaccttgggaccgatcttgtgggatttcggctccctctccatgtccttttggcggcatgaccatcgtgtgtgctggcacggcgtggcaggctccgctactccctcgctgaaagccgtcgcgggccaagacatcatggcagcactgcttgacgagttcactgccgtcttcgccgagcccaagggaatgcctacaccgcgctcaatggaccactacatcaacccttttcccggctcctcaccggtcggcggtcggcctatcgcttacccgctccacaag

SEQ ID NO: 68560 - DNA, 438 bp, Oryza sativa
  unsure (1)..(438): unsure at all n locations
cagctttggagttaatagttgctcactatctttctttagctntgnggaatactctaagtttacaaactttgtggctagtttaaatccatgtctcaaccatatttcaaggaataccataaaggctgattgcattagtgagtatcaaaatcagaaggtagacttacaagtggttttgagtggctcgaattttaggctttctctcactgccgacatgtggacattcaagcaaaaattgggttatttatgcatcacgtgtcacttcatagatgataaatggaaattgaagaatagaataattangtctgatctgctatctcactgaatttagatgtcaaatcagctttgtctccttttttgattcccttttggatgattcaagacttggaagtaggtgatacttgataatacatcatatccatacttgtgttgccactgata

SEQ ID NO: 68561 - DNA, 406 bp, Oryza sativa
  unsure (1)..(406): unsure at all n locations
tgtcttgaagatgagatggaaacatgacatggngtattttgcttcactggggatgacacaaggacgtgtgacgttagcataccgtaccttgggcctagccagctcaagtatgatgcgcaaggtanggatgggcgagaagagcaaattatacggtggtccgggtgcgtcgtctaaatccttgaactctcaaaatacatttttggacctctgaaaaacttgtcttagagtgttatacgtgtccaaacagcctccaacccactccatgcggngacgtggcatgccacagtgctgcctacgtgtgagtgtgacccacatgtcagccacatagaaaaaataatgaaatttgaaaacatcttttctcttgggtgtacaggagaaaacataaaatgaaaggatatatatacat

SEQ ID NO: 68562 - DNA, 316 bp, Oryza sativa
  unsure (1)..(316): unsure at all n locations
agcttgaacagaaatgctactaccaatatgtgcttaaaactatggngatataataacaggagttacagattgttacagaaactggagttgcagcatctttgctgggaattcaccaggccctcagtatcagccaccacagctaggtaggatgaaccttttgggttgcagatcattgccatcaatctatgggcctgtttggcacagctccagctccagctctacccctcctggagctggagctcagccaaacagtttcagctccaccaaaactgggagtggagctgggtggagctctctcacaaaatgaactagagtt

SEQ ID NO: 68563 - DNA, 469 bp, Oryza sativa
  unsure (1)..(469): unsure at all n locations
aatactacgcttgtgaacgttaacaagaagcctcaagcaatgattgtttccatgaaaccagcanaccgccaactttactctcaccgcaagctactcttcatccagccccatcggatggcctctaaaagaaaaaaccaaattttaaatttttaagcttaattttaatattgattntgacatatttttaacgtagtttcttttttaacattggcttttaagtcacaaaaaacatatttataaaagttttacccacaaatttatttttatttcctaataagctatgttttggcttattaggaaataagccaaacgatggggaccatcgtctccactcctcccatgttatgttcacttactctctcattcccaaattgatcatcatgtcatagaatccaaaaaatttcaaattaatcattatataactatatagacacgtattttatttgaatacaattaataccacatggga

SEQ ID NO: 68564 - DNA, 438 bp, Oryza sativa
  unsure (1)..(438): unsure at all n locations
agctttactggttgacaccttttaagatgcattgtaccaactcctaaaaagttgagtaactgcggtataaaaggattttaaggtattgggcacttgatcacgcgcactttggcctaagcaaaaagtgcctaagtccctaaaagaacgtgacaggccacacctgaaaatatgggttgcagacatattaggcctaggccaaaaaatatgccttcgacaccctttaaaggatgacgcatgtaacatgctcccgagtaatagatcttccgggtgatatagaccaagtatagctcatatgaatagcttctgatctgagcgattatcctttatgggatactccaaaatagatataacaattgaatcctgactggcgcaagtattcggttgataacccctaaggggaataatgattgctccagtcttcgagcatagaanacaatc

SEQ ID NO: 68565 - DNA, 343 bp, Oryza sativa
tgtgggatcggcgtcgtcgatctgtatcttgatcatcttgccatgaggggcgggcttcggcatgcgtttagcatggtcatgtggttcagcctcaacattgtgcactgctctgttgattgcggccagatcgcccttttatgcaaccgaaggttgaagccccttgatgacgatcggacccggcatcttgagcttgagataattgtggtgggagatggcatcgaacttgttcaaggttgtgcggcagaagatggcattgtagttatatgggatgtcgacggcatcgaacagtatttgctctttgcgcctgttctcacttgtgccgaaagctaccaccagttgtact

SEQ ID NO: 68566 - DNA, 404 bp, Oryza sativa
  unsure (1)..(404): unsure at all n locations
tttcctcttcctgtgttaacccagnctggctgattgtgttgtgtgacaaaattctttttcttctaatatattgacgtaccatacttttgcgcgttcgtgaaaaaaaaaaatatcaaacgcatgcaaggtgatatggtgaatatacagtatcagcaacacaagatggtgatatatgaaacggcaaggttcttcttcattgatcagaatntgcgatagatataatagatcgaatagaaggtgttaggtgtgccatcccaattattcccacacgtcctgatcgtggcgctggaacaccacacgattccacgaacacgcgcgctcggatcgcacaccacgcataacgcacgaaaaaactagttacagctacaccaactacagctaaaagtacagcgaataataagcag

SEQ ID NO: 68567 - DNA, 447 bp, Oryza sativa
  unsure (1)..(447): unsure at all n locations
agtaaaacaaataattatcctagactggaatatgatgatgatgtatatatattaaggttatgagccatgtgaacttgaactgagcaattaagagttgaatgcatcatcatgtatctaaaatcttcctctactccatgtccgtgcattgagatcatgtatctaaaatcttcctcctctccacggccgtgcattgngcgagtcaatcttgtctaggactaaaaacatcgcgttccatgtcatcaaaatgctgcctcctaataaatcatgccagtctgagaataaacatatggagaacttgttgggaccaagatagtggatgcaaaatacatatgcaatctcacaaagaactctcagtaccagatctgcatccacgtcacccagtcgaggcatatccttgtaatgatagtatgcacctgaaagcacacaagttttatgtgagataacaca

SEQ ID NO: 68568 - DNA, 398 bp, Oryza sativa
  unsure (1)..(398): unsure at all n locations
ttttctgatgatcgantaatttaattgcttcctaccaggcgtgcataagcctacatcccttttatgggttactttggatgattagccgtacgtgaaacgaactataaacgtaattaggctcagatctaaacttctacttcctacgtgtttttcattagcacgtttccaaactgtaaaccatgtttttttaaaagaatattatgtaaaagctcctttaaaaatcaaatgaacctaattttcaagttataatattaataattaattaattatgtgttaattgcttgctccagtttccgcgccttcttgacagttcaattcctatgcaaacaaacgaatgcttatgcccatactacaaccttcttgttttctttagtatggtttccaacagtaaatggtac

SEQ ID NO: 68569 - DNA, 417 bp, Oryza sativa
  unsure (1)..(417): unsure at all n locations
gcttcgangccggatcgaccggcttattatcaccgtacttgctaacgagccacttcctattcgcgagcagcccggcgacgaggacggtgaggacgccggcacacgccatcaccacacgctcgttttcgacgggaatccccaggacgaaagacgtcgtcacgatagcagcgccaccgacagcgcagagaccgaacatgaagaggtactcgtcggcgaccagcggcgcgcggggcaggtacatgagcgtgtagaagcggatcaccatggtcagcgacaggtaggtgtcgcacaggacgcgcaccggcagccgccactggacgcgggcgaggtagagagggtccttggctatgaggggcgtcagggtgtagaggccacccgcgaacatgcacgacacgaggagcagcgccgctatccact

SEQ ID NO: 68570 - DNA, 244 bp, Oryza sativa
  unsure (1)..(244): unsure at all n locations
gacaatgctatttntatggggaaagccccaaatgtgtaactggtgtggcatctttcaaggatcatgtgcattatcaagttgcaccctatatgggaccacattgaccaatagcagtttttggttctcatgattgttaagtaaatgcaatctggaactgccacaaacggcgaaagttgaaacttctcagcttaaagctagactattcatctttcgcttgagattttgaaattgatacatcacatat

SEQ ID NO: 68571 - DNA, 458 bp, Oryza sativa
  unsure (1)..(458): unsure at all n locations
gattaccacagatcatcatttctgaccgtgattgattttactattgcattatggtagcagntattcctgaggtctggcactaaattgcatttatcttcagcttatcacccgcaatccgatggacaaactgagcgagttaaccaatgcttggagatatttctgcgttgttttgttcatgccaccccagctaagtggtctctttggttacaccttgctgaattttggtacaactcttcttaccattcggcattgaataagactccttttgaagtcttgtatggttatcctccttctcactttggtattcgagctgatgcctgcgtcatttctgacttggattcttggctgtctgaaggcatttgatgacttcactgcttcgacagcatttgaacagagcacagtaaggtatgataacacaagctgacaaatacgcagttttcctcttttcagggggggat

SEQ ID NO: 68572 - DNA, 376 bp, Oryza sativa
  unsure (1)..(376): unsure at all n locations
atattggcccatatttggtttgccaccatagacagccaaactttggtaatgtgacataagttgtatgagcattaccaaaaaatttagggaactttttcttaatctcatcgcagcacataggcctctgttcttgtggttacagtgatctgttctagtcaatccaatactgaccactttgctatttataggtattgggacacaaggcaatcaaatcctgtccatgttcagcaacttcctgagncgctgtacgcacttacagtgaattatccccttatgattgtgggaactgctgatcgtaatctggtcgtcttcaacttgcagaatcctcaggttggtctttgtgacatcgcgacatgtcattaaaatgataatggga

SEQ ID NO: 68573 - DNA, 423 bp, Oryza sativa
  unsure (1)..(423): unsure at all n locations
gacactcaagctttggcttttcttacatcagtggtggtctcctagtgctcttaacaaccttctttttataagaagagggaagaagcaatagtttccccgtcaacaagaagttgtaccatcttcttctccaccaatatattcaaccagtaaggaagagtcttgcctttattaagatggtcatatatgggtagagaagaagatatatacaacttcttgttgatgaaaattgttgttgtttccatgtccttataaagagaagggtatcaacataagcaggcattcaaatggtgtaaaaaagaccacattatgtaggcacttgaatgtaaccttntactggtctagcgggtgaacctccttttcttccanagacgtgagactacttaaggcatgccccacgcagtgacccacgtcgtgggttcaagc

SEQ ID NO: 68574 - DNA, 422 bp, Oryza sativa
gctttatgctgccaagggatatgcagcctctgcttattcatgagcattaaactgtggtggtcaatgataatgataaattccccatggggggagtaagatctccactgatcaactgctaacagaatagctaaatactccttttcatatgaaaacaatcctctggttttaatacccaaagctttgctgacataagcaatagggcgaccttcctaagaaagaacatctcctatcccaccatcactggcattagtctcaatagtgaattatttagacatatcacgtaaggctaacacaaatgttttgactaaagcttgtttgagggtaacaaaagcttgattagcttcatatctactcacaaaaggcacattcttcctcaacaatcgagttaatgggttgcttatcaatccaaaaattttaacaaa

SEQ ID NO: 68575 - DNA, 394 bp, Oryza sativa
  unsure (1)..(394): unsure at all n locations
gcttgaagaagggcatcccccgctcacctagtcgngagacttaccggctgagtgccgccatgctttcagtcagctnttggacgtctttatgggagcttggcggtttcatgttgaggatggcgttgattttctccgggttggcctgtatgcttctttgagataccataaatccgagcaacttccctgacggtactccgaagatgcacttttcagggtttagtttcatcctgaaagcacgaatgcttgcaaaagtttcttctaaatccgcgatcaggtcatccttctgcttggtcttgacgactacatcatcaacataagcttcaacattgcgggcgatctgagttgataaacatctttgaatcatgcgctgataggtgtctcctgcgttcttcaa

SEQ ID NO: 68576 - DNA, 426 bp, Oryza sativa
  unsure (1)..(426): unsure at all n locations
ctgcagcttatcaactatatactcatatctattaattgtgtgccanaaaagaaaaggaaatcttgtcaagacgaaactaaatagtgttgatctatgcaaaatgaatagtcatgctaaactgcattgaactataatatcaatgaaattataccaaattcatagttgaacatgcaaagcagcatgacatcatatcagatatcatattgtgctgatggcactcataaaatcaaataatagaatctgcattataaatgcttaccccgatattcagctggaagtacaacagaagggaagactagcagcttggcaaaactaacatcagtttctagaacaatatcataatcaatgacatgcttcactangtcatcanattctttatttgaccctgccaagtagcaagaatattataacttaatgtcaaacagc

SEQ ID NO: 68577 - DNA, 443 bp, Oryza sativa
  unsure (1)..(443): unsure at all n locations
tgtacatcataagggtatttgtgaatcgtgacactcattttatcctataagagttatgtttggacatcactaatgtcgaaatcgcaaaaaaaaaatattggaaattttaagaacctacagtctacttattaagactacataaatattagaacatttgaccagaaaatggtatgcggatcaatgtaaagaacagtaaagcctcctctgctgttcccaccaaggataagtctaatgttactatgttatccaatgtggtgttgcatatatgggggaaacctttgaattgtcttagaagtcatgtgttcccaattcccattgagaagtgatgaaaaacatttttgtcctcatagcttgtgtattcttctaagataaatggaagcacagaagtaatccatgtntaagcttggtcaagtacactatcacaatgtcattactgttgagca

SEQ ID NO: 68578 - DNA, 446 bp, Oryza sativa
  unsure (1)..(446): unsure at all n locations
tgcaagcttccttctaaaaccagtgcgatgcacatctgtattctaagatctcgattactatgtccccaaaaggctctgagcgctccaaaaacatagcataagttgccaaatctcttgtacatagaagaaaaataacccgccttagcactcctgcaggtgcagagcaattttttccttttcaaaccatccattgaatttcacaagtcaaatgagccatgcttgacttacaaatggatatcagcaacattaacaaaataatgtgggtttccatctgggccttccatcatacctatatctagttntgatatgactcctgcaaaaatatgcacctgtgagcctcatatgttatgattgcgaattcgtagtagacataaatctagttgttgtatattttcatgaagatggccagcttataatagcacattcatcggtatgcttccaaaaac

SEQ ID NO: 68579 - DNA, 411 bp, Oryza sativa
  unsure (1)..(411): unsure at all n locations
tagtggccttgtctcgctggcgttaaaggggggtgatttgcttaataattaggagaggggatagggggtcacccttccgaagccctttcttgcttgattgcctcccccggcatttcattcangatgatctttgaggtggatgaaagaagacctgttatccattatcatgagaccattgtgaatcttcgtgttcaacatgtctgttgaccaataaggatatttctgttacaccctagagagaaaaaataagcatgtgttgtgctgcagcaaggatagattaataaactcaccatcagcagtaattctcttaaaaggagttaaacaagatatggaactcacagatgacaatggaacatgacggatagaaggatgcttccaatcatgcatgaaaaaatngacaacagatgtcac

SEQ ID NO: 68580 - DNA, 450 bp, Oryza sativa
  unsure (1)..(450): unsure at all n locations
gctgcagcttctttcgagcgtaggccgtgagtctttgctccacagaanactctaccgacagagaaaccagccataccagcgccaccaactttcaagaccatggctgacaagacccttcgcgagttcattgatccctctgctgacaatgtggccattgggtcgcaaatcaacatgggagacgtggatttcgacttgaagtccagccttatcacgatggcgcaggctagcccattctgtggcaagcctaacgaggatgccaatgctcatctgcagcagttcctagagatctgtagcacatacaccatcaagggcatcagtccagacgccgtcaggctgaggctatnttcgttctcccttctcgggagagcgaagcaatggttctacgccaatcgtgctgctgtcaacacctgngacaaatgctctacggtattcctctcgaagttctttccg

SEQ ID NO: 68581 - DNA, 429 bp, Oryza sativa
  unsure (1)..(429): unsure at all n locations
ntaaggatgtgcccaacacagagaataataacctgtttgttaaataactgaacttgtgctgtgccacatttgacttcacagatccaacaaagagtgtaaaggagaaagaagtaaagaggcaaactttgttggaacttgttgactatattgcctcagccaatgggaagtttccggagataattatgcaagagatcacaaggatggtttctgtaaacttattcaggacactgactaccccgcccagagagaataagattgaagccttcgatgtggatgatgaggagcctgtgatggatcctgcatggtcacacttgcagattgtttatgagctgttcttgaggttcattcagtctccagagaccgatgccaagttggcaaaaagatacatcgatcattcatttgtcctgagaatacttgacctctttgact

SEQ ID NO: 68582 - DNA, 392 bp, Oryza sativa
gcttgttgaaatcgagatcggtatattcttctttcttctcaacctgagtgcatttgttcatgcttttcattcttttctagcatggcattgtgctgatatctttcttgtatcatttcagttttgtgaattcagaacgtagctgatgcatagctgcatacggcgacgaaggaagagcatgatggggaagaaggggccggacccctcttcggcgccggccgcctcgcctccatcgtcgccgtcgccgtcgacgtcctcctcttccgacgccatgctcgctgtagccatctacgttgggggaaaagaggaagaggattggaggagggagaaagaggaaggagggacgaaggagttgatgctgacgcgtgggtcccagtgtcatatattcagaatgg

SEQ ID NO: 68583 - DNA, 363 bp, Oryza sativa
  unsure (1)..(363): unsure at all n locations
ctcaagccttacaagcatttattanggttttatcaatcccaattttatatcatntatttctgtgctgantntctgctttcanggttggagacctgctattaccgtcaagcaaattcttgttggaatccaggacttgcttgatcagcctaatcctgctgatcctgctcagaccgatggttaccatctttttatccaggttagccatcagtaaaaagtgaccaatcagggttctgctaatttttactataaatcaataatgctaagatattcaagctttgtagttctaatgtgctctttgcgtttgcacgatcctaccgaatacaagatgcgtgttccgctgcaggccaagcagtatcctccgat

SEQ ID NO: 68584 - DNA, 436 bp, Oryza sativa
  unsure (1)..(436): unsure at all n locations
agcttgagctagctnanacgatttattctgtcttaattcaggcctttacgagttacgatcaatcaatcgatcgatcattgaggggnnncccaccgcgccgccgtgccattccagttccagctgcagctccacctcgccggactcgacgccggcgagcctcagcaccaggccctgcgccgccttcccctccgacgccgaccacacaacggagctcccgctccttgggaccacggcggtgcccgcctctttactgtcaacgccggagggggtaccgcggcggctgctcgccgcggccgcctacaccagcggtcggagctcgaagaacgccgcgcccatggggtcgtcgacgaacgggtcacggtcgtagacctcctgtaagcaagcaagcggagattaattgatctctaacctagctaggagaacacaatggagtaca

SEQ ID NO: 68585 - DNA, 390 bp, Oryza sativa
  unsure (1)..(390): unsure at all n locations
tatctcctatgttacaggaatggatcattcagaacatcttcaccggcttgccgtcgtcgccgccgactggtgtcctcacctatacggttgggtagtcacaccgccgttgntgggcgtcgttttcttcactgaccggctgcctcgtccgccgtcgactggtgttttcgcctatatgattgggtggtcacaccgccgttgttgggcgccgttttcttcaccgactggctgcctcgtccgccgtcgactggtgttttcgcctatacggatggttggtcacaccaccgtttgttgggcgtctacgtcttcaccgaccggcttgccttcgccgtcgacgactggtgtcttcacctgcacgactggcctattatgccgtcgtttggtgggcgtcta

SEQ ID NO: 68586 - DNA, 429 bp, Oryza sativa
  unsure (1)..(429): unsure at all n locations
agctnttcgtgtgcgatctccttctatgggtgtgatgaattccaactctgatcgatgcgcgtacttcatggcgcaactaatgtcaggacggacgatttctttttgtccgggtaattgacaaaatcggttcggatgacgtgctgcttgcttttgttgtttcggtaaagttcagattgccgattttacacagtccattagagtacgtaatgatctcgaagcaatctgtcctctttagttttgtgagggggagggttactaattaaaaatttccggagtatttcgttgtacattggttaaaacaagagtaaattatattcacggtacatcaacttgataagtaggtacaatttaataaaaaaacttaagaaatgaacatcataatgcaataactcggtacgtgggtgcaatttatctagcgtaccaacttta

SEQ ID NO: 68587 - DNA, 403 bp, Oryza sativa
tgttgctggcctgcgaaaccactagtctgggtgccatttctgctcagctccgacgtggagccgtgagaccacaggccagagcaacgtgttgtacatggcctaagttaacacgttgcaccatgtaaagtgcatctttgtctcactttgatctgcaccatttatcatcacacgctttcactttatatcagtttatgtcataatatattaagaaattgaaaaaaaactcagcgaattaaaccttgtaatatttcagctggattttcacagtgagatttgctaaatttggtgcaagctaaaatgaggtgtactacaaggtgcaaaatgcttaagctcccatatgttgaccatatgctgatataatactccctctgtccaggattataaggattataagggagtattc

SEQ ID NO: 68588 - DNA, 371 bp, Oryza sativa
  unsure (1)..(371): unsure at all n locations
accgcagcatgcagctnaatgtgaaagcatattttttttctttttagcctgcggcctggaaggcttttctaatcatacttgcgctccactcactgactctgcttgagcaaaactatccttctgcactagtccaatgattcgcaaagcttcacatcaaatgggagtcatgttggcccataggaggacatgcctcacaagatattaatatatagtgaaagctcaagacaccaaacgttgattatcacctctcatacctccgaaactacgagtggcatctgttgacttgatggataggggaaaaaccataactgcctcttgatcctgaactattaagcgactgagtaccgcctaagttacttccatacaatcta

SEQ ID NO: 68589 - DNA, 452 bp, Oryza sativa
  unsure (1)..(452): unsure at all n locations
tcctttaatagattaatntccttaatctaatatagcattgtttcgactattggcgatgcgataattctcttatggactttccaaatttcactgttaacagaaataccaacatcttttcacacgtgatgcaagaggttcgatccccattccaatcctagtgtcttggaatgtcaatggtgccatccaagtagcctcacgcttcaactntcttgcacattcaatgttaccaggctcgtcgttgcaactccaacatcatcaccaatcctccacagtgcatgtgtgtcacccaccatgttccaaccaatgacgttgcagcaacgcgtccaccacaaactctagtggtagtgcagctgatacacctggcaatattggcaacggtgaaaatggtggcaacaacgacaatgacaaatggtgttggctctattaatgatagagccctcatgaatcaacgt

SEQ ID NO: 68590 - DNA, 394 bp, Oryza sativa
  unsure (1)..(394): unsure at all n locations
gctggcaagtagcaactgtactgaattcatggattgttgctaagtggtcgctgggacgatccttactgagaatggtgatatacgcttaagtggacatgaagtgatctgaattggccttccagatggaggttttgctttctgtgcactcactctgtactgtgcttatcctttcatttcgttctgcttaaattgactgacctataaatatgaatatggtgttggattggtttgcaaagatctttttaggtgtggaaccggatgcatcccangtttgaaagcattcttgaggcatgtcttgtactctcacccttcaaattaacatttaaatgttcttttgtctatccggtgttgttggcaccttctctgcatggaagagctctctgtcatgaactga

SEQ ID NO: 68591 - DNA, 406 bp, Oryza sativa
  unsure (1)..(406): unsure at all n locations
gaaagctaacaagattgatgaggacaaggattgagccatangataagccaaggctgttatggctgagcaaatatgcccttaactacccattatatantttcagaatttctattgtatttttatagggcctgaattggattgcagagtntggcctagaatttaagcactaccagccctaggcatgtcttggcccctggacgaggataaatcatatcatatctacggtggattttcacccaccactttactctccattatatataatgatgattcttgccgcatcattgcctccttaattctccatttcttacctcctaataaaagccaaagctcctcacctttcgccacttgattaattgaaatggctacatcgatcctacgtatattagcttactaattgagcact

SEQ ID NO: 68592 - DNA, 369 bp, Oryza sativa
  unsure (1)..(369): unsure at all n locations
tttccatattnnccgttcctttcatgacaaaacctttcggttgcgccatgtatactntttcctccaaatctncatttagaaatgccgtttttacatccatctgatgtaattctaaatcataatgtgccactagggccattataatcctgaaggaatctttacaagagaccggagaaaagtctcattgtaatcaatgccttctctttgcgtgaaaacttttgccacgagtcgcactttaaacctttctatatttcctctggagtcatatttggttntgtagacccatttacagcctacttgtttggctcctttaagaatttctctctaatccagacatcattaatttcattgattcatttcatctttcat

SEQ ID NO: 68593 - DNA, 424 bp, Oryza sativa
gcttgatcgatctcgtcggatcgaatagttgatgacgatgtgtttctatctctttttgaaggcaaactccggtcgggttagacctccccacagtcgaagtctgcgagtagcttgttgtcggagaatccatctcttaaacctatcttgtcgaaattctgaagcaccaaagtcccctacctggcgcgccactgtcgacgtttgatgtcgcgattcccgtatttgcatggtatggggatcgttggtactaggatatacactagactgaggtaaaagagacggagacagggattgttatacaggttcaggctcctgaattgtcaggtaataaccctacatctctgttgccgaagccggtattactcttattcaccataatcgcaccaggacaatattttggggttgctatctaactgttattgacata

SEQ ID NO: 68594 - DNA, 419 bp, Oryza sativa
  unsure (1)..(419): unsure at all n locations
cttcactgaaagcactgataaattcatggacccactgtgttttactcgactcatcagntttttcactgaaagggacttatgatcgtggaggactgtgggtaaggcttattcatggacaaaacttaaacaggcctagtaatgtttgtactgactatgcttcgctaaaatggaagtatcatgcttgcaatatgtgcgtgtgattaatgtgtggatatcctagataagaattcaaggccaaacatatctcatgaaacagacattctcttgtgaaatatcgaggcaaattataacatgtctttactcaaactgaacagaaatccaactgttatctactggtatttggaaagaaccttcaactaaacaccaataatttcagcccaaatacctgaatctttgtagcgggttctactctagcattt

SEQ ID NO: 68595 - DNA, 243 bp, Oryza sativa
  unsure (1)..(243): unsure at all n locations
atttatgtntaagtttccccttcatagttcaaatgtgccaaccacatagaccgatctaaacacattcagttatattgtcaagaataaactaaaaattgatgaaattattcagagaataaacttgcttggtagactaaaccatatgatcagaaatcgtgaacgtatggattttacctgctgctttggtagcactctggggcaaaataaaggctgctggccagttctggatcagctgaacctgat

SEQ ID NO: 68596 - DNA, 426 bp, Oryza sativa
  unsure (1)..(426): unsure at all n locations
tctccttcgtcttccatctcacctcacacaagtagaagtaggagatgagttgtaatttgagagaaaaaaanaagctcaaagcacaccaacacataaggagaagaagatgcctngttcttcacagcaaccagttcttcctcaagtcctaatataatcaaattaggaggagcaggagtaactttcgctcccctttcctactcctacttttggattcttgtgcgtgcgacaataacccagttataataagggtgtgtttagttcacgcttaaattagaagttcgattgaaattagaacgatgtgatggaaaagtttgaaggttatatgtgtagaaatagtttgatgtgatgaaaaagttgaaagtttgaagaaaaaatttataacttaaccacgccaacatgaatatatagattaatttgacacacgtt

SEQ ID NO: 68597 - DNA, 303 bp, Oryza sativa
  unsure (1)..(303): unsure at all n locations
gattattatgtctagaaaaagaaagaggtgttcaaggagagaaggtattatatatggcccaatggttgaaagggatagaaaaagaattgagtacctagaaacgaaaatttggtggaacgatacaacttgtatcaacatgcttagacttataagggcaagtttctttcgtttttgtaagctttttaaggatcgtggnttacttgaagataccattcacatgtgtattgaggaacaagtggctatgtttttgcatacagtggggcataaccttagaaatagaataagtcgtactaattttgatag

SEQ ID NO: 68598 - DNA, 419 bp, Oryza sativa
tgtggcagagacaaaccacaagacacattttccggcctgttgaccaatcacgccaactgggcggctgtaggatatgttaggggggtgcccatgaatacggtcaagaaaatgattatagctgtacctcatctatttcaccatgtatgcacgccctcgatacaaacttatgcacccgtatcagcttaaactcgatctaaaatagagtaaattaagcaagtggcaccaccctctgtttcgctctagctccgcccgccaagtgccatattaaagcttctaagtacgcaggtgatcacctggcggcgagtcaagtatgatgaactgatgacatgtacatgcactggctgcacattagctgaccaccatgatcggtgcaatacagcaccgtacactactaccaaacaacacatgaagaacgatca

SEQ ID NO: 68599 - DNA, 332 bp, Oryza sativa
  unsure (1)..(332): unsure at all n locations
attcaatttgcttacttgatttatcattgccctgcttggtctttcgacttantcaatgaggactgaaggtttttaacagcttttgcgggttttaggctcaataaggcttgacaaaggctttaagaaattagaagctaagtatggaacaccaagcatagcataaattcatcagtattgtacaaattgtgcctccatcatcattaatcatcaaaatcattgttatatcaatcagtatcagtcttttcatcatcagaattatcacgaccagtcggtcgacaatcggtggtctgaaatctctcaactacatngattgctatcttatctgcagattt

SEQ ID NO: 68600 - DNA, 274 bp, Oryza sativa
aagcacccatcagactccagggagtgctaaccttttacgatggacatagtggcctccccatgttatcgcccacgccctccaccggtatttacataaaacacattggcgtacgagctaacccgatcaatcataatgatcactagacaacagctatcactactagccgcttgcaaaaaccaaagttggaaaaaccgactcgctaatgttcaaccgaaccggtggaaggccaaccatactgcgaccaagtttcagccggtatatgattcaaagagcc

SEQ ID NO: 68601 - DNA, 422 bp, Oryza sativa
  unsure (1)..(422): unsure at all n locations
gcatgcaagcttgcgggcattgtgggctacgatgagtttattctgtgcgtccgcaccggcctccatgggcggctcacccctctgctcatcaacctgcctcgcagtcaagagaccctacatatcgtccttattaggaccaacaccacaggtgataatcagactaatttgatatgcatgtggctgctgaatactctgaatattgcttctaaatgtcctgcgtaacttgagattattgataatgccntaaatgttctgaattctgaatttctgataggggatgacagtgactgaatttcctgaagcatttagggtgtctctgtctttttattggggaatattgacgctgcccagtttgtagatgcggaatctagttaattagagggattctacttgttcggatgaccaattgtaccccgttagac

SEQ ID NO: 68602 - DNA, 464 bp, Oryza sativa
  unsure (1)..(464): unsure at all n locations
actcaagcttgttctgtgaagtgtgcctaaaccttattggtggcattcctgtcttctttgtaccagactaccagttgatgtatctatttgcctgaaaatgttatgttgtaagcctaccagagatagctggttctgttgacacaactgataattattgcagactgcaccgattactcccaagaagattgcacagcctgatcatatgcttcaccatcaagaggaggactcctgctctgtgacttcttcgtatccttcttctatctaataaaaatacaccgcgtttctattttttttgggttgtactgtgatgatgttttctgcctttatttcttgtgaagatgtatctaaaatattgcatgagaaaattcatttcacataatgatcagatatntggttttcaattctagagtgatgactggggaaaaaaatcgattgtaaaaatgattagctctgttaaccttaat

SEQ ID NO: 68603 - DNA, 422 bp, Oryza sativa
gcttcgggtcatatagaggctagctaggtcttgcacaacaaacaagattgctgagtcctgaagaaaaggtatatatacaggaaatatttaaaagccaggaccctagtactagtagcagtgcccagggcaatgaaaaagcaatcaacaagaatttcatggctcaaacaggggacgcaaacacatagatttttcacacaagagctacagccaggcctaggaagaaccacataaagcacaatgggagacagtattagtatacacatggcaagacacagcaagacaagtcaaaaagctattgacgatcactttcaacagattttggggagaaggtttacagatcatgcacaataaacgatcactctaatagattttgggagaaggttacagatcatgacaataaataagttggacctgattacatg

SEQ ID NO: 68604 - DNA, 434 bp, Oryza sativa
tggatgatctaagatgccaacatgctagcatttcttgtatgccacatatgtgtagtgttcattgagggtggcacaactgaaaccgttgccgaagatggatataaaatttccgatgcaataatctgaaagaacatggatgaaatttccagttcccttcaacgtgtcgatgcgtgtgtagtcgttgatctcacggacaatgtcgatgcccttactttggaaattttacagtccttattgagataccaggagataccaaaagttaattctatgtccttggtaccaaatcttatatgctataaatttggtactaactcccaagaaccatactaaaattacttattataaaacaactagaaaggaagcctgcgcaaatgcgccggcaatttattattgtttaaacaacctactgaaaagtcatatatcatcatcaaaac

SEQ ID NO: 68605 - DNA, 322 bp, Oryza sativa
  unsure (1)..(322): unsure at all n locations
tgcaagcttaagctgcgcagagagtattcaggatttttctatatcaaancttggttagnacaaaggctgtagttgttggattttgttcattacgctgaaaagtagcactgaagtttagaggttataaacgctgtctttgtgtatagctagcataaatagctgccatattttagatggtttgataatgttctaaccttgagagttctcaataaggcgtgtctgggctggtcacaacatcgtaaggtttgacttggccagaataagggaagcattctctgaaataggacggccacctccggaacccaaggggatgatcgacacc

SEQ ID NO: 68606 - DNA, 352 bp, Oryza sativa
tggagcatctgagcgccagccatgccattgttggtctattggccgtcggccacacttagcggtatccgatccgggactagtcttctacctgagcatgtgtgatagacgatgaccctcttgtgggtggtggtattatatttactcttctgtgtacgactcatcatggttgtaatcattgttcttatgttctgctctatcaaaagaaacttcgcaccgtctctcgcgagttcgtcaaaataaaaaaatgtttgccatgttcgcctcgcctgccttggtgtatgtatggaatcatgtacttgaccaacgtaatatgtatgccactacatggttgtgtgttcatgctaagaaatgc

SEQ ID NO: 68607 - DNA, 447 bp, Oryza sativa
  unsure (1)..(447): unsure at all n locations
gcatgcaagcttgaagaagtttagatactttctaatgtttctatctaccaaaaaaaactacaacatgttcaaagtttaaccttgatgacgccacgacaaaacagcatttcaacaacttctttgacgataggaagaagtccagcatggtgtactccaatccctctacgtagaaggctttgtatccctacaacctaacagggaaaccaaagtttcaaacagaaacaaggataagattgtcagactaaaatcatttgtgctactagatcacctgtggaaggttcctatcagatcctttaaggcgtgaaaaggccttgtcacagaagaggcggatttcacttttctctgagttactggtgagatctgcaccaaacatgctctctgctgatctatcacatncgatttttgagaagcaaaanattaccacctgtcaaagaaccatataaaata

SEQ ID NO: 68608 - DNA, 475 bp, Oryza sativa
  unsure (1)..(475): unsure at all n locations
tcagagctttggaaccttgcctaagcaaggcaatggcttttaagaggatgaaaggatcaagttcttttcttgctctttcttccacccacgatgtaccaatcgatcacccatcaattcatcatcaagattgcaaaagttaaacatgattcgaaaaagactaaaagaagctagatataaagcagagaaattaaagcgaaagaaatagatagaggaatcaagtgacactgtcacacgcttctcccggttccattntgcgtgcgtgcatgtggaggcatatttttcactgttcctttcaaaatcattggcgaatccaagttaaattaccctgctttttatactgcattattctctcaaaaaatagatttcgaactaagtttgaagtaatctcactctctgaagacatgtctgttaagtaagctcaggactataaatactagtgtatataagcggttcacttcacaaggtttgaggtgag

SEQ ID NO: 68609 - DNA, 435 bp, Oryza sativa
  unsure (1)..(435): unsure at all n locations
agcttggaagtgtgtgtgaaagtggttgttatgatgtccttatataggcaggtacgacggttgtcctctttgtgaattgtctgaattgccccgcaaccgtcgtcagggagtaatgtgggacgtccatgccaaacctctgcctgaactgcctgngctgggccctcatggcctggcctccagcttatggactccctttgttcgtccttatctatttctgtgaattttggactgattctccggtattttgatgaagttcacaacccatccttgtatggatacatgtttctctctcactttggtccaattttcctcctaactcctaggtttattacatgcatcaaataaataccaacacatatggattatgtgagaattaacacctatcactatgtnggatattttattatctagactttatgcagatgttggcggtat

SEQ ID NO: 68610 - DNA, 97 bp, Oryza sativa
gcttcacagtggagatgatagtctcccttaattcagttcacttcattaactcattaatgaaaatgtactactccctccgtattttaatgtatgacgc

SEQ ID NO: 68611 - DNA, 351 bp, Oryza sativa
ctctccgaacggaacaacgctatctgtcactgtataggaggatcaccaacttgtcgttatgagatttttacaggataataatacagttttagtactattgtatagtaatattctttttatggaatttaatttgtaataatggcaaaaaaatataattgttgaatacttgaatcaaaatctgacatagataaatggattcataggtacggtgaatcatctcagacggtattgataggaacgaccagaattaattagtactcatattgtcctttcatgctcacatataagacattaaagtaaactagaatacatcttatcttactattacaaatttaatagtcttagtactag

SEQ ID NO: 68612 - DNA, 436 bp, Oryza sativa
  unsure (1)..(436): unsure at all n locations
actaagcttcaccactgtacgcataaggcgttggtgccaaattttcacttcgacctttgtttgatttgccgggctntaaaccaacggtccgacgttgaggcccgtagaccgcgcaaacgttcccatggaaggagtaaagttcctaccggcggctttttagtggctaaagggtattttgaaaataaaaggaaatatctgaaaggcaaatctaagtttaaattggaaattcaaatgtaagattaaatcaaatatttattccaatggcatttgaataaattaaggaaattcaaataaaatattaaaatttgcaaatttggtaccaaaaatgtagctttgaatttacatgaatttacgttcaaggttcatcggaatcggatctacaggtgacgagatatgggcctcttaagaattggatttgaattaaatcttaaaattt

SEQ ID NO: 68613 - DNA, 364 bp, Oryza sativa
agagggggttataactatttgccacttttagatttggcaaataactatttgccacccctatctcaatgacatccgtggctctgttcttcaaacaaagtgctccatataatcctatcaggtcttgttcattcagactatcagagagcaagctgcaagcatacacagttaaattcacccattcccatgacttataggcaagcacaatagtcataactcatgatagcaagctaacagaaaaaggctatctacacatgtaagagcggagcagaatctgacggtcctgcgaaaatgacaattttacatagcgaactgatgaagcttgagtcacctaagcttcctttgccttcttgagctgacaaccatc

SEQ ID NO: 68614 - DNA, 391 bp, Oryza sativa
ttctttatgcacacactcgaatcaatgtaactactcgagtttgaatcttctttacatttgatggattatagtcactgacatcatcaccagcacctctacttcatcggccctgacatctctaccggtgctaatggatgactacgtattcacctccggctgcttctgtcattgccgactagttatatcgccttcatggttgacctactatgcaaatgctgatgagtgtcttcgtcattatcattggttgctacactgctattgactggatcaccgacatcgtcattttcatcatgtccgatgcgcttgtcgcagccgactactattcttcatcttcatgacttggggattacgacatcgcctttgatcatgctcgtctgaacctgactgatta

SEQ ID NO: 68615 - DNA, 359 bp, Oryza sativa
  unsure (1)..(359): unsure at all n locations
gaagatcgagctcggtgcgaaccaacttgatagcatttctacgtgtcaataaactttacgaccaatggaaaacgatcatttacagtattataaaagaagtatttcttattatcgtgccggattaacccgctataaactgaagagttgtaccgctataaaatctcacattctaaacaagtcatgggcaatgcgatcatattttcgcttatgcttataagacaaaatttgttttttcaaccttaaatntagagttgattataagggtttttcttatcataagttatttttcagtcgttgcttttagatcgtcaagagcatatatatatatatataaatcttattcacaaattattttttat

SEQ ID NO: 68616 - DNA, 215 bp, Oryza sativa
cctgagctcgctcgatcctgtcgaatgaacacgatctgtcttgcgtctttccgagctctaactgctctcgagctcccagctttttgatcaccctacttccagcactctctctctaagtatcattctggactgttctctcactggctcactgcatcacatccgttgggtggggaagagacggtacagatcctcatctaccgtagagggatgttctt

SEQ ID NO: 68617 - DNA, 403 bp, Oryza sativa
gcttcactgctggtgtgattctggtcttcgctctggttatcttatgtctaagattcttgtgcgttattcgccagcaacttgtcaaaacatgctcagatatcaaccgccacaaagttagaattactacatgtgagaagttggtgaaataattaaccaagggcatcgaggagtctatgaaagaataggtaaagcttcttgctgaaaaagagaagatgatgtctattttcaatgagattgagaaggcagcttttactgttcaagaagattattagaaaacacaagaagtagtcttattgtattgccttaccagctgtaaactgattggattgctttttatttgttcaatggacaatgttaatctgtgttctgcagaagatggacaactcatatagattatcttgac

SEQ ID NO: 68618 - DNA, 253 bp, Oryza sativa
ttctaattcggcccgaaaaggaaaaggtgaactttaattacttttccaattaacataatcactgaaatgatctttgaattgttaaaaatacttctaatgctcaaataatctcaagaaaaaaaaccctgaaatacttggacactccaagtactctaaaaaattaccatcagaccatttaatggataaattaatatttaaataattgctgaacttctctttgtatgattaaaattaggaattgagctccgaaaat

SEQ ID NO: 68619 - DNA, 293 bp, Oryza sativa
gttctgctgctttctatcctcccccgaagtgtggtgtggagaccggctgctgctactcctgattattctcgcgtgcgtaggcagcacgaccaagactagacgaattgacgagactagcgacgacacgcgcctgccgtcgccgatgatgaacgtgcgctggtggataatcctcccgaattgcagaacgacgatgggatagtcgctgactcaactcccaatgctattataccactctgtaataaaatatatgctccactgagacaccaatttcacgtggaaacccttgtggaaaa

SEQ ID NO: 68620 - DNA, 464 bp, Oryza sativa
  unsure (1)..(464): unsure at all n locations
actcaagcttaaggagttagatggggataactttatagtaagatatgtttcgtacattctcatgtgctagnatgggatggcctatgctgattaatatatttatgactagccttgcattctggtaggccggtgtgtatgaattattcgataattctgaggaattagtcgatgattcagaggagcttcctatttgccccgacgtggtagtttaggtgactaagtctgttcaatacaacggtattgtgccacgtgggtgggtttccgttgtgtccgccaccacggcgttaagtttaaggcgtgggcccgccacttaacggttctaggtcatataacgtgtatggcttatgatggagtaacacgtatcgtgctggtgtaaagctaaatcatgaattttggaaagctttgttgcgggtataaattggtacttatgttcgcgtgcatgctttgctatattatttccatat

SEQ ID NO: 68621 - DNA, 349 bp, Oryza sativa
ccacccgcagctgcagctgtcatgtcttaggacttctttttttcagagacagccttgccccggcgactatgagaagggggctcagactcccgctattgagatcttcctcgcagctggccaccaggtcggggcggtgcgcgtttaagaggaaatcgctttcttccgccctatttctccggccttactgaccatggtcacgtcctggaatagaggaggaggcggtggcgttaccccccccatccgggagtgggattcggtgaaagccgggcctcgctctgcgcctggtctcaactccttcgcggaccttgagaggagatccctcttcggggttcgttctctccccccgcga

SEQ ID NO: 68622 - DNA, 357 bp, Oryza sativa
agcttataattacctataagtatacattatttttttgttgtactccttcagctactataggtaattacgtagaactcctttcgtattctaatatataacgccgttgattattatcaacgtttgcccatacgaattatatgtaattaagacccacacactattatgtccaccatataggcttgtctatggaagagtacactgcaggccataaaaataaatttttaatttttacatttttattaaaatattttaaaattatatattttatttcgaaaatttataaacctagacgcctcacgcgtgctcactacgcgttctaggagtacgttttttaaaaatcaacaaacattaggggac

SEQ ID NO: 68623 - DNA, 285 bp, Oryza sativa
gagatcagttagtcttaactgattgcatgcgccaaaagatgagtatccagctaacaaccgggtgtgaagatatttgaattatgggaccgtggagcatttagagcggatcacatatgggtaccatgcatgcattgaggtatgaaagtaccattctattccctcaataggggcaattgcaaaattaccactactctgaatcgttattacaaaactgccactataatattacaaaaatgccactagaactggcattcgagtggattcttgcaatattaaaaaaaccgg

SEQ ID NO: 68624 - DNA, 366 bp, Oryza sativa
agcttgctgcgccatgaaatacgctcagcttgtttcttgtcttgaggcaatttttgctgagttaaaaacttgataaacggttccctccaatcggcgtcaatcactccaacctctttggcctgctcatcttcgattttatccttctgtagcacagtcagctcatagagtaaattaatacctttactttcggtggcggacctagaaaaatatgatttttgcaagcggaaccttatgtggtccgccagcaaaaatcataccaccaaaaaaaaaatctaaatttcatccttatccactccccccactcattttcctcccagtcctctctctctccctctcatttgttcaccaccaccagcaaatcccacc

SEQ ID NO: 68625 - DNA, 455 bp, Oryza sativa
  unsure (1)..(455): unsure at all n locations
taattaacaagggttaacatggattataaggaaaaaatttatttagaaaattattttggtgcattattaattgtgatactttgtcgtctcaacttaagatagtctataccgggctctgtctttgagcatgctctaatggttagaaaagaggccagttgtcgacgtttgatgtcgcaattctggtatttgcatagtatggggatcgtcggtgctagaatatatgcgagactgaggtaaaagagatggagacagtgatttttatacaggttcgggcccctgaattgtcaggtaataaccctacatcctgttggccgaagccggtattgctctttattcacctgtcacaccccaatccggcaccgccgtacaacggcacctgatangagcgtgtcatangaaaaacagcgcgagtcgcttcttacgaaaccgcgatctcagtaccagttccaggatgt

SEQ ID NO: 68626 - DNA, 437 bp, Oryza sativa
  unsure (1)..(437): unsure at all n locations
agcttcttccaaagcatacggctttctatatgttatgacgatctctagacagatggatcttatatgaatcgtatgatgaagtaccacatgagtggatatataggaaaggaatccaaatctgccgaatcgctcatgttatgatcttctacatcctaggtctccgcgttccgtcatctggcttatgttcttcatgtagcattcagatcgaatgactctatgaaattacgtcgatacttctacatattatgggtaacgtaggagacatccctattttcccccgggggtcttaattaccactgcttagctttcaattcgcctctgaccatcaaattaaatgtgaataacccgtcctcctctctttgaaacaaggggcgcttccggttctgtgcgtgcttcaaacaattntgtcttctccatattaccatatctctagagtc

SEQ ID NO: 68627 - DNA, 367 bp, Oryza sativa
  unsure (1)..(367): unsure at all n locations
gacctataaaactcaacttgtcagtttgggaagggggtttttgatagaaaagaataatctacttcaaccgatatgcccttaggcacggccatacataacataaaaatcacacgtggaaggggtgggcaattagctagagcagcaggtgctgtagcgaaactgattgcaaaagaaggtaaatcggccactttaagattaccatctggggaggtccgtttggtatcccaaaactgcttagcaacagtcggacaagtgggtaatgttggggtgaaccacaaaagtttgggtagagccgggtctaagtgttggctaggtaaacgccccgtagtaagaggggtagttatgaaccctgtggnaccaccccatg

SEQ ID NO: 68628 - DNA, 342 bp, Oryza sativa
  unsure (1)..(342): unsure at all n locations
cctaagaaacagaaacaaagcagtgaacattacgttttgttaacaaaaatcgttatgcactccagacccaaaaaagataaacagaggctggtgcataccgatctagtgtgctacaacactatttctggtggaccatgagcactatatttcactagtttcaggcatttttgtttcttaatgagcactactctcttcttcttaatgaanagcaggaactccccacccttctcagaggttacattataaataaagtgattcttgtatatggcatggcactcatagccgcaattagacagtacagatcaaactcactacaattacctttctgacggttagcttatt

SEQ ID NO: 68629 - DNA, 445 bp, Oryza sativa
  unsure (1)..(445): unsure at all n locations
tcttgnatgagcatatgtagatggcttattgaccgcatgtgatcaagttttctatttttagatatgggaataacttttcttttgcattttcattcggatcttatagcatgattatatgtcatccatcgcgcgtcttcacacaggaaaaacaaaactgtactagctaattcaggctatgggaacctgctcctgcctttaccttcaacacagctgcagtcatgtgaactacggtttcctatatttttacctatgagactggtaggcatcaaaaaaatcatattatctttgttattcatttacgaggtagtacactgttgaagatactatgggtctgggcaaatatcaaaagttcaataacataccaagctaaacaagccaatccagaaggaatgagaggtctacataattatccacacatacagcaacctaatcctgaactccatac

SEQ ID NO: 68630 - DNA, 432 bp, Oryza sativa
ggagtccgtccaacctagtggttttatcttatatacaatgccacggaagctagagcagtaggcatttgctacatcctttgttcgcggtagtgtaataattctgcttccactgctggtttcgacaaatgcaccactaatactgctccatgtttctatgcttgatatgtcatcgattacaactaggaacctgagaaacaaacatagctataatcaatagcagaaaaccatagatatctatagaaaaccatatcaacgctattttggtataaaccatatagttaaatcctggccttcatactcattggtatatctatatctatacctaccccgggcattatcttgtccagataataaactgttaaaatttctatcaagtctactatcagatagagaaacgatgactgaatgcagcatgtgtacagaacatgcgct

SEQ ID NO: 68631 - DNA, 480 bp, Oryza sativa
  unsure (1)..(480): unsure at all n locations
gcttgacgctacccctacctggcgcgccaactgtcgaaactagtattcggctttttttaaagggggtggctatcaagctagaaaagtgtatgggtttggagacaaaggatttatacaggttcatgccttcttattcaagaagtaataccctactcctgtccggggatgaatccgccgagtgtattattgattgtatgatttggagaaaatcaacatccgcccctagaggcacccggaccccccttatatatgggaaggagtccgtgttacaaaagataatctatatccctaacggaatatgtagatacagataaaatacagccgtaaccgactaagtctcaaggtggtttcttgatgtacaagttaagaaacaaacccgagatacaaataagatattctatctatattcggnatcctgtatttcacccacaatccgtctccgtgaagatatgggatatccataatcttcacacatatata

SEQ ID NO: 68632 - DNA, 361 bp, Oryza sativa
  unsure (1)..(361): unsure at all n locations
aatcactcagaggttatcagaatcagttcttctttggttataccaacctacagagctgcagcatattttggaccatatagcctcataacacgcacatatgttgcaagtatggcgttgcttatgtctgcaatttctttagtttgctttatttacatacattacataactcattcatttcatgccccacgggttaaaggtcgctaatgggccaaggtgcaataataagaatagcggaagctggatatctccttcgtgccggccttatcctactagcaatgtatgctctaaggcagaanaaaatagctaaggacgcagtagaacgaactactaatccttgtggtgatgagctatttcatcattc

SEQ ID NO: 68633 - DNA, 379 bp, Oryza sativa
  unsure (1)..(379): unsure at all n locations
tcctgcngaaaaatgatgaactctacggaccctcttattacaagcatatacgaaacgtttaggcatctgctcgtttcgctcgtaggatattcttctgggtgcgaagcgaatacatgcagccatttctgctgatgagagacggctcatacgtatccttgcgttattatctgctcgccatatcgatacggtactgttctgtacactgatttattgtcaatacatgtttttttgttctatttccgatgaacgaatattggcagtatctgttctttgtccgaccctaacgtgtctgaatgtcagtacctgtctgactccatgctgagtgctgacgcgatacgtatcttccaagtatattccgcttgaccgatttgcatctgat

SEQ ID NO: 68634 - DNA, 358 bp, Oryza sativa
  unsure (1)..(358): unsure at all n locations
gcttcttgactagctgctactntaggctgtgctctgggagctctaccctcnacttgagtctggcttgccacttggtacaacatagcctagagtgatggatttctctcctctcacacataggattgaaagaaagttaacagcaaggtctacattcctctcatatggagataggctaacactggcaaattcggtgctatcatctctccctacatactatatgtgttccctttctttccggttgcagtcattgaaaatattgacagagctacatagcattgtctatggagaggaaatgatcttcattcccacaagaagtctttagcagctttgggctaaaggctgtcgcccaaaggataaa

SEQ ID NO: 68635 - DNA, 233 bp, Oryza sativa
gatgaagaaacgtaaggctattgggagacgaacggcccgatgatgctataacactggaggattttttggtaaacatacttgaaatggatcccaatacccctttagataggcgcactacctaacgggtcgtattccaaggaatgagagagaatgccgcccatatattctaatgcccagcaagggcggctgtgtcgacctcaattcaattcatattcaaccgtagactccctcta

SEQ ID NO: 68636 - DNA, 448 bp, Oryza sativa
  unsure (1)..(448): unsure at all n locations
cgcacgcatgcaagctnnttcctctatactctgtaatacttcttcctctataccctntcagaagacctcaataatgatggtggtgagtggtgaatctgtcactatccactaccactcacaactaccatgtgggtccctcaaaaagtgaggcaggtggacttttgtcctttcctcaaccttaagtcaccaaatggcgaaaatttcttttgaagtgtggtaaaaatgataacaaatatgtaatatgctcttaagattttacaatgagaataactttactttaatatttgaggctttaatgtggttctcttgctaaattttgttgtaacgcacgggcattcacatagttctaataaaacgttatgggacgattttctttctgctgggtaaattctttatgataaggtgaacgtcgatgaaattcagacagtttgtacataattgatcactc

SEQ ID NO: 68637 - DNA, 379 bp, Oryza sativa
  unsure (1)..(379): unsure at all n locations
tctgcagattgttcagaacattttgatgcttaacaaatttattctgctttctcacatccagccaatattcacatcaggaaaaacaaaatggaaataggttaacgctgatccatagcagaatcctaccggtgcagagatgctcgagtgtaatcaaacgagatttgatttctttattgatttatgttttcaggtttgttagctggggtgttctcaagtttgttaatcggctgatagacatatttacaagtacaatgcatgtgaccgaccgagcgtgacatcctaataatccccacataattatgtctcggcagctgttatgctgtctcaaatccggtgataattgcagcgagttcgaccganaataacataatggcgcacg

SEQ ID NO: 68638 - DNA, 357 bp, Oryza sativa
catgcagctttgtcaaatcgacatggttatttctctctgactgccgtcccttgttgagtacataagaaggtttccgctatcgatgagaatgcctactcgatcatatttcccttttttttcttttctctcgtcagcgacctagccttctcattttctttctgggcgctttgtttgagatttgtgtcaagtaatcctttgctcaaagcttggcgggcatttgtgctacacggattttgactatgcgtgtagactcataatattatgcttttgacttgcgccacggagtcacggccggcacgggaggaggctaaccggaggcacggtgatcgtcactgatgtcatgcccacaggtctcgc

SEQ ID NO: 68639 - DNA, 408 bp, Oryza sativa
  unsure (1)..(408): unsure at all n locations
tgaggtagagggatcgtcggcttgtgttgatgcacgtttctccacttgtgttgaggaagaggctccttgttgtggctccctatgacgtacgtccccaagagccaatcttttgattgcttcgctcggatcctcctcttcacctaacacatgtgagtcaacttgctctacttgagaaccattagtttcatcaaatgtcacatcacgcgcgatctcaacaataccggagggtttgttgaaaacgcggtatgcgcattcatttgacccatacccaagcaagaatccctcatctactttaggagcgaacttagaggatctagccttcttattaagaatgtaacacttactactcgaaacacganagtaagagacatttggtttgttaccggaagaagctcatacggagtcttc

SEQ ID NO: 68640 - DNA, 361 bp, Oryza sativa
  unsure (1)..(361): unsure at all n locations
gcttagactaatgtctaggacgttatttgttcttactgttgntagctgactcgaagagcaatgtttgatgagtttcaacaattcctactggtaaaatggtctntttacaagacttaacgaagatctactaatagagacctaacggcgatagtactttcgggacaaatgcgtctgtatgatagcatttccatgaagttggatttggcaatgatattttttgaaccgcgaggcttgctgatgatatttcttgaattataacacaaattcattataccgattacgaaccccaagacgaggctaactatacctgaagttcatataattaagtatataacacctgacaagttatgatcaaactact

SEQ ID NO: 68641 - DNA, 438 bp, Oryza sativa
actaagcttcaaaattctcccgcagaaccgcttaccttcgtcttctttagcctttctaggggcaggggcctgcaatggtgagatttgagccaaacttgggccaaatttggcggcaaagccttgaaatttctgctgcaagaaccgctttccttcgtatctcgcttagcttgatagcttccggctctcgccgaactaaggttgtgaggtttctgtgagctatggaggaatctggaaaggaagcaagcaaggccgcctctttaacaggtggctctagaagcaagaagaaaacctcaagaggagtacggatagtgaaaatttcatattagcccttgtaagtattgtaggagtactttccatgatgagctatggggaaactccatattggagtgacatgtaaaacatacttcaatacatataatattatgtttttacataacg

SEQ ID NO: 68642 - DNA, 406 bp, Oryza sativa
tcaatgcttaagataagcattgagtgtaggtaagagttttttagctaagaattatagaggctggatttagatgaatcatatctccgaagcgcaaatgcctgccagattccttatgaaccacaaggtaaccaatacaaaagcaaactggaaaaaatatagcgaaacataaaattggggctaaagtgctgcactgtcagtgtctattgctattccatatggcatcctgcaggtattgaacaaattgggcaatttctcaaacttgggaagcacacataagagagcagattaatatgctttttagtgcatgtacaattcatacatcagaagttaaacaccactatatttatcaatgtattcttgagaagtaaataccatttcttttgatggaatcccacttcgcctagca

SEQ ID NO: 68643 - DNA, 306 bp, Oryza sativa
tgctggaggcatgtgtcttcttccgcacatgaaattcaaatattttcttgcaggatttagatcaaagcttgtgtccgtatctctgacttatgctcttatcacaaactctacagatttcttgatcctgaatacatacattttgttgtacatggaagaacctcaatgaaacagttgctaacttgtgatcacaagactacagggcccaaacatttcactatgctagacctttcagacagaactccacggcccaagcagaccgcaatgtgattctctacccgcaccaataccccattgcaatcgacatct

SEQ ID NO: 68644 - DNA, 394 bp, Oryza sativa
  unsure (1)..(394): unsure at all n locations
tcgagttcttgtactgagatcaaaccatttatatggctctattaanggtctccataatagtgatctaacaagggatcacttctcaagcttgcaaatacttgatttagccaataacactctatctggtcagttgcccccaaaatggtttgagaaactgaaatcaatgatggcaaatgtcgatgatggacaagttttggagcaccaaacaaacttttcacaaggatttatctatcgagacatcatcactatcacatacaaagggtttgatatgacattcaatagaatgctaactacctttaaagcaattgatttctcaaataactcatttgttggagttattcctggaacgatagggagtcctggttcacttcatggacttaacatgtcacataat

SEQ ID NO: 68645 - DNA, 439 bp, Oryza sativa
  unsure (1)..(439): unsure at all n locations
agcttatcgagaagatgcctagttcgaggatgatgtatcggcaatctatctattaattaggcagagttagttagtttccttctaattttaagaaagtgtgtttagtgtatgattaagatttatgtttttccttttaactttangaaagtttgtgtcgtgtccaactaggacacttatcagcctatgggtttaaatatgtacacccagggttcctgtaatttatctccacagataaatacaatctactttcggcgcattgccacccttttactttcagcgagttcttgtttcgagttgggatgcatcagcttcgatctccgacaaggggtaaagcatgtcatgacggcttgtatcggcggaaagggcttacattgtttcgacactctaatctaacttatgcatctgcctatttgtcatatatcttaagtaatctaagtcg

SEQ ID NO: 68646 - DNA, 387 bp, Oryza sativa
  unsure (1)..(387): unsure at all n locations
actcagctatacatatattcatgtcaatcttattctaaatttttttcaagtttggactgtgaatcggcaaacatataagcaatccctagctggatcaacaatttcaacatgtgataaagatttgcttcattcagatgttagcagagcaatctaatctgctgcaccgaaaccaagaacaaaaatagcaatgcctgtagcaaagaaaacaaaccttggttgcagaaaccgacttgcagagaaagggttgcacggtgctgtggatctcnaacaggaagcggatgccacggaggacagcggctcggtgctggatcttgaccgggaggcggatgaccgacagctgatggaggcgtacgacacgcccgcggacggngtggcgcgatctggatg

SEQ ID NO: 68647 - DNA, 414 bp, Oryza sativa
agcttctgatatattggttcaccagacaattgtgatgcacatatatcaactgaccagccaaagaacaacggccatattgcaatcacattaatgagattaactgaaatattggcaacggtgactagatttatgatccctctgaagaacagtcgcaagaaagacaatgccatctggaccattacatgtataccaggcaaccttctaagagggctgaatagtctgtacattccattggtcaagaccttgaagaatactgcaattgtgaggtgttctcccctcgagtactggtcgaaagtatgaaacccagtgaaaagtacacccagtgaaaagataaatccatatccaactaaaaggatagaagatgttgaagtgtaggagtggactctatccatatttccaaaactgaagcacgat

SEQ ID NO: 68648 - DNA, 486 bp, Oryza sativa
  unsure (1)..(486): unsure at all n locations
ttctgcttgcaagagaggcaaggttgttntgcacatcttttatttgtagacatttggtaatcactctgtgatttatttctttctaagtttgggccgaaaagagacttgcgtctcgattcgactttaagagatgtttttcaacagctcatttggtaatgtaccgacctcccgggtcagatcattacttctcggctcccagagccattccacttgattaatcggctcccagagcttctttcattttctcagactcccagagttcagctgcccagcagcataacaatccgcttccactcgggaagcctagtctatgatgcccgcagacatcccgaatcacacagattcgtttctgaccactcaggtcatccatctgccacataggctggatctggttacgaattccacaccacaacaacgtttcactaagcacaggcaaacaaatctacgccacggggaccacctcacatctggccatgaacgtgggca

SEQ ID NO: 68649 - DNA, 380 bp, Oryza sativa
ccacgggcactgcattttctcatgcaattttttatcggtcggttgatgcctatcggatgacaatgagccgtgactttgccttcctcatgggaaggcttgtaacatcatcccatatgcaatgcttctgttattcgcctggaataagaaataacaagttcattcatatttgaaaaatgaaaggaattattacgcgcaatgatgagtctaaaataaggagcgtaactattatttacaggatatgaaagctatgcactagtatgacaaatatgcataatgatgttgttggaaaaatgttcagcttatatagaaaaaatatctagctaagtttaaacaactgaatgaatttgaacatgtgaaattcaataaccacctcagatatg

SEQ ID NO: 68650 - DNA, 344 bp, Oryza sativa
gatatgctagtaagctgttctttaagaacccaaataccttgcatagaggtcaacacaattaccacaaaatataaaaacttcgaacagtgaagcacaaacagttagacagtttctacaaaaaacatagatgccgaggcttgccatctcttctttctgatatggtcaataaattgcattcatcaatggaaccagttacccaggtcccaggatcataacttcgacgtaagccattcagctacaagctttattttaaatcctaatccacaccattgttttattagttaaagttttttctaacaattactgaagttatagacacaaccaaattaacatttaacaatgca

SEQ ID NO: 68651 - DNA, 439 bp, Oryza sativa
  unsure (1)..(439): unsure at all n locations
ttgcattngtccaggcgggctatgatggaagtgttctgaagctgcgtattcccttccctaggcgtgcacaggacaggaagtgagtccccgcagtcctgcactgcgttctcttaagccttttatctaaacgtccgaatgatactttataattaatgtctatgatatgattatttcaaatatagatatcttgagactgactacattcgtttttctgttcttttatagggatgttaagacacttattgtggaaatgctccaagctgcaaaagcctcatcgtcttctgctgaatgaatgtcctgttctagaaagggacgtctttgtccttgtaaatgaaataaagatgtccttcttgatgagttttttctgatctaggaaatgtcatgttttacacatgatatatcacaatgccacagcttaacaactaacagatgccaacta

SEQ ID NO: 68652 - DNA, 390 bp, Oryza sativa
  unsure (1)..(390): unsure at all n locations
gcttaccaagtgacgagctatcttttnttctggttagcacctaagaacgccgaccctctttgccaccgtgttggtgacagccgtgccgccgcatcggtccttctctccggatcggtgatgatggctgcagccgcgcgccgccattgtcgaacgcacgagggggagtgggaggccagcgagctcgcgctaccctaagaccgcgcgccggcacccaagagccgccgtcgccggacgcaccaccctctggccgcgcgcgccgccgtctgtgcgagagcatagagcgaaaggaatgagagaaatatagaaagagagagggtgctgacataatcttcatgacatgtggggcccacgtgggttccatgctgagtaaccgccacgtgggataaaacc

SEQ ID NO: 68653 - DNA, 459 bp, Oryza sativa
  unsure (1)..(459): unsure at all n locations
ntcaatccagagcttaagctggtcattttgccttntttctatctcaacacaaaagacgaggtgacctagctattgcagtcttgcagagtctataaggtaccaatgaaggtttatatcacaccgtttaaatgaccagcgcactctaatggcccctctgaatcgcacggttgaaaaaacgaacgaatagtaaaaacacacgattctgatagaaattgaagtgtataatagagaattgctaaacacaggaaaaacacatgaatagttgtttaattcgagcgcaggaaaaacgtacgaatcggatgagagagatagactcaaagggaattttccaagaggttagagctcttgctatatttcctctaacatctacatacaatgtgccatttcataggaatttcataggacttggaaaacttcaatcctttgaatcataaggcaagtaagaaatatcctatatga

SEQ ID NO: 68654 - DNA, 385 bp, Oryza sativa
atattgtgaataaagaaattttctttgtattgggcatacgccatgcgcacactgctttaacagatgtgcttaagtccctagaagacacatggtttcaccacacctggaaatatatggcatatgtggtgtaaaatccgagtaaataaactcataaaggatttaccaaccgcctagaaaatgaccacaatatataatcagcctaagccataatattggtcaataaaaatgcacacttacgtggcgaaaagcaatgatattgtatccaatcaattgcttaaaaacccaaacagcaccttgacttatatataaaaaagtcagcgggacagctatataaagctttactggttgacaccttttaagatgcattgtaccaactcctaaaaag

SEQ ID NO: 68655 - DNA, 196 bp, Oryza sativa
ccacaagccacaccacagagcacgacaagcaaagggcacaagggaacgagaacgcgcaagcacagcaaaacacaaacaaaagagcaacaagccaaaccaccaaaaaacaagaccccaaagcacacagcaccaaaaagaacgaagagacgcccacgaacctgccggacacaaggactacaacgagacaaaccgaacc

SEQ ID NO: 68656 - DNA, 458 bp, Oryza sativa
ttcaagcaacttatcaacatgttcttctatgtcaattacaccacccaagtatcctatagaagactgtatacgatcatgcaccgtcgcattcaggggaagctcagacttgtacactgcgtacgtcaggaccactccgatgcgtttattgagcagctggaaaggagcagttagaacaaccttgcctgattctctcgctcgcagtagatttccacggtcttctgcccccgagagcatgtcgatggagacgacgtgcttgtaggcgtcctgcgcgaagatgaccggtgcgtactcctccgcccgcggccgtttggaggagaagttcatcgctctgatgctccacgcttgctgtcgctcgaacagctcccgctccgagtgcgtcacccgagcggggtacgccaaaccgctcgtagcggacgctcgaacgcggtgcgctccacgtactgcgcgaatgtggtctg

SEQ ID NO: 68657 - DNA, 319 bp, Oryza sativa
acttcgaagttttggcagaaattacaagtagagatgggtaccccgtttgaatttcagtaccgcttatcaccctcaaacagatggtcagacggaaagagtaaaccaaatcttagaagatatgtgtggacgccccgttttataacaggaatcaatcgtgtaaacagtaccatttccctggatcaagtaggttggtacacacgaattcatagctggaataccaagtgcacatacacgagtgtctgatctaattattacatcataggcccgcatgcatagccttaaatcatcggaccgagcggtccggaatacattccaaagc

SEQ ID NO: 68658 - DNA, 387 bp, Oryza sativa
  unsure (1)..(387): unsure at all n locations
ggaactnttgctcttgatttggatctcctggcgccattattggagtctctagctcctgcagcagggccctgcttgttcgtgctgctgccgctgccgacgaggacggcgtgcttgtgtatttgctccgggactctacacttgccctcctagatggcagacgaggacgcacggcgctaacggcaagcctacgatggggaagagcggcgtcggctcaccaacaaccattctgagataaaaatatatcttcatccctattcctcaccattcaacctgcttttctctcaatgagctcaccaaccaccattctcagcggtgagggtgctggtcaaagaatangaagagaatgtggacgacacacatacagcgggtgggaagggtttgactggg

SEQ ID NO: 68659 - DNA, 441 bp, Oryza sativa
  unsure (1)..(441): unsure at all n locations
agctnggcaggacccaccatataccaagtcttatactgaatcatacctcatatatagaaggagtttcggataaggaaggacaagaagagttctatatgaaaactataagggctactcggattgtatccatattggtttccttagttctacttagacaaggggatatctatgtgtataaatataagaccccctaggaggagggggcagaccaacaagacacatcaacatcagagataagcctagatagaccctatccagtgcttgcggaggccaacaacagggatctagcgccatctctaatcttgacgagttcatattcgaggaggaagactaccctgtcgtcaactatgtgttggtgaatccatgctcgcaagtgacgacagctagataggttatcccaattattatacttgtgtgattctaatgaatatagagcaacac

SEQ ID NO: 68660 - DNA, 381 bp, Oryza sativa
tcctctatatgcgttgttttcttgctgcggtgctctattttatatgagtaggcgggctgtaaggggagagcggatccattattctttctcaccctcccccctcaatcccaaaggcgtgatcagagttgagttatgtgctcggttgtttgggattggttttgggtgggcccgactgtagcttccttgatagcctagcggtggccgatccaatgctagccttctacttgagtatgtatatgtgttgtcggtgcgtgtggtggtggtctttttatttctttcctaactactgccttatacgggacttgttattttttttctactctattcaatggatcatcacgcccgtgttgtgctgatcgcttaaagataaatatgagaaaa

SEQ ID NO: 68661 - DNA, 437 bp, Oryza sativa
  unsure (1)..(437): unsure at all n locations
agcttataaatttctcatagaaagaggggatgtcatgcctatttttcttgtgaaacttttgtagtgattatatacaaatcggaggtgtctaaaaggttagtaacttcctcctccaatgttcttttgttgttatattacttttggagctatgtttcacacatttttttttctccaaaactttgttgtaagttgatgaaagagaaaatttgtgtggggaagaagaatatatagaaattctattctcatagtttaaaatatgatgaaaattaatcttaaaaaacagaaaacaaactaaattgaaaattaagagaagtacaacattaatattagtttagaacttcaaaaattgttaataagaattgctcgtcgaaagagtttttaattattntatcattactgtttgactgtcattattgtacgaaaatntatttatgtac

SEQ ID NO: 68662 - DNA, 449 bp, Oryza sativa
ttacgtgggttaacaatgcaagaattataaacgagttttatgtttcttacacagaaatcatgacatgcttgattgcaaaaatatatatctcttctcattcgtacaacttgcttgcaatgctgaaagtaaaatataggaggatatgaaaaagaaacaccctatgtctttgtctccaattactaactatttgcaggaagagcgtaatcactaaaaggaggagagagacatgaaagagccaccaattccattggcacactcaagttcgagacacctccatcatctaaagaggacatccaaggtaaagtaaatggtactgaaattaatcaaggtgagtgcattgtttacgaaataaattagtccactcttcatgcaaaagtagagcaaccgttagtggaaccaaatgctggaattcttctgcacaagtcgattactcgctgtccttgtgataa

SEQ ID NO: 68663 - DNA, 358 bp, Oryza sativa
  unsure (1)..(358): unsure at all n locations
tggggaaagacactacataaccatatatatttatcgatgagcaccgngccgtctaaatgaaacttgccatgctgacgtggcggttcatgagccctttttttatgtggtttgaccgaaatgcccctgcgccttatctcccttgagggagtagccggtcatggtgaagaacccctcggtggcgtagatgatggggcagtcctggcgcgtcgcgtcggagacgactaacgtctgctgcaggctggacagcgcgttcttgacctccagcgacacccacgcggcagtcagttttactacgcgcggtcgtcgacgtgcgccgccgtccactgacgacttgcatgccgcttccgtccccgacgtg

SEQ ID NO: 68664 - DNA, 354 bp, Oryza sativa
tatgatagaatgggaagctcccgaatcgaacatttctatagctgtttctgagttgacagagaacatacccatcacaacgtctggagcatcctgagcggtttctgcttgaatgtgattcacacggcctcgaccaaagttgttggaagcacgtgaaccttgtccacttgcctgagagctaggactagactgagctgtcgctggagtaggagttctggaagtgctaccattagcatgccctgagttggtagtgtgatgattctgaggacactgtctagcatattgacccatctggttgcaccggaaacactgaactgctgacggaccctgcggtgacttgaaagaggtaacactgtt

SEQ ID NO: 68665 - DNA, 325 bp, Oryza sativa
ttcccggtctcggagcttggggcacaccaaatttgctagatacgcgccgtactatcaagaggggtctatgaaacgagcttgtggatgatcttgtgccatattatttcatacgcatgtaagtgcatttttggggcttgtctaaccaagtgtgatgagtcttctcagtcttaaaccaacagagaagtgggcatgttcaatacgagggagtgacatcttgtgcgtatgtcccgtggatattctttggagtgtgagccctttatccttgacttaagctgtgtttattggatggaattttcatgggttggatggcctcttgaataatctt

SEQ ID NO: 68666 - DNA, 436 bp, Oryza sativa
  unsure (1)..(436): unsure at all n locations
gatctgcccaaaaccactgaagactatttataaaactgaaagcatttggtaaacacttagccgaattgcaaaatctctgaaagtgatctctggatctgatgcaaccgatgcctagattatagacgaagtagatcaaattaggcaaagggctatatcggctatccaaaaatatgtgtctcgatgagctaaacttggaactttaaattcgcaaacttttgggctgtaatgaactccaagttcagaacttgattacttgttgaaatttgcttttgaaacccatacttttcatatatattttcccccctaatttgcaatgctgaatacattaataaaattataattagactaagggcgatataacaaatattggccatcatacatcggncaagcacaaccgattatgataagaanaacactcagggcgatataacttata

SEQ ID NO: 68667 - DNA, 301 bp, Oryza sativa
ctatcgtacacaaacacgtgcaaatctcttcctttgtaaattcctgagttgcttgctagatttcatgcgctcgtaaaattgatggttttcagtcacgatatgaaagaagcttatggatggttgttttggatgacgtggcattcaaaaaataaatcgataacatgtgggggttgacatgtcacgggttttcttcatccttcaatcattctctcctttattcccatcacttttcacacctcccttctcttacctatatttcttctccgctatggctgatggcatctaggggagatgccgtcat

SEQ ID NO: 68668 - DNA, 421 bp, Oryza sativa
  unsure (1)..(421): unsure at all n locations
accacctcagcatgcatctgcacctggggagtatttttgtatttattgctncttctagctttttagaagtcgtccatagcaattttcatgagctcatgtcaatttggccatcttcaagaggcctttatgcaaaactgcttgtacttgcagttgacttctcactaatgataactcatgcgatatgtgtctggttatctataatcaataaaatgcataagaaaaaaaaaactcaaccatgggctagatcacatcttggctgatccatggctacaaattaaacttaccgatcgagccagataggtcgactagcccattagattgtccagcattctagcccatggggccaaagtgttcagcccacacagaaacccaggtaatttgacccaacatgaagaatttttgcttcgaaccttgaccacca

SEQ ID NO: 68669 - DNA, 414 bp, Oryza sativa
cgttaatgcactataatggacaaattgtactgttatcttataactaaggagaattacatagtgatgttctgttcatgcatgttcatgtacagatgttgttacaaagggatcaaattggctcaatctacccacgcaaccatgttttatctgaacaggttgcatcaaatacttctcgagcatctaaggatggattgctagatataattttcatgatcaaaacatgaaaaactgcaaatttgttaattttgaatgagtgtagtgtattcaacacgacgaaagagatacagagggtggaattaacaaggtcgcattgcttcttacgcaccgttgctggactgcattgatcgagacatctagtattcctgtaaatgttgtgttctgattgcaccccattctattaatattcatgacact

SEQ ID NO: 68670 - DNA, 439 bp, Oryza sativa
  unsure (1)..(439): unsure at all n locations
gcaagcttatacattatattcaatggctaatcttatcctaatagctntttacaagtttgtactgtgaatcggcaaacaaataagcaatccctagctggatcaacaatttcaacatgtgataaagatttgcttcattcagatgttagcagagcaatctaatctgctgcaccgaaaccaagaacaaaaatagcaatgcctgtagcaaagaaaacaaaccttggttgcagaaaccgacttgcagagaaagggttgcacggtgctgtggatctcgaacaggaggcggaggcgacggatgacggcggcgcggtgccggatcttgaccgggaggcggaggaccgacagctggtggaggcgtacgacgcgcccgcggacggtgtggcgcgatcttgatgggaaggacngancgtctgcgctcgcggacagggatcgggacaacaac

SEQ ID NO: 68671 - DNA, 327 bp, Oryza sativa
tgctttagcagagtgagctctctttgctcctgtgcggagactaaccgatgtatgacgtcaagcgccatgtggaaatggattttctgcatcgtgcagattcccctggaccaactctcgcagactatattcggatatttgcagcttatgatttaaccgatgcatgggttctgtgtgagtcgtctgcttgcttcaagcacgccgaacaacgtccttgaatcctggaatcttgcttaaaaatctcgacttgaagggacgtggttccgtggcctgaagattggaaagagtaccgacagtgtcagaaggcctatggagagcattagatgtgct

SEQ ID NO: 68672 - DNA, 238 bp, Oryza sativa
cgcgtcgcatagagttcgtcgctgtcgacgtcacgtcgcatcgagtccgccgcggccaccgtcgcgttgcatagagtccgttgctgccgccgttgcatcgcatcgagtccgtcgcgggcgccgccgcgtcgcatcgatgtcgatgcggcagccatcgcgtcgagcttccgacgaatcgccgccgtaaccatcgtcaagctcccgatgaatggccgttgcaaccatcggcggacttacc

SEQ ID NO: 68673 - DNA, 340 bp, Oryza sativa
gaccttaaaactcaacttgcagctacgcgtatgaatgaatctgataatttgtttgaaacctcccttaccttagaagttggaaagagagttgactactactgaacagattgtacatcagtcatatcaactgaaaacaaacctggtgaacagcatgcataaggtaattgtgctcaagtcactcataagcagcggttacacaacatacattgcgtgtccatcttaaagcataaccccatatgatatcagtcagctggtattactacgtacgcataccacaatgaaggacaagcccactaaaccgcgcaaagcggcaatcctactagaatgtgaagggagaaca

SEQ ID NO: 68674 - DNA, 416 bp, Oryza sativa
  unsure (1)..(416): unsure at all n locations
agctngctagtgcttcactntaatataccttatataactgttctatntcagaaatcatgaggcagcttgctcgtgtgttcactactttttaagaactagttaagtttaatcacacacttatgcataatcttcttggcatatatataaaaattcatttcactttatcacgtgattatggagattccattggagctgatgctgactataactcaaaaacgcccttggatgtttttccccgacattattccactaggccatcccatatttgacatcattgaatcaacagatcctgatgtaaatggagccctctaaccctctaattatggtatgttccagtgaagactgtatgtgcattccagaggttggtgtttttagtttctacagaatcacttatgaggaacattgtgtgattaaga

SEQ ID NO: 68675 - DNA, 231 bp, Oryza sativa
gctttgtaccgaaaaacccctatcgtgttactttcacgcggtattctccttcgctgatcatacggcaggcacctcgcattatgacacgtatgccggtaggttctagtatttacatcttaatatgttggtttttataactgcatatgaaaacacaaccaagctcaaaaccagtgtaataacacctcaagataatacctctatcctattatacctcgcacgtacactacacac

SEQ ID NO: 68676 - DNA, 440 bp, Oryza sativa
  unsure (1)..(440): unsure at all n locations
agcttcgcctcaccgcaagaaagagaacttgttcgtcacctcgtctctagttagcttcgaagattcgcgtgatgggtgaagttgtgcccgatcgtgctgaacctgtcatcgacatcgtaagtgatgaggaagaagaggaagaccctgaagaaagagagccagctactccagaggaagaagatccatcgcttcgttccgacgcaaggcgggattagtcgcttagttaggtcgctgccgtagttcgctgtgttagattgcttgtttaagtttgcttgtgagtgtgtgggttttagttggtgcttacatcattggtgggatgtaacagcatgagtctagttcttttgcttgtcagagtgtaagatagttggtgagatagtgctaatgcaacttaaatgtaagcatacacagttaagagcaatatacaatctanattaattaaa

SEQ ID NO: 68677 - DNA, 367 bp, Oryza sativa
  unsure (1)..(367): unsure at all n locations
tgttaatcatgcaattatgataaatntacagctatatgttcccttctatgtaataatactataccaatagtcaaaagttccagaattatatcttacaaattcataatataactaccccgcagcaacacgcggggtatcaactagtttatactattatgggacctaaaattgcacgaatttgcatagtttaggggtgaagatttccggtattgtgactagggatgtcatgcaaactcgacgtaaagttgcgggataacaggtgaacttattccgcagcattacgagcacagcataagtgggctggtatatgggccagtagcctggcccgctagccctgggntccctttccctttggtcgaatctccac

SEQ ID NO: 68678 - DNA, 363 bp, Oryza sativa
agcttcagtgtgacagacctattctgttttctattcaaaaaattcctaacggatccgcccttcgcatactcagtcacaatacaccaaaccattggcttcctgcatgcaccaacaaacttgacaatatttgagtgcctcaacgttgcgagcatcatgacttcttgcacaaattgctgctccaacaactgagctttctcagggtcagcctctggcctctccaaagcttaattgcgacatcgcctccattgaggttcccctatagagcttcccaaaagcaccttgtgcaaatggcatccctatgtgcagcttacccaaatcaatggtccactcctcgtaatccttgagtgtctcagtggggaacct

SEQ ID NO: 68679 - DNA, 425 bp, Oryza sativa
  unsure (1)..(425): unsure at all n locations
tgcgcaactatgttctactctaattctattcccntgttctatactaactctaactttggagaaagggagcttcaatccttgcttgagtgtgcgttgaaagtgaacgatgtgacgtccttttatagctcacaatgacggttgtagagatgggaattgtcctgaatgcctcccaaccgccgccatgagtttatccggaacgtccacgccaaaggggagagccaacggctgagatcatggttcggtccaaccctacactggcccaacaagcctggtttctggcttgctgcttctcctcggcctctctatcttttatccaaaatgccgctggattggactcacaacgagttggccaccacctatggctcttctggcccccagctcctcctcagaactccaatgggcccccaatccggacataattctag

SEQ ID NO: 68680 - DNA, 396 bp, Oryza sativa
  unsure (1)..(396): unsure at all n locations
agcttggaatattccaaggcgaggcgaccgaatggaggaggggaaaggaaaggaaagggaagacgaagcacctatcccatcggcaccgcacgcgcgtacctactgacaggtggggtcactacaatgtgggccacacatgtcagtangtatcgagggaggtgggcggtggaaccgccgtgtgattcttatctcatcgtggggctcgtctggtcaacgaggaccacgacccgatccgctacgcccttgtttgttgttgggctcgttacaaccaatgggccgttgattacacgacanattggcccactccaacaaaagaattattgtttctttgataagttactataggtctctcattatacatcgagtttgaatatatcttgaatacagcacagaaat

SEQ ID NO: 68681 - DNA, 418 bp, Oryza sativa
  unsure (1)..(418): unsure at all n locations
tgaggcattngcagcgtcgagcttcttttgcatgatcatgtgattggcacattntgcaatggaagtagacatagtggaaataatgagtttgctggtgatgccggtccaggccttgacaggaccgagtgactggtttgagcgctcatatacttaagctgttgaagtagtagttccttttccatttcaatcttgtgtgttctgaacaaaaacatttttttcttctgtttctcatgtgcccttcctgcactttgtgcatgaaagacccctataaaagcttaagaaagaaaacaaaaaagaaagacatattctttgaggaatggactgtacatgatataaagtaaagatcccattcttcatgtctggataagctgngctcttttaatctttgtgctgaatacttcatttttgttcatattat

SEQ ID NO: 68682 - DNA, 414 bp, Oryza sativa
tcgctagaccgttattccactggtgttgttcttttcttttgtaagtatgtaccggcattatcatgaaggaattgcatattaaaatagtcacgtttgagtatctcaactgattcctggactacgattttatgctcacataagttccgaaaatacttgggaatttttgggcgtgacatttagatcttacaggtatctgtatacttaatgctgcattcggctgaagtcgaactattaaggtctatctatagttgtgatatccacctttgtttatgatcatcaatagagataacatcggagtttcagccaatcttacttgatttagctattattatcttatatgcttgcttgtatgctgaatctgccgttctattaatatcttgttgcttctaagtatattacgtctctatttgatat

SEQ ID NO: 68683 - DNA, 363 bp, Oryza sativa
tgtcttcctatgctatacggtgcagatttattttatttatgaatgccgaccctcttttgatttcttccatcgcactatcaaagagctgtaatcttgtctcgtacgattttagaatcacactacaatttccagtgctgctatcgaaaatattctttccaacacacaaatggctatcccaaaatcacttcgaatttcttatgatattctcataatacaatgctcctccggacggatgattatctaaacgcgcaaataggaaaaatatatgaataagatgtcatgtcacatacttgtgattcctatatgggattaaacacacatgaatttcagatttcttgcgcatatggatggttttgacgaaat

SEQ ID NO: 68684 - DNA, 421 bp, Oryza sativa
tagcttgttgcagatgctgctatataactgtccctcttggtgtacttaaagcaaatatcatcaagtttgaacctgagctcccagattggaagctctcatcaatatctgatcttggtattggcattgagaacaaaatagccctccgcttcaatagtgtattttggccaaatgtagaagtgctaggcagggttgccccaacatcaaatgcctgcggttactttcttaaccttcacaaagccacagggcatccggttcttgtatgcatggtagcaggaagattcgcatatgaattcgagaagctatccgatgaagaatccgtaaactttgtcatgtctcatctcaagataatgctaccaggagctactgaaccggtaaattctcataattcattttcagaccatgtacagttgagtactgtcaa

SEQ ID NO: 68685 - DNA, 432 bp, Oryza sativa
  unsure (1)..(432): unsure at all n locations
aactcagctntccctncaactcgcaaattgtgccaacaaaacaactattgctgtcctgcctggattatgttaaaatggaaaagaagagtgaaaaggtacagctgaaattactgaacctccaaccataacttgtacaagctgtaagtaatcaagtctaagggtgtgtttgagaaggaggggattgaagagatacgtaaaacgaggtgagccattaacacatgattaattgagtattaattattttaaacttcaaaaatggattaatatgattatttaaagcaactttcatatagaaattttttgctaaaaaacacatcgtttaataattcgggaagcatgcacgcggaaaacaaaactatctttctctctttttcctgcgccngaacgcagcctaagtgatgaaaaggaacaaaagggggactacatctcttt

SEQ ID NO: 68686 - DNA, 414 bp, Oryza sativa
agcttgtgtgcttttcttagccataggaatgtccagttctatgtgattggtaatactttgtgactctgcgctgtagtgatgtcgaattgattgtgtgaagttgtgattgctcgtttgctattacatgattcagatatagaaaggaaagtgacattttagtattcgatgttggtgaagattgatgccttatctgctcataaaggggagaccacagtgctagttaggatactactagttagcttgatttctacatttagcagttcaatgctatttctgtggaaataaccctgagcccctgactgtaatcaccactgtattacgatactgagcagttcaatcagtttgttttcctaaaaccatttgaggatatattcagatgctactctcgtatgggtaaatcatgctcttatccca

SEQ ID NO: 68687 - DNA, 389 bp, Oryza sativa
tgctgttctgttgcttcccataaactgacggaccgactctaattattctgaccttgaccagaactgctggtgctcatagaacttctatttttttttgattgaattgctaatgctggcaattagataaactgaggattcactttgctgaccggcgatcggtgtagtttttccgaaaccttgaaactgactttcgtaacccacagacaatgactttgctcgacttgctcttgattcaaaccacaagtattttcaggaaactggcttggtctgtccttgtctggattgcggctgttcctgatgctacttctttaagccaaacggttgacctggcctcaccggcgtaccttcgaatttaattagacaacttgggatcagtgttactctgctga

SEQ ID NO: 68688 - DNA, 389 bp, Oryza sativa
  unsure (1)..(389): unsure at all n locations
agcttggggggttntgttgatagtcgatatcgatcagattttaccgtcaatattactaacatagaggagaactagtgatgcttgcaatgcatatatttgttagaataataatattccactcgtattagatatactaaccttttgcagagaatgacaataaagaggaggagaatcgacctcaactcagatgataaatcaatccgacgatgtcgagaactacacttatgtatgaatgggccaagaactcagaaataacacgacacattgggcccgaattcacaaatctaccgaggaggacaacaaaggaagtcgctagccgaagataggcatatatgcttcgggacagatgaggtgggccctgaggtgacagctcacacgggtattcttat

SEQ ID NO: 68689 - DNA, 421 bp, Oryza sativa
  unsure (1)..(421): unsure at all n locations
tacaaactcaagcttncactcactcatactttctatgttcacaactctgagtttggtttttttgtgtgctgatcagcagaatagactggtttctcaacacgttatcagcacgagactctaccgagctaaaaaggtatacaggtgagaaatcagtttctactgatcatcttgctctttatatgcaaatcattcttctgctatagttgaaataagcacaagagcatgcgacctgaagtaccatcccccgatattatctcaacgatacacaataacatcatggcggctctgccgccattatcgttgaattgctacagttgatacatcctctcagcaacgcccgggaacatgatggcagctctgccgtcattaccgtccaaaggcttgagatggacatccccttagcactatttgataacacaat

SEQ ID NO: 68690 - DNA, 411 bp, Oryza sativa
  unsure (1)..(411): unsure at all n locations
agcttaagtagggagcaatgctatacgtactaaaattntcttactaaacttttactaacaatcatctcaatcgtttgatttaagtcgatggaagttacaaaaaaatctagatgcactcatagcataacagtgttagtaaaaatttagtaaaaaaaagttactaggtatatccttttccttaagtaggtgcacagcaaggctccaagaaagtacaagttgcttacggctggcacggcagcatgggcgcacgcgtactaagtcaaaaaggaggaagcggagggttgcacaagttcgactttgcttggaagttgcaaccccatacttggagatcctgtgactccaattaacaacttgcactatgtntaagctttaattaacctcctccggttaaaaccaaatactatgattttt

SEQ ID NO: 68691 - DNA, 372 bp, Oryza sativa
tgactatgcttgcatcaagttatgccctgaaccttgtatttttcttcatggcaagtgcttacagccaattattcaatgctcgtcaaactgttccacatgatgcttatgacttctttatagatcttcttgctgagactatcatgtgagcacattgcacattcacgttccacgtttttcatgtttggtttctgttttgaagctccataccatgttctttgtgttcttttgtagagatgaaataactgattgcagggctcacgcatatgactacttgtcaatatcttatgcaaagaaaatgctattgttgtcttgtgaccaacagcttcttaagatcatatcacacgctcgtattatttggttacgctgctttta

SEQ ID NO: 68692 - DNA, 415 bp, Oryza sativa
agcttcaaacggtgccatctgtagactggcctggtagctgttgttgtacgagaattccgcatatggcaagcttttgtcccaagctccaccaaaatcaagagcacaagctctcaacatatcttccaagatttgattgactcgctcggtctgaccatcagtttgcgggtgataggccgtgctgaaatttaaacgggtccccagttcttcctgtagcttctgccagaattttgaggtgaactgactccctcggtcagatacaatctttttgggtactccatgtaggcacatgattctcgaaaggtaaagctccgccaaccttttgcccgtatatgtggtatgtactggtatgaagtgagcaaccttagtgagtcgatccacgactacccagatcaaatcgtgacccgatgatgtccgg

SEQ ID NO: 68693 - DNA, 418 bp, Oryza sativa
  unsure (1)..(418): unsure at all n locations
tacctcttctttatagtgcttacatttctctccagttcattacttcatttcatgccaagnttccaattagcctatcaatttatttaacccatccgttcatgctaccatcacttaacacgagacatgagtatatcaatgacatgcattgcattgtcattagttttacaagacatacttttaccatcacctggcaaaccatagagcatattaaggtcagataacatgatatccagggttcttagctgctaccatagatcatggccatagtgctttgtttttgttttccattntcttggtgtcttactaaacatatagctaggatatgttattttttccaaataccagttctgagaaacctgatagctctntatattcatccacactccacaacaattaaacacacatgcatagaaatata

SEQ ID NO: 68694 - DNA, 394 bp, Oryza sativa
tgcttatggttgagaatgtccagtcatatatatcaacccagtacaagtggcagtccaatttggaggatgaccttaaaaagctcgagactattttaactgaaattttattggtggtgggcactgcagaaaggcggagaacacttgattgcaatcatcatactttactccaccaactgaaagatgctgtctatgatgctgaggacatcttggatgaatttgactacatgcttctgaaagaaaatgctgaaaagcgaaaccttagaagcttatgctccagttctatatccattgctaaacgtttgcgtggccatgacaagtttacgtccaagttaataaagatgcttaaaagcttgattatggtaaagaatgtgctgaaatgcttgtcagagtgatt

SEQ ID NO: 68695 - DNA, 419 bp, Oryza sativa
  unsure (1)..(419): unsure at all n locations
ntctctnttcagttccaattgatggaccaatgttattttttacttcacaagtttctgagcaacggtctcttcgatatgagttcttcacaactcccgaaagaattgattcatctaagtatgtaacagtattaacaattttatgtgctgtagcctgatagcattatcttggacaccgtgtctcttaacagcgcacggttggattgctaagtatgccacgagttgtttcgtaccttctgtgctgtttccataatttacatcaatagcagaatgattccttcatagaaataggaaatatgttttatgctcatcgtccttagatgtgcatagcaatacacaagctataatcaccacagctacaattagtttcttcagaactatgctaaatattgggggtaagcaatttgtttcaaacattatct

SEQ ID NO: 68696 - DNA, 415 bp, Oryza sativa
  unsure (1)..(415): unsure at all n locations
agctntgagttactccatcagtttcatattataagttgtttgcctttttcttagccaaacatctttaagtttgatcaaggttatagaaaaatgtaataacattttcaaaacataacaaacatattatcaaaatatatttaatgttaaatctaatgaaactaatttgatatcgtagatgttattcatttttttatataaacttagtcaaacctagagagttttaactaataaaaaaatcaaacaacttataatatgaaatggagggaggacaaagtattacaaatggtaacaatgcatcaatttgtaccgcactggcccacatatatataggccaataaaccttntaatttaatcatgatatcagagcgccaattcttactacacgggcctacatgtggcctatagcacttttttg

SEQ ID NO: 68697 - DNA, 424 bp, Oryza sativa
tcagaaatagccatatactctgcttcagtagtttattatgcaacagttgcttgcaaacttgccttccaactaacagcacatcctccaatagtgaaaacataacctgtgagcgatcttctcttatccaaatctccagcaaaatctgaatccacataaccaacaagtccatctctagatctcccaaactgcaaacaagcactagatgtaccatgtaggtatctgaaaatccattgaacagctttccaatgctctttgccaggattagccatgtatctactgacaatacttaatgcatgtgataagtcaggacgagaacataccatggcatacataagtgaaccaactgcacttgaataagtaactctagacatgtactcaatatcataatctgactgtggacataaatctgaagataatctgaaat

SEQ ID NO: 68698 - DNA, 378 bp, Oryza sativa
agcttgctgttatgaagataaataatatttatgatgcgtggtaatcattgatcattacagatgctcatgaaagctgacttgatttgatacataatgcgcctataattaattaacaatcaattacaaatgcagtctattgccaagaacgattcgcaattagcattatctgttgtaggtactgtttacttcacacaagggtggtgatgattcatacaagtaatttcagaccagctcggtacatggtgaacatttctttattcatattaaagcaaagacacacttcaaaacatactttttaataatgcacagtgaacatttgtctttttcaacaatgcaaaacataatgtttaatactgttttagagtaactttatacctt

SEQ ID NO: 68699 - DNA, 318 bp, Oryza sativa
gagagagagatagatggggatggctacgaacaactattaatcgacacatgactggtctctgactgtcacagggagataaataacgattgggttgggtggcttacacctgtcacggactaaccaaaaagaccccctagaaatggcttataacatgattttacaggctggatatgtatggcccggtacacggatctagtcacctgtgacgggccgcagtcggattccttacctatggcggcatcccgtagaacctgtcatatgtgaccctcaacacttgccaacacttatgcccattataagtattgtgccaaatgttga

SEQ ID NO: 68700 - DNA, 419 bp, Oryza sativa
accggatcttaatcactgcggctgcagctggttatttactacctttttctttgaatctctaaactttattcaaattaatccaaaaacttgtgctattaattggataaaggtcttaactctttcctttcacttgtctttagatgccgcgctacaagcctgagtacttgtttggtgttgagggttttgttcaggagttgcgtacgatgtcctttgtcattggatttgggactgcccctttttatgcccacattcctcatgatcgtcatgaagagaagtgccgaatcaaagtcaccttgaacagcaatagtgaagatatcccctcagtgatgttcgaagctggaggaagaaactacatccatgcatgtcatgaagtggcaaagatctgcctatgacggctccatgaactctactgtgatcag

SEQ ID NO: 68701 - DNA, 371 bp, Oryza sativa
ttggaggaaacgattaggaggagacctggcttataccctacatgagcgcctgcgaagatggagccgcaagcccgctaatccaccgctgcctattattgatcgtcaggcccgaagcgcctttggaataatgtaatattatcgatatcataaagatggggcctttataacatgtttggggggagaccacggctttttctgggacggggaataatacactaacgttcgggaaaaagcgaatttcccggtcgcgacaagccggtatcaaaaccatctcgactggaggaaaaaccacagggataaaaactaacgacataatttatgaataaaacaatttgcgaaagttctttttctccttcccctaaagccaattg

SEQ ID NO: 68702 - DNA, 414 bp, Oryza sativa
  unsure (1)..(414): unsure at all n locations
agcttggcacactgtgacaatggatnttgtggaagggctaccaaaatctgggggatatgacaccatattggttgttgttgataagttcacaaaaattgccaaattcattcctttgacacatactttcacagcttactcagtggctcaggcttttattcagcatgtatatgatgtgtttggaatgccccaagttattatctctgacaaggataggatctttacaagtgccttgtggaaagaattgtttaaattggcagatgtcaagcttaacatgagttcttcataccaccctcagacagatggacaaactgagaggctcaatcaatgcttggaagcatttcttagatgtactgtccattcctctccacacaaatggtctaattggttgtctcaaacacagcattggtacaacac

SEQ ID NO: 68703 - DNA, 425 bp, Oryza sativa
tgagacatcagctctggtggacaagagaaatcactccacatatgatcatgaaaccttctctttcaaaatccctcatgattcatgctcatataaggaaaccccagactcctgttcgattagtactaccccctcgtgcgaggaccacaaccactttacgattcttttttccaacatgttagaaaagtggtcttggatccttttatttatcataaatactgcaaatctcgtatatgttttcacactaatcttacatgatgatgtcccaaaggtcaagcttaagtgtcacgcccggaatttctatccaaaattccaaacgcttacatgtgtgtgaaccctcgtccaggaatcagccgaggcacacaataacaaattgataatagagtacaattattactctaattaataagcgtgtaaaatgtcattac

SEQ ID NO: 68704 - DNA, 419 bp, Oryza sativa
  unsure (1)..(419): unsure at all n locations
agctggtttatggcaaataataacagagctagtgtgatttattcacctatatgaaattaatcaacgacatatcccatataatagcatatagtaggagaggtgagcaacccttagttaaccaagcagtaaatagaaactattcaaataaatgattccatatattaagatattgtgcacatatattgtacatcccattatagatatatggtatcgtattaatttgcttgttgcatatattaatttagagggagtatatgacaaacatgaatattagataaatactagttatacatcttgtcctcgtataattacagatcaactgtaaatntagattattcattgtaaaattatgtgatgggataatctgtaaccataatatgattaacctaaacaattctaacatacaaagcatgggtaat

SEQ ID NO: 68705 - DNA, 438 bp, Oryza sativa
  unsure (1)..(438): unsure at all n locations
gaccttagaaactaagcttcggtctattcttggtttatctcggaaatcggtgtttttttttatcttttcctgtgatcacgttcatgcatgttgtgatcacgtataccgatcgtatataaattcgcttaagagatgtgagaaacggattgatgccattaaatagccgtgatgagcacgtangcgagacatgacaggatcatatatatccaatgtgaataaaagaataatattcaaaacagattgacagaatttaagatggttcgatcggtagcttggaattaaactacatttgctgtggatcgatgaatataggaggcaaggggctgtcgatcatgcaaattggacatattaattttggtattttcacaggcgctatcttacgtggtccgcgtgcgaaattgtatcttcgcatacggactgtcatcgcccttcccctcc

SEQ ID NO: 68706 - DNA, 432 bp, Oryza sativa
ctcaacttgctgaagaatatatggggacgtaccagagcgctgtcatctttcttattaattgcgaggcacaatatataaatacaatatctgctcctcaaaaaaatattgtaaatgccacaaattctcatttagatgtggctagatctaatttcaatgaatatactacatcggctaatgattgttcaaataattatctgaaatctttaaattatgaaaataatatgtcacaggctatgcaaagtaattcacatgctttaaattttgataataccagcaatatacaatatgtacacccaccttttaattcatcgacaattatttcacaatctatgacaacaaaacaaagtatgccgatgaataatgggtatggatatgttaatcatttaatcagttactctgaaccactatattgtttctcaaatactttgcatg

SEQ ID NO: 68707 - DNA, 392 bp, Oryza sativa
  unsure (1)..(392): unsure at all n locations
agcttttctgggcattangcctcatttcttctttntccgccgcatcttcttcctcaaaccccagccaaacaagagcaaaccgtgcgttgttgggggtgctggtttccaactcaggggaacactaagccaaaaatatttctccatgcccttcaagacctcaaacaaaggctggcacgccaactggttctatgttcaaaatcctgaaccagcccttcccgagtacacttgtctccctccagtctaccaagatacatggaattcattgcctacaggagatgaggcagcccacgctgtagaactaatggagcgcnnnataaagctgaaagagcaaggtttgcagggtgaactgatcactcggcacttcataaaaatccggttagctccaatcaaag

SEQ ID NO: 68708 - DNA, 424 bp, Oryza sativa
  unsure (1)..(424): unsure at all n locations
ggctaatatatgtacttgtatatatctgtgtggatcgatcacttgattttgcgtgcaggtaacatgcaccgtattcgnncgttatcatatctctggattgacttcaaagatggagggtggtatgacataatatattagttcattcaaactatgtgccggtattcctcttgtgcttgtaaggtcaaatatagcttctgatttagttaaacacacacatatattaatcacctgagacaacgtcattaaataattatcttcatgcaggttgtacgtaccaaattaagtaaaatggcccaacaactagcttaaccagcagtgcagcacaaggattntaattaatcatatccatgatgcatgtgatatatattctccttgcattgccagtctaaatgcaatgagtcaagtcaactccgatacattcatg

SEQ ID NO: 68709 - DNA, 433 bp, Oryza sativa
  unsure (1)..(433): unsure at all n locations
ctaaccttgaacatcgaggttntaaattttaaacatatagtcatgttatttttttaatacgttagaactttgataatggtgttatctatggctttacaaaattttagcttaaaatatgactcatataaagataaataaaagaagaaaaatgctgttaatcagtaaagtggaacactttaatagttttagaggtaaaatgagtaaaaaataatttaaggggtaagtgaacaaaacaaatagtttgaggaagtaaaataaatttttcatgcctatgctatggaactatttattgatgttggaacccggacaacccangtacacaaaggcccatcttagcggggatggctagttagcgacccatcgtgcgctccctccccgcatggcgcagccacgtggcgcgcatggagagggggggggggcgtggctagctcca

SEQ ID NO: 68710 - DNA, 407 bp, Oryza sativa
agctggcggcgttgctgtccgacgagcgcaaggatttcatacgggtgcgtagcaaggtaaagcctctgattgatgctcttgaatctgtccatgcctgctttgagaaattgtcgctcgaagatgagaagaatcttgatgcgttacaagaagcctggatgatggatttacgggagctgtcctatgacatggaggatagtcttgacaggtttcttgtcaaatctgctgctgaaccgggtagctgtaagaagctcttcaagatcttgttaacgaagatcaagggtagcaccaatgggattgttaaggtgatccaagatatcaagatgccagtcgaggagctcaacgaaaggatgaacagattcaagctcagtgatgaccgtcatgtaacatacgacccgatcaagatcgac

SEQ ID NO: 68711 - DNA, 388 bp, Oryza sativa
tgataaaagcttttaagaaatcaaagatttggctatatttatctagcacagcatatatacaccagtattgtacaaattgagcctccatttgttacaatcatactcagtcagtatcagtcctttcatcatcagagttattgttgctcggctgaaagtcgttgttacggaattgctctacaacgtcacttgcaattttgtcagccgcattttgagcattgctgataagatcaagagcagcttcttcgcttgtcccgtctgcaaatccatcaatggtgtcgatttcaattctcgggtacaaggatttggtcatcgccaatgccatgctagctcccatacttccagctttcttgatgttcttgaaatacacatgcggtgcaactctcaactt

SEQ ID NO: 68712 - DNA, 397 bp, Oryza sativa
  unsure (1)..(397): unsure at all n locations
agcttngtgatcttgtcaactaagacattttattgtgcttgagacttgatcttgcggtctgcgtcaacagattcacattaatgaatcagcatgtagaagataatggcttttgaggtattgattattggtaccttcaacctcctttaaagccgaatccctctgtcttgccagctctgccttgtcattttccagagtttggatctgcttctctagttgagatatcttggcagcttgcactacattaacttcggttaatcaagattacagagataacagcacaaatcagttgggcagagtttgcgcgaaccttttgatgagccactcagttcgaaattggactcctggagctcaacaatccgatccctcagatcgtgttcattcttcttggtaagttctc

SEQ ID NO: 68713 - DNA, 379 bp, Oryza sativa
  unsure (1)..(379): unsure at all n locations
catttnctaaagatccaatatgagacattctccatgttttcttatgagagcgnaaatgacatgtatgggaggctcaatgtcattgtgaatgatctcaaggggcttgcggcaaactacatctaacttgaggttgcccaaaagatgcttaaacctctaccggagaagtatgagacccttgtcaccatgctcatcaacatcgacatgtcaaggatgacactcgcaagcctctttgggaagatcaacaccaatgacatgtacaagttgaagaaggaggagatgaaggaagcctcaccttccaagaagtgcattgctcttcaagccgaagttgaagacaaaggcaagggcaaagtaaatgaagccaatgatgacttggaggaag

SEQ ID NO: 68714 - DNA, 366 bp, Oryza sativa
  unsure (1)..(366): unsure at all n locations
agcttgtggacaaggctatccatcaggatgatcagtgtaacaaaatgaaccgaaaaaggaaagcatcttagttcagaactctccaggggaacagttagaagcctcgcttcatgacgggacatcagggtggaccttccaccatgattatccggcagcactgtccctaccacccgggtagcttcaacaagaactacaagagtggcagtcacagcaacagcgagcagcacagcctcaatccgactccaagtccattaatgagtccagctcagtcagttcagccaactctgccaactcagccagaacagctcaagaagtttggagaaaagcccgaactctacttcaattgtaacanaacctggacacatg

SEQ ID NO: 68715 - DNA, 419 bp, Oryza sativa
  unsure (1)..(419): unsure at all n locations
tccatggttgcaactgtagcttgccctctatgttgtctttgatagcacggccgccggggtgcaccgcccagaagagattgttccagtcaggatctgtgtatccgaccgattggaaggattcgagcaagctctgctggatgttatccttgatcagcattggcacctggacagagaggtggaaatctatgccggtgctagtggcctgcatgccaagtgcgtgctcggatcctggtatcatggtctgtgaggcagcaaccatctcgaacaacgggcactcgccatcagaaaacgggcctgcgccaacgattattgcaccggcaccatccccaaacagtccatgtccgacaattttgctttcgtctggggtggagaaacataccanggttagctctgagagtgctacaaggacgcgtgcacca

SEQ ID NO: 68716 - DNA, 384 bp, Oryza sativa
  unsure (1)..(384): unsure at all n locations
agcttcaaggataggctggtattttgcatttggctntgnttgtaagttttcaacaatctaagtgtgtgctttccacaaccagagcgagacaagtctcggcttggtcggggagagaagtaaaccaatttatttgtaagattgcacaactcccagagttggcctcaaagctggtttcccaaaccaaatcaattttccaatcttttagagcttggttgtcaccaaacaaccagtcatttccagggtctccctgtcctgctgtctccctgacagccacttgcttttccaaacatcaggtttcccaaaccttagcatcttttcacaaagcagggtaaaacgaaaactacgctaaggaatcacctcacatccgcccatgaccatgggtac

SEQ ID NO: 68717 - DNA, 368 bp, Oryza sativa
  unsure (1)..(368): unsure at all n locations
tgctctncttcttatgttccacgttggattgcttttttttataactcgccaggcaaaaatcttcaccttttggggcgcattgcatttccaaagggcattccaggctctgctattttcattcccggacgaactcgagccttcatcaacatgtgccagagctactgccagatgataagcacttctgacagaaaatctccccagtttatccggatgccaagcaatgaaatcatcttccagccttgaagataaacgaatgtttaagatggcctctgcgtccatgggcaggaaatgctgcgagattttgtcagtatcccaggacccggactgatcaatcaggtctgaaacccatctcagtctgcaatttcttt

SEQ ID NO: 68718 - DNA, 393 bp, Oryza sativa
agcttaagctcaggtgcttgcgcctttctttcctgcggcggctgctgctccacgccgtggctggcctcgccgccgccgccagaggtggccttcgccgcgccgttggacagcggcaggccgaaacccacggcggcgatggattcgatggccgccttccaggcggcgtccccgtcatcatcgctgctgctgctgctgttcgccccgctcgccgtcggccttccgccgccgccgtcgcccatttgcgctaccccgaatctcgcgtgtgctattgcactctatccatgggccatagccggcccataggcttttcagatgggccgagctgagccgaaactagaatttttttccggtttagaattttttaaaaaaatatttacagaaataatctacccg

SEQ ID NO: 68719 - DNA, 416 bp, Oryza sativa
  unsure (1)..(416): unsure at all n locations
agcttcatcactctcagatacaactgtaccaganaacagatttattccattctgctgattttctgtctcatcaacaacgggacctggagagttctccccaataatgacaggtggtgattgcagactgtcatctggttgaggaaaaggaagtttatcatctgatcctgactcctcatcaaagattatgttgatttcttgatcatcatcaagatcagcctttggttgtctcggtttctctggcttggtagagacattgtcatccaaagttgccttacttcttacctgagttgcatccccagatggcgctagaacaggattttgacgttccctctgtcttgccataaattcatctacatgaatggatggaggccttccactaagtgctccacgtggagtagaacttacaatatttgatg

SEQ ID NO: 68720 - DNA, 419 bp, Oryza sativa
ccgcttggcgatgacggaaggagcagcaaggcctcgccggagatcttttttcgtgtgcgagctcggccttcacggtgacaacgaacttcccggggtctccggcttcggggagatggctgccgggcttcctctccttgcgaacccaacggcagcagcggcgaccgaatgcgacgatggacgacgaagaatggcacggctggagcggcggccggcgcttggagagagaaagagagctcgaggaggggcggctagggcacggagaaggacgggacttgagcggataggcagaggacgactagggggtcctttatataggcacgggagctcgggtccaggcccaaatcgacgagagaaactccgggaaagttaaggatcttcgctggaaaaaggaaaggttgatccgcgaaattggaaaggat

SEQ ID NO: 68721 - DNA, 423 bp, Oryza sativa
  unsure (1)..(423): unsure at all n locations
tgcggcatgcaagcttgtgttggcgcatacgacgaagcatttgcatgtngatttttctgggcattctatcgaacaccttgaggtcttcccaatactgacacaacttctcaattaatttttagatacatggaaacagtatgcttacccctttatgcgccatgggtgacgcgattcgtctaccagcaacggcgacgacgcagacctcccaagtcccgaacccctactaagagagaccaccaggcgttggattgaaccgtctaagaacacgagaagatctgcaggattggggagaagctaactagctaagccagtggggcttgcctgtgccgtgggtcaatggaattgatgggagcaggtcggngtctactcttgccatgcgcgcccagattcctgatcgactttcctaccctgaaaacatgggct

SEQ ID NO: 68722 - DNA, 426 bp, Oryza sativa
  unsure (1)..(426): unsure at all n locations
taaccccagaaggcagngatggccgtcttgcactgggcttgctgtctttgcacgtcngccgcgctggcaatgccggaggcgcatccttgggctgctcatcgcgcttctttatcgtctccagcaagacctccaaggagctcttcgccgcggccggggctggcgccatcacggcggctgcagagagcatcaccgccgtgggaaatcacacaaaagccaccagatcagaccagtgacctacacgcaggctcacacaccaatccgccaaatactgccgcggggcaccatggcaaccaaaaccttctccatctcgcaccaatattatctccaaatttaggtgcacacgcccctaactcaaaagcaaagggctcgaaagtgacagccctcccaaacccccaaattctgcctgcaagggctcaaaatcccctc

SEQ ID NO: 68723 - DNA, 399 bp, Oryza sativa
  unsure (1)..(399): unsure at all n locations
agctttgttggtgctggtgatattggtagttgtcattagcaagtagtcaagcaaggaaagagtatgttggtacctatgtaatgtgaatctgcttaatgtaatgtctctgaaaatgatatgttggaagaatgaattatggaacacaccgtttaacagtttgaaaagcgtgccacttttatccaaaagtgcagctcacctgatagatgatagataacgggagaacaagattgtgaggcctcctataatctagtcctctaaaacctagagaatggatggtacgatctctgcaagttgggtctttcgaaacaataggccaacactatgcccttatgcaccactattcacttgctttgctttaatttagtacgataccaactaccanacctgcgccgtaacata

SEQ ID NO: 68724 - DNA, 402 bp, Oryza sativa
gctgactatcacttccattggatataataacccactttattcttgatgcaactgaaatatgaacttttccttgcagatctgtataaataatttccaacatacctctggctggagttcatgcattacttcatacatgtctagcaatacaaataatttttcaggtgatcttttacttttagcaacagcatctccaaaactgagaagtgtcaatacgctactttctgccagttcagcaaaacattgatccttgttgaaattaataccatcaaaaacctggtcacaaattctccgttctccagcaagtaataattggacctgattgaagcacaatctgtttacctggtgtttggagacatatactagaacattgtcagagagatccttaccgcaattcgcataaac

SEQ ID NO: 68725 - DNA, 420 bp, Oryza sativa
  unsure (1)..(420): unsure at all n locations
agcttgaagtagagggatcgtcggcttgtgtcgatgtatgtggctccacttgtgttgaggaagaggccccttgttgtggctccctaggacgtacgtctccaagagccaacctcttgattgcttcgctagggacctcctcttcacctaacacatgcgagtcaacttgatctacttgagagccgttagtttcgtcaaatgtcacatcacgcgtgatctcaacaataccggaggttttgttgaaaacgtggtatgcacactcatttaacccatacccaagcaagaacccttcatccactttaggagcaaactttgaggatctagccttcttattaagaatgtagcacttactaccgaaaacacganagtaagagacatttggtttgttaccggtaagaagctcatagggactcttcttaagaa

SEQ ID NO: 68726 - DNA, 415 bp, Oryza sativa
tgaccatcgggacatcgctttgcaagattagtgccacattcttttactagatttgcagtatttatgataaatataagcatccacaaccatccttctaaacatgttagaaatgaggaccgaaaggtggtcgtggtcgtcgcacagggaagcgacactaatcgaacaggactctgcggatttcttatgcgagcatgaatacaggggaattttgaaagaaaaactttcatgctcgattgcggattgctttctcttgtcctcaagagtcgatgtctctagcttgtccgtggcctgaaggttttccttctcaagagatgcatcgtgcaagaaccgggttgtttcttgatgataaacaagaacaacgttctgagggccagatgaacaatgcataagcttgatcgacggtgatgagggtcat

SEQ ID NO: 68727 - DNA, 382 bp, Oryza sativa
  unsure (1)..(382): unsure at all n locations
agctataccgatgatgttggcctccccgatgccatactccatggccgctgctagctccgccgatgcatcccttcttcttccctgacgatgtcgttctcgtgcagcacaatgactttagcacgtgccttctcccttgcatgcgcgggagcggagggagatgggatcaagggaaatggtgtctatgtggcctaactcgtcgaccgcatcttcgctgctcgccgagacactcggagaaggagccagggcaaagcgactcgaggtctaccactgtanggagagtgggctttgatggtacacaacccaagtggcgggggtgggcttttcgttttacttcaccatactcggtgctcgcctcctcgactctttaatgcaaggggacaac

SEQ ID NO: 68728 - DNA, 425 bp, Oryza sativa
  unsure (1)..(425): unsure at all n locations
tgagctgaattatagaggctctattgtactatatagtattctatattatgaagagagtagagtagaagaagtcgcaggaattccgaagttgtcggtaatcctctccatatttctttctgctctgttaattactctgattataatagaattatattttgagtaatttagttctgctcggtgagaattatctcttggttagttcctatttagagtacatcattcactataatcaactaaaatatagtgatttactttggtgtatagctaacactaaagtaagtaattaatctgcttagacgcgatgtctangtagttaatttttggtgtttgctccgcatcccacagtaagtgtaaggagggtgtagaggtggtgacaatcctcacgacactaaagtcctccctatccgggtacgccgtagagcgat

SEQ ID NO: 68729 - DNA, 414 bp, Oryza sativa
  unsure (1)..(414): unsure at all n locations
agcttagtgagaagtgaaggggagagagtgctatggtagttttgccacagattacggtaaagtgcctccaactcaagaaatggtaaaaaaactaaacaacacaaactttggatggtattaaagtgcaccactaattttcagcgatatactatttctgaagtcaggttcttctgatgccgcgaaaccaattctttccttatatgccactgtaaatttgctatgaaattacccatgttccccctcctttccttcttcaacctcatgggagttgattgcatggtggggtcatccatcagcgagatgttgcgaaagatagcgtcaatttcctgtggctgctacagctgtccagcgagatgtagtcatgtcagagcttgctgatattacaagngactgcgtggttggatcttaatcaat

SEQ ID NO: 68730 - DNA, 403 bp, Oryza sativa
  unsure (1)..(403): unsure at all n locations
ntgataatgctgtggcaattgttggtggtagaaaattattattgactctgngcctgaaaatgaccaatagggtttcaagttgagaactttggcatgaaaaatgttgccacttcattctgaattaatgttcttccatgccaacatcaccaataaactagcaatgttgtttttgtgtggctgtacgctttatctagtttaacaagcatcttagtgtgttctatattacgcatctttatgtgttaacattagtttctggtaggtcatccttttagtgtgttctcatggactaattaccttggttaagtgagcatttcaatgtgtgtatattcgtcgtgtattggtaggttaacaaatgcatcaatctttttttatgtgactggttaaggatcttgatattcattct

SEQ ID NO: 68731 - DNA, 404 bp, Oryza sativa
  unsure (1)..(404): unsure at all n locations
agctntgttgcggataataaatcaggtacttatgtatcgcatgccatgctcttgcatgattattatttcgcatcatgtgggtaaagtgtacaaactctacagagtaaaaactaatcgattagccgtgctcgcggtcaagagcgacgtgtggatatgtattgagtatagacttgtgtttattcttctaaatgctgaaatttaccttcaaattgggatgagatttgagaatgatctccttgctgccatggaaggcaatgaggtgcatatttatacatgattaatgcctaccttgatgcccaatatgtcaaagtactagcttgctgaaatttatttgaaagtaaacctgatttagaaatgttttatgcaaataaaacttgctttatgctaaaaagaaccatattatg

SEQ ID NO: 68732 - DNA, 413 bp, Oryza sativa
  unsure (1)..(413): unsure at all n locations
taacatgcanagatgccacattatcatccactaacaagttttttctatatcatccactaacaatcaatacatttaatatcatgcaaatacgttatattatctataatttaaaatttattatattttagagcttttaaaatgaaagcatgttaaatcatcatcccacaaaattcatataatatttcaatatatatcttcattattttcttataatatcttatgtacctatgtagttcatcatcacttggttaatgttatttctctcttctctaattaagtcatattacatcaattgtttccagtgcttatgtaagtttatattggttagctatgctacatattatttttatttattggtatcatactgaactcccgcagcaacgagtggggtttcacctggtatctcttgacgc

SEQ ID NO: 68733 - DNA, 365 bp, Oryza sativa
agcttgcaagaagttcatctaagcagtgagctgctattgcgatcggcatcaccaaccggaggacaccgctccgacaatccccacccctcctcgcgcgtccaggagctctgctccaccaccatctcggcgactcccaagctcacattgacggagaccaccacctcgccgccgccccccaccatctccacccggaaccaggccgccccgggcttgggcaccccgaccaccgtcaccgcggagccctccgcgagcccgcacgggatcttgacgccccgggcgcccacgccgcccagatccccttccacggacgaccggcagctcacatcgaggtctccctggcgccgcccggcttggcgccgggcgct

SEQ ID NO: 68734 - DNA, 421 bp, Oryza sativa
  unsure (1)..(421): unsure at all n locations
ttattagataactattcactcattgatatgcagtttattattctgngatncatcaataacgagtgtttgctgtgggaacggaacgatgatggagtataaaacagcagatgaaatgacgcacaagaggagagcaatgggtggtatgatacagtatgcctcaaagggtggagttttatgataaaacatagttaacctgtggttatgtgatagatgtgtctcaaaacctggggttttgtgatatttagtcatttaaaaaagcaacatcgctatcgccttatatcctaatttatgtgtataccttttatagctaagaggtggactatattggccccacactttccttgtacttctcaaaaaagggagtttagtgcactactagaaaacacggtttcgcaagtggaccagttgtccgtctacaact

SEQ ID NO: 68735 - DNA, 401 bp, Oryza sativa
  unsure (1)..(401): unsure at all n locations
agcttcgatccggccatatcattntcatttttctcttagctccaagaatccaattcatcgtgacgtcggtatcgtccccatgaaactgaaccgcatcatcttttcatttatacttatacttatcagttaaaatttaagtttttaactttaattttaaagttgattttagaaatttttcatcatagtttattttttagtctccactattagatcattgagaacacgtatgtaaaagttatatccacaagtgtttatttttcatttgtaaatataccggtttgcctttttctctagcggagctagaacgaaataaagtgaggtgccacttggttaatttactctactttatatcaagtttaagatgatacgagtgtctaaatttatattaaaagtgatgccta

SEQ ID NO: 68736 - DNA, 412 bp, Oryza sativa
tgtgatgagaataaagcctcgacaaagcatggactttttcttttcttaaacatgggtccaccggatggtcacaagtgtttatctctgctcaagctttaccccaagatggatggcgcatggcaaaagtataatgtagctcagaatgttttcttagtcttttcccggtcttggcgtttggtgttcacccgatcttctagatagaccccgtactatcaagaagagtctatgaagcgagcttcgtgatgatcttgtgccatattaattcatatgcatgtaagtgcattttttgggcttgtctaaccaagtgtgattgagttatctcaagtcctaaaccactagagaagtgggcatgtccaattagagtgagtgacatctttgggctatgtcctggggatatcctttggagtgtgag

SEQ ID NO: 68737 - DNA, 408 bp, Oryza sativa
agctggtataagtgaatttcgcaggtaactgatccaattcctgtataggcccaatatcagaattatcaaaaatctctggctccttcgaatatttctcctccagtccagccaaagaagtttcatgcaacctctttgagcccaattgaaaaggatgctctgaagttgaaaatatggaattcagacaactcatgcttgcattcgacacaatatcgttgctctcacttgcagctaagttggagatatagctaaaatcactgtgattgagaattccatttctagtgtccaaaaagcttgaagcagaacattttgcatataactgatcaaagctagatagaagtccagtgtcaaaattaactaattctgacccatgttggtcttgcctttccagtccaactgaactagaagtaa

SEQ ID NO: 68738 - DNA, 415 bp, Oryza sativa
tctcttattgcacgatgcgatcaaccaccatcttctttgtgttaataatcccctctaagacatgagcattttttctagccacaggtgccaaggaggacgagggagttgaacccctttcttgtgtgatcctacagttgctggcaagaagactcccaccaaactggaagcagagcctgttgacagggtgatagcctcttgacagggtgatagggaggctaacctggcccggttgaacagcaacttgtgctaaacttgtggtgcgaagacacactgcaccaagatatggtcacctagatatctattgattatctctatacaaacaaatcattagtgtttattattccgatgatcagacgggctagaacaatcagcaaaagataggatatgtgcattcttctggtgcatatatatgctt

SEQ ID NO: 68739 - DNA, 400 bp, Oryza sativa
agcttcttgatgctacaacattgaaagaatcaatcacttgcagtccctcttcctccccgcaggccgtatcaaaagacaccatcaactcttcaccatcagtccgttgcctttcctcccctgggtcaatcatttgggttcgggaacctcctgaagaccgccttggggtataccacattctgatggatcgtagtgggtcattccacatgtatcctgatctgggtggtccatttcagagcttgaatgaagctcaagatgctatcagcagccatcttaacaggatttatccaccagtaaagtaaggttcttacactctattgtagctaacgctgtttatttcccctgtgctgggatgggtgtcagatcatgaatcacaaaatgtactgtaggacctaacttgtag

SEQ ID NO: 68740 - DNA, 340 bp, Oryza sativa
gacagtgaaagtgacaggatgtttcccaacatgctcaaaattgatattcgccttagattggtgtggaatccttattctacaaccattgtacagacgatcataatttgagcccactgtcctgcactctaccacaacactcccgcctatatcaacatgatgaactataactgctgaggtcatcatgctctctattgtacattattcaagttactttgttcagcacttggtccaccatctgatgctttacctgaagcaaagaagctgagtcttgctttctacgtttgaaaggtactatcatgcccttttattgcactccgcaataaatacttataaaagaaag

SEQ ID NO: 68741 - DNA, 401 bp, Oryza sativa
agcttgtatctagcacacagtctgcaaatagatgcggaatgaacgtagtacgtcaattgattagttttttaaacttgcctttttcaagttcaagtctttaaactttagacggggactcacatttatttacggttaattattcatgtgataaatttattataggtgtttttttaaacatgttaataggagtaaagtgtacgcgtctgtctagagggattagtgtgtagtatttcctctgttttatattattataagtcgcttcatttttttctagttattttttctaagtttaattaagtttatagtaaaatataatagtatttttagcaatcatattatcaaaaaaatattaaatgttcaatttaataaaactaatttaatattatatatatattactaaa

SEQ ID NO: 68742 - DNA, 429 bp, Oryza sativa
ggatagaattggcttcaatttgacaaaattaaatcaatttatcaaatttgacttcaatttgatagatttaagtaaacaaaatttgacataattttggtagattgattttggtcttgcagtggtgagaaagcattatgcaacaccaattgtcaggacgatcaaatattgatcaaagagtaagccaattagccaagaacaacaacaccatcatctcctctctgcactcatcctgcttgtccctccatgcaacagccgtcaccgttggcaacccctccctccgcgcactgatgcaaccatcgcctcccttcctccgcgcaccagtgccgtcgttgcctccctccctctgcacgccagtgcccgccccctctttctcctcaccgagagagatgagccagagagagaagggaggtcaggagatgcccaaatgga

SEQ ID NO: 68743 - DNA, 421 bp, Oryza sativa
agcttaggggaatgaatgatggtgtggtggccattaacaaggcgaggtgaaaacacctcacatagcattacctattgtagtggatagagaatgagaactccttttgaagactaggcaagcacaaaagttgcatcaattcgaacgatcatcctaattaacaagtcaatgttgaagtcttgcaaaaaataccaaagaaacctgaagtgtgcgggttagtgcctacattcatccatcctttttgcaacagctggagcatctaatcctgcaagctactagtataattatgagtttaatttgcactacacgtcagtcatccaatgcatttttcccatatattaaaggggggcaatggtggtttttcccaactttgaagctcaattgtcgatttgccctgtttattttaaactggagctacagtttg

SEQ ID NO: 68744 - DNA, 424 bp, Oryza sativa
  unsure (1)..(424): unsure at all n locations
tcagcttcatattctggttttgttcgtgaggatggatttctttcttgtctcttgngctttatgtgctctgatctgcatatttggttgcaacatctgaagattatgttctcataatattcccgatggcttccatgcctattcaaagttggccatatatatataggacatgagttggagaaaaggtgacaaggtagatatatgatttgatcatcaaatgcatcaagcatagtgctctcagtgatcagcagagtgagcagcaaatgaagcaatactgtaatgatttcttttatgatcttcaggaaatacacttggatatatactgggagaagaattcagagactcaaaacatatataaggtgggtgaattggacattgccagttgaattgaattgtacaccacacgagttatggaatctaccacgta

SEQ ID NO: 68745 - DNA, 401 bp, Oryza sativa
  unsure (1)..(401): unsure at all n locations
agcttgttccttctaagaattgacccaaatgaagctccttcccatttttcatccaagttaactgactgcatttatttgatttaaagatacattcttaaataatataaaaatagacaaaagaatcaccgtttacataaaaaaatataagatatggagagtttcagtactagtttgttccctctgataattagtctattcaaaatttacagttggcaataaaatgtagttcacaattactgactacttacgtgaattgcaagagagatgtgcctgtatctatctgtgataactgagtcagcagatatgtgctggaatcttgctgctaagattgcagatggtgattggcccttttcctcacccttcanaaaggcaacatgaaaagaataaataattgattttaa

SEQ ID NO: 68746 - DNA, 253 bp, Oryza sativa
ataaaactaagcttgtgaaatgacaactcctgatacctcctaggccaacttttttatattctatatggcctatgcatcacttcatggctggactggtctattctgcctccatgaagcatatttgctcatctctatctcctggactacataatttcttgctcctttatataatctttagtatatacaacatttcaacttatacaattactcagctctctcaatccttacaattcaatatagcaaatgggatgat

SEQ ID NO: 68747 - DNA, 335 bp, Oryza sativa
ctcacccgtcgtcggggtgctcgacaccgggatctaccccatcggccgcggcttcttcacgcccaccgacaggctcagcccgccgcccgcgtccttctccggcggatgcgtctccaccgcctccttcaacgcctccgcttactgcaacaaccagctcatcggcgctaaatgctctcggccacgccattgatgagacggaggagtccaagtcgccactagacaccgagtgggacacgggacccacatcgcctccaccgccgcagggtcgccggtgaccggtgtcgagttcgactacgcgcatggccaggcagtgggcatgtcccccgccgcgtaca

SEQ ID NO: 68748 - DNA, 426 bp, Oryza sativa
tatgtttgaaaaagccaacgagtacgccaaagctgaagattttgttttcgcatcaaagcagtcgggtcccagttggaagccaaacaagggtacgccggctactggaggaggtggaagtaacaatcataaggaccgcaagcgtaagcctgaggaacttgttgcaaccgccactcactcttctcgacagcgttcgcgcgtcaacacgttcgacaagatcatgaactcccaatgcccgcaccatcctaactccaaccacgtggccaaagattgtttcgtctacaagcagtttgcggagcaatacaccaagactacacggaagaactccgacgaagaacaaagcacgtcgaggaagaaggacgacggcgacaccccggcaggatttcaagaccaccgcaaggagctcaaccatatcttcggcgggcccct

SEQ ID NO: 68749 - DNA, 366 bp, Oryza sativa
agctcgtcgaatattgatagtcttgtatttgtgtagcccccgactctttggttagttgagaaacaactgaacatagagtcgagaactgtagcttcttgtagtcgaatagtcattgcttgagtaaagatgcatgttgaagatgtccgagtagaaatattgaagattggaacaccacttgttgtaataatataacacggcatcatatttggtgacgcatgccgagatgtcgaagctcctgtagacgtcgtggttggtgaagtatgaaagcggtagtgaagacatataattgtgaagataaaagcaccagccggcggcggcataaccagtcggcgacggaagacgatgatgtccatcagtagtggtagc

SEQ ID NO: 68750 - DNA, 398 bp, Oryza sativa
tggccctaattgcactgatgaataaaaggcaaggacgcattgtttccaaatctataaccactcataaacaatatccttatttgttaaaagatcagaaagtgaattatactcataataatagttcagttcttcagtaatttatctcccagattcagtctcactatatttcacaatgttggtaaggtttaatttcttcagaccctgagatcaagtataattaatttcttagatcttataaagcacccatggatcaaaatatcagtattacttagatcttgtagtgacatgccagaataatatattcataaaaataggccaacattgattatattttagtgcaatgaaataaaatattcaatgtcctatagttatattatatatagagcacgtgatgcata

SEQ ID NO: 68751 - DNA, 398 bp, Oryza sativa
agcttacaaatcacaaagcattgcctcctatcttacttcactccattaatttctctttacagtgaacattcacggacactaatattggacaagacaacaaatcagatatctgacctgagttaaattatcggacggtcaattgtttcatttgatcaaagatgaaatatttactaaacagagtgaaacaaaattatcaaagtcattgaaatatttttctttaaaagaaacaaatccattatgtaaatagcatatcaaaatacttcctgaaacatccaaagaacaccgtatatagaaaatactaataaaatattgaaacatcataaaatacttattgagacatctaaacaacaccatgtgcgacatcacaataaaccattgcaacataaaattccaaaagt

SEQ ID NO: 68752 - DNA, 424 bp, Oryza sativa
  unsure (1)..(424): unsure at all n locations
ntatctgtgtcangtgcacgtccatctaactttttattttataatggcattttgtattttaaacatagaatctggattggtcataataaacttttgcaacaaaagattctggccaatttacatactgcagcagtggggggtcattcacgaattttggttacttatcaaagagttaagcagttgttctcttggccaggcatgcgcaaagatgttcacgagtttgttcaacattgtgatatttgtcaaagagctaaatctgaacatgttaaatacccagggttattgcagccattggaggtaccttctcagtcatggcaagtaattactatggattttattgaaggtttacccanatcagcttcattngactgtatactggttattgtggataaattctctaagtttgctcatattttacccctgg

SEQ ID NO: 68753 - DNA, 408 bp, Oryza sativa
  unsure (1)..(408): unsure at all n locations
agctnttaattgaaaatttaaaactttcaccttaaaattatgaaaactttcaattcaaattaaaaagaccatcttaaaatcacaaaacttttaattgcaggtctagaattttatcttaaaatcataaaaaactttcacttcaaatttaaaatttccatctcaagaatcacaaaacttgcaattcaaaaactttcatctaaatacgcaaaatcccttccccatcgctgcctccaccacgtgcaggtgtcctactgctgcctcaaagcaaccacatctccgccttcctgtcctcgctgccgtcacaacctcaggtaggattgcggagctagatggagaagggaggggcccaacgtgtatggctgaatgagctgagggcggcagggatagagagaagcgagggataaaagg

SEQ ID NO: 68754 - DNA, 418 bp, Oryza sativa
  unsure (1)..(418): unsure at all n locations
tgcacacacatgcatacaattgtgttggactaattacttttcttttctcgcacttgntggtcacttcaatcacctagaggcatctattcagtacacattcttgaaaagtgttacaattgatggatccaataaaattagtttctttccactgtgaggataatatttcactgtgtataactcttttagtatagcattttcatgtacaacagggttagacccttcctttgctgtagataggtgaaccagcatgccaattatagcacacttaatcctctttaaatctcactacttaatgtaccttcagcctggagctagggctgctaatatcagcttgtatggtattccactgtacaattgattgctgtgcttctattttcaggtcttcatgttgttcttataatgttcacgggttatttgg

SEQ ID NO: 68755 - DNA, 409 bp, Oryza sativa
  unsure (1)..(409): unsure at all n locations
agctntaaatatccaatgacatgttatcttctaacctttacaagacaaagataatgaaattgttttttgtagcatacccaaatctgagtatctggcatgtcaaatgtggtgtgcggttacatatatgtctgatcaatcctggcaatcacatctcctaatagagaaatgggagggatgcaaatatttctatattcttattagattttctaacatgccctgcataaagacaatagttataaaataccacaactcatgtgtatttgtagatacatctttgatcaatgtaattgaggaaaacgaatggtatagtcatatagctggttttacctgtcaatcttgtttttgataatcgcccttaagtttgtagcttatcttgagcactnnttggatagcaactgttacttttctg

SEQ ID NO: 68756 - DNA, 397 bp, Oryza sativa
  unsure (1)..(397): unsure at all n locations
ttcccctaagccagttaccaaaaatatcttttgtatttgttngagggggtattgaagtcaatgaagacacatcgccaaacaaaatgtgcaatatgacagtcaaagaaaagatgttggatggtctcttgtgtattaaaaaacaacattacttgtttcccctacattatctctttctgtgattatctttcgttaagattacctttttgtgaagaaaccacataaatactttgatttttagtggtacatttacctcccataagatcctcttgcggatccttacattggagttgatcgcattacacatgaatttgaccgaaaattggccaattttattttttggttaaagttcatgaaccatggtagtaaaagggaatattgatggagatacatatattga

SEQ ID NO: 68757 - DNA, 366 bp, Oryza sativa
  unsure (1)..(366): unsure at all n locations
agcttagagaaaaccttttagctagtttatgaatntgcatggctgtatcaaataggtgccggttcttggtaagaacaggcacctattgttctgcacagcacgagtccacattggtgctcgtttttttgttagtggccttgttggcggaagggtcataggtgccggcaccaatactcctcactcaggggaattagacaggaaacaacttataggtgtcagttggtttgtctgtatgaaggtttttttagtagtggttgtagaacatattaagcgtatatttatatattatgtaacatcgcaaaaatattatatagcccttgaaaacaaagaaccaccttctttatttcaaaataacttgttgaatac

SEQ ID NO: 68758 - DNA, 408 bp, Oryza sativa
  unsure (1)..(408): unsure at all n locations
actcaagctcttggtaggcacatatataatattcgcgcgcctattagtttattctcttataaagaacaaagagngcatgtactttcaataggatcacacttatgtgtgaagatgtaaccttaaatttatatatacgtcatccgcgaaaaaaatctgataatttcaagagtataaatatgtcagaattttatctatgtcttttactgctccctacgtataataagttctgaagataagactgcactcatatgtataatactacttaatggatatgcacttttcttaaatgttttggcaatatttgttaattggtgattacggtgtgtgtgcgcataccaatgcttattggcatatatatgagaacgtttcttatcctacaatactagtagatccctcaatcatactccc

SEQ ID NO: 68759 - DNA, 412 bp, Oryza sativa
  unsure (1)..(412): unsure at all n locations
agcttgagaaatgttaggcgtccgagctgttggggctgctggcaggacaatgaagaagaagccctgcttgttgctcatggcctgctcgacatcaccaaaggagccttcgtcgattcttccatcgacgagcatctgctccctgaatatgttgccaggagacaagaaatattccctagtggtggctgggagatgatgtacgaggtggtcaacatggagctctccctcatgtacgacatcctctacaccaaggcagccatggcgcacacatggcatggctatgccattcgtttcgtctcgccggtcattacaaccgctgctttcctgctgttttggttcgacagcaaggtanggcagcggatggccgatgtgctgatcacctatgtcttgctggccggcaccgttctcctggata

SEQ ID NO: 68760 - DNA, 421 bp, Oryza sativa
tctgattgcagggagttgcgtggactgacgtgctttcttctatttttctcggatctgggcacttgtcggcgaaatgacccattccttgacaattgaagcaacagatgtcttcccggactcggcattttcttttctcatttcgattcctctgtcctggcactggagttaggctgaaacggtgatcttggcggggatttgtgttgccttgatgcttctctccgttggaactggcgggttggttggccatcttcttcgtcagcagaaaactgaattgacaatcttttggtacatgatcagttccttcaccaaagaaacaagtgatcctgctcgttggacacctgtcgggtggatggtcttcctcacaatgaacgcatgtagaggcacaccagctggcaacatgaccgatttctcacaacgagag

SEQ ID NO: 68761 - DNA, 383 bp, Oryza sativa
agcttttgacagcagtttgcaatgtgagttcataactctgctggtgtatttaattttttttcaagaaagatctgcataaggagaaacagcaaagcaacctgtgatgaaaactcaagaaacagaataaatcttggttcattatttcccaggaattagattggaccaaaggaacactaaagtttggctgtcagagttacatcacaggaaggaaaagggaatgccattttggctcatggaatacaaaggcaaagacataaaattccttatgatgatccttctcgagaccaccaaattaatggctactaccacatgtacagatttttttgaatgaatatttacacgacaatattgaatggaggaggaaagaattgagagcatagcaa

SEQ ID NO: 68762 - DNA, 408 bp, Oryza sativa
tagtaagttgttcagagatttaccaagagatcttttctttgtatttggcccaataacttgcctcagtaacaacgcaagccagtggtatttgatacatccttatgcatattgtctgttcttcagccagactgcaaagttgttagtaatggcatccaggcaccctcaacttttaaggaaacagaaaatggagtaatcggtgttgatgagttggtattcacttggtactccagtgacataaccagagattgtcaaaaatgtgaaaatgaaggcaaacactgtggtttcagctcacaaaggggccgagcattctgcaattatggtattttctctttctgaagcagaaatcttacatcaatattatgacttgctttgtcttggtaggaaactctatggtctttaccttttcat

SEQ ID NO: 68763 - DNA, 403 bp, Oryza sativa
  unsure (1)..(403): unsure at all n locations
agctntatgttcggcgcagtactcatactggaacttacgagcaagaattgctctatcaatcaccatctactttagacatatcttcttcaactttttgaaaatccaaaagtccagtatcttcctacaaattagtgaatttgcagcattctgaattcataattcgaactgatcagcacagtctcgtgcatttagaagatcaacgactacaccttggcagcagaaggccttcactaagtttcttggacttcaataccgacgcaagggagccaagaatggagcagctgatgctttgtcccgacgcagccatagagtcgatcttgcagataggcggaggtatgattgcttgctccttgcatgtgaaggtgggaaacaaggaaacagcagaaatgcttactgggacata

SEQ ID NO: 68764 - DNA, 416 bp, Oryza sativa
ctcactcacggaataatgacgagtgaatggtgcttttatgtcattttggagtttaatgagttaacagacatatgcagagagcatctactgataagaatcaatgagtgttatgaataataatagagaataagttatgtaattcatctcattgtaaagaactaagatgtgttatcatctgaaaggctatcaaccaatataataattagcatgcccgaaagttccgaatataaagaagtgatcaaaacctaatataggaatagatcttaccacctgccagcaattcaagcatatgttgttaccaaattgtggtatgcgactattcctgaacaactaaatctaagccattcgatccaatttcaattggcaacaccaacatcgcagttccccatatatatgtttataaacagaacctggtc

SEQ ID NO: 68765 - DNA, 390 bp, Oryza sativa
agcttctaaataatcttatttcattcaatatatccattattaattaaagctatatacattgacctaacagaaaatctaccattctgatgataattctatctaaaacaatcagaggaatggttcaactgaatatgtatgatagaagcacacaattcatgccaatatataagattctgaatattttattctataacctattttgatgaaaaatccacttacccaatatatgtgagtagttgattcggacaatttcctccgatgtggatttatagggaccgtaccaagtatgttggactcgtccaacgtggttatgaggtgagttcgactcgagtttgtgcttacactgctcaaagtagtaagatgactataaatgatgagagagccgagcgc

SEQ ID NO: 68766 - DNA, 415 bp, Oryza sativa
agcttgcttacgccctagtgatggcttcgtgcaagcttaaacactactttcaggcccacaaagtcactgtgccattacagtatcctttgggcgaagtgctccggggcaaggaaattactggccggctcagcaagtgggcggcggagttatctcccttcgacctgcattttgtcgcccgtactgccatcaagtcccaaatcctagccgactttgtggccgaatggacgccagcattcgcccctaaacccgagcctgccaaacaaccttgggtgatgtactcggacggctcgtggtcgcacaatggggcgagcgccgtaacatgtgtcgctccgccagggggcgtgccgattcggtacgctgcaaggctgcagatcgacacgaccaaacacacggtagaataccaactgtactgttg

SEQ ID NO: 68767 - DNA, 422 bp, Oryza sativa
tagagtggataatttcaaatgttgtttctattaaaatctattttataaaccaaattattcaaaatttatttggattcaaatgtagcccaaaaacccctatagaccataaaaggtcacctcctagcacttaagtgtgtttcattgcaaatatccatatttctcaaatattatgaatgtttgtcaatctttaaactcataattcaaaaatgctccaaaataaaaattttatttggtgtttttgtgtgtgggtgtgttgacttgtgcaagggctatgcacactcagctagggcaggtggtttgatcggccttataggcccggtctgaccggccgcatagggctattcggaccggctagcaaggtgggccctccttcttctcacttattcacctgacccttctttctcccatctcataccctcact

SEQ ID NO: 68768 - DNA, 347 bp, Oryza sativa
agcttctagcatcttccaccacttgtatttccttatactttatcttttccacctttatttactgagttcggttgctattgcactgggtaagatttcgtccacaccagcctgcggtgtctagccgatgcagtgggtagctaggagctcgtccgcaccgttcttccgtaccgggagttgctggccaccacctcccgcgtcgtgttgcactgcgcgctatgtttattttttgaatgtgttaatttgatcataccactgaaattataccttattagaaaaataccattattattcgcctattctaactcgtgtcattccaatttttctatattaaaactatgccattgacg

SEQ ID NO: 68769 - DNA, 428 bp, Oryza sativa
  unsure (1)..(428): unsure at all n locations
ctaagcttaaacattctacctatctgctctactaactgaactgctctctctttcatccattcatttgactcctgctagacacatggaagcatatataacaaacatgacatagagtggatttcataaaactattattatttcgttaaaattgttactttgatacaacttcagcacgatacatattttgttatgaaaaagattataacaagaccaaactatctagcacggattaaataacgtgtgtgcacatatatgtatacatgtccatgccttgagtggttggttgtattcgatgaagaagtcgccgaatatcgttgggtggaaagtcggtgccatcttactaacaatgggagatgacggcgctgtgcacttgcaaggcatgaagcgggccgcgtgcacggaagacagcantggatgacgtatcatca

SEQ ID NO: 68770 - DNA, 388 bp, Oryza sativa
agctttatcagattctattttccgaagttgcacctacaactattcattgaaaagaatcctactcttatgggtaaatgctcaatatccaagtgggcttacaaatttgatcatgatcaattgctttgtggattgtctcgcgtctcttgattagttggtatttatcccccccaatattgcatgttttttacgtccaaacaaagtatttacttgttactaataaaaaatcaaaaagtttatcctacgttcttccttagatcccttcttttactccgatagtattgcagatcgtcctcgatgcaaagaaaatgaatgcatttccatactataataaatagtgagtgtgatagatagagaagtaggagcatgtcacatgacttattccatttct

SEQ ID NO: 68771 - DNA, 375 bp, Oryza sativa
  unsure (1)..(375): unsure at all n locations
agcttagccaaaatattggtnactttatatataaaatggtatgggtgaagacgatgacatcaaagtgaataagccccacatcttgaagattaggaaaaactaaaatagattaagtaaaggtagccgttgatgtaacaatccatttgaccctgttattaatcttatccttcccatttctatacacataaatcatttgtttgacccatttattttttatacgaggttatcaccacttcttgccgaagagaaaagttctacgaagctccaggtatatatactcatatatgtataaaaattaccacgcacgccatccaggatatcataagcattgaccgctctgtcgtgacgcttaataggcttcgataagcattaatt

SEQ ID NO: 68772 - DNA, 415 bp, Oryza sativa
  unsure (1)..(415): unsure at all n locations
agcttctcgtatgtacagtgctcatgagtcttacatacgtcctcttctaatgctaagtcacacacatgtacacacgctgatcatgctcgatctagtcaagaccaaacaagctggcagcaaccaatgatcgatctagtgaaatgtctcgatcgatccgccatcgacttccttgcagtttccaacagggtaattacttaacacagacgataattctgttaattagttaccatgtatgggtatgcgtatcaattagtttatgtagtaaatgtccacgaatcagctttccaaatactcttaactactataatntatctgaatgtacttcttctaaaacactcctaaaaaagattggaagtacactagtcacgcataatcaatagaaatatttttattattaattttactaatgcgattt

SEQ ID NO: 68773 - DNA, 420 bp, Oryza sativa
  unsure (1)..(420): unsure at all n locations
ttctggagtctggacgactgtgcttcactgtccgattactttatcgagcgnnccgcgncggcggcgtcggtggcgagctaaaatgggcagcaccaacagtgccggtcacaccactgacagtacaatcttccatggattcatgcgcaagcagccactctcccattgtttttttcacacaactgccagtgccggactcttttctttcgtgcattgagaccaaaagtaagctgtgcttagatccaaacttccaactttttccatcacatcaatatatcatacacataacttttcagttacatcgtaccaatttcaactcaaacttccaactttaaaaggaactaaacagccgtaatcctcagatcaacttatcaaagggcaattcttccatagtgcgtgcttctacctagctaggtgcacgta

SEQ ID NO: 68774 - DNA, 407 bp, Oryza sativa
agcttcaacttgttgaagctgagaaaattatatatcatgcaagaatatgaacggaaagagaagcaagtcgaagttagaaagaaaatgtgagacttctattcctcaaattatttatgttttcctgtgttctccgaatggtcccattaacagcatttcatgttgaggatttctgcatcatacagtacattacatcaatgcctcaatacattttagatacagctggaatgctggattctcatttgtgtgcaacattagtagtaaaagctagctacaaactacttcagccacatggttaaattggcagtaatcgtaatttgactgcactggttgttgagacacttaaaaatcacattcggatgtgtagttcagtgcagtacacttcactgatgagtcgactgtattttatt

SEQ ID NO: 68775 - DNA, 423 bp, Oryza sativa
tactcaagctgcgaattgcgtgtattatgcaagacaaggtgtttctctttcttttaaaaaagaatctgcacgaggtgcaacccctcccccccacacccccaaagcatgcacaaatacgaccattgaaaacttcggagcgacgtaccacactagagtgtcactgggatggtcgctgcctcaccggggaagctttcgcgacccccaacgccccgatccatgctgtctagaagccccaccaccacgtgcaaccatgaagcccaccagccctcgacaccacttcgcggcttggttggaatcttcatcggcctaggggccctaatctgagccgcccaaagttctaccggcccaacatgctctaatccatgctgcccgaagcttcgttggtcatcgtcccctgatctgtgctaagcgaggtggatcttg

SEQ ID NO: 68776 - DNA, 352 bp, Oryza sativa
  unsure (1)..(352): unsure at all n locations
agcttgcgctcgtgtccaatcagagtggctgngtctttatctgcgcaggcggntcacgatactggtccaactgctgaagttgcttcgcaatcttgcatgcaaaacgccttcgcaacaatggatagcttcactgccgcttgtgcgaatgcctacagtgacctctcatttcgctctgaagaagagaagactcgactcggccattacaaatccggagttcctagcttcatttcacacttatctggggtgggcctagcaagaaactgaccttggaggtttggatgaacagcatcaatgtgcagagtcatcccatattctcattacaatctcacaaaccgattgtctctgctttgct

SEQ ID NO: 68777 - DNA, 422 bp, Oryza sativa
  unsure (1)..(422): unsure at all n locations
tgacgcgcgcncgngcattgatgtgtgcatgcattatatttattatatgcacgcgcgccctagctgtagcctgtagctgccacagagcctgatgcacactattactccccttagagcgagtttaatggtataacccactgccagctctaaatcatctataaccaatgtaatagccaattcatacaataggtgcttgctatactattaatagcccggaccacctgtcatacacacattgcgacttggagcccgtgctgcagctggctacaaatctgtcgccagctactcttctctctcttcctttatctctttaaaatatgtttataactgacttatagcctgctattgtacctgctcttatttcaagtttgtacaaaaaaaatgtattgctttcatcccaaaatataaacatccctgaacag

SEQ ID NO: 68778 - DNA, 335 bp, Oryza sativa
aatcattgtatagctatttcagatggagtcttaacacgagtgctaccataagctagcagcaagaccaacagtgagggaggctcggaaggggctggttttgtcaactcgagcgtgtttgtgcacggttgcagagccaacgcgcacgcataggtgcgtcttgttcatcacagcccccgctcgttcgttctgttgcgcaaaaactctccgcgcgcgacatgccgcagttgaactcacaaaagaggagacacatcgatggccgtgatatgcccggacagcgcgcgcccccccgcttgggcatctgtaccgcgcaacgtccggccggacgaggacactca

SEQ ID NO: 68779 - DNA, 399 bp, Oryza sativa
agcttgcattatccatacttgtcgccacaacggcatgccacttattacagccgatgtgaccactacaccaaccatatggatcaaccactgcaagactgatcgccagcttgtcactagtaaaaaaaacaatagtaaaattatttagataacaaaaatggattgaaaaaacaaccgtaataatttgtaccatagaatgtacatgttagcagtttttttagacagttctgtgtttgaatatgaagtgaatttgtttatcttttctcatcaattaagcttttgagttaaactgtatataaacctcaacataatatcagaacaactcaatatagtatcagacagaaatctcgagttcaaatccttgctgaagcgtaattaaataaaaagtgtacaccacttcta

SEQ ID NO: 68780 - DNA, 376 bp, Oryza sativa
gaccagaccaactgaccaagcatttatctatttgtatggagggaattaattgatgtggatgtactaaagaatgagaccgaactttattcgatcgggagctgctttggaccgccgctgttacacgcgtgatgatgcatttgatgctagctgccgcgactgagctctcgctagcttcctcgactgggctcttggtcttcggctctagcagaaaatgcatgcacctgtgtgctgaggcgctctcaaaattttctcgaattcacgcaaaaatctagccgtttgaggggcgactgaccctccgcgcgacatgtggtcccggcgaccgattctgactgcgacaggatagctagccatggtgggcgcgagcttgtggcctttc

SEQ ID NO: 68781 - DNA, 409 bp, Oryza sativa
  unsure (1)..(409): unsure at all n locations
tgaggagggctggatagcgacncagccctgcttactttttataggggcgctttgacatatacccatggacaattcatggcatagtgtccttgctctctgcaatcgtgacaaaaggggacatcctcttctggcattggaagctcattgacctgtgtggcacatgctcgatcaaacacatactgattttggtcttgacttccaactaatggtagctgtgaactaagcaccatgcttggaatggaccaagggtgtgccctggttaactctcttgaggccagtggtagattgagttgaaaacttgagttacttgaggcatacccgctgacattctttcctttttctctgttaaacatctcgtacccggattcaggtgagagaggaaacaagcctcgaaagaatagaccagaac

SEQ ID NO: 68782 - DNA, 392 bp, Oryza sativa
  unsure (1)..(392): unsure at all n locations
agctttncgataacctcgcattggcagtacccgctccatgatactaaatcctcatgcgctctaggcgttcatgtttctagcagtgagaggagttctggcgctcccgggaaagagaagtctcacacgcatattaaattatggttcaagttaagttctctctctcacacactcatggcagtcctaccaatggcgacaccgatgtagggcacgcctctcggccctacctcaacggctgtcccaccgtagcgcacctgcctcactcaggggtgaaccatctatgcagggatactgcctctgctcggctatctaatccgctaggtctatacccattcgagaagtacgggtgtacggagggcgtttcatgcttaacttcatggctccggtcttaattg

SEQ ID NO: 68783 - DNA, 402 bp, Oryza sativa
  unsure (1)..(402): unsure at all n locations
ttacattgaagatgtttttttttcttattgncttatctacaaacaatccatacaaacattatcatcgatatggttatgcatgaaaaacgtatattatcattagaattgtttcacccgttgcaacgcatggacatttttgctagtatattataagacgcaaacatgtaagcacaaattcaatttccataagttataataaaaacaacaaatttacctttaattagtatacatgtgcttatagacatactccctccgtccctaaatatttggcaccattgatttttctttaaatatgtttaatcggttgtcttattcaaaaaatttaagaaattattaattcttttcctatcatctaattcattgttaaatatactactactactaaangtttttaataatatt

SEQ ID NO: 68784 - DNA, 417 bp, Oryza sativa
agcttattcaaaagtgtaacctgaggaaaaagaacacccatattatttgggtatgcccataaaagagtggtgacgagtgatgacaaaaagacatgaaggtgaatgtctgtaaataagattgttttgcacatttcctttggaattattccaagagggaggaactatccccaatggggattccccataactgggatagaaatattactacaattttgaagcagaatgtacgacatgacagattcagctgtaatgtggtactgaagttcacaacatattttatcagatcaaatgtaactggcaaacacaaacctgacagatttaataatctcgagtaggtaaatgcatgccttatgcatgaaataccaatatgggtgcttggttggacaaatttcatggtgggaaggacaataaaatggc

SEQ ID NO: 68785 - DNA, 427 bp, Oryza sativa
  unsure (1)..(427): unsure at all n locations
ttgaatactaagcttcttttagctggtntgctatgtgaattgtcaatgatgtttcctattttatgttacactcatcatattttacaaagtagtcggtatatcactcggatcatgttattcaggtgcccaccttatataggatgggggcaggattacaagatagaaaccttaaccaatacggtatcggtttcctaaatctactttacaatattatcaaaccaggactttaggccgntccgtaatatacaaggaaacgtaatacccaagtcatgatctgttacatattccatagatataagttatcccttataaccagtcggataaccatgtcgtgtgggtatggggtacccataatctccacagtagcccctgagaccttcacagtcgaaaagataatcttctctcgaaccagaatactccaaagccg

SEQ ID NO: 68786 - DNA, 400 bp, Oryza sativa
agcttctaggacttttccactcctctcactcccttccagagaaataaacgcatagtgagagcacctcatcttgcccccatctttcttcttcctccttgccggccgagagaacttcatcgtcgccgccgtgtttctggtcgtcttcttcgccgtgcaaccctcgttccctgctctcctattcatgccctaactcccctcaaaaattcatcgattttcatgcagtgaatctccgggaacgcacatctctttttggaggcccggagcgcggccggcgtcgtctcgtcacccaagcttccagtgttctcgacgttccacgccgagatactgggtggtgctgctcattctagttcatcttccatcttcctcccagatgtacaccgtccagaattacctcaagccg

SEQ ID NO: 68787 - DNA, 426 bp, Oryza sativa
  unsure (1)..(426): unsure at all n locations
aaaactcaagcttgattcctgctgcctgagaaccctgaaatttttttttttaacaanncgcgaagagcctgcattcttgctattgaggcccaatctgcaagcccatgtgatgtaaagccatgagccatgtacatccgagttgtgagagatagcgaggggcccaacaatcagcccaaatcaggttcctcttgggagaataccctatcccactgctttatgccacgtacatagaatgctgcgctgtcaccgtgcaagctgctacagtcgtgcactgttaagaacatgacaaatgacgcaacgcacctgcggcacgcaaggcactaacgctatgcactggttgagcccccaaactgagctcctgccagcgcagctcgcacatcaccatggggtcacgcaagtgcagccctcgccgaccacagaagcagc

SEQ ID NO: 68788 - DNA, 402 bp, Oryza sativa
agcttgtctatgtttagttactggagggttatctaaaaattatctctggataatacaaaatctggaagtaatccatgaaatactcgattatttgttaaagatagcaccttttgagatcatagctgttttgtgcgcctggatcataggcttgtagtttgtccttttcagtctcttatgttaatgttgtacttagtctaaaactgcatagacattctgcagaaaaggcatctttcctgattttgttagtttaatgcagagaaccagcttccagtgctttaggtaaggcagcgtctggcatgtcaagcgatgaaaagaatcatgttgttctctctatactggtatttcaatttacaaactttttcaaatttccagtaggttgctttggtatgcttccctacattt

SEQ ID NO: 68789 - DNA, 403 bp, Oryza sativa
  unsure (1)..(403): unsure at all n locations
tatacataatcaagactacctccatcaacttaattcttttatattatcagatgttacataagcaaataggtagaacaaggttatcaagaaatgtgtctgatcacgcaaatcaataacgtaaacaagtatagttaaacacaaaaatctaagctttgtgatacacagacaaggcaggctctgggcctaggcaggttgtgcgaccgcctagggcccaggccggtagagggcccatcaccatcatagtccatcagcatcccaggatgacctagttagccggntagcccaattgcagtgatgtcgttgccacgtcgattggcaaggaaggaagcacgccacgcacgcaatcgaggatcgagcccaaaccatcgatcaagggcgaaaccgtgacgcggcgggtcattac

SEQ ID NO: 68790 - DNA, 404 bp, Oryza sativa
  unsure (1)..(404): unsure at all n locations
agctntactgtttgacaccttttaagatgcattgtaccaactcctaaaaagttgagtaactgcggtataaaaggattttaaggtattgggcacttgatcacgcgcactttggcctaagcaaaaagtgcctaagtccctataagaacgtgacaggccacacctgaaaatatgggctgcagacatattatgcctaggccaaaaaatatgccttcgacaccctttaaaggatgacgcatgtaacatgcttccgagtaataaatttggaacgggtgatatagaccaagtatagctcatatcaatcgcttctgatctgagtgattatcccttatgggatactccaaaatagatgtaacaattgaattccgactggcgcaagtattcagttgataacccttaccgggaat

SEQ ID NO: 68791 - DNA, 402 bp, Oryza sativa
gctctcccatagctgagaatggggatttgtcgttcttattttataagaacattactttttttttcaaagatgattaatgccttctgtgtgagacattgacgcaaaatgttgttaatgccatcgccaagttccaaaaactgagtacctcatattccataagaacattactttttttttcaaagatgattaatgccttctgtgtgagacattgacgcaaaatgttgttaatgccatcgccaagttccaaaagctgagtaccttagatctgaggattctcataagagtgctcgttttcttgcttagttttactgctaaaaaatctagatctatttctatgggaagggttgactttctttgtatgacagcctgaaggtacttaacttacttccataataaggaatt

SEQ ID NO: 68792 - DNA, 412 bp, Oryza sativa
agcttgcacggaagtggtgcaattagatactttttatacccttggcatggacatggagttaattttgttggcatctgggttgggtgggatctccttcagcacgtttgctaaccactttacctactatggatttaattttgaagattggtttcatgcatgacagatattgattttgactgacttaagattccttcacgaaatggaggaacatctccacaaaaaagattgtaaaaataaacttactacccataaaatgcagtgtttacattccttgaggatgtaccgggaggtactgtattttcagtgtaaatttttggtacctcccttgtgttgaggtacttgaaggtagcacatatttaagttgaggtacctgaaggtagcacaaatttaatacttaaaggtatggtacccc

SEQ ID NO: 68793 - DNA, 423 bp, Oryza sativa
  unsure (1)..(423): unsure at all n locations
cggttggntcgcgtctttgcattttgaatgcacttgttttttttctatctgtgactntttgtctagtggaaaatgagcacgatgagacgatcgagtatagtgggtagagggtagtgtatgtccgaatgatgagtaggccattcatggccatacgatttttcaccattttccttcttctcttttattcttctcaccttttcgtccttcttcagaccggcggagaacggaagacggcttcctggcttatgccaagctaattgcgtgtggcggcttgagttggaaaattactcttcgtttaccagtcatgtagcaatcggctactctcattaagcaagtaaatcagagacacgttagtagaccttgtacgcttgggctttgtggaaggaaacttggaagttgaacctccaagaagattcgatggat

SEQ ID NO: 68794 - DNA, 427 bp, Oryza sativa
ccggatccttaagtcacctgccgcatggagcttttgaaaatacagctcctatttgtagtttttcgccctggagggtgcttagatcaaacattacttcatggttaagagaattggagactgtgtatatccccagctcctgtagtatgagagctttcatgttgtcttgtagacctgtttgcgtgtttctttatgcgtctgtactctttatggtgaaggtactggttgtgtgttcttaaaaagaacctgaacttgtgattagttgatggtcccatgtggtgatggaactgcttgtgtgctctttaagaaatcctgaatttgggaattgttgatggacccttgtgctgatggactggttgggtgttcttaaagagaaccttgatttgggatttattggagggtccgcttcctgaactaatatttggtcttg

SEQ ID NO: 68795 - DNA, 345 bp, Oryza sativa
ttcagaaccaacgagatccgagaaacgatcatgaagctgaaacgagtaacatgcattttatacccgatctgcaacgagggctcggcggcagcttccatggaatggaagaatacgttgccaccgtgcggtggcacctgctggacggcatgaggcgactgccgctcgtagccgaataaggtggcgccgtgctcccacacttgtacatgcaactggttgctctcctccagctttttctcgcaaacgaatcaaacattagtagggctcgttatacttttctcacttgagtttttttttttcatttcacagcatcattttggttatttcacagaactacctaagcacgcg

SEQ ID NO: 68796 - DNA, 393 bp, Oryza sativa
agcttcgagaatgaagtaaccaccaatgtctgacttccagccaggagccaatactatccagccgacaactcaagttcctccattcctacctggatctttgccgattccaccaattggcacaccaccgccgatgtcgagagcaccattgctttcaagccgggatgagctacgattccaaacaccacctcaacatgaggtgccgggtgctcctcatcattcggcttatccaagcttccatcaaccagaggttttccaacaacctcagtacgtgcagcagtcccagcatcaacttccaaatcatcatggaggtaaaacatgttgaggctgaaagtgcatctagtcccctagtgggctttggtgattaatgacaaaagcggttgagggactaatgcg

SEQ ID NO: 68797 - DNA, 386 bp, Oryza sativa
taaaaccccgccgggcaaaactgcgcaagacatacggttttttttattttagagataaaagacgcgtgcgacatggacatattttgtaatctccggcataaatagaccctgagccctatgtaaaaaactaacacacgttcaaatacaatctctgcgcatcggcacccttttacttttgttttgtttcgacgagatcttgctttcgagttgagctacatcgatttcgatcttcaattataggtaaaacttgttatggcggcttgcgttctcgggattagtgcttccatctttatgatgctctaatcttgcttatgtaatttggcaaggtatcatatattctatataaacttagcaatattgtatcgacattcaatcggcaacatcta

SEQ ID NO: 68798 - DNA, 423 bp, Oryza sativa
  unsure (1)..(423): unsure at all n locations
agcttttcttcttgttagctatagagaccacttccctaccatcatatggcaattgtctgtcaaaatcaactgttgattcgaagtctgtatttttccatggcaaggaccccccatgcaacgaactttgatcatcttggtaggagcttgtgtccccacttgaaacatcagttttacttgtgacttgggtggttccaccaatgccagcagggtatgggcttacgattcgttgtctagcagctgtacggatgcgtttcgtaggaactgcaaggaaagatgaaggcctttttccattcgataatttgctctccaaatatggttcaaaaggcacatgagtacttattccatatgatcttgcaccggtaatcctctgctgccctagttgtntcctatggcccatctgtgataacacaccaccatcatatc

SEQ ID NO: 68799 - DNA, 412 bp, Oryza sativa
  unsure (1)..(412): unsure at all n locations
taaccatcattttntctctctcttcttgtacggcgtgatatattttctatgcatatcattatcacctaagttagctaacttaacctgtggccttttcattccaaattaaaccaggcaactattttagccagctagcaagacatatttgtctggtcacttcaaatggcaccgtgtatacatacatacacgtagctgccctagctagcttcaccaagaaaacgataaaaatgtaatataaatgcttaaggaattggaataagcaaaagtttaaatgaatatgggaaggggaaaaagatagtacttgatcttcttgtcgtaaccgctaacgagaagaaaaaacttcttatgggaagtgatcccatccattaaactctcatatggtcaaataaccagaaagatattggattttcta

SEQ ID NO: 68800 - DNA, 324 bp, Oryza sativa
agcttcttcatgagctagaagcctccactctatttcttggttgacttgtctccatcatgatccttggaagggcacttggaatcaaactgtcccttctctccacactctaagcaactcaagctggaaagagtctcgctgggacttctacttcttcttctattaaagtgacagacccttcctctctccttattccttcccaagagatcaatgaaccttctatcaagaagggcaaccttctccttcaaatactatttgggttcaattaacttatcctagccactgtctataactccggcttggaaatcaatgtaattcttggaaagt

SEQ ID NO: 68801 - DNA, 422 bp, Oryza sativa
  unsure (1)..(422): unsure at all n locations
cctttgagtaactgagaatttcggctaacccatcactaactcttctttatatttcttgntgaaagtatccctgatcccactgataacgagtaggcccaaacaattcaattggggtagttgctgacccataccacatagttccggcaactacgaaagctgcaaaaaaaacagcagcgatactactggaaagtacagtttcaatattgcccatacgtaatcctttgtatagacgttgaagtggacggacactaagatggaataggcccgctaatatgcccaatgtacccgcagcaatatgatgagaagctattccccccggaacaaaaggatcaaaaccttctgcaccccacgccggatttacagcttgtacttttccagttagtccataaggatcagacacccatattccaggaccatacaaa

SEQ ID NO: 68802 - DNA, 414 bp, Oryza sativa
  unsure (1)..(414): unsure at all n locations
agcttcagcagttcctcttaaaaaaaaagctttgcgtgatctagttaaacgcttgaatcatgcgaaacttgtggcgacgcgaggacactaacttccagatgggccaaaaaacttgccagttggttgcctggttacattccaagtgtgttgggagttttatttctcgtcggttaggtacgtgtacattgtacagtgtactgagatagttatatatatgcgagcatgctgtttgcaactttgcaaggaaatgtcggttgctacaaagtgttaggcagacgaataggagcctgtgatatgaatgatatttgtgatgtagntacatggaactttctgtgatttttcgtcgtcgtactcaaggattgattattccaaaccaccatgtttttgctttaacttgtacgaagagacacctac

SEQ ID NO: 68803 - DNA, 408 bp, Oryza sativa
ctcaagcttgcttctggaatccggacatgctgatgaaatgcagacctttttttatatacatctatgtctgaatatgactgagagctatcctagtcctacaatcctatgcatgagtgtggttgaatgatctctgtagcaaggtttaccctaccgcgcggttaccgggcttaccacggtaacctccctaaattcaaataaattttaaaaataatttgaattattgataaattttgcacggtttttcacggttaccgccggtatcgagcttaccgccggggcgcggtaacccccgcccccgcgggttaagaaaccctgctctggtattgtacaatttgaacgaacctcaaagaatatattacctatatggttttgcttgctttaagaaccacactattttttaaaccacac

SEQ ID NO: 68804 - DNA, 405 bp, Oryza sativa
  unsure (1)..(405): unsure at all n locations
cacctatgatgttatatgtggcactcaggaccctctactgttctatcggactgctcttcccctgagattagttttacatcctcgtcaagaggaaatatatacaggtatctcctccatttggctgcaaaattagggtgaaattcacgtgagacctgcaaattatgccatcagttaataacaagcgtagcatcacccatggtggatgtcttgacattctaagaactttacatgaaaaatggacaattctaccactagcagcaatgcagcatacatatcaagtgcagtcatatattctgagaaagcaaaagaaaaatacctgtgacacatgccaaggtcttattttatcacgtgcagccctngttattgcatcctttatatcactagactttacatccttcctccatg

SEQ ID NO: 68805 - DNA, 431 bp, Oryza sativa
ctaagctgctctcaaatagagctgtattcaattagcatttgatatttttattctagctacacaaatgatcaatttagctttttttaatgcaatgtatctacaatttaatggttcgttccaaccatcaaggcataaagtccctctgtagtctgacatgccctgtggtctggtcttactaagctagttctataacatgtctgtgtttatcatcacttgccatctgagatgatatatttgatagtttcttatcctattgctctcaaagatggcgaagtgcacatgctttaagttggctagttcacctgactgaagtactctacatgttggagattctgttatcatcacatgtgcaaaatttaccatactggttgtcatcatcttgtttgataaaatattttcatagccattagaactctttacctgtattcata

SEQ ID NO: 68806 - DNA, 362 bp, Oryza sativa
agcttgcctaggaaatatataaagagagataaaaaatgggttgttttgatcagccaagaactggaaggatttgatgctctcctactgctaccattgctaaacaacctaattttagtatgctgctgctgatggtgatgatgacgatgattaatggcggattaattggatgctctaatctcttcctccctcttcctttccctttcctttttcttgcgagctgatgagctaaaaaaagctaagaacggcgcggcgatctgtgcgagctatctgccggcggcggtgggctccgtccatggcgagggcaagaaaggctcgtcggcgatgtctaagagggaggacatgggggtgccatccaatgcggc

SEQ ID NO: 68807 - DNA, 400 bp, Oryza sativa
agcttgagataggttgaaccaggcaatgattggcttgttacaccaccaacaagtgaagattttggatagcagttaccatttccttgccagtatgagaaacccttgcagctgcaatcactcatgcatatgttcttgcaagtactaagcgaaacctgctgatgtgtactttgatcataccctaagaattcagtagtgggtagcttcacaaatcttatcttctgctttctgtcacagctgattgtaaactttggcttgcatcctttactcaagtcacttgggtcattgatctcgtgtccaggggcacatacacatgcaggcttaggtgtatacacgcatattccgttcatgccgcacaaaccacgtacaaagcagaggttaataaatgccatccatgtgacta

SEQ ID NO: 68808 - DNA, 423 bp, Oryza sativa
  unsure (1)..(423): unsure at all n locations
gggtatgacgtatagcatgttgctaacactgcgtacgctcttttctttcaaaagtcatcacatccactaaaacatagaacacatcatcatccactaacaataattacatatcaaatctcgtgcaagcatacaacatcatcatctacaatttgttgaattctacaaatcaaaatacaagcatatttaatcatcacccccacatcatttccataatattttaacatatctatttattatttttataatatttagaatatattcatacatatattccgtagcaagacacctcagtatctcacttagtggttgaaaaaaacaaggcaaaatgaataatttaacctcatgtttcccatcatataactaaatctgaaatctcctaaccgctctatatatttntacaacccagagtaatccagcattcac

SEQ ID NO: 68809 - DNA, 408 bp, Oryza sativa
  unsure (1)..(408): unsure at all n locations
agcttaagtttagttcttaatgtttcaatttatccatattagtcctttaagttctaattgtagttcaaacttatccttgaacccatttagaagccacatggctaaatataacaacaactttcttgataaatgatacttataccccccctcattcatatatataagaaaaacaattgcattcaatgattgttntatagataatgcacagtaatttatgtaaaatgaaaataaattatgtacttacaagtgtatacgatagccattgcttaagtttaatgtgcacatattgaaataatgagacatatatctgcaatgttgtttattcatcttggttttatcttttctaatgtataagttgtatacaaacttaaagggcaaaagagacattctctaacagaaatattgaat

SEQ ID NO: 68810 - DNA, 383 bp, Oryza sativa
agcttcacatcctctataatatttgaagcaatcattaatcatcttcggctaatagaatcccgctcttctaagcaaccaattcatcttgtgggccgattgataagttccacaaattccttcatgcacctctcccatagccactttagattgatcttcatctaagcacttcaacaagacaccatctatatttcggcgatataaatcttcatcaagcaatgtgtatttgaatgcttgccgccgaattttccgatcaaccttaagtgtgggatctttcaaatatcgaatcaaaggaattctccaatcttcttctgcttcctgggcacaaatgtccgaattcacaattaattcggcctctaaattgattgaaacgtgccctccagcgc

SEQ ID NO: 68811 - DNA, 432 bp, Oryza sativa
  unsure (1)..(432): unsure at all n locations
acggacacttnaaactcagctttccttcgactgatgctgatggcggaagcttatttttacaccttctccccttctctgttcctactttctcccttttctgaaaactgctgcaaggccaccatgatcaactttggtcacgtgaacccggtgaaagcatggcccctaggcccccagtccactctctcccctctacgcaagcgatttctctatgtggaccaacaatgtcacacgtcatgtatgtgcattgtggatggccttttagtcatgtggtcacatacatatgttggccctatgttacgaaaaagtttatgtaagagtatttgcttcactgtttccatctcggagattctactctaatacgagatgtcctggtatttttnttctaacatactccctccatctacttttgatagtcatattttcaaatctaaa

SEQ ID NO: 68812 - DNA, 392 bp, Oryza sativa
agcttcgggaggagtggaagtctttctgtcgcatatgcatgcagctagctagctatggcttgatttgatagggtcggcttggctgaaacgggaattaaatttggaggaaattccggatggatttggtggtgtgcatgtaacaccttcctatatattctgcggccggtgcatgcttaatttgtctgacacggcaggcaagcgtatgcatgcaaggctgctaattattgccaacttatcagtaccactagtactatactgtccttttgcgttgctttcttttagtttaatttcagaccatattaattggttcatgtgattaatgggcttgccatgttagcacaataattataggctgtattctttcatgagtgatctgggtgattgtgagtgag

SEQ ID NO: 68813 - DNA, 422 bp, Oryza sativa
  unsure (1)..(422): unsure at all n locations
taccggcaggggtttttctggcccactgctgtgttctatttctcacaaaatgtgcgcacatgtgaaggatgccaattttttgccagacaaattcatctaccagctcaagagttgcagactatcccgctatcttggccgtttgcggtttgggggctcgacatggttggcccgtntaaaaaggcagtcggcggttacacgcacctcttcgtggccattgacaaattttccaagtggatcgaagctaagcctgttgtcacgattacagcagataatgctcgcgatttcttcatcaacattgtgcacagattcggagtacccaatcggatcatcaccgataatggcacacaattcaccggcggagttnttaaagacttttgtgaagactttggaatcaagatttgctatgcctcagtagcacaccc

SEQ ID NO: 68814 - DNA, 109 bp, Oryza sativa
  unsure (1)..(109): unsure at all n locations
agcttcatggtctttctcagtcaatcatattcggtngagaaaaaattttcaccagccatgtctaggagcagctttctgccatatcaggtactccctccgtcccagaata

SEQ ID NO: 68815 - DNA, 412 bp, Oryza sativa
tctaatccacgccaggagagatccgctcagactacacttatttttgaccccggagtccatctaggatctacttcgctcaacaccttaatatgtggattttgtacgccactatgcttctataagtggagcttgcatgttgtatgagggcgaaagcgtatccaggccctagaacagtctgggtcactgggcacttcttaccgtacttctttgagatatatgaatgctaaagtacctaagacgaggtctaggagccaatcaacctatttgctttatccctaagtgctttatcctaagtaccccacctattttaaagatggtttaagcatgccatttatctcaattgtgaagtaataactaatttactggggaaatggggtaccctatttcccatttcatcaacaaacaccattcg

SEQ ID NO: 68816 - DNA, 404 bp, Oryza sativa
  unsure (1)..(404): unsure at all n locations
agcttatctatactgacatgtntttttgtgtgtaagcttcgaagcgaaaatgcttggcagaacaccattgaggtagacggaatttagttttgacaaaatatttggaagttaaacagtgcagtttgaattgtggtattttagcacaaagttctgacttctgaattagcagtcaatatcaatttggtattcaaggcctcatttgctggtgttttagagttctcagcactggttgttatttctcagtaacaaaggtattcttttcttctggaaagaaagagagctgaagctttattctgaaaaccatcaatattggcaaccaagtacaggtagaaactactaattattaacatcaaattgggatatcgtanaagccaggcacgatgatcactgaccaacatctggta

SEQ ID NO: 68817 - DNA, 382 bp, Oryza sativa
  unsure (1)..(382): unsure at all n locations
cgagggtcggcacatcataacggaagtggtagaatattgttgttctanngccccggccgaagccgccgagaactatgttcgtcacagcggttgggttgtgcgggataacgtgcctgtcagtacggtgtactggcgaagaacaagggcacgcggagatcatgagagctttgtcccagattccgagaaagagatgctgtggaccacaatgctcgagacattcaccctttctgcgggtacagaggacaaagtgaaaaggtggactctgaagaaaatggcagaacagtttcagaaggtcaagggagatctgtaccaaaagtatatactgaaggggcagacacccaacttcgacacattcccaaagctaatggatcactgtgacgag

SEQ ID NO: 68818 - DNA, 457 bp, Oryza sativa
  unsure (1)..(457): unsure at all n locations
gacccgtgacctctcagtcacctgcggcatgcaagctngaatcaaaatgggaaggaccatacctcatcaagcacaagtccatgacgggatcttttcgattggcgacactagaaggtgacgagttcgaccattcctggaacgccgcctctctcaagcgcttctatgtctagaatgggtggcaaccaaattgcaaacttgtaaaaatgtgcatatcgtcatgtaagcccttcggcactatgtaagcctttcggcaagagaaaaaaaaagaaagacaaaaaaaactggatgtagggctattatccaccacggaggcccgaaccagtataaaacctctgtgtcctccgccttctttntatttttgtgtgattgataatttgtggaaaaaccccaaggcaaacgcctgatcagcgaataaggctaggggggcgaaacgaatcggccgaagcatcgctcgctg

SEQ ID NO: 68819 - DNA, 418 bp, Oryza sativa
  unsure (1)..(418): unsure at all n locations
tggtggaacccgggagatacctatagtacgttccattcaagcagatcatacatcctgttttacctttaatttgacctgaaactgaaaacattgttagataatcgttaatggtcacgaagatgatggccttcactgtgaagtattcccttaggtactcgtcccacactttcaatccctctttccataaatcagccatatcttccaacaatggttcaagaaatatgtcaatatcaataccaggctgacggggtccctgtatgaagatacagagtagtacgtattttcgcttttgacaaagccaggtaggaagattatacatgatgagaagcactggccaagtactatgtgagctactcatgtctncaaaaggattaactccatcagtactcagggcaaatctaatgttccgtgagtcttt

SEQ ID NO: 68820 - DNA, 351 bp, Oryza sativa
gattttccaataaacgtgcaacggtggatcccatccatctttctacctataataaattacaaaagaatacgagaaataaatggagaaacaaaaacaccgacaaaagaaaagctgatttgagtatggttgtcgctgaactgaatgcaccgggctaatcaacatggcactagtgcaaccatttagttgcttccccatgcatataatagtgcaaactggatgtgcatatgttgacctctgaacgactcatctgttctttggccgataaaaatatataggtagggttgcatgatctagcaacacaatccattaacgtttcttattgctagttatatcacgaagatgagagctccc

SEQ ID NO: 68821 - DNA, 410 bp, Oryza sativa
  unsure (1)..(410): unsure at all n locations
atgtattcaatcatgtgaaacaaatacaaattctattttatatattngggtataccgagggagggagggagagggagggagtttattctcttcatccaaaaaccgaccggcaaaatacacttatttatactacaacacttacatacgctcaaagatgattaaattcaactatttctattttctctatccgtaccacaatatgcccactagcaatgaattagatataataatcaagtacgttgcgtctatccaatatttgctatattttaatatggcggaaataaataattggtaaacctattatgctgattatatacttattatacagactaattaaatattttatgaaacaaaattgtaagaaaagcttaaaccaatatgctacaaatgtaagtaaaaaaatattcttt

SEQ ID NO: 68822 - DNA, 356 bp, Oryza sativa
  unsure (1)..(356): unsure at all n locations
cacctgatgatgccgcttatatgctggtggagggtttacttggttttctcttttgcatgctgtacctgggtgctatggcatctttcgaaaacaatccaatcgcgcattgattgcgaagaactcaaccgatgattgttgcgtattgattcgcggccgngttcgacgaacacatatagcttccgaccagatcgctgcgcgcaacggatgatctgatacctgaactctatcaatgtccattctatcatgctgttgggctcattcctcacccacgtggtcaacggatacaacgataccgagcctttttggtggtgagccaccccactcgccagcatagccactataaattggtgcgcaca

SEQ ID NO: 68823 - DNA, 317 bp, Oryza sativa
actaagctgtttttaaccccggcatggtggagcaagtcttatatcttcttgccaacatgatgccgacagctgtagcatgctttcttcgactctcctatacagcgccactcgctaaatgctaatcgccatcgctagagggaccaccggcgtgcaatatttttttcaacgcttcagcatccggaatgtttaaacgacatgggtgaacctgacttttgtagaccaaacagttccactactcaggggggattacccactcaataatggagtggcatactaacggatatgggacccgggggcgatggttggacgagaggaat

SEQ ID NO: 68824 - DNA, 441 bp, Oryza sativa
ttcagtcacctgcggctgcagctttcttcgcacatcctgttggttgcatgcaattacaagtaagctcatgcatatgtactttacgttttaactgtgtgcttaagcatgaagcatgcatcgcacactgtaaaaaaaaaaaaacgtcctcggtattcggttaattaattactgtggcgttaatatctcctgaccgtcgaaagaacagcgtaatgccagcactactgccgacgtatatatgagaaaaattagctgggtatataatgttctcaactaaacaaaaacagtctagtgcatcgatcatcagccaaattatattactattacttgtttgttgtagtagtggtagaattaatttaaatctaactatagatcgattttcatgagtacaggaatattttattcaaaactctggtgagggatccttaccaattcatccatttt

SEQ ID NO: 68825 - DNA, 414 bp, Oryza sativa
  unsure (1)..(414): unsure at all n locations
tagacatatggngcaatcangcgatcggcaggatagattttggtgtctgttagcgctgaaacaaatcccgtagctttttgtcgcatcatgcttacctgctagagcaagtttaatagtgtagctcactactgctctaatttatttatagccgatctaatagccaattcatataatagttacttactataatattaatatatggtctcacctataatacacatgttacgtcttgaagtccgtgttactgctgactacatatctatagcccactgctcttttctttcatcttttatctcattaaaatatatttatagctgtctaatagtatgctattgtacctgctcgagaagccctttttttttcaaacagtgacaactgatgctaccaaaaggttttgccccgtcacacgggttt

SEQ ID NO: 68826 - DNA, 399 bp, Oryza sativa
agcttaacccgtcgttatgtatgggtgctatggatacaaatccctgcctaataagatgctcaaggttcggacctagctttcgtcggtcggcttcccaaggagaaagtagcaggagagcatggcctctaacctttgatccaattgctgccactggtagctgatacctgatatttcctcagttttgtgcccatcttgaggtttaccatgtatattcattggttgcattggtctggtttttgccgatgtgagatgaacttgctggtcccaattccttgttgatatcagtagcagcatgtaactactcctttctcttgtctgtaaataacccttgtattgctgtgtattgtccggaaatgaacaaatgatatgccgatgagttgaattatttcttctctgcac

SEQ ID NO: 68827 - DNA, 355 bp, Oryza sativa
  unsure (1)..(355): unsure at all n locations
ccgcttagctgcttcaccaccgatcgaatcaaactgacacgcccgtcgcaagggaggaggaggaggaggaccaccagcagcagccatgtgggcggcgacttgcctggcgtccagctgcgccacgtgcgcgtgctaagcgagccgtacagcggacggcaacatcggacgccgctccgcccgcatcgcctactgcgggctcttcgcgctctccctcttagcctcctgagcgctccgcgagggcggcgcgcccctcctncaatccatcccatgtgagcgccctcgccatcccttccgcgggattcgattcggctctttttttttctctcgaaatcgatcggaatattttatggcgcgc

SEQ ID NO: 68828 - DNA, 367 bp, Oryza sativa
atttcaccagtgggaactacaaacgaagaatggacttaccggttggatccagggggagaaaatcgatccatacgatggatctctctccctttcgctggagagaatgagagagagaacaagatagcgagagtgaaccaaagagagagcgcgcgcggagacaacgaggagaaagcgattagtaagaaaaaaaaaacggctactgacatggcgtggaaatctaaatttatacagcgccacgagaccgaggagaccaggttttgactcccacgcgttctgatccaaaccaaatcgtgcacgcatcttaaagtatatcggactaccaaaaaaaacgactaatatcgggagaagaaatttaatgacatatatt

SEQ ID NO: 68829 - DNA, 391 bp, Oryza sativa
agcttgcaagaatcaccaagatggttactgtcgcgttggatgcatacgagcggatggaaaatggggatcctgccttcgagctacacacgatatgtagtgtgaacaatgaggtctctgacccagcagacctgccagacgtgtctggtcctacttacatgtatttccactctcacgtcattttttctagtgactccgaaaatccctcatgctcatggagcttctacgacgctctttttcactgaacttaacaatgatgacgaggaaggtgcatcctattgatgtccagtgcctctatcgatgctatgcgcggaacgagtttggtgcctctactgcgatttcatgggggctaggatagtgcaccatgtcatgaaaagctttcatgggtgcaagt

SEQ ID NO: 68830 - DNA, 403 bp, Oryza sativa
  unsure (1)..(403): unsure at all n locations
tcaatatgcaatacgaattagctccttgtctttgtcatggttatgcataacatatacccaatagtagttcactaagctcagcggacccagcatatactaagtcttatatgaacttatactctacttgtagtttccgctggactattatgaggttttagtccaacggaaataagaaatactctccaaacaaattttgcaatatgataatcaaagaaaagatattcaatagtctcatttctaaaaagaacatcttttatttccattccaatttctctgtgctaaattatccttagaattaggagacctttttggagttcaagttcaattaattcaattcttttttggagttngacagctcaaacatattccaggagtcagaatacagcttctatcagcacctatc

SEQ ID NO: 68831 - DNA, 418 bp, Oryza sativa
catgcaagcttcagaatcaccaatcatgtgtaagatccctatatattctgggttatatggctgcatatgaacatttgatcattgtaaaagaggcccatcacctactacaactgaaaaaagaaaattttcattgtcttaagatcagcaggtagtcatgtatctcaccttctccaagggccttctccaagatctgccaagatggtggaaaatcaatgcctgcaaaaatccatccaagtacattttacaaatgcagcggtaaaaaaaatgctgttatttcaatcaaataaagtcgacaagcacctgagcaaccaacatctggctgcttctgaccatgcacccccagttcacatcactagtatacttggaatcagagatggcatcaaagcctgcaacaaaaagacagtgcacacaactcaca

SEQ ID NO: 68832 - DNA, 294 bp, Oryza sativa
gtggagagctgacatgtgggacccgaggggaggttccgatcggactgtatcgtgggggcggggatcgagtgggcgggttgcgacatgtcatcgcccacccagtctattcgcgcgcgtggacgcaaaatggagtggcgcgcgccgaacgaaacggaagccgtattcatcaaattgcaaatgaaggcaaatcacaagcaaattcactcccgcgccgcgccgatcgcgctcggcttcgacttttttctctttcgatcgtcgtgggccaaggaaacggaaccaaatcttatagcctcc

SEQ ID NO: 68833 - DNA, 403 bp, Oryza sativa
agcttgtcgtcactggcgatttgtatcatcgcccttctagtctccacagcactggccgaccatcgtcatggtacaagagttagccttctgatcgctgcagcacatacttagtattgagcggtttttaggggatgttaggggcgcagcctatcctgagaacgataagacgcgttccaggaactgggtggccctcttgtatatgcgccgacaatcggagccaaaacccaaattatgttgggtcgcctccgatcgtagtggcttgacttgggagtactgcgccgtcagtcttcgcttcacattctcccatgcatgatggtgatggtggagtatatgtgtgcgggcgccgacagtggtccacggcctcgtcggtccgtgcgcaggtgttggtgacgtagtcttcata

SEQ ID NO: 68834 - DNA, 431 bp, Oryza sativa
  unsure (1)..(431): unsure at all n locations
gacctatgaaactcagcttcactgcgntggcccctgtaagctttgtttcttgtgcagcttctggccatcgntagcctgcattatgacatcatgactaattgcactctgagaaaattaggaaaaaaatcattttcagaaacaaaaactgtgacaaattatttacgttagggatcagaaattagtgcttacatgaatccagagcatcagaaaaaatatgcaaaatgtcgggttcttcgttcatgccgggatgagctatggtctgttttttccccatgccatgcctggatgagtttggttcagcctcaggggtcgtctgcacatacatgatcttgtcgctagtcatttggaatcttgatattcacatcttcagacaattggctgaaaatattggaggtttcagtcaaacatttactgaaattattggatgatca

SEQ ID NO: 68835 - DNA, 344 bp, Oryza sativa
agcttgagccttcgtataactatggtactggaacgagggtggtttttctttacaagtagaaccaaactggagaacgtccctagttcaattaattcttcagtgcgcgaatcagggatagattatcgcagatttcttacgaccattttttttcgccgggctggtatatgttctgtagccatcttacccagcctgagtaggagccccttttgttttcctgaacaatgaaattttgctgaagcttgccagaatgtattttgtctctgaagactgaatataaaggaaaagctctttttttttttgctggtgccatcgaattgaattagtgatatcagttggaggttatt

SEQ ID NO: 68836 - DNA, 379 bp, Oryza sativa
ttcgacttcctcgctgccgcgagtgaagtggttctaactgacatacatactctcatggatcgatattttgatatgcgggtatcacatccctatgatggcatcatctgttgatattgcccgatccgctgtggtttatctttgattttacgtatgattgtttgctgtgcgcatttatctgggttgtttttttacgcagaaatctgctaatctattactccctccgtttggattttgagtttttacttgcaacgttagaccacccgttttattcaaatttttttaaattgctatttattttatttgtgacttactttattatctacgttactctaagcacaacttaacttttttgtttttatatttgcacaacaaaattgaa

SEQ ID NO: 68837 - DNA, 289 bp, Oryza sativa
  unsure (1)..(289): unsure at all n locations
agcttgtattgataatngcaaacatcttgaaactcgaaagcggtcaaaactaaaatcaaaataacttgctatcggctggaatgttaaaaggaggaagttcagatgtcgaatcttgaggaacttcaccaagagtcaaagtccagccggatgagagaggccaaattccgagacaaatgaactcttcaactaaatctcgaacgctaaacttggagacaagctcttcaacatatngacggcaggctctgaaataaccactggatcctttgcagataaaacgaaaggacatttc

SEQ ID NO: 68838 - DNA, 301 bp, Oryza sativa
tttatttcatcctttcaaggctatggacattaaatacacgtcaatcaggaatagaaaatgtactatgtgaggagatgtgtacaaaaccatttacattgaaacatcttgatcaacatataacaaaatgtgcattcaacttttactatcacatagcaacagttagacaagatgttccaatacctgttagatcaatttatagagatattcctttcgataaattacagagacatgctactgctagatagagagtattgtacagagtctctcttattattagtagcgccaattttgctacagacac

SEQ ID NO: 68839 - DNA, 366 bp, Oryza sativa
  unsure (1)..(366): unsure at all n locations
agctngatgaagttctccaccgtggtgagcatggtcatggcgatggctatctgtcccatgttgttggtgacgttgtcggcgcctatgccgccgacgaccactgtggcggccgccgatgccaatgtgtctcccagcgtctgctgcagagcctccatccactgcgacagcgcgttctcgacctgctgcgaagactgctgtacgttgcagatgcccataaacaactgatccgtcagtggctcaagatggctctctagaacctgcacaaacaacatcatcatcatcatcattctgcaatagcagacaatggtagcttcagattctttgcttgctactgaatcgagtgggtgatcactcgtgtcaaacctt

SEQ ID NO: 68840 - DNA, 449 bp, Oryza sativa
  unsure (1)..(449): unsure at all n locations
agcttcgttaacttttactggttttacctttccacctctcattaactgtggacctctctcttcctagttcctctctcttcctagttcgatggttcaacttcctttagcgtatttagtgagtggcattattggaaaaaaaacctaagattactgcaattttcttgtaacttaacctctataaaaaaaagaatgcttatttatatttatagacggatggagtatctaagataaagctaagaaagtatcaacacattatatttgcagtgtagccttgtagcgaggcacagagnntgcttttatatatgccaaagtcaacaaatgaacatctagctntctacatagtaaaaagttagatctagtattgtcgtggtccaattaccctctctctctctttctgannagtggctgatttaccctcttaactagtaacagagatattttacaccatc

SEQ ID NO: 68841 - DNA, 329 bp, Oryza sativa
  unsure (1)..(329): unsure at all n locations
ctgatggtcctgtgaaagtgtcaactgaattatccctagtctatctataagctaaaaatttgcatcctaaacctgagtgcaaccaacctattgtgagttccccatttatcagtaacaatgtactctaaatttttaccatttgaaatttccatatgctcttaaattttcatgcatttcccaatctctttcctactgccgatcctatatatggtggttcaaaaaaggaaaccaaactctaatataggtgtatattatattgcttgataaatgtctcgcatattcgattggcacaaacaatntatatcacactgatttctttccctaacacc

SEQ ID NO: 68842 - DNA, 328 bp, Oryza sativa
  unsure (1)..(328): unsure at all n locations
gcaatgactgacccggatcttaagcaccgttcttcgnctttttgtgattgcaatgttgccagtaaattctacggcattgattcttagctaccataatatacttaaagaaagccttatatcatatatattgttttcatatggctccagattaagcccacaataatggaagttatactgcctatactactataagaatgtctaactctttgacagcctaacaactaactcactactatcattatactaatgactaataaatccctatatagccagctcttatataaccatgaaccccactcttggagttgagccaaatctgcccaaattt

SEQ ID NO: 68843 - DNA, 345 bp, Oryza sativa
tgcttatagtctagtgggtaccaactatatatgaagaaagaattatctctatatgaagaggccttagtttgaagcagattgtgcctgttcagtatccccttgactacagttgtacagctactacctccgtcccaaaataagtgcagccgtggatattcgttcccaacgtttgaccgtccgtcttatttgaaaaatttatgaaaaatttgaaaatatttaatcacacataaagtactattcatgttttatcatttaatagtaatgaaaatactaattataaaaaattgtcaaataagacgaacgggcaaacgttgaacgtgatagtgcaaaactgcactattttgg

SEQ ID NO: 68844 - DNA, 273 bp, Oryza sativa
gctttacacagtccaaagaaccattcttcactgctaagaacaatggggtttctttggtcttggaaggagtatcaacacaatcttgagcatgaagcagaagtgacttacagagcaaacaaacatactatcaattagttataagctcaaaaaatgccatcgtgtgagtagaagttacaaaaggctacctgaagagctttataatttcccttatctgcagcgctgtgtactggtgtaagaccaagtttgttccccttgaaaactctggcaccattc

SEQ ID NO: 68845 - DNA, 397 bp, Oryza sativa
tctgctgtataaagcggctcccacactgatcaatgctgcattagagaaaacatgaacagcaatgtggccatcagaaaacatagttttatgtcttgcatacatgtgaatggttctttagcagcctatcatctgcaacttcagagttgatacaaagttcacagacctgcattgaagcacatggccttctatgtgaaaaagccggtaattccctttgtttaagctgctgaacttcctatgtaatagaaaggcattgagttcctcattatttagccttttggaatcatgtatgtgtgcgacatccacatcagatctttcaaaacctgaagtgtcattcttatgagaaagctcagtaccacagccaagtggtggatgactctcttgatgtggcatcttcctt

SEQ ID NO: 68846 - DNA, 375 bp, Oryza sativa
  unsure (1)..(375): unsure at all n locations
tagcttgtttngagttttgactggttctgatgaacggatgggtgaagattgccagcaacaaacgggacatttgaacagcgcttttccaaccaagccattgacaacaatcgttttgcaacatatacttatacagaagaaattctccaagaaaatctgttcgagaaaaaagaaaccggatagagttaaaagcacaaatgttagccctgccccccagcgcatgcagcacgcccaccctgatcaggtgtcctgcacgtctcagccatcacacatatttggtacacacacgaacgtacgcatgcatgaatgtcacctcggatcctctcgtgcaaatctcccatgcacacgtncatgcatcgatcccacccttcacgccat

SEQ ID NO: 68847 - DNA, 293 bp, Oryza sativa
ctgaaatctgtacttatctgtcagctgttaccgaagcaaaaggttcaatgtgaacttaaagatgcagtactgatcctttttagaagatttaacacagatttaacacgtacgtgccccctgtgaatctttgttaagtttcttgttataatgatggttttatcctctgaattcaagcacggtgttctgtatgcgaactgtgatgggatggttctcttcagaagcattttattttaactaaattcaaaaacatttcgatggcatgatgactgttcgattgacaatttgtatgtaca

SEQ ID NO: 68848 - DNA, 376 bp, Oryza sativa
  unsure (1)..(376): unsure at all n locations
agcttagctgattggtcgatcagtttcttcatgtcttcaacatgcatgcatgtgctgaaagattattcaacaacaaagggcgcaagggaatataggagtgtaattntttttggaagcttgtgcttttgttcgtacaccatctgtcccaaaaatacatatggagtctatccacgattcaaggtatgaaccacctangatattcttttcagcttgacagtttcttatcgaaattcacaaagcttcttatctaaaatgaaatttgatcgatccttcttcagctgcccggaaaagaataaaaaaacacgatgcatttttacttggcgatctccaattntataggaagagggtggcatctcaatccctaattcaattcgta

SEQ ID NO: 68849 - DNA, 354 bp, Oryza sativa
gcgtatatatacatggagagcatagtgatttttcgtcgtgttccaaaaccatcggttgtgatgctggattggcggctgtattcaaccaactattcactgcacctgcttctgaccgtgtttttctttttccggtgtgcgaccatatgtgggatgtgttgtgcgctctcgtcactgcgagtagtggtattccatcaacttgaatttcagttgcaattcgtcgctaatgacaaaacggaatggtaactgaatccaatagggagcaggaaagcgcgatgtatctgatgagacgtatcacacagatgggagggatatatgaattctgaactctgaagaaatggggatggatggggacat

SEQ ID NO: 68850 - DNA, 326 bp, Oryza sativa
  unsure (1)..(326): unsure at all n locations
agcttattcttcatattaatcggaatgttccaagtcatattacacaaagattattgagataagtatcgctggatagccgatatagctctttgcctaatctgttctacttcctctatggcatgggcatcttgagcgtcggttccaggaatgaccttcaaatatttggtcatatcagcaacattcttgatagccgatttaaccttgctttttgttcttcgatagactgtgggagatcggctaacttcttgttctctagatccagttcagcattgcattcttgaagttgtgctangagttcgatcttgcaagcttcaagccggtcaata

SEQ ID NO: 68851 - DNA, 425 bp, Oryza sativa
  unsure (1)..(425): unsure at all n locations
agctttgctataataattaaaacattnggaaacgaggtcacaaattntgtaatnttgaataactggtttcaaaagaaagttataaaatcaacatactaaatntattttattgcagcaagattaaataaaacagtattgtaaaacttttgctggtaaatgagccattagtacagtaatagatgtacagtactaataacactggaataaattttgaatgagaaccattaaaggagattatgaagtgcatgtgccattagtttggtttaattaatagagaaagggaggagaacagttctacttttccatatattttcagagggcttctatgggtaaccatttggcataacctatggtcaaagatgctctgataccaacttgtcacgcncggaatttctattccaatattcaaacgcttacatgtgtgt

SEQ ID NO: 68852 - DNA, 293 bp, Oryza sativa
gctcattcctagcgaaatgtatcacaatatgggtgtgaaaacacaatataatgatctaaggtcggatcataataatattccttggtttaagaattacgatggtctgtgtgaccaaactactgagattatattacaacttaccaaggtagtgtacgtaatttatgagaatatgattgataatgatgatacaatgcaatggtagagtagtactcaaggatcactatgcactgttgtgagttatttgatgacaagccttgggcttctgctgtattgggaacaaaatggagttggga

SEQ ID NO: 68853 - DNA, 246 bp, Oryza sativa
  unsure (1)..(246): unsure at all n locations
ctaccctccaataataaatggtatttnggttatttttactcttcactaatttcttcctcgaactctagaaatggatattttgtgggatggaagaagtaccttctagttagtcaactgcacgtatggggcaagaagcttctgctacctcccaaacgcatgaaaaaatgtatcaagattggagcatcgtctcacaagtttccttcctcactgtgtccacggtgattttatcaattgtgaactgtgata

SEQ ID NO: 68854 - DNA, 349 bp, Oryza sativa
  unsure (1)..(349): unsure at all n locations
agctntctgtccgggtttgaaccctatctaaccgcgagtgaccgttcataagcgaaaccaaccaaatcgatccatcgaaataaggagaaaatttcctccaaaaggacgaacaagatagatctaactggggacctagcaagaatcaaaaccaacagatcgaaagggacacacacacacacacacacacacaagattcatgaacaagatccaaatatacacacatgcacagtactcaaccaaattaaaaacctacaatggcaagatgctactggagacgttggccaggttgaagatccacgacacccagtgcatgaaatccgcataggaggccatagcgtgcaagtgcaac

SEQ ID NO: 68855 - DNA, 336 bp, Oryza sativa
tcatgcaagcttgtgtatgtgtaatatttcagctgccactacctagtagttgataggagcgtgcatattcttgtgtatgtttcttgtttgctactaaccatggcaggattacacaaggggaaacgagatggtcatgctcaacctcgacttcttcaccatcaacgagatatagcgacttcttcacgcattgcatatgaggtacatgataatgatcttgcaatggtagaatctaaattgccagtttttgatggtaagtatgattccgccgcttatgtttattgggagctagcagtaaacaaacaatttgatgagtatgaattctctaatgctcaaatg

SEQ ID NO: 68856 - DNA, 337 bp, Oryza sativa
  unsure (1)..(337): unsure at all n locations
taagctgtagcacttattcctcatctctctaaatctctgaatatactcatgcacaggctcatcatgtctttgcttgatggatgtcagatcggacaatttcatctcatgaaccccactataaaaatagctgtgaaactgcttttctaaatcggcccaactgttaattgatccatatggtaaagaagaaaaccaagtaaaggctgatccatacaaagataaccggatcaacctaaccttcaatgcatccacagccgatgcttcaccacattgggctaaaaatcggctaatgtgcttataagtcgatatactatcttgccctaanaaatttgaaaagtct

SEQ ID NO: 68857 - DNA, 316 bp, Oryza sativa
agcttttttctaccggtttacctccctcattaatgtcgagatgtccgttggttgccataggtgtcttgatgggcttcgcatcctccaagccaaacctcttgagtagatccttgatgtacttggtttggctcacgaacatcccatccttgagttgcttgatttgaagtccaaggaagaagctcaactctccaatcatggacatctcaaattccctagacatcatatcaccaaattccttgcaaaatacctcattagtagaaccgaatatgatatcatcaacataaatttgacacacaaagaagtcatcaccaatgat

SEQ ID NO: 68858 - DNA, 365 bp, Oryza sativa
  unsure (1)..(365): unsure at all n locations
ttgtgtatatccacaaatattctcataccaccgaaatttctgtattntttaccattacttatatactactgcggagtcgatccgatcgataattattactaccaggttttgaaaatctttttttgtcgtgcagccgtgcagacatgggccgggagttttaactctgttggtacccatcctgctgtccttgccgtcctttggcaatggagtgattctctattttttttttagaaaaaaacaccgtacaattgttggcgttcacaatacgcacaccctgctggtatgagcaccttcgaaaaactggatacgccacctaccactagaaacaactagccataaatacgagcaccgtgtcaaatctaaaa

SEQ ID NO: 68859 - DNA, 442 bp, Oryza sativa
  unsure (1)..(442): unsure at all n locations
agcttgtgatgatcgctgagttgcaggatgagaacggtcgcctcaagaaggatgtagccaggctgcacggatgctcaccgccaggaggagcccgcatccgcaccatgccaaggaagtcgaccatagctccagtgcgcattcagcttgcgcccaggaacccgccaccacctccacctccagcacctcccgcagctccggcgccagctccagctcctgctcccgtgccagctccagcatccgccctctccttcgtgccagcttcagcctacaggggtccagcaggtggcagtggaggatggctgccagcttctcccagtggtggtcgtgtgatcatcagcagttccagctctgatgcngcagcggcgacacctaccagctatatatgctgattntctttctacagaagtatatactggactctgtatgtactggctttttctat

SEQ ID NO: 68860 - DNA, 340 bp, Oryza sativa
  unsure (1)..(340): unsure at all n locations
agcttgttctgtttgngaatgggttttttgagagataagaagaatctacttcaaccgatatgcccttaggcacggccatacataacatagaaatcacacgtggaaggggtgggcaattagctagagcagcaggtgctgtagcgaaactgattgcaaaagaaggtaaatcggccactttaagattaccatctggggaggtccgtttggtatcccaaaactgcttatcaacagtcggacaagtgggtaatgttggggtgaaccaaaaaagtttgggtagagccgggtctaagtgttggctaggtaaacgccccgtagtaagaggggtagttatgaaccctgt

SEQ ID NO: 68861 - DNA, 397 bp, Oryza sativa
tgaacccaagtcctacagtgatggatataagcgcaattgatattcctggggaggtatacatttgtgtattgataagaccgttcacaatttcttgaagctcgatctcccccccatatgatccatattgccaatagaaaccatgaaccataatagaagagcttgccccacccatgagtaaatatttcatagtagcctcattagaccgtagatctctcttggtatatccagactatatgtatgaacataaactgaaacattctggagctacaaagatagttattaaatcgttagcaccacataaaaacattccccctagagtagctggtaatacgaataacaaaaactctggtataggcatttctggtcattcaatgtactctacggatagaggaataca

SEQ ID NO: 68862 - DNA, 308 bp, Oryza sativa
  unsure (1)..(308): unsure at all n locations
agcttagttgtctagctgatcctcanaagtatctcccaaccttatgaagctatactacaatcttatgcataagcgaaagataaaagaaaagagtcacagttactccatagcctgtacacaggatcctaatagtgtgttgatttataatgtttggaatacgacatcacccctcagattgtacttttatcacaaatccttatattgaagtctaacatctgacaattgtttcacttgggacaccttccttcctaaaggatgatgccttgtaccatgttttttattttaccaccaaagatgaaaaagttcat

SEQ ID NO: 68863 - DNA, 305 bp, Oryza sativa
gactacactgtctcttacatgcatgttctttgacccttaccccctgccacgcatggatcatattgtcgactccaccgcggggtgcgaccttatgtggtgtctagatgcatactctggttatcatcagattcccatggctaaggatgatgatgaaaaaactgcattcattacccccatatgaacctattgttattcgacaatgcattttgggttaagaatgcagtactacttttaacgtatactcgatttccttgggatccaaatatgacgtaatgtttagcctttgtgatgacttggtggaaaca

SEQ ID NO: 68864 - DNA, 363 bp, Oryza sativa
  unsure (1)..(363): unsure at all n locations
agcttgcataaagtcctgtctgttcagagttatcttcttgtgctgatcttccactcggtgcttcacttgtccctgtcagcgtaacttggtcctagaatttcagatttattaactgaaaatttggtgaatttcagtcattagctggatcatttgctaaatttcagncattcattgaaacttttgctgaatttcagagtcaccaacttggcacaatctctgaaactttggctgaatttcagattctttgactgaaacttctgtatctcttttggctctttttagattncgttactttggcgtcattttctctggaaccttgcctagtggtagagtaactaacttgataggcgccattttttttct

SEQ ID NO: 68865 - DNA, 327 bp, Oryza sativa
  unsure (1)..(327): unsure at all n locations
ccttaaatctaactcgctttttgttacagganaaaaattaaattcattcgtctnttaacgcaatttgttgtctcctgtcagatgtttgtcgactgtatgttgtggatgttcaatattctcaatacacacgatattgctgacattgctcattccgttttgtgcatggattcttccggaaacgtgaataactgctgcttgtttgtttaaattaaacaaaacgatcgactaactcaccacaactagctgatacattcaccaaatatatttgcatcgaagtaagccgtttatgcgttaacacaagcccaaccagaatccatgcacgccact

SEQ ID NO: 68866 - DNA, 356 bp, Oryza sativa
  unsure (1)..(356): unsure at all n locations
agcttggttgtntaccgaaaataatcagatataaaaagaagcaagatcatgatagagtaccaaaaatcaatcaccatatgagataaacattcttgcaattggtaaaggtcatcgagtgttgtaatctgtaccaacaaattntcgatgtcatctatgacagtgacaagccaaatttcattggacaattgacatttcctccttagatgattgaggaagcacgttcaagcataaatattccaagaaaatccattggatcaacctagatatggctagtagatgcattagaaaaattaaagggaatgagaaagaggtagacacaaatgtagtggtgtgggctttcnggtgggagatgtatt

SEQ ID NO: 68867 - DNA, 386 bp, Oryza sativa
cactttaatactcaacttatgtctgaactgctggaaagaacaaaaagcaaatgaaatgttgtatttgagacgaaataatcctatatggtttgacagggtcatcgtttggcttattccgggaataagccaaatgacataaaaattttatatagtgttcttaacgatctaaaagtaaaggctgaaatataaactacgatgagaaaaccccccaaaatcaactccaaatttaaggctgagaattcaaacattaacttataagcgtaagcaaatactctagatgagactgtcaaatcctcccatgctccaaaggaccccttcatgtctaaggacaaatagttccatatgtacccataatataattattaattcttgattatcagatcaat

SEQ ID NO: 68868 - DNA, 246 bp, Oryza sativa
gctatcataagaacaaatttcgctttggtcataaatgatatggaactgatcatttcagaactaaccaatgcggaaacgcgcatgtccagaccttgcttctccatggccatctgcaattcggccaccacatcttcacctacctgtcatattccaaagaagcactaatttcagaataagaaaccaatgacaaaattctgacagcatttcacataacaatgtgaaaaacagattcgctgtgacattgat

SEQ ID NO: 68869 - DNA, 351 bp, Oryza sativa
  unsure (1)..(351): unsure at all n locations
agcttcatgaagttnagaatcatttgtatagntgcttctatgactccttggagtgacttgttgcatggcttatgtcaatagaatctgaacttctgcaggagactntttgtgtattacatgctctgtatgcacttatgttgcttacataacttaatgggcacttcacattntatccttatntatctgatacctaaatttctatgcttttgacgatcactcaatggactaaattgatggagcttcttttgntaaaaaatgaaaactaaactagctggttatcatttactgactcaagcaatgaacaatgacacttctcttatatgttgatacagatatgagaaagaagcaatg

SEQ ID NO: 68870 - DNA, 444 bp, Oryza sativa
  unsure (1)..(444): unsure at all n locations
tgcaagctgcttataagctttaatgatgaaagtcaagaccatgataactngaaggttggtgctggtaatcattcagttgactagttgtgttcattgcttactcttcacctgattcttcattgtatgtcgaagtgcaccataaagacgctgttgtcatagggtctttgagagaatatcatttagatcataacatggctgctgtcgtcgtcgagaacttacctgatcttcgccctgtgcctttcaacaatgttcagaaatttgtaccacatagcatggtagtagctctatgccgtgatatctctggaaaattaatggccacaggtgtggttgtgattggtggttcaagcggatcatacaatcctaagcttatgtcgtcgacttgtaaattctctgaggtacacctgttcttttatcacttgaagtacacacttgcatgaatacaat

SEQ ID NO: 68871 - DNA, 397 bp, Oryza sativa
  unsure (1)..(397): unsure at all n locations
agcttcaagtatttcaatccgatcaaatcatcttctgacaccgattgctttcctcgaagacaatcacgtagctcagtttgtgccttttgcatcactcttgggttcctcacgagctcggacatagtccattggagtgtattagctgatgtctcactcccggcaccaaaaaggtcctatagaatgcaggggaaaattttgaaactttcatgaagtcatgttgcataaaacaagtagtagaggtgcaattaaagacttgcaatatatgttaatgtcatttaactcttactagttaccatccattntatattcttgtacatgtaaatttatttcttactaccatttagcatgaattttatattctaatataatactaacattatcacacagatagaacatg

SEQ ID NO: 68872 - DNA, 367 bp, Oryza sativa
aatcgcgtcttcattgaacgtgatctacatttactggtatccccctgcactctgtgaagaatatgcaacagggacagccctctgtgaaactgatgataaatgggctgaataatggcaccaccgatcgatatgggcttatccccaacaactaatgcaaccgggaggattaatgcatgtcgtgacacggtgatcatctgtcagactattgatgcactttcctcgcatctttacaatgatcgtggtggtttcccggtgtgtacctgtcgtacacgcttcgtgcggtgatgaacaaccgacactttgctatccgttgactacctactggatttgatgaattgtcctaatataaccctacctgtcattgatt

SEQ ID NO: 68873 - DNA, 283 bp, Oryza sativa
  unsure (1)..(283): unsure at all n locations
agcttgattatgaacagtgcccttggaagcaaactttactttcggctgggcttctacttccaaggactgattaaaggagggacacaaagcagacttcgggaaagagagggaaaggactgcaagctgagatgagactangccgagagtgagaggactttccctaattcggcccgaanaggaaaaggtgaattttaattacttttccaattaaantaatcactgaaatgatctttgatttgtaaaaaatactttcaatgctcaaataatttcaagaaaaatcctg

SEQ ID NO: 68874 - DNA, 231 bp, Oryza sativa
  unsure (1)..(231): unsure at all n locations
acccgacgttcgtactccatgcaagcatgaatgaactgtatggtcggttcaggttgttttatcngcccgccacttgaagtaactctgactgtgtcaatccattgtacgaaagtgtgttgtcgtgagcataagttggtctatcaccatatgaatgataagaactatgttgacgatacaaacacaagtagttctgcagtagtaatagcaaaagtagtactgctttacaagttt

SEQ ID NO: 68875 - DNA, 437 bp, Oryza sativa
  unsure (1)..(437): unsure at all n locations
agcttgttgtaattagcagcagctacctcggttctagtagaagctaccgacaggggacaggtgaacgggggaaataatagatgtgaagctacagtggaattgaagtgtgtgtggatggatgggacggatgagtgacatgacatgggcacgtcgtcgtacccaacggaaatgtccatccaactcaacgttgcttctaaccgattggtttaagccatgtttagatcctcttgaattntttttcaccgtatcatatcgaatatttcgacacatatataaaatattaaatataaataaaaaaataactaattatataatatgcgtgtaaattgcgagacgaatcgtttaagcctaattgatctatgatctgacaatgtgatgctacacgaaacatttactaataatgggttaatttgattaataaattcgctcacagttat

SEQ ID NO: 68876 - DNA, 406 bp, Oryza sativa
  unsure (1)..(406): unsure at all n locations
tttcactcgagaagatagagttttatgacctttcttacacttattatttgagatacctatgggagcggagatgaatccaatccaggtactctntctgttgcttatttcttatttgtgaggactaaatgtctctttttctgagtatntaatgtctattgagatgttggatctatatattgaattngtaatttgtgcagataatgcaatttacggttgaaatttttgaaatttgggtaatgttggaccaacccccacctccaatgacgtgattatctccgccacaattttccttttttttttctcaaaattttgcaaatttggtcaaaatttagtcaaattcagtttaaatatgcttaaattcaagaaaacatcggccacaaagttgttgaaattcccgaatttaaat

SEQ ID NO: 68877 - DNA, 380 bp, Oryza sativa
  unsure (1)..(380): unsure at all n locations
tagctgttcattgcggnggatgagtngctcttgctccgaagtgagctccatgtcatcatggagtacatcaacacctgtacaaacaactttccaaatacatggatgcaaagagattagatgcaacttcatcttgtgcttccaagcggcgtaatgtgtcccatcaaattgatgagcacgcccggaaggcatggagacaaagttgngaaaaggaatggtaagtttgctgtaatccaaaggtatagtagctcccttgggtgatggagttcccttgctgctcgctccatcttcatttccattttccccgttctttccccctaagttcgacatcgtggatcactcanagcggtgaagcttgaatcaagagcaccttgctctgatac

SEQ ID NO: 68878 - DNA, 425 bp, Oryza sativa
gctgtagaaaatatattatctattataatcatactataaagataactcagatattaaccaccacgtttgcttgaaacactataaattcttgtattaagacccccccgtgagtttggccggaggagatggcgcgatgatcaagagcgtacttccgcttaagatctaactactggatcgctcaccagtttgtgtggaagacaatggattatataggtttggactaggaagcgtaacaccctactcctgtgtgtgggattatgatgagttcttacaagaagtcttgagctcctatggaaacctatctgttcttcctctagagctcaagctatcgagagtcgtccctttttcttggtgggcgatatcctccttttatagttcaatgggataccacatgcaccgtctatacctaccccttcatgggatgg

SEQ ID NO: 68879 - DNA, 445 bp, Oryza sativa
  unsure (1)..(445): unsure at all n locations
agcgttgtgtttgaaactgctaaacttaggctgtgttagttgcaaacccctctccctctgttccgcgcgcacgtttttcaaactactctactgtttttttaaaaaaatttctatacgaaagttgattaaaaaaaatcatatttatccatttttttaaaaaaagagctaatacttaattaatcacgcgctaatagaccgctccgttttccgtgtggagggaatgagttcccatctcctaaatccgaacgcagactaagtattttttttacaaaaattttctatatgaaagttactaaaaaaataatattaatctatttttgaaaaagaaaagctaatatttaattaatcacgtgctaatggacagcaccatggaaatgttatacaactcttaggccggcttagttcatgcaatacccncaactcaactttcatcacatatatacat

SEQ ID NO: 68880 - DNA, 384 bp, Oryza sativa
  unsure (1)..(384): unsure at all n locations
ctgtagggagagtcgaacgaatcctggcggtgaccgtgctgttcatggcgaggtcgctggtgggcaatgccatcatcaatgacggctctgtcgcttgccatgagacgagccctctgctcggcgtcgagaatgacatctggtacgttctgcactgctctcgtttatcctaacaagttcttatgctcttaatctcgaaattgatgaacaccatgaaacactaaaaaagagctcgaagactacgaaagaatactagaagactaagctgttgaagtcttctaaatccaagcatctcgacattgatcatccttgtgcaacatcatcccttcctatttgttcaccagaatcggtgttccttgtggagatctctgtcgtancgtcatggga

SEQ ID NO: 68881 - DNA, 388 bp, Oryza sativa
  unsure (1)..(388): unsure at all n locations
gcaattcagctcgtacccgggatcctcttagtcacctgcttcatgcaagcttctatgtactcattgaatctagtgaggaatagcaaatccacaactctctatcctccctttgtaactnttcgactggctcgatagatatggttttcccttcagatccatcttttctaacctttntccggccaaagatagttttcattgacaccttcccagttttatgtatgtcctttataacagcatccatgactctgtaatcatttgntagtccttcaagtgaatatccaccatcagttcttctggaagaatcccacaggcgtgcaagatgcatcgtatcagcatgaaatccagcaaccttgattccacagttctcaatgacatggatatcaaaact

SEQ ID NO: 68882 - DNA, 378 bp, Oryza sativa
tatctacttcctcgtagagcgccggcagtcgatggtcgattgttaaagtggcagagctgctggaccatggcttgagaagatcatacctcttgtgtcgcttgctctcctcgacgacatgggccttgagtgcctcgatctggttggcaatctcatggcgagctctcagcttcttcagcttgcgaatgatccccttgatgatgccctcgcctctctcctgctgatggcttattacacggacctcaaacgagtcgatgcagtcgtcgatgtcgaatgtgagctcacggaccttgtccctccacctcttcacgggggggtcgaggtcttcctctacatcggccagcacgcggagcgtggcgttcatggcgcggagctcgtcac

SEQ ID NO: 68883 - DNA, 355 bp, Oryza sativa
  unsure (1)..(355): unsure at all n locations
aagcttactgttcttacagagtgagaagctatcactgggtatttgaccaaccaagagcaacacttgactctgcagtctgcttgctgctataaccaatatgaccacngttcatcttttgagcatgataataaaccacttcaaaatgtggatcatctggctggagcagtgatgaccgttctaatggattaatttgctggaaggaagtgtcaacttaacaatgcngttgcaatgcaattgattcctagtaagagcatagtcaactctttctactgcagttattatataccataaaaaatttgtgctgtacgtaaaatgcaggaactacttactgacaaatgaatcgtgagtggcatca

SEQ ID NO: 68884 - DNA, 224 bp, Oryza sativa
  unsure (1)..(224): unsure at all n locations
naagcttattgctccatgaatttataatgaggngctacagtaaacatgtggtaccgacggattaattatgcttaataaattcgtctcgtggtttaatgacggatactgcaattatttttttattatggtccgaacaccccatatgacaccctatataatatctgatgtgacacaccaatactttatatcccctggatctaatggcctttcacagtgctccacct

SEQ ID NO: 68885 - DNA, 439 bp, Oryza sativa
  unsure (1)..(439): unsure at all n locations
agcttagaacgaataggtgatctctcaaatcctctgtctaacatatggacagagatctcaagatcaatttgtgctaatagaatatgaaatcaagcacctcaaatatggacttctttggtttgtttgcaaaacagaactaaaataaaatgtcaaacttggctgggaaaatcagctaattaaatcaaatactccacacaagtaacatttatggagtacataattcacaaacttcaatgtacataaggtaaaagggaaacaagaacacataatgttcataacattactcagtctttgatacatgcctgtccaagtgtccaccanatactatntttagaanataatatttggttacacaacaacttattaatatctggtcattatgtaaggacccttacatgcctatttccagaacttgacantgccagtagcactgaacact

SEQ ID NO: 68886 - DNA, 388 bp, Oryza sativa
  unsure (1)..(388): unsure at all n locations
tctctaatcagtatgattcatatgacaaacttgccttctgaaaatgggagtggtgaaaacatatcagacattaaaatttctagacacctccaagaaaataacaacagcgatgaaactgtgtgccgcacttgctgtatctcaggtaacatgattccgctatggcttgtttgctgttttgcacgccattgacagcaaacaagggctgaaattctataagctggagcagtcgaaatgcttatggagaagatttctcaaaatgcattcctatatgtggtatgtgaatgctagcatctcttgtgcactntagtattntaacatcatgctagttctaaaataaacatnatgcagcgnagtcccgtaattattcttttgggttatctgatttctc

SEQ ID NO: 68887 - DNA, 311 bp, Oryza sativa
tgtgttcataagtcatgcatggtactaagcagagattctctacgttgtcgactatacagagataatttggtttgtatcaaaataggaccagatattattttgaagcatgaatattaatttagacggctaccttcttataaatttttgtcgcacgcgtcaaaaatagttaacgttgtggctgctttcgtctgctcggatctcttatgtcacttgtatgtggaacatctttattctctgttgaatgatcttttgtttgtatatacgaagtatcatattcgacacaattattatctggttgtgattggattagt

SEQ ID NO: 68888 - DNA, 312 bp, Oryza sativa
gactctattgctagatgcttagtcttgcgcgttgtgcgcactggtggtcctgctatgaatgaggatgatcgtacgccagatatgggtggggagaactcaggtcgatatagctatgctcggtacagatctgcgacattgaaaccttcgaaacgttgaacccttaaacatgcgttgatgagtcatcatcattggaaccctggcattctgagtactcaccacactgaaagtattgtgggaatctccaaacgagttctatagctgcgctgatccaagacatggccggctaaattctccatgttagtgaatatctaa

SEQ ID NO: 68889 - DNA, 128 bp, Oryza sativa
ccgtaagaagcccactcagtgtcgtctgccacacatcggatgctcccgtcatatcaagactcgggtgaagaaagtgatcggcatctgacatattgatgatcatctaacagtgctgatcgtactataac

SEQ ID NO: 68890 - DNA, 386 bp, Oryza sativa
  unsure (1)..(386): unsure at all n locations
tatctntacttgttgacaccttttaagatgcattgtaccaactcttaataagttgagtaactgcggtataaaaggattttaaggtattgagcacttgatcacgcgcactttggcctaagcgaaaagtgcctgagtccctaaaagaacgtgacaggccacacctgataattcgcattgtaataattccgaagaattatatgaccgcgtaaaaaaagatnttatcagcattgggcaacactattgtgcgcataagttgccaaagcaaaaaatgcctaagtccctaatgagcacaatgggccacgctgntaaaagtattgtgctgatgtactgttcaagcctaagcccattcgcaccttcgatacccttatacaaaaatcacgtgatcc

SEQ ID NO: 68891 - DNA, 367 bp, Oryza sativa
ctgcatctttgaaataatcatgattctcatgctccatttgtgtccatgtagaaattgaattatgagcaagtgaactataccatgtagatgcatagtttgacaaagaaaggggaaacaacttcaacttaagcaaatcatcgctaccggctttaccacattaatcaataaagcggccgatatgctccattgtagtcatagcattctcacctgtgaatttcgtgaagttgggcacctcaaatccttgcgggtatgggaccgaatctacatgttcatgatacggcctttgatatgtatgcatagctaacttggattctatttcaccactatcccacaagacattgtcattatcttttccaatatccacatg

SEQ ID NO: 68892 - DNA, 352 bp, Oryza sativa
  unsure (1)..(352): unsure at all n locations
agcttatctcatgcctnctcgtataaatgaacgatacaatgttttggaaacgattctatgttggtcggtaattttcgtatttacaatttactaactatttaatggtctgcaatatgtacgccactaaaataaatatggctataaatggtcaaaaatgttactattccaacataaatgatacttgttcggtcaagaattttctgtaccatttttaaccctacctccatgccttngtgaagcatataatccaaaattgatgagatggcataatattacaatctgcttagaaggataggacctggtagaanaagtagtatttctttccgccccaaatataacaattntgagcact

SEQ ID NO: 68893 - DNA, 419 bp, Oryza sativa
  unsure (1)..(419): unsure at all n locations
actgggggattgcagatgtttgtcaccacctttatccttccatgttcaatatcacaatggagcgcatttcttccattgttgtcaagcaattcaccacagttagggtacagttcgaaaaactggtcaacaatatggacatgaccctttatagcatcaatgtgcacagggtattggccataactgtttggaagatacgcgagagttggatcctccagtagaagattcacaactctaattctaccagccgaagtcgcatagtgaagtgctgtatttccaaaatcatcgcctcttctggtgagcattggcatcgagagccgcanggactcggtcatatcttcaattgtaagtaaacaaggtgaaaaccatatattgtatgaagaaagtaaaactgcaaagctagctatgcacgatatttacaa

SEQ ID NO: 68894 - DNA, 449 bp, Oryza sativa
  unsure (1)..(449): unsure at all n locations
agcttgatctgtatatnnacttggccgncgcgtaaacgcctcgctaattctttatttgtgcgtttcccgcataatctacaccccccttaattcgcagcatcgcaagtagtactagttagtactgcgaaactaacagaaacacttggtttatacgactaatcaatcggctgctttatcaattaactactgcagttaagcttaattctatctgtcgatgaattaaaaaacgagcatgtccaagtacctacgtgtattcagtgttaaattcatcttcagtagtcagtaccttgccaccaacaactgctattccgtccaattaagtaaagggtgtgttatctgaaaaaagttggaagtttgtagaaagttgggaagttggaaaatataagtgaaagtttatgtgtgtagaacagtntttgatgtgatagaaagttgagaatatggaggacact

SEQ ID NO: 68895 - DNA, 422 bp, Oryza sativa
atacaatggcctctccattcatctgtctcgtaacatgtataaaccatatcaaattgcatcatctgcgagtaaaccacaccaatgttgttataagcatgcttcatttatcatatgaacacattaaataacttaaatggataacaaaaacaaaattatagagatctagatataaattatagctggtgatggtaccgcatagtggctgtcaacttccaaagcttcacaatatttttgaatcccctcctctgtattacctgcaagcttcaagctatttccaagatcggtcaacacaatatcaagaaactctgcagcaaggttgtaagaaggatctgcatttagagctctttgataagcctgttaacaattctcttcatcagaacatttattgattaatatatcaccatatatatacagaaacaatg

SEQ ID NO: 68896 - DNA, 393 bp, Oryza sativa
tctgcaagatcttttcggatgcaacatgatggccttgatggtctcaacaaaatatagacaaataaaattgtgcttcaactactctactctactggcaccagtagctaccttataaaatcttgtgcttatgctgtgtttagatccaaaatttggatccaaacttcagtccttttccatcacatcaacctatcatacacatacaacttttcaatcacatcatcttcaatgtcaaccaaaatccaaacttttccctcaactaaacacagccttattagtcaatgctctgtatagattacaagagtctaaaattcacaaaacattctgtggatgtctctgttggttgttgggatcccacaatgcatatatcatcttctttgaaaatgcaagttttta

SEQ ID NO: 68897 - DNA, 404 bp, Oryza sativa
  unsure (1)..(404): unsure at all n locations
agcttgctctcttaccgatcaaaggggntggagttgatttgtgaacgcctaatatggcctatgtttacgtgaggatntgatccttctatgtggcatgaggtaaccctgngtcggcttgggaaaggctttgtcgcgaacctctgacaccggccagtgtctggagtaagttcgtgtcttgtgggtaaagtgtacccctctgcagaggttaactaattgttcaaacagccgtgcccacggtcatgggcggatgtgaggtggttcccgttgcgtatatttgtttgcctgtgctttgtgaaaagttgttgtggggtgggaatcgtaaccagaatcagcctatgtggcagatggatgacctgagtggtcagatacgaatctgtgtgattcaggatgtctgtgggcatcat

SEQ ID NO: 68898 - DNA, 414 bp, Oryza sativa
  unsure (1)..(414): unsure at all n locations
ttacgtgacactataccaatactaagcttgagctaattacatatcttgtgcccttactgcatgtgatctttatgatatctagtgaacccgcaccaatgctcgaggataatgagaaatggtgagtgccatctaatacaccatgaactgtggtgcttctctgagtacctcagtaccatgaacagctgataagagcatggttattaaactttcataccagagatcatttcaaggctcctgtttcttttgatctgtgaagaaattataacagtgtcagctgtgacctatttatcaaggaataaactatacattcnttttgtgcgtgttggttactataattagcaagtttcaaaaccgaggctgaccaattgtccataatattattatttccctgcacattacaatttaatcatcacg

SEQ ID NO: 68899 - DNA, 377 bp, Oryza sativa
  unsure (1)..(377): unsure at all n locations
agcttgctgtccgggagaaatacaaggggcctgaatagatccacaccgcanatggtgcaggtatgcgaattaaacatattggtcatgctttagttcatacccctcgtacattgcatcttaaaaatgtccttcatgttccacaagccaccaaaaacttagtttcagcatctcgtcttgccgaagataattatgcttttcttgagatttactctaagtattttttggttaaggatcttgcaacgaaagacataattcttaaagggcgatgccgcaaggagctctatcctctctctcctggaacctccaagcatgtctacagtgttgcgccgtcttttgcaagatggcacagtcgtctcggtcatccatctactcctatt

SEQ ID NO: 68900 - DNA, 62 bp, Oryza sativa
atcacctagcaacatggtatcagaaggctaccgcgtcgacgctgttcttctactagcggcgc

SEQ ID NO: 68901 - DNA, 450 bp, Oryza sativa
  unsure (1)..(450): unsure at all n locations
agcttatgtatgattatcctttatccctctgctttgtttgttgtagctgtgggattgctagactatttgtcttgcattgctagtggacgaactctcccaaaaaacttatcttctgaagaatcaatcgatgagttgtttacaatatttgatgatgtgcgaaggactgcagtgagtacaactgacagaatcctgaacttcattggtgagctactaagattctagatagtttatgctctttacaatntacgctcttatccatggaatgaactttaagcaagtgtatttaacttttaagtacactgtagtcagtcattttcatactagagatttgtttggacaattgngcaggtaggctggtagaaattttgttatgcttgcatntagttcttcagaatccatggtagtgtactgctagaattgctgcanattgctgtaattcattgtactatt

SEQ ID NO: 68902 - DNA, 459 bp, Oryza sativa
  unsure (1)..(459): unsure at all n locations
agcttgcatactttcattgggatccgaggaacaaagctatacaaagtgtaacagaatnttatagtagtatgtagaaagagagaatctagcattagtttctgcaggaaatcctggacgttgtctacgagtagttaagcacctttatgccggaatggagggttcatgtaatcatttttatttcagataatgatgtaatcatgttactattatagctacttctgacggattcttatttaccagtttaccaccattgacttctagttaatctgagaacagattagcagcatcttgtgatgtgaattatgccacaatcaccctacatatatccacctgagtcctgaccaatctccaaatatatggaaaactaatgattntataagacatatgtgtacatatatattttatcatcagaccaactctgctgattgaactggctagttnggaatgcagagctagcta

SEQ ID NO: 68903 - DNA, 189 bp, Oryza sativa
taaagtcaatagtgacaagtagtaattaggaatgagtaaataggtaatcgttaatccctaccctttcttgaagcggcagtgtgatgaactagtcgcagtaagcggctcgcgcgacgccgaataacccggggcgcgcgcgttttgcccgacgttctctaacactccattatttacttgcccatcgcgcgc

SEQ ID NO: 68904 - DNA, 208 bp, Oryza sativa
  unsure (1)..(208): unsure at all n locations
agcttctgatacgaagtanactttcatttgcttggtttctttctcttgcactaagactgcgcttactgtcactggtgttgccgctacatacactagcaaaggttgacctttcgtggacttgctaaagttggcatattctgtaagtatgtcttcaaatcatcaaaagctttctggcactcggcttgtccctcaaatgagnttgcccctc

SEQ ID NO: 68905 - DNA, 343 bp, Oryza sativa
tggcagcatgtagaatttccagcattgaataacactttctgtgccactgtattctgaaattatttttgaatgcacaacttttgtgtcattatcaagtttggccaatcaaatatactgttacagttgactagttaaaaattgatgcaaaaatacatcagctcagcttgtgtcattattcatacgcaagtgtagaatattatgaaaacccataaaagtatttacttcatataatgagagagatcccattctggacagcgaatagcactacaatctgtgtggtagcattccctgatgcctacttgtggttattatacgtaatctaaatttgggtttgatgtagcgc

SEQ ID NO: 68906 - DNA, 445 bp, Oryza sativa
tccgcgtgcgtgtgtttatccatgtcaatgccgtgtcgccgatcgagcctttcgaatgagagagcttgttgaaccggctgttggtggaaggtggtggtaatcgtattagggttgtcgatggcggatcgccgttctggatggtgtcgtggtcgtctgggagcgggatgccgtttaagttgccggtggatggtgggtggccacgccgcaacaaatcaagtcggtgatctccagagagctgaatacggtgaccagctaatccgtctgcatatcataccagtcgctgccactgcattttgccacagcgttcgcccgatatttctccgttcatggatttcccacccgctcttaatcccgctcttaatctatcaatcaattctacaggacattttaatctacaattaatctacatgacttatattcttcaatcattctcaggacatatttt

SEQ ID NO: 68907 - DNA, 357 bp, Oryza sativa
  unsure (1)..(357): unsure at all n locations
agcttctggtatcttacagatctagtcctcttattatcttttaagatggggagttgaagtaagaagagagtactatgtgaccgtgctcagataagatgtttgatttcagtttgtaatgcaactgagaaaggatggctcacacagtgaacatttgtttcttctcatttaactgcttatgatcgttaccatgcatatatatctnttgaagttacatctcttcttatctgaggtaatactcaatccatgatttggaagccccactttgaaccgatatattgaatcctttgttattggctccttgctctgatgagtagtgacaaggtttgagtggttgaccctactaccctatagtagttc

SEQ ID NO: 68908 - DNA, 436 bp, Oryza sativa
  unsure (1)..(436): unsure at all n locations
cttgcgatcttctctaaccggcttgtgattatgaatttactttcagctgaaatgcaacttcgcatagaagcgcacatcattgtccatttatcatcatcaacatcctcagctaactcaatgatgactaacaatctttctcctccacttgaaaccgatgatgatgtgtgcatatgccttatctctcctgaatcccttattgtaagcaatgatttttcctctctaaaatcgccctcagtaagaaaaaggatgcgagagaagtggttgcacaccctctcatcgccgcaaacatgcttgacaagtgtgctcttcccaactttggctggaccaatgatcggcatgacaccaangttatcaacacttatcgtgtttggaggttcaagacgcaacaagaaattgatgatatgctccatcttcatttgacgcccaaacatgcact

SEQ ID NO: 68909 - DNA, 382 bp, Oryza sativa
  unsure (1)..(382): unsure at all n locations
agcttatcacctaatatcagaggggaacatgtcaagctattaagagagcgttgcatccatggccacaagtcttaagcactacacatcagcattaattcagtcagcaatcacacactccatctaaccaatcaattcaatagctctcaaatacacgggtcaaaacatccatggaattgatgtgaaatggaaagctctcagcctctcatctcaccttggtaccaaagggcccgacgggcgcgtccatatcaaacctcttcttcccctgaaatgaaaaanaaattcagaccttccatctagtaaaaaaaaaaaaacttccactaataaatcaatatcaagaggagaggtggttgacctggagctcggcggcgatctcctcgcgctc

SEQ ID NO: 68910 - DNA, 344 bp, Oryza sativa
  unsure (1)..(344): unsure at all n locations
tcatccacatccaaagccgtgatatgatgactcaanggaacataatggctgtatttggaaaatntgtcaaccacaacaaggatgcaattgaaagtggcagacctgggaagtccctcaatgaaatctagagacacaatctgccatgcatgtgcatgaacagggagtggttggagcatactatggtatttaacatgtttatgcttggcttgttgacaaactgtgcaagactgaatatattgagtaatggaagcacgaagtcgatgccaatcaaacagatgttgaacgcgctggtaagttacttgaatactggaatggccacccactggcgaggagtgtaaattggc

SEQ ID NO: 68911 - DNA, 83 bp, Oryza sativa
aactaaataagtttatccaatacaatgtaagaatgatatgtgactaagaaaaaatggtgaaccatcatttctaggccaattaa

SEQ ID NO: 68912 - DNA, 398 bp, Oryza sativa
acacttattctatttcgtctcccgaatgtggcccatgacctactttatagtggctattcttgactcggattcaaaccaagtgggcggaacccgcctgttgacaaaaaacacgaggcctgtgagatctgcttaactccagtgcaggtccaaaactcgccttcaaatgtatgagcgtgccagttgatttactcctgtaatataaaagaaacaaagacaaagaaaccgtggttaaatctataaatgatagccgatcggctagatgccgatgatatatcatttatcttatgccgatgtcatatgtacatcgaccggcaagtttaataagcaaatcagaactaatctactcgatcggctggagatattaatatatatatccctatatcgaatatactaaatca

SEQ ID NO: 68913 - DNA, 279 bp, Oryza sativa
gacgaagatggtgcgcacgaagagtgagatgaagataagatccgacatcgagagaaatggggcgagccatcttacccttcatggtgcccgtgaagtcttcaccggtcctgctcgttatagcgtgctgatggcgtggtatattacaaggatttgaacagagaaatggggaattctcttatttccattgatcttcatgcgccattatatagggagattaaagtttacaaacctaagattctagcctttattgaatacattttttatagcaataggatgatt

SEQ ID NO: 68914 - DNA, 229 bp, Oryza sativa
gacagaatacaaatgttcgtcaaatatcctttttcatatatttgatgcacacaagattatcttctattactatcaataatacccatgcgttgcactgggtattggcgggatcactgaagcatgatcttaacaatgtgacataacgcccgaacattatcataatcattggagatatgttcagtgacaaaatgtcatggttgactctgaacaatttattttagctacatgt

SEQ ID NO: 68915 - DNA, 345 bp, Oryza sativa
  unsure (1)..(345): unsure at all n locations
agcttattatgaggaacttggatcgaatcatgacaagccatccgataagaccacaatgcttcggccaatctagtatgccactgccgaggataatcggaaatttttctcttaatcaatttgatcaaactcttattagatgcctcggcctgcccattggcttgtgcataatacggcgaagaattcaacaatttgatacacatgctatcggcaaactgaacaaattcatcggacacaaagatcgagccttgatcagttgaaatgggttgaggaataccaaatcgataaataatatgnctcctggacaaattgatagcatctcccgaatcaactttcttcaaaggaatc

SEQ ID NO: 68916 - DNA, 416 bp, Oryza sativa
  unsure (1)..(416): unsure at all n locations
agcttccttgacgcttactccggctaccaccagatcagcatggcgaaagaggacgaggagaaaatagcattcatcacgccatttggtgtattctgctacatcaaaatgccgtttgggctgataaccgcgggaaacactttccagcgcacggtccaaggggcacttaacgaccagctcgagaacaatgtcgaggcctacgtcgacgacattgttgttaagacaaagacaagcgactcattgatcgacgacccatggccaacgttcgacaaccttcgatgatatcgtctcatgctcaacctagagaagtgcacgtttggagtaccatcgggcaagctcctcgtattcctcatctncggaagaagaatcgaagcanatccggagaagatcaatgcaatcgagaacatgaagtcacccac

SEQ ID NO: 68917 - DNA, 331 bp, Oryza sativa
  unsure (1)..(331): unsure at all n locations
ttctctttcaaagttcctcagtgttcatgctcacataaagaatcctcacaattctgtctgattactatcacttccttgtgtgagaaccataaccaccttttgggccttacctctaacattgttaaaaaggttggtttggatgctcttatttatcataaatattgcaaatctcatatgtgtntgtggtactaatcttgcagcgacatgtctccatggtcgagcttgtgaccataaacaaagcactgccgggagataccccggattatcttggtaagtttttttattataaagcanaaccagtcttatgatttatacaccttcggtattcttg

SEQ ID NO: 68918 - DNA, 288 bp, Oryza sativa
taggcgtatgtcccaagagcaaccttttgattgttcactcggggtctcctcttacctaacacatgtgagtcaacttgctctacttgagagccattagtttcgtcaaatgtcacatcacgcgcgatctcaatcataccggaggttttgttgaagacgcggtatgcgcattcatttgacccatacccaagcaagaatccctcatccactttaggagcgatcttagaggatctatccttcttattaagaatgtaacacttactatccgaaacacgataagtagagacattt

SEQ ID NO: 68919 - DNA, 374 bp, Oryza sativa
agcttatgtaatttacaatgacttacacccgggtgtttgggatgcaaccctacgctcctagctgaacctaaacgggtgcttttctttgatatttaatgacctaaaccgatgctaatataatccttggcgtagattgttgtaaatagtgattcttgctatgaattgcatatgtttatgtctaagttcccgatgatcattaatcaatttgctattgtccgtggttttacatcccctgttatctatctgaaccatgagaatcccataaaagtcgcggaaaattaaaatccaactcctatactatacaatccatgactccaaatatgtcctagattgttgctaacaatcatttctccgatttctctgcatatgtgctt

SEQ ID NO: 68920 - DNA, 321 bp, Oryza sativa
tgtgccacaataagctgttcgcatcatattatgccaagcagtcagtatatcacttggatcatattatgtcgggattcacaccgcatatgctatatattgatataaagccacttggttgattacaataatcaaaaccactcggctgggtagataattaattacttgactatatgtttggttggatcaattaaccacatagtcaggggctacaacctataggtgcatctattagatgcacctgacgttatgtttcaacccatcagcagcctcagacttggataaagtactccgtagaccatggctatagatgattgaatcact

SEQ ID NO: 68921 - DNA, 281 bp, Oryza sativa
agcctggagattgcaacctcttctaacagacttgacttcgcgcaagtgtgatgcttcactatacagcatgacgccgtcgtatgttctctgcattcacgataggttgaattgtgcacaacgtatttggcggtgtgcactatatgcttatttttgttgctcaactgagcagggctattgctgaatcattgaacatgcgctgaccatgtcatacttaggtgctgcattcatagtgcgtagaagtccgggagattacagttccgacgtgaattatattcctctca

SEQ ID NO: 68922 - DNA, 403 bp, Oryza sativa
  unsure (1)..(403): unsure at all n locations
ctattgtctcccctgtnttgtgcagtgacctctatgatactggctctagtcctgtgtacctacaagttaataatacatgaaaaattagaatccacagatttgtccccattataaagatgtatataaatcatgtcccactgttgagaagtgtatgcgtacttttggggatcaaaccgatatcttgtgcgatttgcaacttgttcctggcgtaatccaaataagtctctggttttcgattctgaagataaagctcgcctcagaattagcaaaatatgaccgattcggagaatgcactcaacaccataatcaattatggaaattatcaactactacccatgataggtgtgcttgatatggaaattaattcactaaccatttttatgacggcctctttgatcaattg

SEQ ID NO: 68923 - DNA, 327 bp, Oryza sativa
  unsure (1)..(327): unsure at all n locations
agcttctattatcattacccattttgtttaaagatattgataccgatcctgcgacgaatggatgactgcaaacactggcacgaaagcaagaatataatggcaccattgatagatggatgaaaatgtttaattagcttggttctatgagcactagcttatttctgaccgaagacatattcaaacctgtggctgccgttctagttgcttagtgtgcttctttaatttgatttgtacgcactggcatataactccagagaggagattattcattattattgaacatatttncttgtgaagcatttttacgtagtcttatactgtgtaagt

SEQ ID NO: 68924 - DNA, 432 bp, Oryza sativa
  unsure (1)..(432): unsure at all n locations
ttctcctccatacacagacccctgtattgatctgctcggtcatcaaatgggttgttcctcttccactgcttgctgatctcaaatgtttcagtgtatgttctttccccattcanctataaatctttntataatacatcttgattgatgctaattgagtagtcacactaatttcttcgattcaaagtatcccatatcagtccctttctattttccctgtacaacagtatatgcactaaatgactacaaataattcttattactaagcaacatttagtgaatcaatgagaatacacaggcaactgtatgattcattgaagcaatgacctagatggagattttttttatcatatatgcaacacagagctctcattcagagttctttttgtgtgattcttcaagctctgtgcaatttttctacaaccatcaatgatg

SEQ ID NO: 68925 - DNA, 442 bp, Oryza sativa
  unsure (1)..(442): unsure at all n locations
agcttcttattcctnctggaaatgcgtgcatacttgagtagccgacggatgacgaagcagacggaaacacagatgtatctcctgctcacgttccgggatgaagaaaggcaccatgccaaaggcgtgtagctcaccattcgtcctctctcccgtagtgggtaggacgccaagattcgcggctccatggccttcaatgaggccatgcatgcaccggcgcagccatagttatcttgcccctacatgtaagcacgataaatagaggagacattttgtccagtgtttagtggtttcatggactgtgtgcatttgtttgccgttttacgtccaaatagagtgagcgcgtcaccctgatttcaatatgtcatcgtgcctaagtcngtgctgcattgtaagtcagtgcgcatctgaatgatctacatgtgcaacccaaccaatatgtccg

SEQ ID NO: 68926 - DNA, 400 bp, Oryza sativa
  unsure (1)..(400): unsure at all n locations
tcttaatatatgaaaaaaaatgcatcggcttatagccttcattcaagtttggtaacgagaatcctcacacacaaatagtcaaatatgcgtgacgcccatgtgaatttctacccttttccttttcaacccatactaatggcgattaatttctattttcggtgcctctttcacatgaaccctttccttttctgcccctttcaatttgttcgattntgtgggaaccaattttggaacgaattgaaaacgcgagtctaagcctccctcacagtcacagtagccctaaatctgcatatgctgggcttactctttaattgggctagtttatgcctaatagagagtcgatatntnttttttctttattgaacntgtttcattgaattcagttcgaaaatttcgtcac

SEQ ID NO: 68927 - DNA, 441 bp, Oryza sativa
  unsure (1)..(441): unsure at all n locations
agcttcgtattcacccttttatgaaaaaaaactagacagcatgtacgtggaatccacattagcaaacaaatttgtgaaaatgttgaatatcccatttgaatctcgacaagctngaaagcagtgcaccataaccatctacaaccacccacttctttacatcaatatgtgatatgtaaaattgatgataaaatgctaaagtttgataaacatattaatgcaaagattaatggctaaatttaataaagattttactgcaatatttgggctacagttggatatagataacaaataggtgcacattgcanatgatgtncgatttattagatttagatgttaattgatatattcgatcttacatagaggttggaatgttgaanaatacattccatcttgtcacatatattgccgcaaatgaattcctcttatactatcattcactat

SEQ ID NO: 68928 - DNA, 448 bp, Oryza sativa
  unsure (1)..(448): unsure at all n locations
ccttttggcttatgtaaggtagatgtattactcaaccaaatttaatacattaaattcaccggcttataaatcatataagccaataagctgacttaaaagtatagtccaataagcctaaacctaaacaaagatggcctaaaccccgtggggcatgtatgttgtcacagcggtttgcttgtgcaggtaaatcgaanaaaatattaaattactagcaaaaatatccgtgtattgcaatgggaataataatattggcatgtcatgtaaaaaggcaagagtgaaagcatttgttgacttgatagacaacgcattgtaagcatataactgacaacttaccctntgtttgtattgaagtcgcaaggttagtgtaacccgtccaaaagagaaaacattgctaacttgttatatgttcgtatgcttacatgcatattaatcggcagttatctttaat

SEQ ID NO: 68929 - DNA, 389 bp, Oryza sativa
  unsure (1)..(389): unsure at all n locations
agctctatactatgtcaaatccaattctcaagtctcaaatttcaacattacatcacaaaacacaatcatgttaagtccaattctcaagtttgaattgggcgtattgggttgggctgaattgagtgtcttaagaattaagatgctgaattggattgggctggngaggaattatagactatggtatgggtctttaatattccggaaattcagaaatttttcggaaaagttccgaccgattccaagttccgacgaatatcatattagattacatttccgagaaaatatttctgaattcatttccgtttctgaaaaattccaaccaacagattccgttttcaaatatagatccggaatccataaaattttcgtactggtntcatcccctgctg

SEQ ID NO: 68930 - DNA, 406 bp, Oryza sativa
  unsure (1)..(406): unsure at all n locations
tcgaacgatatcaactataacaaagtgttgtatttgcttggttccctgtgcatctctctgataaaccaagaagcgtagtatgggtgttggagttattgtacactgctccttaattgtctttnttttatttcctacaaaaggttagtggacagcaaatacccgagggactacaaagatttgaaaagattttatcatagcctcaagattagttgttcacatccatgctaaaaaggatatggattcgaaacttaaagaagcatggatcccataaaattgccataattgtttgtcatttttttcttttttttattcgagagacanaatttttttactcgagagacagttcttttattctttgaaaacatttttttattgttcaccaaatttcatttaagcaaactcatac

SEQ ID NO: 68931 - DNA, 418 bp, Oryza sativa
  unsure (1)..(418): unsure at all n locations
agcntgctctggagctctnttattgattcatcttgatcatgatgaacttncataattcggagaagttctctcaaaagagaaagctcagagtacactttggatacacatacccaggcctttttggtgaaacttcctttatttttctatcattggatattttctgagctaatgttgtcttaccaactccccagtcccaacatttgcaagcttattaagttttctcccctatgttcagcactaatctaccatttttctgcggcatgttgatctcttgccncaatgttggctcaagaggtgggaacttttccactctcatactgactgcttcagtggaaccgactcttgatgtaaaaaactctgccttcgaatgtttctatctcctgttgagactctatcttacagaacctatgacgtgctg

SEQ ID NO: 68932 - DNA, 364 bp, Oryza sativa
  unsure (1)..(364): unsure at all n locations
gacactatctattactcaacctngctattgttggaacatggggagtttgctagacaacactatctcataatatattcaatgataaataattagaagggagatttgaccatcgtgcctgggtttgtgtctccaatgagtattctatggtttcccttttggcacaagttcttagtaatatgaaaattcattatgataaatatgaatcagttgtgaaccttcatagcaactcaatgcatgcattgcagacaagagtattttccttgtgtgggatgatgtatggcactataaaacatgggaagaattactaagaactccactatatgcggcaggcacatgaataattctagtaactactcgagatgaa

SEQ ID NO: 68933 - DNA, 326 bp, Oryza sativa
  unsure (1)..(326): unsure at all n locations
acatattctgtcaagtgggaaccaaccaatggtacatntgctcaccggcttgatgtataccctgactaccctctctttgaacaccaaggtaagactcagtttctgcaattaaagcctgggtctgcaccctgggtcttatgtattttgttgcccattttccacataanaaattatgccttgattctcaattcccatgtatatcttgcagcatttcctctgaccacagattatccattttatggcagatccattggttctcaatcttcaatttttcatgatgttatccttctcactggctagtgcaatgatttgatgncactctaaaa

SEQ ID NO: 68934 - DNA, 319 bp, Oryza sativa
  unsure (1)..(319): unsure at all n locations
agcttcatcatattacagntaggatcagaagggacatctctatgctccataatttgtgtgttgcttgtcttttgatgtcccaacaagggtagataacctgacgaatcatacaatgtttctagtttgaatcttcttggacgtgatgtttattggccaaacgaagcgggtaaattttagatccatagataatcaagtaaacaactctctgtgtcaccatgatgtagacaaagtagtcaaaatagagcagtaacttcatcagcagcataataaactgatcttttttttttgtgaacgcacaagagccttgtacgctaatata

SEQ ID NO: 68935 - DNA, 377 bp, Oryza sativa
tattcggaaaaaatataatgttaatctaaaacctgatacatatttacaaaatgaacatgcaagctaaacttgcaataacaaactaatgtacctagcaaaggagaaggattaatacaatattcagggaggatgttacatcaattcaatattcatggaggatgttgtgcctccagcttccaaacaatggcattggttacaccccatttgaacactcgtaccgaaaccatctcactacgtgtgcgtgatggttctcaatgtgcaagctttgcgcacgctgccactgtttatttgtcttgacaaaacgatccttgatcatgtgaatgggttcgttcctgtctccttggtagttaagtagctaacacatgttaatgtaatcc

SEQ ID NO: 68936 - DNA, 427 bp, Oryza sativa
  unsure (1)..(427): unsure at all n locations
agcttggcttggcatattactctactgaanaataacactagtacacatcagcaacagcaatatactccatcagagtaactggtaatgatgagatatactgacgtgttatacatgtattgatgtatatatgcatcctgcaggaaataccagctgaacaatggggccaggaagagaggaaagcataaggctagaataatgcattcaaccttttgccaaccaccatgatcttccctttcttcagtccatacatatgactcattccttacattatctttgcaacctttatgttttcatcgactttctatganattccaactaattcttaaaccttcatatatacttgatcactgccatggaaccggctaaaatgtgtgatgccctatcangaccagntaaataataccaaacactgatatggggggttttc

SEQ ID NO: 68937 - DNA, 315 bp, Oryza sativa
  unsure (1)..(315): unsure at all n locations
agctngattatggctagagctcctttctcctgctcacctaccctcctgttccgtccccctcaccatcaacgagccaatgagatggctgccaacaccagatctggagatatctatggcctccccgtcattggatccgcctgagccatgtcagtgatgatgtgatgatcgcaccggcccctgtggcctccacctcgatgtcatgccatcgatgaggatgccgaacgatgtgaatcctcctaccacgcaactgttagtggtgatggagaggagaccaatgaaggtgctagatttggagtgtcaattgacaatcgacgt

SEQ ID NO: 68938 - DNA, 304 bp, Oryza sativa
  unsure (1)..(304): unsure at all n locations
agcttgctcaccgcggtgaacacggcgtcnagctgggcgtcgaggaggctgtagtacttgaggccgctcccggagtcgagcacgccggcgttggggcggaacagcgcgtaatcgatggagatgacgtcggcattgccagagtacgcgaagaacgggtacgcgttcaccatgatgtacgagccggtctgcgcgatgaagtcgagcatgggcttcatgaccgcctgngcgatgtcctcccggaacacgccggccgactgcgggtacaatcccgcgagcgcggtgagcgcgatgggggacgacacct

SEQ ID NO: 68939 - DNA, 445 bp, Oryza sativa
atactaagactaacatttgtaaacatcttacagtacgaatagcaaccattcgcataccatggaatctcattctcccaccatctgaaacaatagaaatatggagacttaccaaatattaatcacagaaaagagaaaacaatataaacacaatatgcaataactgcagacctctgttagctgaagagtgttccaagtaccatgtcatgagctcctctccacatacatcaccttcatgtaacggagctttgcttccatctgcactgatgctttctatctttcccctcactatgaagaccactttttcaactggaccaccttgataaaggatgtcacttgcgctaatatacaacgtttgtcttattttgcacatatagcgtccaagataggccaatccatcaatgtgaataatcggacctgcataataattgtattcaacatttccttg

SEQ ID NO: 68940 - DNA, 215 bp, Oryza sativa
  unsure (1)..(215): unsure at all n locations
agcttcgttatgcagtatgtatgagctcattgttctcttcacactnttgaaactgtgcctagaagcagagccaatgcatataagatttatttggagatttgtcaaaaactatctcattcctattcaaccaaagagcccaacaaaaagcagatgctccaacaaatatgagattttaaatttttgagtcaacaacaccaagccaatttttaactaca

SEQ ID NO: 68941 - DNA, 350 bp, Oryza sativa
ctaatggagtcacttgtggaaaatatggtaaagaaatatcttctccctgcagcctaaaccatatctattgctatgtcaccaaattatcccataacaaagttggcacgaaaatattacagacatagtgtatgaatcatctaaaacagcatcaacagttacagccaccatatgcgacaaaggcattggaattcctatagaaatgtgaaatggaaacagaattttacaaaggaaaagattgttccagtggctagaaacaacaagtgagaatattgttaagcgcacaactagtgagattgtacacaccgttactgaataacagatttaccacaaacaggggcacgaattatata

SEQ ID NO: 68942 - DNA, 299 bp, Oryza sativa
  unsure (1)..(299): unsure at all n locations
agcttggtgttctaaacaagttgctatgtaagtcatgagtggagatcgagacgacgcatatgttctcttgcctacactgctgcatgccattaaagcataaaaccctaccgtgcatttccgtgtggagcctcaccccgagaagtcaatgatggtggatggagtacataggctgatgtccccatgctcagcgccatttttcctggcactgaagccccccaagccatccatccagaaagctngctgggcgggactcggtcgataacggctatgttcaatctcagcaccagagcacgtggcgc

SEQ ID NO: 68943 - DNA, 414 bp, Oryza sativa
  unsure (1)..(414): unsure at all n locations
ctatatacctggtcttataaaacatatgtgagatataatgtgttgttcatgaaaagttaatttctcataagtgtcaatgtgtgacagaatgccttccatatagtaagaacatnttctattcaatatataatgactatatagagactatctatatggatttatctattctttttgagggaaaaaatatattgacataagtatatgtgtattcatacgaagatatcttctgattgcaatatgcaaggccactgtacatatgaagtcagcttttgctctgttgtgagcatgaatcttatctgtgttattaagttttcaagtcacatgctactatgttgactcaaatatatttaacaaccttatatttgaaacaagctacactatccacaaagaattcgattttcactaatgtggaat

SEQ ID NO: 68944 - DNA, 444 bp, Oryza sativa
  unsure (1)..(444): unsure at all n locations
agcttctgattgcanggagttgcgtggactgacgtgctggcagctatgtttctcgagtttgggcacttgtcggcgaaatgacccattccttgacaatngaagcaacagatatcttcccggactcggcattttcttttctcattttggttcctctgtcctggcactggagttaggctgaaactgtaatcttggcgaggatttgtgttgccttgatgcttctctccgttggaactggcgggttggttggccatcttcttcgtcagcagataactggattgacaatcttttggtacatgatcagttccttcacaaaagatacaagtgatcctgctcgttggacacctgtcgggtggatggtcttcctcacaatgaaggcagagtgtgagacacatgctatgcaacgtgtcaatttctncacaacgggtgcatgcctttgattccatc

SEQ ID NO: 68945 - DNA, 457 bp, Oryza sativa
  unsure (1)..(457): unsure at all n locations
tgaaccttngctcgtcccgagtttatgacgaaaggaacaatgacttggttattgatcatgacgaaaggaacagatgcaaggtatgggtactctctctctctcaaatcaaataagtttggcacggtggcttacccttacccctgattcccacgagacacttcatttccttgtcttgagcggttgagagatagaacatcagttagagcgctagttacccaatctttattcaactnttattccgggagtttttcaaatgatttttacaaaagaaagccaagttcctcaaatgattctctagatcactcaaagtgtatgaaaatggattcctcaccagatttgtctttgtgattcctactataaggttgatatgtggagcttggtanggatcaaacatggcatactngtattcatatttattactaagtgcaaaacttcgactaatatagatgactaatca

SEQ ID NO: 68946 - DNA, 444 bp, Oryza sativa
  unsure (1)..(444): unsure at all n locations
agcttaacatgcatagatgccacatcatttactaataagatgccacatcatcatccagtaattaacaagatgccacatcatcatccactaacaatgaccacatttaaatatcatgcaaatatgctatatctttatagtctttataatttaagagcttttcaaatacaaacatgttaaattatcatccaacataattcacataatggttcaatgaatatctttattatgttttttgatatcctatatacttatatagttcatcctatatacttagttagtgcttaaatgattaatctatagtctaaattatctttctcctttttttctctaattaagtcatatcacatncaatngttttagctctgagatgaataatctacnggccaaactatctccctacttttcttcttccataaagtcataccaccttactttttacatttg

SEQ ID NO: 68947 - DNA, 374 bp, Oryza sativa
tgtccatgtcgatgtatcttatcttcgccccttgcaaagcttctgagacgaaatacactggtttctggcctaactctgtttcttggacgatagctgcactgaccgccaccggtgaagcttctatatagagcagcagttcgcttcccagtgttgggctgaccaatgcgggtgggctttgcagatattgttttagctcgtcgaacgcagcttggcattcgggcgtccagctaaactttcctgtaacatcctgaagttgtaattaatcaacttaagtggaaatcggtgtatgtccttagtaaaagtgggaagttttaaagctatgtgggttcaaaacctcatccggttaatttgtgtataaaaaacatgggtagaaa

SEQ ID NO: 68948 - DNA, 381 bp, Oryza sativa
  unsure (1)..(381): unsure at all n locations
agcttaatatantttaatctattgagatcttaatataaagggcagatgtagcatatcaagtaaacatataagatacaaagtagctaaatcaggtaagatcggctgaaaccctaatgctatctctattagcaattataagacaaattatatgttatggttctaaacattacttaatagatcaaacttaactgatgcagcattaagcataatgagaaacataagatctacacgagctgataaaagcctttctgagatggtggatacactgtataatctaattcaatgtcggtatctaaccctatcggctgtttttgatgatggaggttagccgatggggttagataatgatattgatctagattatacctcatatatgataac

SEQ ID NO: 68949 - DNA, 338 bp, Oryza sativa
tatctattcctgagctcctaacactatgcagcacatttcacatttccatttcttcccttgtaaagattcctatattaaattagattggatgatgatcttccttgtcatcttgcaagagcattattgtgggccaaaatcttgatgattgatcacaatctgcatgaccatacacggataacttgggcaacatgtgctcaaatgaaatactactacatggtattttcctcttcctctcgtgttacacatgctcatttttctccatccataatcatgttcatataactgcaaaaatatggtcatctgatattttcagaaatcagcataccaacctttatatg

SEQ ID NO: 68950 - DNA, 211 bp, Oryza sativa
gttcttgcttctcaatgtctggtggtgcatgttcagcaaccagcaagaagttgtgacatacattgctaggatgctgccggatctcgacatatctttcttcatagatgggcttcacaagtctcttgcaagtagaaataaaatgcattgcacatgacaaaaatctgaatcacaaattcacaaccacctaataagcaagttatgctgtacatca

SEQ ID NO: 68951 - DNA, 340 bp, Oryza sativa
  unsure (1)..(340): unsure at all n locations
gtgacctttctgttccttctgttaagggagtattccacattattgttganacacatgaatgggccatgtttgaccatattcatcttgacaatgggggtatttgtctcattaaaaagctcacattgtgttttatgttactaatatagtgtaatgggatgaatcatattgtacaggcattcatatgttaatcattatatttttctttcagttaccactgtgaatttcatgaccactatgaccccactgtcgatatcctctgctattgtgtcggcatatatcaccaacagattgatgatgaatgaataggttccatgagcggtgtgctatcaatcatatcact

SEQ ID NO: 68952 - DNA, 367 bp, Oryza sativa
  unsure (1)..(367): unsure at all n locations
agcttattttgtttatacaaaattcaaaacaatggtcgaaaggatcttccccgatttgaaggttgcacctattcngctgtgtcattcctgagtttcagagtgaacacagctaactgaaccaaatattctatcaccaaccagcctacagacaaaaatgggggcgaagcccctgatgagctaatccaagtagaatagggttacgatcttccggagattcttggcctcctggcaagtctccatcagcagcttgctgtcatggaatgcaaaacaaatcacctgttggaccttcgagatgatgtccatgttgcataacctgaatattgtgatacatattaagcaccaatagctgctaattctaattgcacca

SEQ ID NO: 68953 - DNA, 302 bp, Oryza sativa
ttcttggctattatgatggctattgacaagtggagatcatacttattgagaggccctttcactattaagactgatcatcaatcttcgtgtcatttaaatgatcagatactatgaagtgaattgcaacgtaaagctatgactaagttgattgtggtgcaatacaatgttcagtataaacgatgtgttgataataagtcagctgatgctttatctcgtgtgggacacttatttgctacggtttctggtccttatcctaaatggattcaagaagtggttaattcttatgcaacggatgctgatgc

SEQ ID NO: 68954 - DNA, 339 bp, Oryza sativa
  unsure (1)..(339): unsure at all n locations
tcaagncttcttctcctcagagctcttgaaaaaaattcctatttcttattcctatgaattgaaatttatccaaaccaaaaagcccttaacatgtttctttttctagtattactaactcacattttccagtttagcaagcagtaatatacgaccttgtcagtactaattcacacaaaacctgtgtattccaaatagtacaccaccagtgtacactactgcatgaagtctacatgagacacagtagcctcttccatacaagagatgctgtactctntagtctctactatacagacgtcaaaaactgatacacctgcatttgttgtccaagggaacaacagt

SEQ ID NO: 68955 - DNA, 413 bp, Oryza sativa
  unsure (1)..(413): unsure at all n locations
tatgtagaagacttgatattgaattagataagttaattgcttataacgaaagacagaggaaatattttgatgatgaaattgaaagaataacagcagaagctcaactgcgtgttacggaggctgaaagagaatacaaaatctctctataggttcgctttccactataatgttttatatatnttgttaggctcggtgcaagtgtttattcttggggatatcttgatcttcatgagcatgctatttataggaatcaatagtgcagtgactaaatatttgactttgttttctcatatacttttatcttttagtcagaatactggtcgtcagaagttttctttgacaaaaacccacattgaaattgggccttacattgacaccatataggagtatccaattttgatcctattatgaat

SEQ ID NO: 68956 - DNA, 449 bp, Oryza sativa
  unsure (1)..(449): unsure at all n locations
agctttctttgacttggagagatgacagcacttttaaataattgtacatgatttacccaaaacaaaaaaaaatgcagatgaatgttgaacagagttctgtcctatctttgtcaaaaaaaataaaacaaaacagcatgcagtcatataatatcccttccagtatgccttccaacgaaatgatccactgcaagaactttcatacatagtgacacatgtacataccgtggattcgaacattctctacctacttccataaaagttggattccacacatgatcgataagaccaagcataatggaacaaactaacgaaaatgacctcgtcaatgcggccggctgatgctattactcaccacacgtcaaactcttgggacattacaatatacaagtaataanttagtatcaacagcaagccagaaactgatcacacgcgacgaggggtcttttccc

SEQ ID NO: 68957 - DNA, 71 bp, Oryza sativa
acaacggatgataacctgatcgcagcgcatagaccttgcgcttgcgttatattgccatgtgaaacggggcg

SEQ ID NO: 68958 - DNA, 341 bp, Oryza sativa
  unsure (1)..(341): unsure at all n locations
gctcaaccgctggccagttgaaagctatggatgatgctgtccatgatggtgttgatatactatcactttctattggtggtccatttgaaaaatatggaaccttgcacgtcgttgccaatggcataccagttgtgtactcagctgggaatgatggacccatcactcagacggtggaaaactcatcgccatggctgctaactgttactgcagccactatggatcggtcattccctgtggttatcacattgggaaataatgacaaattngtggtatatatatttatttactgttcaggtttctatttataacacaatcttgtatgcgtgtagtttattcattat

SEQ ID NO: 68959 - DNA, 194 bp, Oryza sativa
catggcacgatggatcattaatatataaaccttcctgtagtataaattccataccacgtggtggtatatttttgcgcgtataataacggattgaccctgtggccatgttaacaagattcattgtcataatccatcaactaatgcctttttacgtgcatgcatatcaccatataaccttacattgatatgaacat

SEQ ID NO: 68960 - DNA, 157 bp, Oryza sativa
tcattcattagacagcgatgggtctggacaacatccatcgtgctcacaatgattgcttctgatcactggccgtgatagccttgtggagtctaccccttctgcctctcgagatgataacccactaatcggaaaaccattaagcatatgccacccatca

SEQ ID NO: 68961 - DNA, 328 bp, Oryza sativa
  unsure (1)..(328): unsure at all n locations
tctctcacttataanacgctcatacaactgtaagaagaagtcatactggcattaagacttaacattgtggtagtgtaattagtaagcattcacatgaaaaatcagttgcatgacactggtaatattaaatcgcaagataagctgatacacacatgcatgatcaaaacatattataaaagatcaacaaacaggaactaagtgatcttgtaagtatcacgtcacacattttcatccccagccaatgtaaagccatcctcagagaatggagcaacaacatgttgatcaccgttgtctccgttagcataagaagtcgatggtccagcaacct

SEQ ID NO: 68962 - DNA, 414 bp, Oryza sativa
  unsure (1)..(414): unsure at all n locations
atcataagaataacaagttcatgttctccaacaaccgggtatccaaatnntttgtgtattaggtcactaatagcattctggtcccacaacgtatcatcagataagagttagtctttccaatttttgccagcctcttaactggttcagtgggtcgccaatggaaaataccgatattgtatgcaccagtaactgcgcataagatagggggggggaagggcatatgttaggttcaaatagtaactgcaattgatggtaaacagaacaaaaaatcttattatacacgtaaacagggaagatatatattatacaggcaaacagataatattggagcagattctttaaacatcacaaaatacagaacaaaacattagtcacacantgtctaatctctaggattgtattgtgatcatattg

SEQ ID NO: 68963 - DNA, 421 bp, Oryza sativa
  unsure (1)..(421): unsure at all n locations
tcttcacctaggtctaaggctgatggtattaagtngtaaggtgtgttgtttgcttgcaacgaaatgtgacattgcgtgaatttcagatgatgatatgtgctatttcttgatatgcaaacaagccttggtttctttatatgatattgctagttcgatacctttcggaagatcgggaaccctagtacacattatataggtatgaatatcttttaatgtgtaaaaatatatacacatatacaaagtttatattcgatgtatacaaagcttatataggacatatatgaacattgtatatgatgtatatgaacattggatctcatatacatacgtatttaataaataaaataatagaaattgcatcacatatacaaagtttgcatacgcatatacaaaccttgcgtatgttcgaatacaaaccttg

SEQ ID NO: 68964 - DNA, 388 bp, Oryza sativa
  unsure (1)..(388): unsure at all n locations
tgtgcgccgggaatgtctcccccgcgacatcgaacaccacatctgccctctccttggactccagcagatcgccgagttgctgcatcatgttgctcggcggcaccttgatcctcgggactggtctatctctcgacaccctcggctccttcttgacagtgaccacacactccatggtaatccgatcgtcgacgagatacggcggcgcctcgaattcggtcctcttcatcttgagacagctgaccctgttggattcatcggcattgaacaccttgaatgtcttggcatccggctgcgccggcgcatcatatgatgcgaggccggtggtctggtcgaccatcctgacgtcgcatcacgcccgcaccttgcttnccccctggctctggagctc

SEQ ID NO: 68965 - DNA, 363 bp, Oryza sativa
  unsure (1)..(363): unsure at all n locations
agctttcttcagaatgtgtgctagtgctgatgagaaagtgcatagtcagacaacacactcctgtttatctaccacatctcgtcttcttgccatcaagtcacagtacaacatgccagcagcatgctatgatgatgtgatgcaattgatccatgagcctctcccttctaggtcaaaattggatgataatttctaccggtcaaagaaaactcttgctggccttgggatgccatatgaaaaattgatgtgtgctacaacaattgcatgctttactacaaagacaatgctgagaaagtatatgtgattttgcnacttctcatatgaaatgagctagcnagtcccataggtgctaggatctcctataca

SEQ ID NO: 68966 - DNA, 377 bp, Oryza sativa
  unsure (1)..(377): unsure at all n locations
ctgtgaggctcgactgaattatgctgaagattatntggttggtgatcntatgctactacgaactcaacttggaaatgttattagcaatgttaggagaagtaaagaatttcttggatgtaaagatcttgcaaaggttgctgaattaatggttcagaccggaaagaatagaacttatcacttggtgtatatgctcattgagttatcattgatacttccggtggcaacggcttcagttgagagggtcttctcagctatgtctcttataaagacagatttgcgaaacaaaatgggggatgaatggctcaatgactctgatgattgctacactgagaagcagattntttgaaatattattgatgaaaaaatcatgccacact

SEQ ID NO: 68967 - DNA, 244 bp, Oryza sativa
tgaaatttttcccttacataatatctgaggttatactagattctagatattccaaattctgcttggatagtttggctaggccatgttcattccaaagtgaaaagttttcaagtgcatatcatatatacgaacccatatgttaaggttttaacattagttaattacgatacagattacagattccgtctgtaactgcatgacgaatttattaagcctaattaatccgccacctaggaatgttact

SEQ ID NO: 68968 - DNA, 272 bp, Oryza sativa
tatgcaagcttgttctttatcaacatgccaagtgcaggaagatgatcatagtatgtcaatgaatgctctttgggaactttccagtactctgaaatctgctgccatcttcgtctgagtatgcagttctgttcatggatgtgggctgaacaagtttgtgtctccggcaggttatcagtgccttcaactggctcttgtctttgctttgggtcatcatctggattcctaattgcatccggtctttcctcttggctatttgctgtgttgagaatggg

SEQ ID NO: 68969 - DNA, 341 bp, Oryza sativa
  unsure (1)..(341): unsure at all n locations
gtatatttttgtttcacttacacgtgggtcacatttatntttttttctgactagggtgttacgttagtgaaaccagctatctatactataatgagacctactttacacagttttaagataaagatttgtggtattgaagattaagacgtcgtacaaactcgacggaatgtcgagggacgacaggtggatgcgggagtgtagcattcgtagtttgttcttatacttcactacttcttgaagcccagtttgttctatcccaatttgtgcttgtgagtttgtgacgacatctggtggccagcatacagaattgcatatgcagtctagcaaagtatctctatctc

SEQ ID NO: 68970 - DNA, 307 bp, Oryza sativa
agcttccttatttatactttcaagagagaattcgtgataccacctaccttatcaggagtgattaaagccccagcacccttcttccggtccttttcatacacttctatcttgggctttcctttagtggaacctgcagacctgccaagttctttaccctcgagaacacgaagccgcgtctcaagctggccaaatggatcacatgtcaatctcaatgggtcagaatatattatggacaaaggaaatgtatttccacaaagtaaataccttgactcgactctctataccaatggagttgtcttcaccatca

SEQ ID NO: 68971 - DNA, 185 bp, Oryza sativa
agcttcgtcgttggctccattggatgcgcagctgcgaagtgaagcccggccaccccttcgttgtcgtcgcacatcgccggaaagtcgtcgccgccgtggacagtacctcgccgcccttcgaagctcgtcggcggccatctttcgtcgccgttcatcgctgcgtaagtgctggtgagcatcgtcgt

SEQ ID NO: 68972 - DNA, 357 bp, Oryza sativa
  unsure (1)..(357): unsure at all n locations
gtctctcaaattcattacatttcttaccacttgtaagtattaataatctaatatatgtctttcaaaaaattacatctatcgtatatatatatgtgaacccccattttacatggacttgatggtgtgctacctganttttcgtttcataaaaaataaaacaagttgaatccttattactttatcactacataacagatgtaatcccatatgctgcatcagaatcaattaaattagtggccaattactaaaactttcattaatttagtctatctttacttcttttgtgttggcttgtttgcaaactaacgggtgcattgtactacatgagaaaagcttttcccgatgggatcttgtatg

SEQ ID NO: 68973 - DNA, 393 bp, Oryza sativa
agcttcttctgtcatgcgcagttcatttctctctacattggtataatccatatgtcttccataatcatattcccatattcccatggtacttaatccataaatgtttagaccacgatgaacatctgatacaccgtaaggagggatatttcctgtattgaagaagttaaaaccttgattgaatggatcgaatgcattcattgggtgtacaggaggataacccataaacttgttgcctatgtaacccctaacatgtgatggatgcataatatggctgtgcatggtataaggttctctcataaaaagtcctatcctctgtgtcttctgtacactgtaaaggttgttactagcatttgacatgccggtaaaaccatcaccgactgtgctttgacaaac

SEQ ID NO: 68974 - DNA, 115 bp, Oryza sativa
ggaatgggaagtgaatataattagtatcaacttattttttattatggctgaaaaaacacatgaccggctctatacatagccaatagactactccccactaagataatcctcccca

SEQ ID NO: 68975 - DNA, 357 bp, Oryza sativa
  unsure (1)..(357): unsure at all n locations
gcccggtctctctcaacatatggcgctcacaaggcacaacactacttatggatcaatngttcctgtaaaggtgtatggcttctggtaatcaagtcatgaaccatgcatgatgtttatgagttgtgccctctgtgtctagcgccattgatgacttgcaagatttataacttgagtgccagcgtccatgcaattntgcatggaacaattcttcctaatttgtgcagcttgatattctggaatgtgcatatgatatcagaatggataatttgcatgatctcagagagaactgatgtggcatgcgaagtttttagcgagttcctatcttaccgccttatgctactgcttgtgcatactttg

SEQ ID NO: 68976 - DNA, 404 bp, Oryza sativa
agctgtaataactgcctgcttttgagaagcgtcctatccaagaaccaattctgtattaataaacatatgaacaagacaaagttgctaccagggatggatctctcatttcatgggccatgatgccgctgacgccttagctatcaacgaaagacgccgacgagcttggacgcatgcgcccatgtcaaaaaggtgaatcttacgtccatcaaaataaaatgactccaggtaagaccacatctttggcgctgcatcttccgggtctggttttgtacaagggggtgggttggcctcaggacagatttgagcagctcatcacagggctaaaacgtttacctatagagttttaattagaatggagaaccaatgccaaataacctacagaatcttttaccttcatccaaaac

SEQ ID NO: 68977 - DNA, 412 bp, Oryza sativa
agctttctcttttcagttccaattgatggaccaatgtcattttccacttcaaaagtttctgtgcaatggtctcttcgatttgagttcttcacaactcccgaaggaattgattcatctaggtatgtaacagtattaacaattttatgtgctgtagcctgatagcattatcttggacaccgtgtctcttaacagcgcatggttggattgctaagtacgccacgagatgtttcgtaccttctgtgctgtttccataatttacatcaatagtagaatgattccttcatagaaataggagatatgttttatgctcatcgtccttagatgtgcatagcaatacacaagctataatcaccacagctacaattagtttcttcagaactatgctaattattggtgttaagcaatttgtttc

SEQ ID NO: 68978 - DNA, 187 bp, Oryza sativa
atatggtattgaccattctccgatgatgaaccctctccctctaagttacgacaagtttcaatagacagggatcgaaagtgaatcaagctcatgagctcctttattggccagcgcacaagggccgtcgcatccactaatagacgagtcctccacaaaggcaaagcatttacatagcccaagatgtatt

SEQ ID NO: 68979 - DNA, 422 bp, Oryza sativa
aagctggtcgagcccctcgttcaagctgtgaagaatgtctataatggactcaagaaatttcacttgcaagacaaaattgagctattcacaccacactcagaagctgtttttgctacttcatatccaccttctgcatgtgttttcaaggaagatgtcatggtgtatatgaaaccactgctggacttctttcaacaaaatggctcacctttctatgtcaacgcatatccctttttggcctacataagtgatccagaacatattgacattaattacgctctcttcaagcccaatcctggaattgttgacccgaatactagtctgcattatgataacatgttcgatgctcagatagatgcagcttatgctgctctgcaagccgctgggtatagagacatggaggtccgagtagcggagactggctg

SEQ ID NO: 68980 - DNA, 400 bp, Oryza sativa
agcttagcatgtgtgttatgtgaaatgcacaaagaacaataattgaagctgtgttctcagaatgaaacctcggaacctatttgccatgcctgaaggggaagacggtgataataatgttgaccatgctgatgttgactcacttgtcgtaagagtggatcagatgaatgtacaataccgacctgacgatttcacaaactggagaagatctgacattaaaggcattagtggtgatgctactgtaattgaggaggcgcgtgctgcatccatgcctgaacctgatgacgatgacatacctgacgaagaagacgaatccgatgacacctacattgctgatggagttgttgctccagtcgaatcccatggaggagacgacgacgatgattttttgtgtaatgttggg

SEQ ID NO: 68981 - DNA, 345 bp, Oryza sativa
  unsure (1)..(345): unsure at all n locations
agcttgtggctggtataaaacatcgatatttcttttgagatagagttcgatccctcaactattctcgcgatatcttcttacgaagttntgttagggcatctataacagcctctggtttaggtgggcaacccggcaagtagacgtccacaagaattaacttatcaactccccgaacagtactatatgaatccgtactgaacattccaccagtaatagtacaagctcccatagcaatgacgtattttggttcaggcatttgctcatataatctcactaaagagggagccattttcattgttactgtaccggctgttaaattangtccgcttgctaagacttgatctt

SEQ ID NO: 68982 - DNA, 358 bp, Oryza sativa
tatatatttgatattagttaattcagtgtctcaaaaaatatcatcaactccaatttgatgaccaaaaattctctgcaaaactgattattttacaaccttgatgctacagatcaaataacaggactgaatgtgccctaactccaaatatcacaatataggtggtatgtgttcctatcgggctaacctcacctacttcaaggaagaaattggtcagcagccatacttggataatggcagcatgaccgtcgccgtggcctcgcaccgccagtggccggcgcacgcgcaacacaccaggtccttccgctttggtcaccacttgccactctttgccttcattaatgacaccacctcagcgact

SEQ ID NO: 68983 - DNA, 428 bp, Oryza sativa
  unsure (1)..(428): unsure at all n locations
agctagtatgttgtgaataaagaaatttccaaagtattgggcatacgccatgcgcacactgttttaacagatgtgcttaagtccctagaagacacatggttccaccacacctagaaatatatggcatatgtggtataaaatccgagtaaataaactcataaaggatttactaaccgcctagaaaatgaccaaaatatataatcagcctaagccataatattggtcaataaaagtgcacacttacgtggcaaaaagcaatgatattgtatccaatcaattgctttatgaatccaaacaacgccttgacttatataaaaaaattcagcgggcagctatataaagcattactgtttggcaccttttaaaatgcattgtaccaactcctaaaaagttgagtaactgtggtataaaaagattntaaggtattg

SEQ ID NO: 68984 - DNA, 413 bp, Oryza sativa
  unsure (1)..(413): unsure at all n locations
agcttaatgtttgtcctcagtcctcacagntcattcattaatattcaagcagatggttagcatttggcatcgcattatagtcaggcctccttttcaatggaaggattttacatgaattttgaagaattcatgtgttccaaagagccattctttcctagagtcgggtcaggtcatcaagtgtttgaagcttaccagaaaaaagagagtaccaaatcaacaagaaacactgtttccttgtaacgaacatctcatcatcatcatcagctgacaagttcactaagcccacaaagcaaagcactgggcttgggcctaactaatactcggcccaaaagtttactaatcttagcctgcgaccggtccgagccagcccgcccgaccactattcgtagcctcgtcgtagtcaacaccttgac

SEQ ID NO: 68985 - DNA, 241 bp, Oryza sativa
atgaatctgggagaggaagatgaggatgaatatgaagatgatgttgacgatgaacatgaataagtcgaagaggatgacgacaatgatctcatggaaccagccctcaaagtacatgcaagtttctttttcccttttagaacacatcatgttatttctttctttgcttgacatgcacatcatgtaactttgttttctcttatccttttgccataggtcaagcggaagggttctcataatatga

SEQ ID NO: 68986 - DNA, 218 bp, Oryza sativa
agcttagttcgtatagtggtttagcctgagaggctatttggcgccgaaagagtttttttttgtctttgttgcgttcaaggcgaaagattgattcatgctacaagaagggatttgtctccaggtggagtttgttgaattgtgatccaaattcatttgcacttaatatcttcactatatctgggctgtgcgcctagggacgcccggaggggcgagtttta

SEQ ID NO: 68987 - DNA, 289 bp, Oryza sativa
ttttaccgctaagagcacacacatagcagctgaaaaaataatggtaatcattctgaaccaaatatggagttattgcatatacactaaacaagcttttatagaagcatatccctgacttactgtctcttataactttacaacactgctagaattgaggggaaaatgagcacagacaagtaacagcatttaaagattaagaggatctggtgatgcgaaccaaaacttgaaattcaactcagttgaggagatcacctgctaagtctgaacaaagatatgattaataataact

SEQ ID NO: 68988 - DNA, 410 bp, Oryza sativa
agcaagcttggacttccacagtcgttgattcgcatcatcacagccagaaaccaaataggttccatcataggtgtatttcacacaaaacaccctgcaaagataagaggtaaaatgatttatacaggactgatgcaatggaaaccccataaagccgtgttcaataagataacagtctgacaagtaacaagtgtcagctatataagcatttgaaggtgaaatattatatttgatcttgttgtccattaagttgagaacactctgatgtttgatcttagaaagtagcatcagttaaagctagaatgccaataaaataatggaaaagaacctttgcatcctcttagtatggtatatctccctgctatgatcaccattatattggaagatccgcacctgccagaagcattgacaac

SEQ ID NO: 68989 - DNA, 315 bp, Oryza sativa
agcttctcttttatgtctctcacaatttcccgctctgcagttgttgtaaaggaataacctctttctgtaaagatcttcattaggcagtcagtcagatcacgaccagcaagatccaaccgaagaatagcatgaagaagtgcatatccttcatagattggcactgtgtgagtcacaccattaccagaatcaaacacaatacctgcacaagccacaacgcactgtggtcatatcacccatgaagagatgtaagtgtacaaagactcattttgaatagtagaaaatggacacatgcctcgtgtacgaccactggcatat

SEQ ID NO: 68990 - DNA, 340 bp, Oryza sativa
  unsure (1)..(340): unsure at all n locations
gacattgaagcacttcatacccaccggactgaccctgtccctgactagcatacccaaacacattcatatattgtgcctgttntgctagcaactcatctatacgctggtctccctctttatacctcaggtcaaagccatccacagcatccaccatctgtggatttcctccttggtttgaccaaaatgtttttttcttgacgatgaagagtttgcactgccagcccctctgaaaccagggttcgcattacactagaagactgatcagccttaactctattgactctcctcttcaagggttcaagggagagcaccgaagatcaaggctgaattgaaacgggtg

SEQ ID NO: 68991 - DNA, 415 bp, Oryza sativa
  unsure (1)..(415): unsure at all n locations
agcttgatgtcgtttgtcatctaaagtatagtattatgtcattctcattgcacctttgcaaatagcatctagtttggagcagaaattcatgggggtgattaatcatggaactcttttgaggcatcttcaggcactttttggtattaatttgagtacattctgcttcaaacagaaaaaaaataagcacatctttgcagtgctttcaaccatccttgtgtcatatatgcaagctaagcgattgatcaaatgatttttagcaattttcagctgtggtcctaccctattagttgaagtgctattatttgcaacagagcattggaaactttttttgtcaatcataagtccatgtctattcagatggttgttgtaccaaatatttntctattccctaatcaccatctcaattaaatctgta

SEQ ID NO: 68992 - DNA, 421 bp, Oryza sativa
agcttgaattctcttctatctggcgcgccaactagtcgaactcgattttagcaataatataaggcgtggctctctagctgaaaaagtgtatgggattggagacaaaggatttatactcgttcacgccttcttattcaagaagtaataccctactcctgtccggagatgaatccgccgattgtattatcaacagcgtgtattggagaaaatcaacatctgtccctagaggcacccggacaccccttatatatgggaaagagaccgtgttacaaaagataacctatatccctaacggaatatgcagatacatataaaatacagctgtaaccgactaagtctcaaagtgtctccttgatgtacaattgagacacaaacccgagatacaaataacataatctatctatattcggcgtcctatact

SEQ ID NO: 68993 - DNA, 307 bp, Oryza sativa
gagctgcaaccttattccattttttggcccacgatcttcaaagttgattgactcaaggcaaaacacaccctttctgacgcctaatgaatcttgttctgcacacataaattaacgcggccgatgacttgtactaactgacaagaattctgggaaataaaatacctattccaagaacaaaaattagtaattaattactagatcataagagtgaacaaccaacatcaattaccataaatataatgaataaaagacgtgataataatgcttaacgagtaaaggattacagatgcacttgatattacagtgg

SEQ ID NO: 68994 - DNA, 382 bp, Oryza sativa
agcttgctttgatctgcatggtagttgggtatcttcagcggaagaagatctattgcttatttagggggattattatatccataccggtaagttgtgtttctgtattacggttttgtatttgtctactatcagtgcctacaccttttaggttacttgttgaccaaaatgtattaataagtgacaagtccactttctattgaaaatatacctttcttcttgctcaactctgatggtatatatcatgggccttgtctctgaatggagaacattattaaactttatgaatcttttttgtgagtatgattcagcaaactgcaagaaatttggagcataataacaatacatctgctctggagcaaggtcttatgcttattagttcaca

SEQ ID NO: 68995 - DNA, 414 bp, Oryza sativa
  unsure (1)..(414): unsure at all n locations
atcttgtctgtnatcttaaggacgagcgagtgatttccgagagacgagccttcgcccccggccgaactcacaaatggggggtctcacgattccccgctattgaggatcttccctcgacagattcttaacatgatcttcaagctcttggaaattttcctttgtgtctatcttacttctaaatcatatgttttctttgtgctccatccaaacagtttcttgtgttttcatttcttaagattcgaggtgtgataacatttgaatcatgcgtatttcctatttgtgtgttttgagaattctgagttccaaaggaactctaaataataattactaccgccttccaaatacaagagattttgctcatgtaattatataggcgaaatccttaatattctccgacataggttgtattacaaa

SEQ ID NO: 68996 - DNA, 224 bp, Oryza sativa
  unsure (1)..(224): unsure at all n locations
agctttaaacatcttgtttgatattagctgccaacctgagcgtctcctaggttgatgtatgatagagtctctgttcgtgttgctcttgtgaaattctcaataagagcaccacattttcaacagtgctcattctgaataagtgctactagtgttcttgatgtttctagtaaaaaatactctctccgattctaaatatttgacgctgttgactnttttaaatatgt

SEQ ID NO: 68997 - DNA, 322 bp, Oryza sativa
  unsure (1)..(322): unsure at all n locations
ataacatgtccatcacgttgtacaaccatgcctgagcatacaaataacactgtgtcccctacacaggactgtaatngttaatcattaacanatagcggtgtttatatatatatgcctggaaagtaagaagggtataacagcacatataatcaccatcaagcagagcaagtgaaacaacacttttagacatattagatgcgacttctccactgaactcactcctgaagacaccttcattagacttgaagtgcaagttacctagttaaacaaacatgatacaacacaactgtgaatgctcggcgagagctantagatacatgca

SEQ ID NO: 68998 - DNA, 423 bp, Oryza sativa
  unsure (1)..(423): unsure at all n locations
agcttgtatggccctatttccttgtcttccctgcctgagctagttagtaagtggatgtggtctgatatgttacctcttttttttgtgattggaagttttctttttttcattggtcatgcaaactttatttttttttcacagctgactctccagacactgttaatgatgattctactatgcgagaggactttctcaaggaatgtgcgcagtggtttactgtacttcctagaaactctgagaaaaatactcaggtctttccccgaaaatttttcaacatagtggatccattgaagcagagtaacaatctaaggcgcagtgtcagcaaaggtttgtttcttacatctagatcatgtgttttgatggtaggaatggatgattnagtcttcaaatatcacaactctagtccattttggaaaaattgat

SEQ ID NO: 68999 - DNA, 305 bp, Oryza sativa
gtggaagtgacgaaagatgaaataagaaggctcaaatcgggcttgctacctttctttcgcgaacgcgccaaagaattgcacgtcaatatattatcacgaaaagagttttggtgcacacagcaaccagccagactggcttatgcctaaagggggtggggaacttgaagctacgaactactaccacggtaaaaacgcaacttccaatagccggaccgggcagagccacgctcactcccaagaaatcccaaaaaagaacgccggctaaaacacactggtcctcgacggatgactcagaccactgcaca

SEQ ID NO: 69000 - DNA, 416 bp, Oryza sativa
  unsure (1)..(416): unsure at all n locations
agcttatttactctctcaacacactcaaacaggctcaagatatctattgtacactttaatttagtattctagtgctaagtgaagtagaatagagtaactctcggagtccttggagtcttcggaggaatttcagtatgactttagtaggtttccttctttcttttgtaagactctcaganataataaaatgctattctttatatactctgatactttagtatgtctaagtattgtctttactttatacctgtatcgatacagttgtatagctagcctaccacagaggtgcagtggtgtgggttttagtgtccgattattcgattgctctatgtcatctcacgggatgtagagtagtatttaataatgtagacgtggtgtctagaatattaagtatcattatttgggtatatatgcta

SEQ ID NO: 69001 - DNA, 412 bp, Oryza sativa
agcttctttatgaaagccaaagcatgatcacaaggctttccagtcacttcccaagccctacaagtacatgtcctttcctccaaatttactgcatgtgtaatggtggccacagttacttcagcagttccagatccacatatcaatacctcacggtttttgaaggtcttgctttctgcatttagagtgttagtaatagatgggattatcttttcatccattttactagcaagattggctcttgacacaaacttgcttatgatcatctttcttatggtgtcaagcaagtcaacaatctgacgatccttaatttttgagatctaactattgaaacattcagagaggttgttattgatgtaatctaccttgcactcctcagaaaacttgcttctgctccaatgtatggatgaatatc

SEQ ID NO: 69002 - DNA, 271 bp, Oryza sativa
atgaggttacttcttttctgcgaagagtatggaattatttatgagaggacgcctccctattcaccccagtcaaatggtgtagccgaaagaaagaaccggactctaactgagatggtgaatgccatgttagacactgcatgactttccaaggaatggtggggtgaggcaatattgactgcgtgccatgtcctgaatatattcctactaactaagaagaacacatttgagaatggaaggaaaaataatcttctgactgcccatgggtgttgtc

SEQ ID NO: 69003 - DNA, 395 bp, Oryza sativa
agcttggaaagggtgcttatggagagagttataaaggggttattggggataaccgtttcctatctgtgaagaaatttatcatagtatataaactagatgaagttgctaaagaggtaattgttcatactcaagtcaaccataagaatgtagtaaggctggttgggtgttgtaaaaacaacaatgctccaatgattgtatttgagtatgctgcttatggaaacttgagtgatcttctttattgtggtgatactcccatctctttgggcacaagattgagcattgttatacaatgtgcggaagcattatggagcatgcactccatgtacaatcccattgttcattatgaatttaaacctgccaatattcttgtggatgagaactttcatgcacaaata

SEQ ID NO: 69004 - DNA, 400 bp, Oryza sativa
  unsure (1)..(400): unsure at all n locations
agcttcagtgtagtcttctatgtccacnttcaattcccgtgagtcccggtgggatcttcaacgtgatctaacgtacgcacacaaagaaacgaccaaataagcctataataaaaatactacaaataaatggtaaaataaatattgtgaatcagagcccgaacaaaaaaaaatgatatattgagagttaacttaatttggaatggcaaacgatttatcctagggttatgatttatggcatgtgtaatagtggttgcaatttgagagtaacgctatagacaacaaaggtgaaaactgaaattgatttggtgttttagagcttgaacaggaggaaaacaacctaatagaagtgtttggacttggtttattgtggttgggcactatatacgtggttttgatgggg

SEQ ID NO: 69005 - DNA, 425 bp, Oryza sativa
  unsure (1)..(425): unsure at all n locations
agctgcttgccttttaacatcttatatatcctctcgatgaaagaatgactatatctgggcttggatatgactatgccatcaaagaggaactngtccggaattctgtatcattgcattataacggtaatatgaagccttggcttgagttaagtataccggactacacgaagtactggaagaggtttcttacacgagatgaacgattcatggatgagtgcaatgtaagtccataatgcacttaaacctgngaaacaaaatatctgacggtagattgctacgtctgctgctgtattatatacctagaggggacgagtcacttcattgatgaaaaatggggccaggaaagcagttattagccatcaattttgacagagtagatccagcaccatctggtcattgaattagtgagcttgatggatgggttt

SEQ ID NO: 69006 - DNA, 375 bp, Oryza sativa
tatatgcatgtattgtcaaattaagtacaattatattaagctgtgacgaacagcatttaactggaacattattcactccgaggatagattgattgcatatcatatcattcagaagaaatctgtatgggaaaagagctgtacacttcatgcttctttctttggaaattgaaatgcatcctgctatttatattgaaagtataataagatataatgcaaccactaaatatgttgacggtagaagtagtgtttccatcattcgtattgcagggactgaatataacaatgcttgtatctgttgaatcccgccctatcctcgacctataggcagtagcttaaccctcaactttgtattcactggctgctttgatgaatgtt

SEQ ID NO: 69007 - DNA, 426 bp, Oryza sativa
  unsure (1)..(426): unsure at all n locations
agcttctttatagctantttgctatatcactcatcatatgttgccaagcagtcggtatatcacttggatcatattattcggggattcacaccgcatatgctatatattggtatcaagtcacttggttgactataattatcaaaaaccactcggttaattggatgacttattccttgactatatagttggtttgttcaattaaccacatagtcgggggttacacctattaagtgcatctagtcgatgcatctgactntattttttcagccctccacagtcttctgacttggaaaaagtactcgggagatcatggcgaagatgaatgaagcactcggctctggagtaatctagttcgagagaagattatctttccgactgtgaaggtctcacgggctactgtggagattatgggtaccccatacccac

SEQ ID NO: 69008 - DNA, 389 bp, Oryza sativa
atcatgggaggagcctataaaaaaaggtattttaaccaagcgggttaccttcatcttaccacatgtattaaaccactgaatataatacggatgtggatgtggataggtagtcaagccaagattcttgaccatctctttacttagctaaatggtgcaactcccgctatcaataatcattttgatggtatggcctttcacaagaactttgctttggaacaaattgtggcgttggttttgctcttcacacttctctttagcactaagtgctagcttgaacaataggctaggatactgatctagcgactctggatgcaaatggacttcctcgatgtcatcgttatctttgcctcctgcatggccagtggcagcttaagcatattcatcatcac

SEQ ID NO: 69009 - DNA, 335 bp, Oryza sativa
attctgatggcaaggctcttatgaaagcacggcgatctgctggatcaatgagtgccttttctggatcggggggaatggtctacatggagtacacgtgcttcttctttccgcttatatttcgtttttacgtcaattatttgatttcattattctatttactcaaatctaacttgtgagctcttttcatccagcactgggtaaggtgaaggctggagcttccaagaaaccgaaggacctctctaagaggcattacctgttttagaagcgttatcaatgatcctgataaccggcgttgttccttcctttgcctatctcatttgcagaaatattgaata

SEQ ID NO: 69010 - DNA, 407 bp, Oryza sativa
agctttgacatatcttcaagatcacgcttcatgctgcatgggacaacctcaaatcccacaatctcatagccagacttggcatctgtctctgtctctgagatcacttccattccttccccagttccaactaccttgactttacctccttcgtacctatggaccaagaccttaaatttcaagtgattaatgatgtagacctcattgcttccttccggggtataaccaactggatagcctgtccactgaatggtcactccattctgttcagtaaatctcctcacaggaagattgtcgagaatcatgttcacctggtagaagtctcggcttcgctgcttgaggagcttcacatcagcctcgtcaagtgggtttgtggtacacagatacagtgattcattgacattcacacg

SEQ ID NO: 69011 - DNA, 421 bp, Oryza sativa
gcttcttttataggatagaaaaaacagtatgcaatttgaattccttattgattcatcactgtattatcctttggtttctacaaatatgtcatagcaattctgaaggaaaaaaatcattttctacctataccatgcaagaaacacacacaaaaaatttaagtccattaaacatcatccataatgctcctaaacctctacatggaactttaataaattagaaaaaatcatataaaaattataagaaaaaagaaaaatacttagctatccgttctaagttaaatcggtggacccattatttctaaccattaaaccaatccttcaaaacacaagtcccttccacctcccactccctctcgtacataatcactcctccctctccaacatccatatatacagggcatatatcttacgtacaacataa

SEQ ID NO: 69012 - DNA, 423 bp, Oryza sativa
  unsure (1)..(423): unsure at all n locations
agcttgtattattctatggagaanaggcttatatgacagctgcnacagacatgatcatatatagcctagagaaaaaaagaacattgagatgattgtgctgtgcacagtgggagcagacctgcaaaggcatgtttaacttatataggtcaaaccaaagtttgcacttttagtttgggccgaaattntggtgtcactgaaattatacgaattttggtgtttccagtacttctttgctcagaattattttaaatcttaacaaattttgattgaatttgaataaatcttgaccacatgcacaaaatatttggagaagttcaaaaatttcgagcgagatatatagttgcttgctggtggggtccaaaatttcgaaccacaattttaatcactatgcgaaacaaaggaagcacaaaagcaaaattcata

SEQ ID NO: 69013 - DNA, 382 bp, Oryza sativa
  unsure (1)..(382): unsure at all n locations
cgggatnctttaatcaaactgcatgcatgcaagcttttatctatctttacaatatactaccaaagcaagtggatggcgatgtacaccgactgaaccaagcaccccaatggaggatggatgtatcgatgccttggcaaacacttgctgtacggctgcaatcagaactgnggagctctatgtatgcttatatatgtatcaaaggaatagcacatgctctaatcatagaacacacagttgaataattgttcaaaagcaagtaccgtgctggtcctacgctaaaacgtactaaagacgtgagcctatacacaaacgataccacatgatagcacttggaacaacttatgctcacctctgatatatgaacgtcagctcaaacattaca

SEQ ID NO: 69014 - DNA, 321 bp, Oryza sativa
gccgccgccaagggatggtgcgctgacattaagtagtgccccacactcatgatcatgaggtagaacatgttccccagctcgccacgaatcgccgagtccctctgattatatgacaaatcgagaaatatcatcgaaccattcttgttgaaggtgtacttcgtgctccccacatacattcttgtgaagatgcacagcttcttgctcggcatccgactgatgtcatcaagccagatgctggtaaactccagcaagctccccttgccacggcactcgctgctgagctagtcgttgcgaagataaacgtaaagcctgtcaactatg

SEQ ID NO: 69015 - DNA, 309 bp, Oryza sativa
agctttatgtttctataagagaaacaattcatcgttcaactattcgaacaaattagtcgtatgtatagcagcgccggttataaaatacgtgaggtgtactagtacttgagtcaggactttacatgtcctctagcgtttctaaactcttgtggcataaagtttaaaagtttgtataagatataaaaaacacgaatattatggaatgacttaatatcaaataattagaagtggtgagtccccgcaaaaaaaaaatagaagtggtgaggttctgaaactctaggtcggttaacccaccaccttgtggagcta

SEQ ID NO: 69016 - DNA, 412 bp, Oryza sativa
  unsure (1)..(412): unsure at all n locations
agctttatttataacatactccttgcctaactnttaatcgacctcagttcgactttcacaacacacataaattaattcgactgcactatttgcccgagttgaatgtacccttgtaaaattctctctcctactgccccttcgtctcatcttttatttcttatttgcgttcttattgaattttcactcaattgttcaaaaggtaaccatcttagccccatcctcgccctcctccacccacttgaaattgtgataatttgaattttcctaataacttaatataaaaataaattgtgtcaaanacttatttgtaaataaaccgtgatattagcaccctcagatttggcgctgagctccatcatctaagcgccactgattntaacgctagcatcttgtcttgagtggcacggattca

SEQ ID NO: 69017 - DNA, 316 bp, Oryza sativa
  unsure (1)..(316): unsure at all n locations
ggatctctaagtaacctgcaagcttctattttttattatgaacctacgngcagccgcatggctgctccatgctatccaccgactggccacataacctgtgactggctgcttctgcctatctattgcaagcatcatactgtactctggctcctcgtataaaccgtgaaccctaacattaggattttggagattggtgaaagcttggcaggcagtatgtctaagatattggagggctgacacaatgtgcctagtgacataaactgtcaacgacatgaccgggatgtcattaacaattaccgatctaacggcatttcag

SEQ ID NO: 69018 - DNA, 414 bp, Oryza sativa
agcttttttgattgatgacagcgttctagataagattatttgtactgcacaggacactaccatatttttttttaatacagtatctattgatttgcgggtatatatatatggctctcattatctaaaaaaatcttgactgggtgttcatatatgcctcgggctctatctgaatgatgggattattaaaaccgacttgtgcggtggcaatggaactagccatgacatcactgatactccgaaagaccttatcttcgtccatattaagagcaaagacacaatcgaccacctcacgttcacctacaatgacacgaaagggaaccagcaaacagtgtcttgaggcggcaccatgggagacgatcaccttgcggctcgtatataaatattccgttatcaactagaatattgcactccctc

SEQ ID NO: 69019 - DNA, 422 bp, Oryza sativa
agcttatagtcttggctcctcacaattcccaggaaagaactatatattctgcatctgtgagaaggaaatcctgatgttggttcggtccagcttgcttgcgtgcttctccacgagcgcctctgttgcctcttccacgctttcaaacagcacaagggcctgcgttttgccgttcgtctcgaacagtcttgagttggcgatagtcccatgctcaccaacaagggaatggatggtatcttcagttatgtcctgtggaagcgctgagatgtggatcatcttggttggggcgcaacagtggcggtagttcttcaccacattgctgttaaatctgttgaggtgagaagttgagtagtcacgtgcatctggatcagcagtaacggttgggtacttggagtagttcacttcaagcttctttccgaatagca

SEQ ID NO: 69020 - DNA, 394 bp, Oryza sativa
  unsure (1)..(394): unsure at all n locations
aagaatatcgagaaaaatcatcaatagtaaccaatacataccactttccttcaacagattgcactctagctggaccaacagtgttcatatgtaatagctgtcccggtgcattcgtcatcacagaaacaataagagcatgtgaagaagcaaccatcttaacatgacgacacagtgtataaaccaaatcaagatctttcttaagtttaggcaaaccacgaacaagatccaaaccacttaacctagtgagatgatcaaaaccaacatgtccaagtctacgatgccaaaacatcaccgttttatcaaacttagcaactaaacatgttatcacaggtgaaacatgattnntcaaatcagtcttaaacactctttcatagcgagaacatttcatacagaa

SEQ ID NO: 69021 - DNA, 419 bp, Oryza sativa
  unsure (1)..(419): unsure at all n locations
agctgtatcagcnttgaaagtgttggtggcgtaaagaatggtttctataacgaacgacggcagatccaaatcctggtgatttccctgaccagcaagacgcatggaattgttgtcctgggcatcgttggatgcagcaacatggtttctttgccagaaaggagtaatctcccaattgttcagtgctgaagcagtatggtttctttgtccgaaaggagtaacctgtccattgttcagtgctgatgggatcgccttcctgttcttctttgccttgatgacacaaatgacaagtccagctagaagcaacaatagtgcgacaacggatgggacaatgatttcgacgagcttagctgtctgtgaattgtctgaaacagaattggtggctgcaaaattcacagaanaatngttcagtggcctactgg

SEQ ID NO: 69022 - DNA, 314 bp, Oryza sativa
aactatgaagttcctgcgcaagatgaagatcactaaccatatctgacaaattcacttagtcattatatgcttggtgagataaaggccgatcaaatatatcttccagctgtgctgtcatagagttatggacataaatggttctatggaccacaagatattccatgaaacatggaaaataaatctaatacaacacttagacaatattgaatcggctagcttagcctgcaatggctctacatcagtgtcggcatttcctacgatcacagataaatccacaatcacacggaagtaatcctaacggtatcatatttaca

SEQ ID NO: 69023 - DNA, 423 bp, Oryza sativa
  unsure (1)..(423): unsure at all n locations
agcttgagttaagctcaattttattagcagaaactggctttgtcatcatatcagctgggttatcatgagtacttatcttgcataccttgacatcaccttcagcaatcacacatctaataaagtgatatctcacatcaatgtgctttgttctctcatggaacatttgatcctttgtaagacatattgcactttgactatcacaaaatatattaatgcaagacgtaactccacaaagcttagtgtacaaacctctaagccaaatagcttctttacaagcttcagaaatagccatatactctgcttcagtagtaaataaggcaacagttgcttgcaaacttgccttccaactaacagcacatgctgcaatagtgaaaacataacctgtgaacgatcttctcctatccanatctccagcaaaatctg

SEQ ID NO: 69024 - DNA, 337 bp, Oryza sativa
  unsure (1)..(337): unsure at all n locations
taatnaactgagctgcagctctcttatttcatatctcaagcggtaagcgattatgaagtttttgatcatacacttaagttcggaaattatatattctacttcatcttctatatgcttgagtggatattccgatgctgattttactagttgtagaattgattagaaaagtactatgggatcggaacatgtcattttcttggtactgtaagatcgtaaagggcctttacaaccccaaaagctagccattgagatgaagggctcccccacttatatcttacgtcatttgcccttccacattcaatatgggactattcaacaatttctcccttcacacatt

SEQ ID NO: 69025 - DNA, 322 bp, Oryza sativa
  unsure (1)..(322): unsure at all n locations
tgccggatggaatnacctcagctgcagcttcttttatttttctactttctatcttgtgcccttagactattgtctatggcatgctctgaatttgagtgcttgattaattgtttacgttgggttagcttgtagtgcattatctatcgaatattgcaataaaggatattctaacagtgactggaatttcaaacactagattagaatatatattcaaccagcttccactttacactttcgacttaaattttaaattggcttattcaccctcctctatgcctttcgcaatcctttcaatatattatctaaggataaaaaacaacct

SEQ ID NO: 69026 - DNA, 370 bp, Oryza sativa
aaacataaaagtaataccggtaaataatttcttgggtaaatttatgtaaattaaccccggtattatggttcttactgcgtaaaaccacagtatcgcgtgcctgagcttaaagcaataccctaaatttaccttcgaagtatactttattatccgcactgcttacgtggtggctatcacgccgtaattcagaaaactacggataattcacttatacctacataccctactttgtgtctttttctccaactatgtgtttacgtatattcgttaggaattaaatttgaggcctctaactctagtattatatattcatacgcaatcagctagtccaaacccaaaaaacaacttaatttgacaaggagatatggac

SEQ ID NO: 69027 - DNA, 408 bp, Oryza sativa
tatcttcttatgttcatcgcctacaccgaccttaacaaggcatgtcctaaagacccttaccccctgccacgcatagatcatattgtcgactccaccgaggggtgcgaccttctgtgttttctaaatgcatactctggttatcatcagattcgcatggctatggacgatgacgaaaaaactgcatccattatccccataggaacttattgttatacgacaatgcctttcgggttaaagaatgcatgtcctacttttcaacgtactactcaaatttctctgggtagccagatacgactcaatgttgaagcctatgttgatgactaggttgtgaagacacgcaaccaagacaccttactctcggatctagcggaaactttcgaaagtctccgctcccgccgcataaagctg

SEQ ID NO: 69028 - DNA, 388 bp, Oryza sativa
agcttacatcattgttggccattgggtctgctccaacatcggtcgtcgtcagacctcctaccacctacagcgccgtgagttcacagcacgatatcgccctttctccgacggcagcgcaggctcaacaacacggaggtcggctggtgtggaggtcgccgcggcagcgcggagatgggacttcctcctcccttggtagcacggatctccggaggctccggcatcaccttgcagagcataagctaggtccgctcggtggcgcagccgcgcatggaccaccggcagcgcgggggatcccgtaagttgaccgagcggtgtgagggtatatatggctaaatgggcctgccggcccggcatggcccgagatctgtcgggccaacacggcccgctc

SEQ ID NO: 69029 - DNA, 263 bp, Oryza sativa
  unsure (1)..(263): unsure at all n locations
gctttctggcttgataacccccaccaacaatggtcttaattgcactttgccagaatctacccacgggcgcgcctgctgccaaaactggttacaatatgggcagaacggatcggcgaagacgtagacaatgaccggcgcatcttttttaccgtcgaggagccagtgggattgttccatccgntgccacatttcgcgtccggctggtgcgtaaatttctttttcgataatgtgttactcaggtttcacctttctcgttgacatgt

SEQ ID NO: 69030 - DNA, 416 bp, Oryza sativa
  unsure (1)..(416): unsure at all n locations
ttcttatctactttnggcttctctgctttcattcattattacatggatagtccaacttctccctcttttgttggatctttgctgctcttaatgttgatctaacatttcaaatttcaattcacgctagaaatgaaaagaaagcgaggagcatgctggggcccgatgtatacttggtaagccacttgtttagctggatttagattcatgttccatgtgcggtttagtttcaaccaactaggtctatttcaataccccatgtattccaatatgcattacccttacccaatacccaatgtattccagcaatatgattgcctgaggtaagtctcactgttacatttctgctaaccttctagttgtgaatgaaatgaaactagggaattttgttcttaaatgatagtgaaaatttctgtgta

SEQ ID NO: 69031 - DNA, 345 bp, Oryza sativa
  unsure (1)..(345): unsure at all n locations
tgttggtaccgatatattgatctgagcttaatttggggccaaattatcttccaactgaaacctgactttaagctcgatttatgtagccttacgaagagctagctcttgtgagcaagtgtcaggacggccaaccggctaccagcgaccagagttgtgctcatagaatctagtaccatccaattgacagtgctttcagctntgcatatcgatcttatnttttatattaattacctgcaatcgcagcaatgagatctcactaatccctagcttcaacaggacaattagctttggttaagaggcgtcagagaacacaacaatgtgcttgatgaaagttgtcatgatcac

SEQ ID NO: 69032 - DNA, 239 bp, Oryza sativa
ggtgaaagattgattcatgctacaagaagaaatccgtcacaacgaggagctcgtagaattgagatccaaactcatgtgcacttaataaaagccagcttctgccagtatcggagcaggaagcctcgccgctggtaagcttagggccggagcgtagcggatcatcatcccttttacggttacaccatatatatacctctgtgaagccaccgagcggtgacgaaccttacctcagatatagc

SEQ ID NO: 69033 - DNA, 349 bp, Oryza sativa
agtatgacttatacgctccacccgaaggtagtctacagacggtctactaccatataagaacttgagtgaaacttgcttgcacaagaactgcaattcacggcgtagtccattgttcaagttgtgagtaagtgtagcttggagttctatgtggatgttcaaccttaatgggtctccatcgaacgctggtatataaacagtacattggaaaaggcaaatctcagtgggattttgagatttggtgggggattggtggaattaatgaatgggccttagcccactcgaagaataattctttggaaatcacaaacgccacctcatgggatggcatgcctgtggaagttagtaccac

SEQ ID NO: 69034 - DNA, 407 bp, Oryza sativa
  unsure (1)..(407): unsure at all n locations
ggagaagggtaccaccgaattcatccacttgaagcgccgccgccggatccgcttcgggaaaccgctagcgacggtagatccttcacgggggaagcttgggagcctaaggagagggggaggtgaccgccaaatccacccatcatcattgtggtggactggtgggtatgtcgtcgacgaaggatgcaagaggggaanggggtgggggagagtgagagtgatagatagggtatggagagcgagagcgagagagaggcgttggtatagataataggataaggatgcaagtggatatatgggcatgtcggttgatccgcttgactcggctttttggtgtcggctttcaaattctggcacatatatctatatgtgctcttgttaattaaccgatacctacaatatattatacg

SEQ ID NO: 69035 - DNA, 318 bp, Oryza sativa
  unsure (1)..(318): unsure at all n locations
agcttatatatctcttgtgcatcataagaagcaaacgaattaacaagggttaatgcagccatgcaaatcaacaacttcatattaacctcatcaaacctattgttaagctcttggctaatcttgtcaataacaccaatataaactttctcttctgaaatgatcatcattttgttggtccagataaaatcttggagatctcccatgaggcacatatttctcatctaagagtggaactttaatgctatgcttaatgcaaaatgaaagaacagtnccttcatagaaatctttccaaccatcattttcttaattttgcaatct

SEQ ID NO: 69036 - DNA, 388 bp, Oryza sativa
  unsure (1)..(388): unsure at all n locations
tcattcaacttccttcaagatctcttgaacttccaacaagaaaattacaatgcaagttgattttttttcttcatccaccttattgaaccattgataatactgagcataaacaattaaacatgaacttataatggttttactgaaacagataagtcacaagataaacaagctttccttaggggtagaattccctggagttgtcaatcctcttgatgaggtatgttggaatttagagaagctatatcacatctctctttggtccttattttccatgttcctgatttcctgtgtatttcagtgtagagtggatacaggagcacacaaatggattaacaggaatgtaccaatactttgtcaagggaataatantagtatctagtcacgtttt

SEQ ID NO: 69037 - DNA, 297 bp, Oryza sativa
  unsure (1)..(297): unsure at all n locations
ccaacgcggcccgcgggctctttttgacaacgacccgttcaggctgctgttcgagcagtttacgtttccgggcgccctgctgagcccgcacgacgggccggcgatactgcggtacatccagaggagcggcgctccgactggcaagatcgcgttcctggcgacgctgctgaacacgaaaccggcgccggaagcggcggcgtactcttcgcgcgggccggcggtgagctgcccgaccgtgctcaagccggacattatggcgcctggctcgctcgtgctcccgtcntgggcggagagcgt

SEQ ID NO: 69038 - DNA, 398 bp, Oryza sativa
  unsure (1)..(398): unsure at all n locations
aagaagaagaagaggaagaagaaaagaaagaaagaaagaaaggtagggaacacattggcaatcatgtgatgattcagaaagagagatgacactngactacactggacgactagcagtagcagcagcggcagctagcaaagagagatcgatgtgatgcagagcaaagcatgagggactagtagtggttattggtacactgggtgtgagtactacggttggtaggtgtaggtaccaagagaatttttagatcgaaagccaagccaaacgatatagtatgagcgatgagatgcaatgctgcnatggtagctagctcctgctgctgctgagtaagataagtctctntctgtctgtctcaaccatagcaacatcaacaacacacacacaatgactggattatt

SEQ ID NO: 69039 - DNA, 379 bp, Oryza sativa
atatataagccaaagtgctgtttggggatttaaaccattgattggatacaatatcatagcttttcgccacgtaagtgtgcatttttattgaccaatattatggcttaagctgattatatataagggtcatcttctaagcggatggtaaatcctttatgagtttattctctcgggatatacaccacatatgccatatatttccagctcgggtgaaaccatgtgtattttaaggactaaagctcgtctagttaagcagtgtgcgcatagcgtatgccccatactttggaaatatatatattcaccacatacaagcacctttataactcgcttgctatgcgaagtttcatgaatgaacccactctacgctacactcatcata

SEQ ID NO: 69040 - DNA, 346 bp, Oryza sativa
gcccatggctcaccagccagatttgaccatacagtgatatcagcaatccgtaaaacatgaccaaccagaaatgtccgagacattaagtatccatcaacaaatgagcaggcaacctcaaattctgatcctaaaacgaatgtgggggcgtattcaagccattcaacaacctgccagttcattaacaacagcattttataacactaacaaaacaaagattatgaaatatgttttagcagaacttggtcacagcatacatgttcagactcaatagcatctcagccatggacgcttggagaggattgggcaatgtacttcaaaataaggttgatacacggagtgattctct

SEQ ID NO: 69041 - DNA, 389 bp, Oryza sativa
agcttcatgaagatttgggttctaagctgaactttagtactgcttatcatccgcagacagatggacaaactgaaagggtgaatcaaattttggaagatatgttgagagcccgtgctttagacttcggtggaagttgggataagaatctaccttatgcagaattttcatacaacaacagttatcaagctagtcttcagatggctccttacgaagcactgtatggtcgtaaatcattcaagaaagattgcgagtagctcagtctcgtcataagagttatgccgacaatcgtcgtagagatttgagttttgaagaaagagattatgtgtaccttcgagtcacgcctcttcgaaggagtcatcgtttccataccaaaggaaaattggcaccgc

SEQ ID NO: 69042 - DNA, 425 bp, Oryza sativa
  unsure (1)..(425): unsure at all n locations
agcttgtgtgtnttcctactagatatcttggtattctgatgcantttaggaaacttagtaacaaggactggaaaataattgaggaaagaattgaaaagaaacttagtatttggaaaggtaaacatttgtctgtgggaggaatgttagtgttgattaattctgtgctctctagtttagctatattgatgatatttctttttagattccaaaaggagttcttcaaaaaattgattattatggatcacgtttcttttggcaaggagatgagcacaagaagaagtataggcttataagatgggatattatatgccaacccaaagatcagggaggtctaggagtgcataatttagaaattcaaaatcaatgtcttttaagtatgttgtcgaaacgacaaccgcatacgtcgaaagacgtggttactcaac

SEQ ID NO: 69043 - DNA, 429 bp, Oryza sativa
  unsure (1)..(429): unsure at all n locations
agggcttacctttctttcattntccgaagccgacggcctcctctcttctttntaagctcaaagtctggaacaggaagtggttttggaagctttgcaagaggcggttcttgccacttctcaatcttcttacgaatttcttctaacaagttccggccagcttttccagttggatcacctctgnatgaattgattcttgcagctagagttgattttgcagctataagtctgcaagcactagttctcagagctggaggtgtgctctgaaatacttcagtttgttcaagatagccaacacgaaactgagatgtggcactagaaaatccagcaagattcttcttctttgccccaagtaactgaacattgcaagcaggcattnttgcaagtgctcccaaaccaccagccagttccattagttntgaggcaacagcg

SEQ ID NO: 69044 - DNA, 297 bp, Oryza sativa
tcactcctagcctctgcataactacgatgcattgaacccacaaaagaacacacctaaaaagttaacaaatataatcacacaagaagtgttcgtgactatctatccgaagactaaattggtacctatacccctacgcaaaacactacctgaccatatgctccaagtgacgacataccaccgcaaccaaagtatggtctctaattaattaagaaatgatggcacaagagaattttgctattcagataaataaattataacccacaactaccggtcaaagtcaccatgacaagtattgat

SEQ ID NO: 69045 - DNA, 420 bp, Oryza sativa
tttcttgttctctgtttaccggtttgatagaacagttcgtgcagctgaagatctcttgaaagaaatgcatcaaaggggaatcgaacccaatgttacaagctactctgtcatcctgcatgtttacagtcgtgcgcataaacctgaactatgtctctgtatgttccgctcaatgaaagagagaggcatttgtcccacggtggcaacctacacttctgtgatcaagtgccttgcttcctgtgggagattggatgatgctgagagcttgcttgatgagatggcaagtgagggagtatgcccctcgccggccacatacaattgtttcttcaaagagtatcgagggagaaaagatgtgaatggtgccctacagctgtacaataagatgaaagcccctggttaccatccacacctgatattcacact

SEQ ID NO: 69046 - DNA, 379 bp, Oryza sativa
  unsure (1)..(379): unsure at all n locations
agctntgttataatatgtcttaagtggagtcctggcttataccccaattgagcgcctgtgaagatggaaccgtaagcccgctagtccgctgctgtttatttttgattgtcaggccttaagtgcctttgtaatagtgtaaatgttatcgatataataaagatgtgtcttttatatcatgtttgtgtggggtaccccggcttttcctgggacggggattaatacactagcgttcgggaaaaggcaattttctcggtcgcgacaagctggtatcagagccatctcgactgtaggataagccaagtggataaaacctaaagacatattttataaatgaaactatttgcgaaagttcctttttctcctttccctaatgcttttt

SEQ ID NO: 69047 - DNA, 321 bp, Oryza sativa
  unsure (1)..(321): unsure at all n locations
accattctctagtcagtatgactcatatgacaaacttgccttctgaaaatgggagtggtgaaaacctatcatacattaaaatttctagacactccaaagaagataacaacagcgatgaaactgtgtgccgcactgctgtaatctcaggtaacatgattccgctatggctgcttgctggtnttgcacgccatgacagcaaaacaaaggctgaaaatctagaaactggagcagccgaaatgcttatggagaagaattctcanaatgcattcctatatgtggtatgtgaatgctagcatctcttgtgcacttagaatttaacat

SEQ ID NO: 69048 - DNA, 422 bp, Oryza sativa
agctttgtcgacatgtgggacccctgcatcggcgtcccccgccggccagccttcatgcgccgaagaccgcgccgcacccaccggtagctcctcctcacacctaggtcgccttctccaccgccagccgcgcctctctgcgccaagccggccttcttcaccgaacgcgcctctcgcgccaatccggcctccctccatcgaccacgacctccatctccgccacccgcgcctctcgcgccgagccggcctccgctgccatcggctgcgcttctttgcgccaagctggtttccaatccctccaccaaacgatgccgcgcctgccagatgcagccgtctcccacgccctcgcctagccgtctgaggccgccaagcctctagtgaccgcagacacggtcaccaccactgcagccgctgctgccgaatgc

SEQ ID NO: 69049 - DNA, 308 bp, Oryza sativa
  unsure (1)..(308): unsure at all n locations
tttgatgcactttttctgaggtggatttggccggaagttgtgaaccctagttcgccggcgcagcttctcactgtagcagggagtggggaaaatggcgagagttccggcggggaagacgaagcgtcgcttggatataggaattttcagttaagggtatcggaggtgctaatgggcttaggcctgaacagtacttcagcccaatacttttaacagcgtggcccatatgttccttaaggacttangcatatnttgctntggcaatattatgcgcacaacagtgttgcccatgctgatcnacccttttatgc

SEQ ID NO: 69050 - DNA, 326 bp, Oryza sativa
ctcatgtgttgggacgaggctcatgtgttggtagtcgcggagtgcgggtaaagtgtacatccactgcagtgtgagttaaccaaatctatttcaatagccgtgctcgcggttattgagcactgggacatgtattacactcggctagactctaaattcttaacttgtgtgggatgggatattgcatgatgaattttatgctgatggagccacttcctgagaggagggaaggtggacgttctcagaaaaccatgacgactcaatggctggaagctatccttgtgatcacaatggatggtggacagaaccgtcattggttaatgtgaaca

SEQ ID NO: 69051 - DNA, 386 bp, Oryza sativa
  unsure (1)..(386): unsure at all n locations
agcttatagcctgctattggatctgctctaacccatgcctgctctaaattaaagaatttgtgaacttgaagaccttttccattcctgtcgtttgaaaactgataggccatgccttaagggggtgcatggtaagcacttgagctaacgcaagagatgacatataaatggtctctccttttanggtatcgagaatcctattgtctatgcactacatgtgattcaccctatatcctaaactaaaggatntagcagggacaaatatcattggccaattgcatacttttcaattttcaaacctatataggctctgtcactaaaaagctaaatgtttgcttctagacgaaagcaaacacacaaaagtgcgttaaaaggaagcatgcacattt

SEQ ID NO: 69052 - DNA, 389 bp, Oryza sativa
gaactccgactcggctctatccaaatcaatccgcctttgctcaagcgcaaaagcaaattggaacctctgctcaaactttcgcttcttctccgcatcggcctctttcttcttatcccatagatagtctaaagactctattcgcgatagatccgaacggtcccgcatctgtagtttcgccttcttcctccccatggggcttccctcacctactgtattctcaagatcagcatccctattctcatcaacattacatgcaggagtagatatcgcaggagaatcatcggcggccttcttctgcttctagcttgaacgtctactagctgtcagctgattccgcttatcatcccacttcggcagattccttaaaatgatgtagcaatgcatgaact

SEQ ID NO: 69053 - DNA, 428 bp, Oryza sativa
  unsure (1)..(428): unsure at all n locations
agcctgagtgtgtgtaatacttcagctgccactacctagtagttgataggagcgtgcatattcttgtgtatgtttcttgtttgctactaacaatgacatggatatgcaagatcattggagataacatagcttgacatcgacatcttcgtcgagacataacgagtgatcaacatgatgctaatgaggtacgcgatgatgttctaactaagatcaatagagaatttcaaaagcatgtcttgtctgagaaacaaaaggttatgtgtgcctctagtgttntaattaaacatgcttcaaatgattggaaaacatctttataggcataacaaaataccacaatcttggaaagacctgaaatgatattttagagatgtttatgttcccatgtattatgctgatattctgctcatcaaactgcaatgtttaaaaca

SEQ ID NO: 69054 - DNA, 413 bp, Oryza sativa
agcttccctagcgttctttgtttaagtccaaaaagaactagtgaaagtagcaagaagcctggtactgaaagtagggacctgccatgtgttttcaagtatgttagtacgtcacattctttgttgcttggtcgcacaattgctcatgcttgtataaaaagcacatccatcgactgacatagtaaggtgtacattatagttgcattatcttttaagtttgctaaagctatcaagttttgcttgttaatggggtgaaatcatactttgtttttcttgcattgaaaggattaaatcgttcaatatcccaccagtcacccattctctgtcctgactcctgtcaatcccctaccctcattgagctcccccacccatccacccaccaggtgacacctgtaggtatcaaactaccaatcact

SEQ ID NO: 69055 - DNA, 417 bp, Oryza sativa
agcatctcgtgatctggccggtgagctcgttcagggacaggtcgatgagcacgagctccttgcagttgccgatctccggcgggatcgtgccgacgagctggttctgccatatgagcaccgtctgaagcctcttgagctggccgatctgcggcgggatcccgtcggatagggtgttctggtagaggtagaggcttgtgagctcggtgcagttgccgatgctctccgggatggagccggtgagcctggcggtgtagatggcgatggtctggatcttcttgaggttgccgatcgtcgtcgggaggctgccggagatgccggtctcggcgagttcgagcattgtgaggtccgtgcaaccgccgatctccggctgcagcgggcccttgagcgcctggttctcgcagcgcggagcacctggag

SEQ ID NO: 69056 - DNA, 423 bp, Oryza sativa
atcttgttttatccactatgcctaatatctagctgaaccagtgaatattaagctcaactagtcaagttttaataacccatggtatcaaggaattaagtaatcaagaacaaaagggctatatctaacaatacattaattccacccaatgacattcgaaaataaatgcattagttgaatagaaacaatagctttaaacgggatcaacatgctcaaaaggttgtttgggatctgtgtgacttgccttgctggcctaggaactcttcaaattcttcttctgcaaaaacggactcttcggaaacgacggaatctaaacagaaagaagcataatcaccaaaacagcacataaactagcatgaacagtacatgtggatattttcaacatgtagatcttaattgtataaaaacttagatactgaaccaact

SEQ ID NO: 69057 - DNA, 419 bp, Oryza sativa
  unsure (1)..(419): unsure at all n locations
gcttctttctagctacggctttctagatgtatatgacgatctctagacagatggatcttatatgaatcgtatgatgaagtaccacatgagtggatatataggaaaggaatccaaatctgccgaatcgctcatgttatgatcttctacatcctangtctccgcgttccgtcatctggcttatgttcttcatgtagcattcagatcgaatgactctatgaaattacgtcgatacttctacatattatgggtaacgtaggagacatccctattttcccccgggggtcttaattaccactgcttagctttcaattcgcctctgaccatcaaattaaatgtgaataacccgtcctcctctctttgaaacaaagggcgctttcggttctgtgcgtgcttcaaacaatnttgtcttctccatatta

SEQ ID NO: 69058 - DNA, 341 bp, Oryza sativa
  unsure (1)..(341): unsure at all n locations
agcttcctccgccacattttctgctgctcccgctcccgtcttcgctaagatcaacagaccacagagctctaccgccctactacccccgcgacgagcgaaagcggagataaaaaaaaaaattccccccctccgagacctacctcttctccgcctcctcctcggtgggagacttcttcttcttcgcggggggcggagggaggtccccggcgtccgcatccgcgtgcgccatggcccggatctcacggaacctgtgggggctcgctcgccgccggcgtctagatgggggaggggatgggaggggatcnctctctctctgttgctgtccgtagagtcacctcgcc

SEQ ID NO: 69059 - DNA, 418 bp, Oryza sativa
agcttcatgcccggtagacaagcgctgaatgctttcacttaaggtattaatagccccaagtaccgggttgaagtactcgttgggttgcattccaaagtaagcatattgtggatggaaaaaaacacttggatcatacccatgaggaggaggaggggctgcacttgagcttgcaccttaatcaaaagttggttggcgcacacgaagagctctaggagtggagagttggagacgaggcttgtactccttatgttcttttaaattgtgaccaatttgtcccaacttgctttgaatcaacctcattatgcagggagcataatagattccttgtccaatagtcccctttgagatggcaatcttcttcatcataaggttgataacatcaaaccgacgaccatccaaaatggcatcaatgacatgc

SEQ ID NO: 69060 - DNA, 398 bp, Oryza sativa
acatgaaacttaccgaattatttaccagctgcatgcggtgcgcacccatccatccatccatttttccattgacttgacaagtccatgatgcagcatttctcactctatcattgtcgactcgatcgttagtggttgtgatgcatacatggccctgatatgctagatactttctttaatagttcatctgtaatagaattacaaccctgctatggcaaaattggcatgcataaaagtcattaatccaaattgagccatacgttattgagaaaatgggtgtgagagtcatactaaatgcacttgctttggaggtacatacgcatcattgtgccctaaaaaactaacaaggcaaaatttgctgaaagacacataaacgggctggacacctaaaaacatgacac

SEQ ID NO: 69061 - DNA, 339 bp, Oryza sativa
  unsure (1)..(339): unsure at all n locations
ctgcagcatgcactttattatttctctgagttgatggacaataaagaattgggtttcaacagaatgtataggacaactgtattgattcaaagctaagaatgggagactcattctcctaattctgtatgtagatgacgatctactggctagtagtgatgtcaatctactgcacgaaatagaaaaattcttgtcctcaaactntgacatgaaagccctcggtgaggcttcatatgtttttgggcataaagattcaccgaaatataacaaagtgtgcattgggattctctcaaaacgcatatatatagacaaggtgttgaagaaatttcacatgtacagatg

SEQ ID NO: 69062 - DNA, 408 bp, Oryza sativa
ttttgcggggagaaccattgtcgtagagaatgcagcatggacaatagtaaggccaaatgccacaagcgctgatagttgtcgcgttccacaagggaagctgaagaacaaaaacaatccttaagtcgctattatccttggaggactccctactttgaagaatcgtatcgctcaatctatgtttaaagcatcagcaattataaatcgaactttcttgcacttctattacccgaatctatgtgcaatggccttgtaattctcaatttgaactgcactgcactattaatatcgtcatgtatctgtattggaaatgtaatataaaattcgaactgcactgcacttgtaatatcataatatatgtgttgtgggcttgtgatcttaaatagaatggactgaactgttctatccgat

SEQ ID NO: 69063 - DNA, 361 bp, Oryza sativa
  unsure (1)..(361): unsure at all n locations
agctgacacacacagggaaccgcgcatagtctataagtatgcacaagttttcgacccaccactcataaaaggacagtcacccaattatgcccagaactaactaagatggaacacgacaaagcaagaactacttcactctggttcattctggaaggcactacagcaaaattagcctcttcgacataccctggccaatgctatgctgacctttaaccagcgataaatgataatagaacaaatatatcctgcaagaacatcataatacagggtttatgctatgaactcttatccaggacaaatgcctccgaacaangaaggtttttcctgccaaaccaaaacaagcataactaataaaaaccaa

SEQ ID NO: 69064 - DNA, 313 bp, Oryza sativa
tgtagcatccagcttggttttgtttgactacatcacaagagagacaatgatgattacggggcatgtcttggccccacgtacagctaggccatgtgagtgacctgccgacgagaattggagcgggcccccacggatataatcaaagcaatgaatgcatatggctccattggcgcgtgctggcccccacccgactgtccttttcccaggtatctcaactcacctggcatggttttcacacgcgctcatcttaaatcgcttaattatgtgcatcggaaaaaattgctatataaaagatgtgtgagactatattaat

SEQ ID NO: 69065 - DNA, 434 bp, Oryza sativa
  unsure (1)..(434): unsure at all n locations
agagagcaagctttacttgaatntgattatgaggacatagtataaccataaacagggatccctgaaatcgctacaaaacatatcccttgaattcataatatccgcgaatatatctaggtgaattcctaacaaatacattgaatttctgaagttcaattatgattgccaacaaacattaccatgtctagccctctccttccctgatttggtgtcacaaatcatcacaagaataaggctaggtaatgccctctccttttcccgagttatgtaaaaaggcataaaaatattattatttactgaaattttgactgtaccacacgcataatatggtttagattttcagactacanttctaaccagattattcagttcagcaatgtcagtactaccaacgccaaattattcagcatcaaagaagtgataccttgcagaat

SEQ ID NO: 69066 - DNA, 359 bp, Oryza sativa
agcttccatttgtcttctttcataagaatcttcaacctctgctgcaccccgcagattaccagcttccatccatggctggtctaccctatttatacaccaacttcttcccctgccagcttcgtctcccaaggcaagagcaacgcaaagcaaagaacagatacttcttctctccacctgcctcgcaagcttcttctgtttcttggatctcacctcgccacgccattgacgccataaagagcttgtgagaggtggtagccaagaaggaggaggaggatatggggttcgtgctggtgatctcgctgtccttcatcttcttctccatcctgctcggcttcagctgctactttctcggcaagcac

SEQ ID NO: 69067 - DNA, 162 bp, Oryza sativa
ccccaacccccgaaacacatgaaatcgtgggatttgctcatttcttttatggcggatattctctcccacctcactattctttccggggattctgaacttctcccggattaccctgcatcactagaacccaaacttcataatgcatattgccaatttatccat

SEQ ID NO: 69068 - DNA, 420 bp, Oryza sativa
atttctcttacggattctaatcattctaagcataatttaaaggatatattttaaggtcgttttgggacgtgactagagctttgattatcctgtggagcatgataaccgtctcatgcgggctgctttcaaagttatgggcaatgcttggaagaacttcaagactaagcttatctgcgagttcgtctaccaccaggcgaattcagatccaagagagaaatttccttggatcacggcacaagtctgggaggaatttcatgcgaagaagtctacccccgagtatatagctagaagcgaggcatatcgcttgttctagatcaagaaccagcatccgcaccggcttggcaccgtcggatatgcctggtaagaagaagaatggcagcgtgaggatgaataatcggaggaatcgtgcacaccgctcgt

SEQ ID NO: 69069 - DNA, 407 bp, Oryza sativa
  unsure (1)..(407): unsure at all n locations
agcttgtttatctttatattctgcacggaacatccactggtgattagaacaaacagcttgtatggggcatatgatctaaaaatagttgcagagggacacagatgaagcattataacaaaagcctcacaatcagatgccatcctgtggcacaagtctaatctaatgaccttgttacatagagtgaaaataggacaaacacaacaacagtacatcttcaacgtgcactaattttgagataagaaaccatgaaagcaatcaccagtccaccatcattctacataataacacaacctaatcacattgccatatcctaatgatagtacggttacagaatacattgctgcctttngctgcacaatactaagatataaccagtatcatgaatcatgagaacatttgtatccatg

SEQ ID NO: 69070 - DNA, 251 bp, Oryza sativa
ttctctttcaggagattaacaactgcttatgaagtgccttaactggatgtctacaagattcttatctctaacataaagcactagccctacacacctgaaaatccatactttataactactgtacctaggcatgacctcaacacataagcacacctactttgcttttataggttgcacatctctactcatcatgacgcccttttagatctcgttacaccagctacactcgctatacgaattactatatctgt

SEQ ID NO: 69071 - DNA, 404 bp, Oryza sativa
  unsure (1)..(404): unsure at all n locations
agcttctgattttgtgagtngcatggactgacatgctggcagctatgtttctcaggttcgggcacctggcggcgaaatgacccaatttcttgacaatttaagcaactgatatcttgccgaactcgggatttgcttttcccattttgattcctctgtcctactctggagttaggctgaaaactgtattcttgtcgaggatttacgtggtcttgatgcttctctttgttggaactggcggggtggttggccatcttcttcgtcagcagaaaactgaattgacaatcttttggtacatgatcagttccttcacacaagaaacaagtgatcctgctcattggacactcgccgggtggatggtctttctcacaatgaaggcaggtagtgacacatgagctagcaacatg

SEQ ID NO: 69072 - DNA, 391 bp, Oryza sativa
gaggcacttgatcgagctgaccagtgagcatgctagatttcattttactgggacaatggactacagaatactactagcatgctaatggcatggttctctaattgaggaagggacattatggactgcgcccgggataaaacttttactggctttgaatgatggaaaagaaggcgaatcattcatggtataagatccaaacgcaccctatgtttttggcgtcaaagaactcatcaagatggaaagaagcatgttattcttgttttagaataatttatgaccgtacttaccggaacagcgaatgcataataattgcggatagcccgttggaaccgttgataggtaagctaccaggttcagtgaagcatcaacaattcaagaatcgagcccatga

SEQ ID NO: 69073 - DNA, 256 bp, Oryza sativa
tcacaccacttacagatgtctagacctaccctgcaccataataatgtcactcatccgggtgcgacattgtgtttttagatgcatactctggctatcattacattcccatggctacggaggatacgaaaaaacgcttcataccccatagaactatgtttccacaagccttcggtaagaagcagtctactttacgacactcaattcttggtaccaatagattatgtgagcttgtcatactggtggaaaccccaaccaa

SEQ ID NO: 69074 - DNA, 336 bp, Oryza sativa
ttcttcgatgaccaacatcgtacggtcgtcgtctattcaaaaatctcggtccaaaccgtacatgaagtttcactcaacggctcctccttctgacatagactaagcgaaaaaatctagagaataaaatagaattagttcatctattatggaccgaaagggctggtatttttcaagaaatctctaccaaccttcccacaaaatttttcttatcaccaatgaattctattatgctagggaaaacgatactccagaattctttgtctcacgcctctattagagaattacccttcacgactttgaggtatagggtatcaagacaaactgatggtgttgtat

SEQ ID NO: 69075 - DNA, 206 bp, Oryza sativa
aggcaaacgagccttgttaaaataagcacgattagcaatatttgctctcgatcccaagctaactctcacaatccactttattaccaacaaacatctatctatgaacctctatcatatccttggtcagaggatctgcagttgaccttataaaactaaaatgggctctgacaaatctcacagaaatggtagctacattagcctgatga

SEQ ID NO: 69076 - DNA, 417 bp, Oryza sativa
  unsure (1)..(417): unsure at all n locations
agcttgcctgtcaatccgttagttccgagctcgtcgccatcgccgccgaccgcgctcctgtcgtggccttgcccgctgggcatggccacactcggcacatcccaacccgcgctggcaccccctccctctacccagtgccccgccctccgacgctctcctcttgcttggagacagaggagagaaagagaggtggatggccatcgccgaggtctccgcgccgtaggctcgtagccccgccattgaagctgacggngagagaggaaggggaaggatggtcgtcgccgccggcgtcgtcgctgtcgtacccttgccgtcgctgcactgcgtcgagcactcactgacatgtgccatgccggcgagactggaaagagaaggggagaaagaacgtcctcgccggtgggggaaaggggagtgtct

SEQ ID NO: 69077 - DNA, 318 bp, Oryza sativa
agcttaattataatttccgtgcgtgcatgatatatgcgttgcccagtggtgttctgttctataacaaaagcctgccagctagcataatttgctatggctgaatcgaaaacactgcactcaatttcatgtttgattatatataattcgcttgaatataaagttctgttcgaaaaatcccaaaatatctctcgtggatgtgtttgagtaatacacgtataactgtgtatccattcatctacacacacgcttgaagtcagttactgctggcaccgtcacaccggccgggccagatagtcctttcctctcttcggcggcgac

SEQ ID NO: 69078 - DNA, 358 bp, Oryza sativa
  unsure (1)..(358): unsure at all n locations
ccaaatatggatcttctctacaaacacaattcagaaatatagaaacatgacgttaagataatatgatcaacccctggcacatttaaggtttgatctgaagctatactgctctgcgggacccaacacaaggattcatcctttccaatggaaaatagagaacaacacatacagcttagacaatggtcaaatacttgtgtaataattagaaccatagttncaatcaagcctgtgtatatttgtgtccacaaagganaatatctaaagagttcaaaagactacctatgttctgacaaaactattgaaaacacgtatttagcccaccctatcacagaatacatatttaacaatccataacata

SEQ ID NO: 69079 - DNA, 421 bp, Oryza sativa
attctttgaatatgatgcacaattttcttttaagttgtgatgaaattggctattgattcgattggacgtttggtgaaaccatgaattggcttccaaaagcttaatgaggtgtcatcgaacctactcactattattgtccatttcagctcgttcatttccagttcttatctcttctccacagggacaacagatcattgtttctatagagtagttatattttgcgaaagaatgggacttcatctcatgcaaacaaaatgaatataatggacaaaattcctgatgagctgatggcatgcagaaaaacatgcttgcatttgtattcaatagttgaatgctcatgctatgttacagataaaagaaaatatggtataaaatttcctaaagtaaataaaaagtatattcttcgtgaaatgtgttacct

SEQ ID NO: 69080 - DNA, 376 bp, Oryza sativa
  unsure (1)..(376): unsure at all n locations
tacgcaccttctggtgcctggcgttcgtgaaagagttaaacaatatgcgcaagctcgacgaccgcagcacacacagtgtcttcatcggctatgaaaaaaggatgaaagcatatcgtgttctggatccaaggacacgacgtgtacgtctcgcccgtgatgtcatctttgatgagaagtctgggtgggactggatggcagcaagcggcacaagtgcgccaccgagcagcgaattttccatcgagtaccatgttgagaagatcatggggcattctatgcctggtttggggggaggagcggtgaccncatcaacatcccctatgccacttgaggagacttcaccggaacccctcccacaccagcaccaagtcctagcaca

SEQ ID NO: 69081 - DNA, 358 bp, Oryza sativa
  unsure (1)..(358): unsure at all n locations
agcacatnttttctttcaaaacgcatgaaactaattaactggctatcgctatactcgcacgcacaatgatgccccctggtcgtgtgcacccgtaagatgcctggcgatcggctatccgtgactcactcatgccggtggagacgaacacattacatggaatagagaccgcggcagatctgacttacgcattactagaacgcacgcactatcaccgcaaaaagcggatttgacaaaatcatggccgactgctgtggcggcagttcatagcgcacacaaattgatacacggcggtgacatctactcaatcgatcgataatttaatagtttgacataacacctgaaagcaaactaacataac

SEQ ID NO: 69082 - DNA, 427 bp, Oryza sativa
tgcaagcatgcattcttgtatataaaatatattttaaatgtgttactcgtgtttttccgtcttaatttgattttatacacgactatccattcatatatttaattgaggagtaaagataaagattcacaataatcacatgatgtttctgcagaatgtggaaaggcttatatgaaataagagaacgaagcacgcccatctacaggactatagatttggcagctgcggaaatggtatatgatttatgacagaagttgtacagctattgtctctgttcagctcattacgtttgttgaattctacgtttcaatgttgtgctaataaatttaagaccagatacatgtagatgcttgatttatttctcacactatacatatatacataagacgtctcttcatcctcgcatatgtatatattttcacactatttg

SEQ ID NO: 69083 - DNA, 243 bp, Oryza sativa
cactgggcagcaatttctattgtacggcggaggccacagaagctgggaggacaagtcgcagaggcgatgaatgagactgatgatgtgtcatgatcaccttgggaggcctacaggagggtgccccaaaactgacaaagacaagaactgcccgtcggatagatcgaaacagatcaaaactcaagcccggcaaggaagggccaacgccaacaagatatcgactagtgagcacgactctgcctaagg

SEQ ID NO: 69084 - DNA, 376 bp, Oryza sativa
agctttgtcctgttcattactagtagccaaggagctagctgattaacgtgtgctttgcatgtctacgtaacgtactaattaacgtgtgtacatggcaacatgacacgcacacacgcctatatatatatcagactactacgaccaggcctaaataatctacctaccatgtccaggtgatgagtgtacgtatacgcatagacctatatatattagtttgtacccttccgttatacgatgtaagtcattctaccattttatattaatatgtaaaatgcttaaatgatttgaataaaggaagtagtaacaaagttgagattaaactcgtgttcctaaaataatccactgtcaattagttgcacaataagtactcattagt

SEQ ID NO: 69085 - DNA, 392 bp, Oryza sativa
  unsure (1)..(392): unsure at all n locations
agctcttttattgttatactgtcatcaatttggaatgtctttaattaactacattgaacataggaaagggtagtaaattaacaagccatgggcatgtgacatagagtgtcattcaataattcgagataataatgctccaacaaaaaggtgggtttttcaggcttccaactgaagatnttcataatggagtcacacatccatgagtcactgattggattcaagagattttttttgctatctccttgaagacctcatccatgtcaagcttcttcatcaccttgaaaggtcatggcatgttctgcacacaaattggagtgtgttcaatcaaaaacaaaatcatgatgtgccctaattcctaaaagtattgtaatcattacatagaatggtatctc

SEQ ID NO: 69086 - DNA, 398 bp, Oryza sativa
agctttgtataccgcggtatcatgcatccattaaacacacacgtaaacgttaaacctcacggtccctcaaccgacggaccacgtggccggcatggacgatggcccaggaaagccgtgtcagtgtgtgtcaccgcaccgggtagtgtgtgtgagcgtgtcaccgcatccgatagatcagctagtagctagtaacgaccactcgatcgtaaatggcgcatccggatatgtcacgctcgcgagtcccaagggcctcggcccccatctggctgctgctgggcatccccatcaccatacggcgtgcgagtgacaccgcctgacgtacgtgtctccgctagctagcaggcgctcgagatcgcgtatgcgtctgcatcgcgttctgtacggttccacacgcatac

SEQ ID NO: 69087 - DNA, 419 bp, Oryza sativa
  unsure (1)..(419): unsure at all n locations
agcttcttctttaacttagaagtaaactgactacctcgatcagacactattttcttagggacgccatgcaaacacacaattcttgtcatatacaatttcgccgaccgacttccggaatatgttgtctttactaggatgaaatgagctactttggtaagactgtcgactatcaccncaatagagtcatggcctgatgccggtctgggtagaccagtgatgaaatacataccgatttcctcccactttcattctggtattctcaaaggctgcaacaacccggtgggtttctgatgttctgccttgactcgctgacaaacatcacatactgctacgtattatgcgatatcacgcttcatacttgcgcacacaaaatcattcttgagatactggtcatttcggtactctatggtgaatggagt

SEQ ID NO: 69088 - DNA, 419 bp, Oryza sativa
tgcgtcagtgtgaccatgtacaacgcgctctttctgtcctccatatactatgaacatattcttaccttttctcaagtactccaagatattctgtacagctatccagcgactctcacctggatctgattggtatccgcttggtgcactaaatgcttatgaaacatctggatgtgtacatagcataacatacatgatggatccgattgcccaggcatatggaatcacactcatcttgtttcgctcatcagtcgtttgaggacacctgatcttgccaagattaatatcatatgacatccagtaaaaacctttcataaaatcttgcatgttgaaccatttaaacacctcgtcaaagtatgtactctggcttaatcaattaacctctctgatgatcttatatatcctatgcccaaatatatgct

SEQ ID NO: 69089 - DNA, 437 bp, Oryza sativa
agcttccatataatctatactaagcaataaagtaccgcgtattttaccttctgcttctggctgtctcgcaataccttttacagcttgttctgcagcagtaccttgaccaactccatgcccaatagaagcaagacctactgccaatccagcagcaataacggaagcagcagcaattagtggattcatgatgagttcctcgtgtcaaaaaaaagaaatggttaaggatacaatcaaccaagaaattcatatttctaagctctattggacagaagtaactaaaaagtacaaattgaaacgataatctgaattcttcgaactgcttcgagatctcctttttagtttctaatcattagaggttcgtgtactcattattctatttctctttctttccaaccaactgatctgtcattccatccttctttctttgctcttcgata

SEQ ID NO: 69090 - DNA, 440 bp, Oryza sativa
acctataaatactaagcttaacaattttggactagatgtggcactggcgcctatatatgcgaaccctcttgcggaaaactaaaaaagaaaacgagacctctagaatagatacattcttatgttttataaaatggatttgcttctgccattgcaattatatcaatactttactcctaatttattactcctagagttttctatttatggggacagacaataccccaccccatgaatagcctgattgaggatgaacaaattagaggaaatgttcgccgtcatgcttcccgcccttgtttatggcagagaaagcttttttcttttattttagaatttcggaacatttaacaaaggaagtttttccggtcaaacgagatctagacttatctaaagaattactaattgatctattctatcaaaaaaatgcttaatatacgataaaa

SEQ ID NO: 69091 - DNA, 375 bp, Oryza sativa
tccaggaacccgatttatcagaactgatgatgaggcggaagaaaagatcttccttatccatccaagccatgtgacactgaaactcataacttccattcctagcaaaacggctgcatcgtcaatagtatctaaagccctctcaatgtccaattattacaaaactatttctcttttggaatgatggcactgatgaagaaattcaaaatatccagctatgcaatcttgtatagttctcccttttatgaagccatattgattctaactaattaattctaatatcacctcttgcaggctgtcatccagaattgttgtcaggaatataagagaaattcttacgagtgatattggcctatagttatttattccttcacggac

SEQ ID NO: 69092 - DNA, 275 bp, Oryza sativa
  unsure (1)..(275): unsure at all n locations
ctaggagccggttttgaagcctcaaggctgggactttacaagctgggtgactttggcttcatggaaccttgagatancctcccaagcaatgacaccgacccttacttcatctgggggcttgctgctctttgctctgagaagccatgttgcctactgacttacagagaactaagactaccatggacctggaaataatggctgtgagcaaccatggactggaaacaaaagcactttcatgtgcgaagtttggccaaaatctatggggagtagacacg

SEQ ID NO: 69093 - DNA, 487 bp, Oryza sativa
gatagatgacactcttattgagtattgtgcagaactgacttatattatgcatgatatgatggccccttctttttcataacatcgacttcctctagtcataaatagttgacgtttaggacaagatttggttaaactttagaaactttgaccatcaatttcatattagaatatgtttatagaatctagtaagtttatgatgttatgatagtacttttcaaggcaaatctacatgaaccattttaaaactaaacatttgagaagttattaatggtaaaaaatttcaaaagtttgactaaatcttggcctaaacgccaaatatttatgaccagagggagtagcagatatcgaataactagtatagattatgtacatggaatagttctcttcaagctcgaagaagttagatacttttaaagaaactaactccaaagaaactcaacatgttaaagttaaccttgatgaccacgacaaacatcatttaactctt

SEQ ID NO: 69094 - DNA, 227 bp, Oryza sativa
aaaaaaaatgaacaattcagacaagttgataggttccaacactcaacatacaattactgactaattagtgaatcaaaggaaccacgagactaatatataattgtcccattttacgaatcgcattctgaacttggaacctatgccagactacatattttacagtaactagaacaaattctacctctcttaacttttgctaatctgttcttatctctttctcttgtgat

SEQ ID NO: 69095 - DNA, 460 bp, Oryza sativa
  unsure (1)..(460): unsure at all n locations
ctcagcttaagnnttggttgggtatttatatattttaaaagttatttttatgtgttatatgagagagaaattgcttagcatagaaatattttgtgtaggatatgaaagatgatttgtattaaaaacatctcccagttagtttgaatactttctactgaaatacatggaaaattacaggacctcaatttaatattttgtgattgaggtcatattcttttcagattattcatcgtattattaaaatctacgtggattggttcgagtgaagaagaaaaaaagccatacggaactaaaaatattttctggagatattcattttcctgaacggatcatatagatatctcatcgaaaggatctcggacgactcaccanagcccgaaagccagctagatgattatttgttctacactctataatatgctttcttaatataaattctgagacatgagttataccactt

SEQ ID NO: 69096 - DNA, 477 bp, Oryza sativa
  unsure (1)..(477): unsure at all n locations
tgtggtcagatttcatttcaatggtgaatttctttntgatgtgcttaacacatgttatgtcaatggacgtgaagcattgtcttacgttgaccgcaagaagggttcccttaatgagattcgtgatcaagcaaaggagcattgtgaggttgcagaaaaggcgttgtttcactggtgttttcctgcgaaatcaatagacgatggactcacggttttgcatgatgataagacttgccttctaatggcaaagtataccacacaaggagttgtggcagatgtttatgttgagttggttgatattgaggagatagatactgatgcaaacaaggatgaagttggtagtgattctgatgatgagatgaaagatattattgataacgatgatttagatgacaatactgtacaacttgatggaggtaatgaggtcataatgataaattcttcaccaactcatgttaacaagaatgatatgtgtggtgg

SEQ ID NO: 69097 - DNA, 391 bp, Oryza sativa
  unsure (1)..(391): unsure at all n locations
agcttttgaagttattatacagagattgcattgcattagatgtttctgcttgtatttcactcacgaaatggaaggaaaaaaaaactattatcatatcaacaatttaacatcaagtgaccaccataacttcatgtttgattgtaagtttcagtacagagttctttttgtgctacaataaaataaaatgtccagctaatagttatattaagacagactggatgtttccagttctctggtatactgatgttctccccaatatgatgcaaatttctgccccgatccgtatagtcactgtattttgccacgataacattctagaatngttctacggcaactntagggacattntagttccatgattctgtcctgttctgatagtcagacatacatg

SEQ ID NO: 69098 - DNA, 293 bp, Oryza sativa
aaatagtgccatatatgttctaaactcgctatcgaacaccctaagacaagggcaacactcaactcttacaaaatatgagcattcactatgagttaaacccacgagcacgactactcaaccatgtctctgctctatggatcaagaaaaattacttgttacatattcgaccttaatttgcatactgtataaccatgttgtggacagactgctcgagttaaaaaatagttgccctcaaattactacgatcaagaccttacgacaagttaaccctactatatctccccataccaccc

SEQ ID NO: 69099 - DNA, 356 bp, Oryza sativa
caaaccactccgcccgggaacattaagacaacgcagcatgaaacttttttttgtccttccaagaaatccgcgctccttaatccacctttcaactcaaggacaaactgcttctctatgggggagagatgtcatgtgggcactgcaatattccccgcgtcaccgcacgaatcttgatctgcgacaacacgcatgaacagcaaacgtgcgataccaatatgtattccggtagaaaagattgttaagattgatatttatctttccagggttggtagaatattgccgcacatgcacagtaataatccatcaagcaatgtgcgaatatattaatatcttgacctgccccactagtgcgtccc

SEQ ID NO: 69100 - DNA, 411 bp, Oryza sativa
tttcaaaaaaaatgtttcataatgataaatgtacaggtgtgttcttcatattcgcgaactttatcctccctttcacatgattcatgaggaagagatcacacgatcatgcataccttaccaaccatgagcattcattcagtaaacattgatatttgcatagagttgtgatgaagtcttggtaagctattatgaaaatatctctttttgtgtgtgtatataaggtgtgcgctatgctaacctaagaatcctctgtgtagtcgatatcttgacagaaagtagagattatcatcttaatctatctttagcacttctaactgagacattagagaataccactatgctgcgcatgaatacccatgctccatattaatctatctatctgtgtactatatcactatgctagtatcattc

SEQ ID NO: 69101 - DNA, 304 bp, Oryza sativa
  unsure (1)..(304): unsure at all n locations
agctttacactttaaacttatttgctnntctttcttttgctgctttctcacagtntttgaatggaaggaagacaaagtgggccacattaacatgcctgaagtattgatgagcctaactgtagagttggacatttgtcacttctatggagatctgcattcaagaagcaagtatactctggtttctgccggatgtgctgagacaatcctttgctatttatgttcctgaggttaacatgtgctttgcttttcttctacagattagcacatttagtgtgctatcaaccgaagcttggggtggagtggg

SEQ ID NO: 69102 - DNA, 456 bp, Oryza sativa
tattagcaccgccaacttgttcggcaacgtctacagctcgagttgttgttattattctgcttccaagttgattatcaaccaacacatatttgattgttttccacacagactagctccatatatcatcgataacaacgatgtacctacgatggaatataacaccaattaaattctgggtaacagaagtagctttcaatttgtataccaattgtgggtacaagaaccaattaaactgttaacaaaggaagagacatgtacctctcgttttgaaggaatttccttagttcatcaataagctgcacttacttccatgtttctccgttaatgttcaagtacgttctctcgtcgagctgacggagcatgttcttgaatacccccaccatgttaggatgaagagatatataaacataaaccccacaatccaactccaatttaagcttgtgaacacaacactag

SEQ ID NO: 69103 - DNA, 341 bp, Oryza sativa
  unsure (1)..(341): unsure at all n locations
agcttgtattttattgatcccattggggagctctctaatgatttgtgcgtacaactatgcacacgttggccctctatttataaatcgagggtgactaaagttgtacgggcttacctcgaaaatcaattaggtctacttattaaaaaaaaagtacacaaatcttatctccccatggataccatattccgtaaaaaaaccaacctactgcacaagatgtatatggacaagaagtgggtgcacgacatcagaaaaaatattaacggtgtaactgcagaaggagcttatcaagtcctttctaatccttcctcanaacaaaatcatggccattatatgttctacat

SEQ ID NO: 69104 - DNA, 422 bp, Oryza sativa
  unsure (1)..(422): unsure at all n locations
aaacatattgttccatcatttaattagaaagatatntaagcagacgttttcaacactggagtagaaagtttcttcctactaagttttagagcaaaaagttataaatacaacattctaaaatcagggtccagtcttgcacccggcctcccgggttcaacggtaggcatgcgtcctatatgtgatccttcagcgtatccactggttgatcagttaaactattgatgactggtttgcccgtgacgcacggtatttctagtgtgcttccctataaaatagttgttcacttcttctagagttaaccgtaatcaattgtcttagtggtgaaagctagcgtgtacctatgtaccgcacatgcaatctgtccgtgcctttatcatgaattggttccataatataatcaagcgtttagaggggacttcaat

SEQ ID NO: 69105 - DNA, 361 bp, Oryza sativa
  unsure (1)..(361): unsure at all n locations
catttaaaagtcacttagttgccccaagccattttataagacgatcctatagctacacaatattatttatcaaggccgtgaaccctcacgaacctgccttaacccaaggcctacgatgattcagaccgaactggcgacccgaccctgagtcccagctcgttccaagccaacccaggccaaccattccacattttagttggtgagcaaattntaagaattaaaacactaacttgggtacattgcttggcttgcccataaccgagggcgtgggtattcgaatagattatactctgatcagaggtgacatctttacccacaagacacatctttctcacgttgtatcacgtgccacataccacca

SEQ ID NO: 69106 - DNA, 481 bp, Oryza sativa
  unsure (1)..(481): unsure at all n locations
gaagaacaggaagaggcacttcagctccttatcttcctccaatgcctgaaattccggaagtgccttcgtctgcagtccctccccgaaaggttgcattgcctttattctctctataaactaaatatcgctggatgtccggaaatcatgtcgctgcccaaggacggctttccggtctcattggaacgtctaagaatacgagactgcagcatcgatttaatggttcaagtcaaggaattataagcatcaaacccagatntacatatacggctccactagcaaacttaccacccaaggtaaaacaaggtgctctcccaactcctacatcttttttccccatttcgtctctaacctttcgaactaactaagactcgtttnttattggttgttgttaatgatgtagctatccagcaccattgcctcatctggaacctttcagagttcttccatcatcgtatagctgacaatggtaatgcgaattaca

SEQ ID NO: 69107 - DNA, 336 bp, Oryza sativa
agcttgtaatttcttgtgaaatgccctcgatgttaagtactaagtgctatttacaggaaaggtaccaatgtgctttcgctgttgaacaaggtagcatcagatgtgttggatctaactgacttccttcactgtgagataactacatcaaagtatgaggatgcatcaaggtaacatttggcctacttaagagttataagagttatattaaaaatttgcctggccaccagaaactacctgatgttgtttggcaaaaaatgttccttcatgatggtaccctgtaacatattcattctttggattaatcaaagctgtgccttggagaacagtagaacacac

SEQ ID NO: 69108 - DNA, 424 bp, Oryza sativa
  unsure (1)..(424): unsure at all n locations
ctgtagatctgccactgaataaacagttgtctttatatgtgccacattggttttcttcaagacaggcttgtntgataaatcatcatcatcgaaagacttgtggcgttcaatcttggggggtggcttcagactaaatgaagcaagggatggcaaagactctacatctattgtagtagactcttcaataggcttcatgtctgcacattttcagaagcaaattttcagataattgtacaaaatatataacaaaactaaagtatgatgatcagcaaggcatcaggcaaacagacctttaacttcgtttgaagggaacgaagtgaatggctggtgctgttcaaaatgttcttccaatgccgctctgcgttttcttcttcttatcacanagaatgcaacgactgctccaactaccacacatgatatgata

SEQ ID NO: 69109 - DNA, 442 bp, Oryza sativa
agcttacaaatttaataatagaaagctgctagagccatacccgaactctttcgaagactttcggactcctgatttctactatcttcctattccaccagctagatactactaaactaaacttgagagaaatgagagagctattgtttgaggtgtgtgagtgaagtgagaagaggagctccttttataggtaggtaatgatggttgcgacggttggaatggtcggtaataccatccacccgtcattggggatcaatcccagccatccatccaaaccctgcattcatcggcgccacgggaggttcagccaaaccccccgagacatgggttggctcaacccagcccatcttcgactggcggcctccttttgtgtccttcttcgtagacttgtgaaatttggcccaatatgttgtgttatttctaagttctggacccattcatacat

SEQ ID NO: 69110 - DNA, 438 bp, Oryza sativa
  unsure (1)..(438): unsure at all n locations
tcaactcgtctaatgggcagcagcgatgagattcatgaattgttaactatgangaganactgctaacatttaaacggcagcgatggtgttaacagtgattccatagtcccttcctacatggaaggaattatactccttttcaaacaaaccattgacagtggcatggcactcgtgctgaatgaaaatgaatttgctgatgccaattatgtgtatcaaaagtctgttgcttttacaaagaacagcttcacgatacctgtgacttcggcatacaccaaagaagtcccatggtacccagaagactgagccagccaagaatgtaaggataaataagcttcttgaagaacataaagtatctgatcatgtccaacagaaagaaaatgtcatgggaggatcaataatgcagagaaatgatcacgcacgagaatttctatctgatgt

SEQ ID NO: 69111 - DNA, 430 bp, Oryza sativa
  unsure (1)..(430): unsure at all n locations
agcttaaaatttgtccggactaaaaaaatttcaagtcgttttgatgaactgattacaataagtaaaattttgaaacaggaatagattagaggaaataaatgcaaaatcttgtatggtaaattcaacaaacagaaacctcagcttataattatgggcggagctagcgtatattatggggtgcctatgaactccgtcaagaaaagtttttagcatgtatatatgtaccccctcaatacaaacttatgcactcatatcagcttaaacttgatctaaaatagagtaaattaaacaagtggcaccacccttcatttcgctctagctccgcctctgcttataatattggaagtaggataattctggtcagccgtcaaccacggacataaggtaaaatgtcaccaacaatgtactaatngaaactatatcggagctt

SEQ ID NO: 69112 - DNA, 410 bp, Oryza sativa
  unsure (1)..(410): unsure at all n locations
tgtcaatnttatatgcaacacacanagctaccagcacaagcactgcataccattcccctcacttggccgttctcgtgcttggggctcgacatactcggaacattcccacgaggacaatgcagctacaagttcctgttcgtggcgatcgacaagtttcccaaatggatcgaagcaacacccatgggggaaattatagccgactacaccatctaattcattaaagggatgatttgcagatatggattgcctcaccgcatcataactaacaacgggctccagttcatcagtgccaactttcangattactacattggactgggagtcaagatctgcttcgctttggtctctcacactcaaagcaatggcaaagtgagagggcaaacagcatagtactacaaagaatcaagacc

SEQ ID NO: 69113 - DNA, 420 bp, Oryza sativa
  unsure (1)..(420): unsure at all n locations
agcttgtcttttaatactttcaaaatcacccatatttttttctactgagggagtacaagataacttatacagactgaagaagcattgtagaaaacaggagtttactgtatgacctgattaacncaagcagcaatcagaagaccaccattgcttccaccttcaatacataactgcctgtaactcgtataaccagcagaaatgaggagttcagcacaagcaatgaagtcgtcaaaacaattntgtttcattgcacgtgctccagctttgtgccactcttccccatattccccaccaccccgaatatttgcaacacagacaacaaaacccatgttcttgcataaaacaacacgactaacactgaaagaagggagtagacttatgttgaatccaccataaccatatagcaaagttggatgtgat

SEQ ID NO: 69114 - DNA, 413 bp, Oryza sativa
  unsure (1)..(413): unsure at all n locations
atacatgtatatacaccgcanatttaattcgattatcattatgatgaggcgaaggcaatcagatcagtacaaagcacatacatacattagtatgtctgcagaatcacttgttagctgcaccggcgggcttgttgcctttggcagcggcggatggcttgttgggtttggcggcgctggtaccagcctccttcttctcctggctgctatcgggcttcttctccttgttgctggtatcggcgacgacattatgctgctgcttctccttgctcttggtcttggacttggacttggagtttgaggagagcttgagcttgaggtgcaccccgaggtcgccgccgctgcatgagctgtggagaagcagcgagttgttgatggactgcacgttgctgttgatcaatcgcttcacgcccccc

SEQ ID NO: 69115 - DNA, 359 bp, Oryza sativa
  unsure (1)..(359): unsure at all n locations
agctcgacccgggatcctctaagtcacctgccgcatgccagctctggatgtcttttgtanctggctcatgttggtgccgctgatgacgtgtgtaaactttcaattgggggcctgtggcagatgggccacctggcccacagaaaatatcaacagcgacgcttggtgcagatgaaacgcttactccgacccaacttccaacgaacgcgtgcgtgtgaacagatgaatttttttttcttgcgaggacaacagataaaaaatccgagacggacaatttatttttacctccggcgaaatatttttactgacgaaatatatacgaaaaccttacgtattttttattatatatataggcatatact

SEQ ID NO: 69116 - DNA, 481 bp, Oryza sativa
  unsure (1)..(481): unsure at all n locations
gctggatctttgtgtctaattataagaagtgactaaatatattggatgcttatcttagttggcctacatggtgaagctaaccgtgttatggataagtagtcataaatatgtaacactagctacaaaaagattgttatcagtcattgcaatctagtgcagntttctattctgttattgctgtatgctgaataacattttgacattcacacttcttccttaatattatctatctaatataacacattattatagagttccgaggatgaaaattttgcgattgtctttgctgctatgggagtaaacatggagacagcacaatttttcaagcgtgattntgaggaaaatggttcaatggagagagttaccttatttcttaatctggtatatctgcattacctttgttctttcttttccttcactatgctgctctaaagaatttgcaagatctataacnntactcttgattttggatttttgtcat

SEQ ID NO: 69117 - DNA, 433 bp, Oryza sativa
  unsure (1)..(433): unsure at all n locations
agctttgtttttgcagtcacgcctctctgnttctttctcctttcttacaaaacattagcttagctcatggttatacacgatacggcatcattcattctatataagtgctactccctaagtcgcaaaatataagggctgttatataactgtgacacatcttagtactacgattctggacaagcttctgtctagatttgtagtactagctaggatgcgtcctatctacccccaaaactcttattatttgggacgaagggagtacctgattaacaactaacagtctaacacagtgtgctaagcaaggtttcctcaatagaagccaggagacaaactacacaccgaaagtctcgatgcgagccatgttccgagatcagaaattcagaatgggccatctgcagagcagatagatgtcctcacacgaggacagagagtc

SEQ ID NO: 69118 - DNA, 437 bp, Oryza sativa
cactaaagctggattgcagccctcgcaaattaaagtctatggcctcccagtacgtccatcttttgtcaaacctattcgaccagaggtaaacaatttattcaactatcagcaccttactggcctttggatcttttgtcatctgcacaagttcctgagttttctacatgttcttatcttctttgataggatgaactgcgaagggaagtaggcatggatgaatatctgcctgctgttctactaatgggtggaggggaagggatgggtcctattgaagccactgttatagcacttgtggatgctctatatgaccaagtccttggtgaaaccactggtcaatacttgtgatttgggccgtatatgatctgactaccgattgcagtcatcatatggaagttcaggtcatgtcattcttaaagctatccagattagttcttcaa

SEQ ID NO: 69119 - DNA, 285 bp, Oryza sativa
agctttattttcttttgtgtaccaaccgggactaaagatctatggttagatcccgggtggtggtaccaaccgggacaaaagtcgacattatcatgctagttgcacccggatcggacaatacaatctccttctttactttttaactcatctcctcacaagatcacccaatcacccttaatctgtgcatctacctcctccctttcttttctacatttccttctgcccagtcaccttatatcttgctctgctcctctccacatcactctgtaacggtggggtgcataa

SEQ ID NO: 69120 - DNA, 478 bp, Oryza sativa
tgccgttatcgagctcagcattggcccctctctcccactgccttgatcatcagcctccatctcatcgctcctgccatgtaccttgatctggatctagctagaggtggtagtggtgtggtggatgcgaaggaagaaaggggataatgcagggtgaggcaacctccggtggtaccggtgcttatgagcctttatgagaccacaattgtcgtcatcgtttaacaaaccctatcggcagcagatctgccactcccaagtccactggaggttgaagttgtcagcgggtgcctagagcccaccaacatgcggtgaatccaccgctcctgagtacgcatgaggccgtagcaatcggcagcgcctgccgagccttgtcagcatcggtgatcatgtcgttggctatgattgacgatggccttgcgaagcctgccacctgagaggcgcatcggtgatgggagagggcgtagaggaattatagggagca

SEQ ID NO: 69121 - DNA, 335 bp, Oryza sativa
  unsure (1)..(335): unsure at all n locations
agcttttctatttctagtttgacaaacagaattcaatagataacggttaggtgtcatcaatatttttttttttacatttggctgggttccttgtttccttcacggtcgttgagaccgatggcgaagggtttgatagagtaagaagatatgaaatatgaaagaaacatttcaaactaacacattttgaggaaggaatgcgatgttactcctctttccaattaatcggtntattttcatctttttctaactcaatcgtttgcttgggcgtttcctatccgtcttttaaatcataaagggtttcacaacccaccactggatggtccgttttataaact

SEQ ID NO: 69122 - DNA, 420 bp, Oryza sativa
  unsure (1)..(420): unsure at all n locations
tgtcttcgtaacaatntataatactgctgtccatggcgtcccctgttttgtagtcagagatcttgttctttctttcagtcgtatcactctctttgtatggtgtcaaaaattatttctttaataagatttaattatgctgagcttgtccccttcattactgataagatgcagccattatattttccaactcgctctagttccattagtcacttgttactgctgctaacttagaaataccctgttgcatgtcactttctctgctgttaaaggtctntaaataataatttccaattgatatgctntacaagcttgttttgtcagcattaaatgatttacaaatgcctagtatggtcttcccactataactcttccttgttgatgtgatangtaatgcttggtgttgaccgacttgacatgatc

SEQ ID NO: 69123 - DNA, 422 bp, Oryza sativa
  unsure (1)..(422): unsure at all n locations
agcttccacttatttatacatcacgaaaatcgctttcaacacataataattttcctgactgactgcaagccatgtactgaataagtgcataacctgaaagtccatagtatagaaaaacatgagcagagacttttgtacgcaggcaaaatgttgggtgtcattcagagtcagagtaggcatcgatctctattggtctgaacaactgattgataacgatcggcatacatgtcggcactcagatagcacaattagtgaaagtctagctaacccagaaattaacctgaacgtaactntcactaattagttggntaaatcagtctgaatcccttttcagcactactgtatatncctgaatattaattactccctcttgtaattagtcagatataaacagaaacacttattcattcttagaatctcaa

SEQ ID NO: 69124 - DNA, 407 bp, Oryza sativa
  unsure (1)..(407): unsure at all n locations
agtacagctagttcacacacagcagcataacttgcaaagccttcaacatataacggcaccatagtttgtntggtacgtccaggtaattagctacttaagtatacaacagaactgtattgtacctgtgggcttctggagtatatccaatgaggtaataagatattgatgtccaagataatgccgcaactaaagaggctggaatctttaagataaaagctggtattgcataagcccatccacgatataagtagtgatctctgtgtttgtaaaaaactggaagtctgctaattgacatgaccagctcagggattccattgaccatcagcaggatgagtgcatagaagagtgaacccatgtaatagttggcactaactatatcaaaattcttgtgtgtacggaaaaacact

SEQ ID NO: 69125 - DNA, 336 bp, Oryza sativa
  unsure (1)..(336): unsure at all n locations
agctttggtcttttttactcggagtagaagacaacgatggcagcgacgacgaggctaagaacaatcgtgacaagcgcagccgagttggtcaccttggtgaggagcttcacggaggtaccggtgccggcgccggcgccgccgctacngagatacgcgtagatgaggatgatggaggcgaagaacgtcaccgccgcataagctggaaggagggcgcggacgacggcggcggcgagaggtagcagatcttgatcagcgccgtccatggcgcccggctggatgaagaagatgaggtggaggaggacgctggccgacgcccacacngcgaagcacgcacca

SEQ ID NO: 69126 - DNA, 426 bp, Oryza sativa
  unsure (1)..(426): unsure at all n locations
agcttgacatcaatgacacatggtgacgtctttctatgtgtcccggtgctaaccgtgtgtagaaagtggcaatatggtcactttggctggcgtccactatggaaagtcggaactgcttggttgttattgcaatgagcttgaccattataatgcatttgtatttattggcggcaagcccagcaacaatgacacacgttctttgtaaaagtggagctgatgtgtcactattgccacaagcccggcattatcataatgttgtacattgggctctatcgttactcgttacttagttgtttgtgggttagtggtgaatgttgatgtatgacctgtgcttgtcggccgttctaaccacanaggttatagtttcgactatatctaaagtagtgaaagattaatctttctcataccacaataagcacatcactc

SEQ ID NO: 69127 - DNA, 372 bp, Oryza sativa
  unsure (1)..(372): unsure at all n locations
agaacaatctataactgcgccaaggtgtacactccagattttgaaatgcttaatttaaatgtgaccaactgttttattttccatctcttagtttctaaattggggtgaaattacttaanatcaatcaggtgcatttttctgagcaaacttggaagcacatgtatgaacatcacttgggtaggtcggtgagaaaaaaaaaccaatcagcatgatgtagtaattgatcaaatcatttacttcangttttggctgaanaaccaaggaaatgaaatcagcagcatttttcatcgntgtacaataattattccttggtaatgatttccaagcaatagagcctcacgtccactttatacaacatatgcgtatgggatg

SEQ ID NO: 69128 - DNA, 414 bp, Oryza sativa
agcttgactttattcttgccaacatgacgatgtctttggcttggcgaccactaacccatggtgtcattcattagccttatcgtaatgggacctattccttttcacacctcaaaggagaacattagtctcaacaaatcggttgtcatccttcacttgatgaccaaccagttgcatatgaaagatatggatatgtttgttgagtattcgttaacatcacaagtgtcatatactcgtatgcaagctcaagtgcaaagatccgatataaataatatgtgaacaacatggatctagaacatgcacaataaatgtataggatttgctccccctaaatatatgcatacaaataaatatacaagagatgcaagtgtatgcataattagagaattgaccaatggggtttatcctatacatata

SEQ ID NO: 69129 - DNA, 318 bp, Oryza sativa
agcttctcactcgttttcatcttatccatcaccatggccgtcgaggttaacaccgccggcttcgtctctttctcgctcgtcctcaagccgtcgcggggcaactttcgcgtacataagcagtttgactccgccgatggcggagatgactcgatgccaacgaagtgggaccgacattggagcaccatcccgacatcggaggcagcgacgagcactgccaagacgcaagatgagggaggaaggggaatgagagagaatatgggataggaatggtaaaggatgaataacgaagaagattacatgtggggcctcacatgttag

SEQ ID NO: 69130 - DNA, 440 bp, Oryza sativa
  unsure (1)..(440): unsure at all n locations
cattcattaacctcatcgtagtgggacctattccttttcacatctcaaatggagaacattagtctcaacaaatcggttgtcatccttcacttgatgaccaaccggttgcatatgaaagatatggatatgtttgttgagtattcattaacatcacaagtgtcatatactcgtatgcaagctcaagtgcaaagatccgatataaataataggtgaacaacagggatctagaacatgcacaataaatgtataggatttgctccccctaaatatatgcatacaaataaatatacaagagatggaagaagtatatgcataattagagaatgaccaatggnnggttatcctatacacatagagaaggcatatgtagtaatgatgtanaccaacataaaacacatacattcatgatctccatgttcttaatgtagatgagactaaat

SEQ ID NO: 69131 - DNA, 427 bp, Oryza sativa
  unsure (1)..(427): unsure at all n locations
agctcgaagatgcatttaataanattgggtgccatgtttgaatactacatacatctggattgcttctgaacactgattcgattgaatacattcgcactgtttttttgtcgagattctgtctgtgtcaagatcttttgtgaaagcatgaatgcaatttagtaaccataaatactgtatggatatgattcattggctaaacttgcgagctctgtattttgagttttctatgttttagccctggttatctgcttgccctaatttccattaagaccttnttttacacctgttttacgggagttgtcttgatgtaattgaagaaagggaaaaagaattgagtgacaagctggatactttanacaagaaaaagcatgatcttgtgcagatgctgaagcaggtattgtttggctaactntattctggtatttta

SEQ ID NO: 69132 - DNA, 358 bp, Oryza sativa
  unsure (1)..(358): unsure at all n locations
agcttgcagtgaggttggtcaccttttcaaagtatatgctgtttgcatgcaggcctgaatcaagcctgtctctcacttctgcaaggatagagtgataagacagaggttggcaaaaaacaatgagaatatatttcattcctaagtcaactttatgggaatatataggtcatatgctggctatcctgcagtgtgacattgcctgtgcaaaatattagcaattttgcttattgatctctgttgttaatgtaacaattgaagcatgattttttttttctgaagtgtaatcagaattgaagttacctagaaaaaaatgtggaattacattnntcattcttccacgtcttcacctggaagcatt

SEQ ID NO: 69133 - DNA, 449 bp, Oryza sativa
cacacacagcagcataacttgtcaagccaacatcttataacggcaccatagtttgtttggtacgtccaggtaattagctacttatgtatacaacagaactgtattgtacctgggggcttctggagtatatccaatgaggtaataagatattgatgtccaagataatgccgcaactaaagaggctggaatctttatgataaaagctggtattgcataagcccatccaggatataagtagtgatctctgtgtttgaaaaaactggagtctgctaattgcatgccagctcaggattccattgccatagcaggatgagtgcatataagagtaacccatgtaatagtggcactaactatataaaattcttgtgtgtctgaaaacactgtccagtataattgaagaagtcaagctgaagtaaaatattactgtgtaattctgaagtatgttcaaa

SEQ ID NO: 69134 - DNA, 371 bp, Oryza sativa
  unsure (1)..(371): unsure at all n locations
agcatattctttttctatttttttacaggcnggcaaagagatggtgattgtttaacctcaatgagagatttaagtttcacagcaaaatatttctgataattttacatgccatacaaaccatgcatcaacttatcaacgttgacaaacaatgacaatatttattgctagccgtgccatggctatggcggaattcatgtgggatcggcaactcttcaatgtttatcttattggatgtcaaacctaacaaggacattcttgacaaaggtgatgactgctcaaaattgtattgctcattgaagtcaccattgaggcataatgcaaatgaatggcaagaaacggagacatgcggagtgccccagatgatgccgctt

SEQ ID NO: 69135 - DNA, 424 bp, Oryza sativa
attttcaaggatggctccatatgactcaatgtcttataagccatctcctatcttctttaaggggtgtgtgggaactatggactaaatattactccctgtcgcatcggatgtttggacactaatttagagtatttaacatagactaattacaaagcccatttcataacctcggactaattcgcgtgacgaatctattgagcctaaataatccatgattagcctatgtgatgctacagtaaatatttgctaattatggattaattaggcttaaaaaattcgtctcgcggattaattctcatttgtgaaattagttctttaatgagtctatatttaatactacaaactaggggctacacatccgatgtgacatggaatagaaagttgtagccccatctccgctgttgttcaatctacaagactacta

SEQ ID NO: 69136 - DNA, 431 bp, Oryza sativa
  unsure (1)..(431): unsure at all n locations
agctttacatattattatgaaacatatnctctaaaaatgacattggtaccatgtgtattttactccataactttccaggtaaaactcaatctacagtcaagaaaaaaaattgtatgtgcagaccaagggcttgtttagagtgctctcataaaataaatgctttccgtttcacttaaaaaagagagcggagcatgttatagtattctcataaaatgaactatagagatcctactctataacttcacgcaaaacctagctagctttntagttaaatntaggggttggagtaataacaaacatttgccaagtttggatttcaatatttgtgaagcaactttcgtgttactaattttatacagcgatatatgtcatagcgatatgcatctgaaaatgaattgtctagacacgctttttccccctccgttctttac

SEQ ID NO: 69137 - DNA, 406 bp, Oryza sativa
  unsure (1)..(406): unsure at all n locations
ctcaccgtgagaccgcgctggcccccctttgccgggtcggccagggaccctgggtgagactctaagctcccaatctgtggaaggttcgcgagacaggaaccatacaagacgccggcgatgtatacaaagtcgggccgctgagaagcgtaataccctactcctgtggtttggtggattcgtgtatgaaggaactacaaagtatgagccagcctctccctcgttctgggttcccaatctggaaaagtcccgtcccctctcatagtgggcaaggtcctcctgttatatctcaaggggataccacatgcnccatcttctcctccaatttgactgttctttataatggacggagatctgcactcgcatctgccgaatgatcttctgacgggacggcccatacctacctcca

SEQ ID NO: 69138 - DNA, 323 bp, Oryza sativa
agcttaagaactattttaccaacctcttatctttcatgctaacaagtctcttaatgttcgcacaagaaccggatgggacttttacaccccgcaggcattcccacatactcgttttttctgtagcactaagagtgtaacatgccggaggtaagtagtagcagccatttcctctgtcttgaggatgcagctctttcctgatgtccatgtcttccaagatctttccgtgctcgcaaagtgtccttcatcttgccaggtgtgttcaacaataccccgagcacgccttcacacacgttcttctccacgtgcattacattgatcgcatg

SEQ ID NO: 69139 - DNA, 395 bp, Oryza sativa
  unsure (1)..(395): unsure at all n locations
tatatgaaacggagaaacggaggaagtatgatcttatgaaaacactttgctaaacgatgaatttttttcaacggcttttgctagaaattcggctacacaatttgtgttggatttcctcgtcactggtcattctggggagtagtttataaatggcaagaaagtctgttctacaaggaacagatctggaattgcctggttgtactacttctctaagctcattgcgagattattgccaggaaggcctgacgtgcaagtatatatatgcagttnttacctttcttttaggctttagatgtatacttaaacttctattaatatataacgcccatcgatattaatctaacagctatcaatctgttggcccgtcgaatcaagtgtaatacaaacacaaatac

SEQ ID NO: 69140 - DNA, 274 bp, Oryza sativa
  unsure (1)..(274): unsure at all n locations
atgcaagctttttattttattntctattgaaattcaatgatgtgccactttaggtacactcatcatatttacaagcagccggtatacttgatcatattattaggattacaccgatatgctacaattaatatagtcgttggtgatacattataaaaccactcgtggtagaaattattcctgactatatgttggtggtcaataacaatatcgggctacactattaggctcattcaatactgattattttagcctcacagctcaatggtaaagactc

SEQ ID NO: 69141 - DNA, 299 bp, Oryza sativa
tcaagaacttcatgagtggaacactgctatgccataatgtaactagatggcgtattttaagtgacaatgtaaaagaatatggtaatatatatattgtgacaacacttttcacttatgcagtatatgaagatttccaagaccatatggttgagattactaataatcctcctgcatcacattctagtaaataattatagaagaatgtattgtgcaaattatcattggatcacaatttaaaatgctctacctaactgtgcatgcggaagttttttattagaagcggcacttcctatttcaca

SEQ ID NO: 69142 - DNA, 434 bp, Oryza sativa
  unsure (1)..(434): unsure at all n locations
agcttgtctatcttcttanggtgcgcatcacagtacttcatgtgttctttaagtttaagcctgataaaagaaatcctttataactagcttattcagattgtaattaagggcactcacaccatcatatagccatataaattatgataactcagtaaaattttgcatagaggccatcaagcaaatttttaaaggaaaatacccatattctcgcttgaggctattcgcggtagcattctttgcttttcctccactatatttcttggaaaaatcttcctttactctctcaatgaagccaactggaagttgccgaccagcagactcggtagcaacaacacagtatgctgaaaaccaaatgcattgtcaaatgggaactancaaaattgaaacaattctatagcagtaactctgctgggtcaatgagtttatctatacta

SEQ ID NO: 69143 - DNA, 341 bp, Oryza sativa
tagcgtgcgagcgggccgcggtctcgtttaattcaatttcctacgttagacattgacaagtatactactgtagtagtgccatttcaagggattttgagatacgatcaaccaacatattaattaaagccaggttcaattcgtacgtacagtacgctgttcgttagctaactacattctcatcaagtagtttaaaatagtatcatcatgaactcgattggttgacctccttgcctgcgtcagctcccgtacgttcgacccgtacttcccggcttgcatgtaaatatgtacttaattaactaactacacgttctggctgatcgagacgatttcaatggatcgat

SEQ ID NO: 69144 - DNA, 407 bp, Oryza sativa
agcttgatattgtgcacacaaacacacagcaaattgtatgtctggcctataagcagttagatacaacaaagatccaatcatacttctattctccttttgatcaacagcttcaccatcttcatcaggatccaacacaggtgtagaaccaattggtgttgaaattggcttgcaattcttcatcttgaaccgtctcaaaagatccttcgtatactttgtttgatgcacaaaagtaccttgaggtgtttgcttaatttgccatcccaaaatgtacgataactcaaccatcatgctcatctcaaattccctgggcatagtttcagcaaaatctacaaccaacgcgtgagtcgaacaaccaaagataatatcattcacataaatctgaacgaacagttgattatcaccatgct

SEQ ID NO: 69145 - DNA, 278 bp, Oryza sativa
tcaacacactgccaacaacacgcaaatatgttgctgatgtagaaatagcaaccgcctgcaataaatacaaacagatattcctgcaattttaaggaagaaagatagctatattatatcaaaattgcgcctttttaacatatgcaaaaaatgaacatgacatgaataactagcatttattaagttactaatttattaatgaatcgaatttgaaatggagtaaacatgggaattcaagacttcaatgtcctaagaaaaagagacacacctctgcaagtaga

SEQ ID NO: 69146 - DNA, 183 bp, Oryza sativa
  unsure (1)..(183): unsure at all n locations
cccgacnggacccccagggacgagctgcaaccgcatgtcgcatgattttcccacgaccccaagcgacatgaggaactgccaggtaaaccaaaagcctgatcatgagctaacagcaaccgatatggcatctatacagcgtcacacaatcagccacgaagatgctgaacagaagcgcaccagacc

SEQ ID NO: 69147 - DNA, 429 bp, Oryza sativa
  unsure (1)..(429): unsure at all n locations
cacaatctcatagccagacttggcatctgtctctgtctctgagatcacttccattccttccccagttccaactaccttgactttacctccttcgtacctatggaccaagaccttaaatttcaggtgattaatgatgtagacctcattgcttccttccggggtataaccaactggatagcctgtccactgaatggtcactccattctgttcagtaaatctcctcacaggaagattgtcgagaatcatgttcacctggtagaggtctcggcttcgctgcttgaggagcttcacatcaacctcgtcaagtgggtttgtggtacacagatacagtgattcattgacattcacacgaaaccggtatggngaattgcaatctggcacccatangagctccctagatctcacactcttcttatccaccttgggatg

SEQ ID NO: 69148 - DNA, 261 bp, Oryza sativa
agcgtccattttattcttctacccacacacacatctatccagtgagcgcccagtcatccatctaatcccacacagagtcataggagcatagcgaggttgtgcaaagctcctttccccgctccaaaaaggcctttatttatcgagatgcaggccagacagcccccactgtcctagctgaaaggcgaattagacacgaaccttgaaacgacttaacaactctagcgctccttgcctcctgctggccagataaccccaaagaaa

SEQ ID NO: 69149 - DNA, 179 bp, Oryza sativa
acggccgctaataagggtagaacccacagggggctgaagggggcacgtacagaacaaaaagccccccttgccaacaaaaaccaatccatgcgccaaaaacaagaaatacagccaaaacacaccccgcacatgtgaaaactaaccaatagaaagacctggaaccctccacagaaaaaaac

SEQ ID NO: 69150 - DNA, 407 bp, Oryza sativa
  unsure (1)..(407): unsure at all n locations
gaagaggagaggtttgaacccangtcgtctagctccataaactagctcgaaaaattgtggttaacatcatacatcatacaccccgctaccaaaactgttcgtgggtaaggaacttcaacatgtattaaccctgcgcatcatgaattcatgatcctatccatgctctctttatgttcactattcacacaattggtaacaacaaatctgtcatcccagatctcacaacaattccctcgcctttaaacttcagcaacaaacgtatagtcgaaacacatacattacaacatatttttagactgaccactggatgatcatccatccctgtgttttgtggctttggtcatgcaggcaagaagccctcctctcaacgtgacctgccaactanaccgaatggtgtctgatgctat

SEQ ID NO: 69151 - DNA, 299 bp, Oryza sativa
gagcctatattttgttagaataagttcacccaaaggccctcaacttgtcattaagataaaaaaagaactcgaacccgtaaaccagatatgtgggggcccttaaataacaaaaccggacacccaagatccttctggggttttgaccccgcgtttggtctacctggtggcttagtcaatgtgggacccacgttggccccacatgtcaacatgccacgtcattactccctctctctctttcccctcctctgcctttcttccatctgtctatctctatctctctctcttttcttcagcaagct

SEQ ID NO: 69152 - DNA, 349 bp, Oryza sativa
  unsure (1)..(349): unsure at all n locations
caatcacagacatagctcacaaagagggtctgaggaatgctgtacttggccattccaggctctggtggctcaatagcttaagggagaatgtattgatctggataatgacaatggatccaaaagccggcttgaaatagtatcctccctaacttggctagctgctggctatgtgagaccaaataccaagaaaggtggcagcatggatcctactgattatgtgaaagttaaatgtttagcatcatgggatccaagtgatangtatgttcttagctctgatgtttgacagaggtttacatgtttgtactttccatcatatgaaactgatgggtgttcctcttatgcagcaatc

SEQ ID NO: 69153 - DNA, 240 bp, Oryza sativa
gtgcatggatgcggagaccacatttatactgggtcaagcccttttgacgagagggtatactctactcttatttgaacgattgaatccgccgagtgtagtattgatatgaagatctggctgtgaatatgcccactagatgacctcctgcccaacctatataggatgggggtgggaatacaagatagaaaccttagacaatacggtctcggtttcctaaatctactttacaatattatttaa

SEQ ID NO: 69154 - DNA, 320 bp, Oryza sativa
aaagagagaaaagaaggggagggggaaaaagtgagaaaaaaaaaagggaagaagaaaaagggaggaaaagaaggaagaaaaagggggaaaagagaaagggagaaaagaagggaaaaaaaagaaaaaaggggaagaaaggggagagagagggaggagaaagaggagaaaatgagggaggaaggagaaggggaaaaaaggggggagaaaaaaaggagaaagaaaggggggagaaaaaggagagagaaaaggagaggaaaagaagagagagaaaagggggagaaaaaaggggaggagaaaaatggaggaggaaaaaagggaag

SEQ ID NO: 69155 - DNA, 423 bp, Oryza sativa
agcttgatctttatgttaaaaaaatgtagccatgccctcttctaatcaataaaagaaggatttttgggagaagaaagtaagcaataaggagaagcaatttctttattttttctcatgtaccactttcatcatataccacacacacattgcacgatcttgaacttgaagttggttagtcatctgctttaatctaagtttttgacttagtaataaatgtgaatgcaagtgttctatgtttgatccctaccgagctccacatatcaaaccttagagtagaaatcaaaaaagggcaaaatggtgaggaatccaaaattgatacacttggagagactgtgaatcatatgatgaacttggctttctttttcaaaatcatttgaaaacttccggaataagagtcgaataaatatcgcgtgattagtgctc

SEQ ID NO: 69156 - DNA, 433 bp, Oryza sativa
agctttctgtcttttaatatggaaaagggggggtcaaaaaagaacagctcagtgaagtgcaacagttgaataagaaagatacggtatcactttaaaatgtcagtagggaaataattcaaaattttcaactgttcaagtacggactaccttagagcaagttttatagtacttgctcttatttacactccagatgataccagaaatgttcatttaaataatatcaaggtagccaattcggatctcttgtgagagatatagcagataccacggtagtagactagtagtactatagttgtgttgtcacagtactttattaattaatctcccatataattcaacgcgaaaacaaaggaggggaaaagtagtaaggcataactctttttgtcacttacttatacggagtatatagtcggggtcagaatgatttgatctc

SEQ ID NO: 69157 - DNA, 428 bp, Oryza sativa
  unsure (1)..(428): unsure at all n locations
agcttgttgttcatccgtatttgtgtttgaacgtgaagatcctttcatcaagcttgctcttgatgttcttggtgcctgtagtatttgtatcagtggggagtattgcaaatagatatcagttagaaaatataatgtatttgctactcgacaaatagaagtaaatccactaaattagtaggtaccattctatagtggtaattttactgaaaggtaacacattttctagtgtaaaatttgatacctacaagtacatagtacctcaaggtaaaaaaaaaaaagtttaatgtaaaattttagtacatatagttaccgtaaaatntctcattctctagactaagaaaccacaggtacctgaatgcacaaaccaagcaaaggagagatctctttcttcanattgtcccggatcattccatatatctttntcacat

SEQ ID NO: 69158 - DNA, 378 bp, Oryza sativa
agctttctgtttgtcttatgcacctctgaaggctggctgttactgattataatgtgccaatacctttctcacttacaatgttccctccactagcggtatatcttaaaggtgggtagatgacccggcgggtgatcacatgatccaagaactcaatccctcttgtgatgtgctcaatctctaccatcgaattctcatgcctcaaaccaaacgtgctctcgcagaactccatcagttgtctccttatctcaactgtcgactcccttggtccactgatcccaataagaacatgggagccacatctaaggaatccatctccttgactctccttcccactgagggcaaactcaggcaggcacgatatggatcctttatcacccc

SEQ ID NO: 69159 - DNA, 431 bp, Oryza sativa
  unsure (1)..(431): unsure at all n locations
agcttcctgacactatcaatgtatattctaccgaatccgtcatgtccccaggaagtcccatatgaatttagatagatcagataacattcaccgtcccgaatcccaaaaccaacaacaacgacacaatgagaacagggattaccttttttattcaattcatattggggatcttcttctggaattntgtagatttgatgaggtagcaacctgaagtaaccagttgttacccggaaactagcaatgagcacctttccatccattatatggctctcaataactttctttatcttcgtcagaaatatgtgctccttcattctcatcntttntctgaacctnctttttttcttctttcctatacacttcttgtcaacaatgcttacttcttccttatcacgttccctcatcgcaatctcaagattgagctcttcgta

SEQ ID NO: 69160 - DNA, 382 bp, Oryza sativa
atatgagaaccacatgtcagtgagcaagtactggatattccatggagtgccccattaataatactatatgggacatattctttaaaatatgactacatggagtatagttttagataatgactatatggagtatatgctagtattgcgatagtattaatctgaactttgaacttgtccaatgcttcccatcaaaacttaacgagagtgatctaagcgcctaactaagtttctatatatttgtccgatgagtataaggactcattctaagagtatactccctttgtttatattataaatcatttaactctattcttagtcaaagctcttattgtttgatcaagttatagaaaaaatagtactccttcgtttataatataagcat

SEQ ID NO: 69161 - DNA, 390 bp, Oryza sativa
  unsure (1)..(390): unsure at all n locations
agcttgatgtttttctctcacgcgagtcgcgagagacttgtattngtaagcgtgttgcatcgaatcgatgggcctgatcctacccgttcatctcctgaggacgcatcacagccgtacaaacatttttcgtgcacccatccaacggtccaggtcggggcagaatcccaatcctgatggtaagatagtcttgtaatctctttttttttgagaggtgatagtcttgtaattctagattatattctgcttaaaaaaacactaataatgttcagaatttcaaaaaaaaaaataaagaagaaataaggttgcgttgggcaaatcccaatcctgatagtaagatagtctggtaattctaaatcatattcttattacaaaaacactaataatgttctg

SEQ ID NO: 69162 - DNA, 359 bp, Oryza sativa
tcgacccgggatcctttatatctacctgcggcatgcaagctaggcttgtcttttttggaatgcctccagaaacgcagagaccatacaggtttgtactggaaccaactcctatcgtgcattctgagggctgcggggagtttatcttcccgaaactgtcttgcgtcattgcgttccccgcctcctgatttctcgcaatacaagtacggctatgatggtgtcacgataccgacgaaagaaagatagaccttagtcggcggacatatgcatacattgatgacgacgcttgatggaatgagttggcccaatagcataacatatttgagttccttcctgcagtctgccaacaaattgcttcaatc

SEQ ID NO: 69163 - DNA, 387 bp, Oryza sativa
  unsure (1)..(387): unsure at all n locations
agcttgactagagcttgttcgagcagcggctgcagctctgggcgctccgcatcccccgcgagctcgccttcgccgtcacccgcctgctccgctccgggtaactcctctctcgctggtcgacgaatccacgatccaatccattcaagaaacggagagcatagccctaggattggttgatgctattagtaggagcgaggggtagtgctgagagctgagctgagcttgtcttcccccctgtttctaggtacctactggacaagccgcgggtgaagccagtcgtggaggatcccgagagcgacaagaaccggctcgtcgtgttgtcggagaagatccagaaccccggtatgcttntccctctgctctaaaatttgcaccanatcgctcgac

SEQ ID NO: 69164 - DNA, 254 bp, Oryza sativa
agaaaggagaggagagagtttttggaagaggaggaggggggggaaagaggaaggaaaaagggggaaaggaaggaaagagagaaagaagagggaaagaaaaggagaagggggaaggaaggggggaggaagggagaaaaggagggaaagaaaaaaaagggggaaaagggcgaaagaggaggaaaaggggaaagaaggggaaaacggggaacaagggaaaagagaggaagaggggggaaaaagggaaaagggggaaa

SEQ ID NO: 69165 - DNA, 406 bp, Oryza sativa
  unsure (1)..(406): unsure at all n locations
agcttcacaatgcatttgtgactgtaaacaatcgtgttctcttctctgacaaaaggttacaggtaataagacacgtataaaattgtaaaaggacggcacgaaagaataatttgcatatgccaaatgagcgtagctctactcatcatgtttcttttcctgaaaccatcccacccgacatctacgctaggggcctgttcactttcatgcccgacatctacactatgtcaaaattttagtatgatttcttatatagttgtcaaaaattagctacaaaataaatgtagcaactttnttggcaactctaccaaaatttgataagggttaaaatagcatcaaaatgaacaggccctangtgtatcattgtcactcctacttataatcggtgtntaaataacgagataagata

SEQ ID NO: 69166 - DNA, 433 bp, Oryza sativa
  unsure (1)..(433): unsure at all n locations
agcttaactcttggtgcaatggtgtgcaagattgtatcaactatcaagtgaaaggtttcaaagattttcgtgatgaattatgcacggttgcggtgaagttctgagatcattcttcctgcagttttgccatgtcgcagacaatagatcaagctgagattgtaaagctgctgatcgaggcaataggtacgccccttatcatcacttgacaaatcaaactctgattcttcttcttcagacatgttcctgatctgcaccgctcttctcacgtttggcatgggaatgtgcatcatgttctacggctcccggagcattcagaaaccaagaatgcaagtcgataacttgcacctgngatccttcaacctaaaggtaactgatccttgcagatatatattcgtatacacagtaacaaagatcaccattagccatgtgttta

SEQ ID NO: 69167 - DNA, 376 bp, Oryza sativa
  unsure (1)..(376): unsure at all n locations
agcttcatacttggtatctatgaanaatgatatgtgattacattctcatttaattgctccaactagacttcgaactgggaaaactagcaaaaacgtacacagacaaacttaatatgataacaaaagaaatggagagaatttacttgctttgacaagtgtaaatagctagggtaccaaatgtttattatatatatcgttgacgtcttaccgcttggaatttacaatttattgatttttataattgtgcaaattttacgtggatttgggacgtacatacttgggatgagcggcaagtcggccaacgaggggcacatctgcagtcatgggaggaacgtggaggagcccaacatattgcgggtcattgcctttctctttc

SEQ ID NO: 69168 - DNA, 425 bp, Oryza sativa
  unsure (1)..(425): unsure at all n locations
agcttgaatataagtggaagtttggaaaaaaagttgaaaatttatgtatatagaaaagtttttaatgtgatagaaagttgggaataagagggaaactaaacacggtccatgtgtgtgtaggaaagttttgacgtgatggagtttaaagaaaaattttagatctaaccacggtgtaactcctgcaaagccatcgataagcagaggtaatcgagtactggtacggngtcttgtcatttgctgcttaccgggacgcgagcagagggaggcangcgctgcangtacggcgagctcangacctgacacgaaaagcaaccggtggcaatgagtcccggacacagtggtggtagtacagtactactataaacagcttattacaaaggacaaagccttctttgtgtaatgtaccctactccagtactggcttt

SEQ ID NO: 69169 - DNA, 360 bp, Oryza sativa
  unsure (1)..(360): unsure at all n locations
cttcaccactcgtcgttttgttcttttgccgngatcccgacgtcgctgtgtcccaatcatgttcaaccctgacggcactttgttttgaccgacgacaggttggcatctgcgcggttaagtcattagaccgctacgtcggggaaatgtcaattcagaatatatatttcgatcagattaagttattaccgcctgcttgataggaatataatcggggtcatcctcaggtctttcatactgcaatcgcgctaggtctagctcaaacgggtcgctcggtgtgcgccacaattcctcgctcgacgccggtacctttccggaatattctttgtgtggggattgttagtgacgtcggttctgtgtccg

SEQ ID NO: 69170 - DNA, 366 bp, Oryza sativa
  unsure (1)..(366): unsure at all n locations
agcctgatccttaaaacttgttatagggtgggggcaaagaatgatctgtgcccggattcttgaactacctccaaaaaacctggaattntcaccaaaaagtttaaaaccgaattgaggtggtttgcttcttttctcttttccacaaggaaaataggtgccgtgtctgaacatgtagaagagagggggaaaaggtgtgcttctccaaacatgaaaatccaatcagttgtgataaacgctcggtcgatttttgtttgtgttggaattgtcccatcttccgcccacgtgaagcgacgaccaggaaggtgcagctctttcacttggattttatccaagagaccactaaaacgttgtatcatccttctattg

SEQ ID NO: 69171 - DNA, 432 bp, Oryza sativa
  unsure (1)..(432): unsure at all n locations
agcttctaagtttttattgaacttaaaacattcaatattctccgcctcggtgtggtgtctcttctctggcggcgatagagtaaggggagagaaataattatggaaataaaaagaaaaccgtataatacatagaacgtggcctatgtattctagtggattttgatcttaacctacatgtaagttagatattaccggtaaacgggcaaagcgggcatggttaatgattacccatacccatgtccatttacccatcatgcataagttntgacccaataagatacccatggttataaaatggagaacaaacccaactctaatatggtttttatccacggataaacggacaaacagggcacaattgcatccctactcatgcatgatgttcaacgaaggtcacatgacagatccaagagcatgcatattttcatactg

SEQ ID NO: 69172 - DNA, 423 bp, Oryza sativa
agctattggttatgtattttatccgacgtttgacaacagcgagaggaactgcacgttaccttgcacctgaatggattaatggtgttcctataacacccaaagtcgagggttataagtatgggatgggcttgctacaaataatatcttgaagaaggaactcatatacctcatctccttgtgttggtgaccatgatgattaatatccaatgcttgtggtccgtaagcttcttgatggagaaatatgtgggttgcttgatcataaaatacatggcgacatcgacatataagatgacgaacaagttgctatgttgcgtgttggtgcattcacgataatgagataaatgaccaacaatggatgaagtggtcatattcttcaaggctagttaaattgacatacacgatgcgaagctcctgagcaattgt

SEQ ID NO: 69173 - DNA, 417 bp, Oryza sativa
  unsure (1)..(417): unsure at all n locations
agctttacttgtccacgcctccactttcgcgaatgccctgccttctctacgccttttgaagattctcacggggaggcagttccccattgtaaactctgttcgcccgcccaaccgcttgacgcgttaacagctgactatgctcgaccaccgaaacatcgacgatcattctgcgggcttctgcttctgtctggtccagggacaacactgtataagtagagtgtgaagctatgtcaaaagtctaataaggcgaaataacaaagcacaacagtatatatcaaaagaacagtcttactgttcgccctcttatgaagtatcatgttcggcaaaccgtcgacctcttcgcccngatcaaccgcgacttgtcatgactgtgagaggggaataatgcgatacatacaaaattnctccaccaagtca

SEQ ID NO: 69174 - DNA, 279 bp, Oryza sativa
cttgtgggcagctacttgactggtgctgatgaatgtgtagtatgatgaatgagatcccatgatgaatgtggattttggatgtttctgtgattgtgaatttgtcctgtatttttttgtgattgcgatgaagcttgtcatgtttatgatctaaatctttatattcgaaatgtattagtggagtggaacatacttagggacacgaactgtgatgaccgaacacacagcatgctccgtttttttaattcacacttttgatgggtcaccgaagcttttattttg

SEQ ID NO: 69175 - DNA, 260 bp, Oryza sativa
ctacggttccccgcaatctccggccttagttgggtgtgcagtactacctaccagatcctatgtgatggcagcgcagctagcatagaccatccgtataccatattatgtaaacgcatgcgatcgcttgcttagatacgacccgaacacactacgaaatcatcatgttctataccgacgacttcccgagcataccagcttcggtcggcatggtggcatctcgcacaaccaccgaagttctatacgacgaaccggagctagta

SEQ ID NO: 69176 - DNA, 431 bp, Oryza sativa
agcttgaattacttatatatatttaaaaagatagactttatggtgcaagccaaggtgatcattgatagacatatgtatctcagtggccactatcgttttggaactgaaaagtgcggcgctgttcttaagcctcagcgtgaatgaaggataattacccaagttaatcacccgaataattaatgaccctcaatgttcttgcttttttttacgtttttcacatgagacatgttcttcatccccaattccccatcaccctagtattatcagagccattagcaaattaattggattggaatcgtaatctaaacatggtgtacacgggaacagcgtcgtgcgcccgtcagcccgtggaaaagaaaaatctcaacttttttccattgaaaatagagaggtaataaaggataagaacaaagagggaaaaagaacaatga

SEQ ID NO: 69177 - DNA, 318 bp, Oryza sativa
agcgtaattttatagatctcttttctattccacaagcatttcttacaatttcatctaaatccaaaactatattacactgttttcaaagacatttgtcacaagacacggagactaccaggaaggccaacgccagtccatcgactggaaaaccttatccgccagcggcgccatcgacttcgccaggccatctatctctgtagggagttcttcgagaacgagaaaacccttcgtggaaaaactcgaggtgcaactgctgacgatgatctcgtatacaggccaacacgtgcccgccagcatatcggcttgagtgacgacact

SEQ ID NO: 69178 - DNA, 284 bp, Oryza sativa
  unsure (1)..(284): unsure at all n locations
cataagtccacttgccactattgtgagagtcagaaacatgacacaatagaatcggagaaacaacaagcaaatcaaagggatccaccgcctgcgaagcgggaaaaaataacatgattacatgaaaagtgagaaacactgaatgatcagaatagcacagaaacattgcaccactctaaggtgntttagcatctcgtgggagacaaaacaaacttatttgtcaaagattttcaaagactgagaaatagatcatgaggaagcaatcgagcataacatacttgcaccaa

SEQ ID NO: 69179 - DNA, 379 bp, Oryza sativa
cagctttttctctaccaatcctggatataaatattcatcagcaccacaatattccacagcactaaatctctccccgccaccccgtacctctgataatggtctaaaatcattgaagccacttgcgacgacgttgctcaattaagaaaatttggcgtgaataatattcaacaccagtgcagcatcatcattacatacttacagccgccgactaccgctttcgatatattgactcaattttccagcctggttaaaaatagcgaccagctcagtcgcaaatatagtgactaccctaactaagcaacaataaggaatacactatgactgttcaacaagtaaaaatccgcatgtcgatattgctgaagataatgcattcttccct

SEQ ID NO: 69180 - DNA, 468 bp, Oryza sativa
  unsure (1)..(468): unsure at all n locations
cgagcgaanatgtgcagntattcagtcgttttcttatcgctcaccattattcttntagacattcatcctatgaaactgccgcaaagttggtggtgggaactgaagttgcgtacagaagggttcaataattgagtcaaaataggaacgcggccgtcagattaaagccgcgggacaaagtccataatttccaagagttgttgaatatcgcagcttttttgaaagcctctgtatcatactaacaagtaaaaaaggtttaaataccacaattaacctgtatttttgataagtcttaccattgtacgatttacacagattctgctccttcttgttgatagtggaaagggtgcattgtgcacttgcgtaaacatttatgacgcgtngatgtccatggttcacatttccttgttaggggatcgacttatttgcggcgaggcatcattcgtaacagagtattatctttctgaatgt

SEQ ID NO: 69181 - DNA, 426 bp, Oryza sativa
agcctgcctttattaagtgcaaatgaaattggatcacaactcaacaattttgaataatttttcaagcttaatgcgtggagtagctttttttttttgcccttctaattatatatgtcagaataatacgaggacgtactaatcaattctttctctcagattttttttaattattttttgggatcttagtatggtccagtcaactgtatgttggactctatgtttgtgtaatggttcaatggaagtatatattcatgtttggaagaagaaaagttcagtctcagataacacaatacattaatacaacatcaattgcggttgaaaagggtataaatcatgtgacagttcctttattcctgtgagtcgtctgtaaccgctcaagaaccattaaagatagcatgatctctgtccggtcacacattatatacc

SEQ ID NO: 69182 - DNA, 433 bp, Oryza sativa
tataagataagtgcccaattgtctctcctactattagagggttatgaatcgcgcattacccatattatgtgatattatctaaaagactcagaagttattccattatatgaaaccaatttatcagcgaatacgatagcattgatatattatgtgtcttgatagaaaacataaatacatttgcaacctgatgtgtgtcttgaatgtcgatttcaagatttataccatccttcgtaacctatctggctatcttatgtatctctattgtctcaaagtgaacagaataaagttggtcgattaaattctaagttattgaaaaagcaactttattatgtagatatgacaaacaatcaactaacaaatggtttttcttattgactgagtaggacacacactgaatatgtcatgaaagcagcatatgaagtacacttgatag

SEQ ID NO: 69183 - DNA, 424 bp, Oryza sativa
  unsure (1)..(424): unsure at all n locations
agcttctaatagccctggtcggaagctacagaaccagatagatatctgcgatcacggaggcaagacaacattctggcacaagatgagatctgatagagttttcccgtgccgatcaatccttctcgaagaattcacaccgccatcgaggatattcctcacgacaacgttcagggagctgattcctgngacatcataaatctcaatacttacattctcgagcggatcataccgaacctgatttgctcgatcagcgggaaacaaggaggaatcaagaaggggtgaaacagcattcttgacccaatctcgagtgatcactgccctcagccgaccaatgtcatcagggaaatgcggaatgatggagaaattcaaatcatttcctttatcaccggccctgctgtgagctacgtggtatagaggaatcttt

SEQ ID NO: 69184 - DNA, 441 bp, Oryza sativa
  unsure (1)..(441): unsure at all n locations
agcataccacanagtatgatattcttctgagaatcaattgactctatgaacggtgccatctcccaccctgtgttaataaaaatgccaaataacttacatgtgcatagcataacacatgaaaaatactatgcatatcattggagtgatatatataatgaataaaagagcatcaaagaaatttacattgtaaaaaggataaggaaaatatggatttggagcacaaagtgaggttgagtgtgtttgctcctcagctagacactacctgttattctagctggtgtgtggtgctgccaagcaagtcccacagaagctcacgaaaggattcactcccttgttactctcgttgcatgggagctttggaagcacagatgtgatcttgtgttaacaagactactagtgttgatcttgttgagaggtctgtagcccatgaaggctctcttt

SEQ ID NO: 69185 - DNA, 437 bp, Oryza sativa
  unsure (1)..(437): unsure at all n locations
agctttaactgtttttttctgcatgaaagaaataaactatactatataaacttagtggtaggggtttattactaacaatttccactaactttggtaaatatatgtatgtaggtaatttaaggagaaaatacacccaccatgcgatgaaaatgaatctccggccaatcacacatgagcacaangattgaagggcccatctgatagtcaaaacctacttaaagtggggccaaaccgtcctcaaccgggtccacctgtaaagcattggagaaaggctgtggagagaggtatggcccacaagtttggccgaactgccactggccttcctcatctccacctcacacatgtatgctcctgatgctctcccaatgaatggtgtggaggagtaaacgccatcctcaaccgtcatagatcttgactcacttggaatatgcacaaca

SEQ ID NO: 69186 - DNA, 452 bp, Oryza sativa
  unsure (1)..(452): unsure at all n locations
tcagctggtgaattagttcccnatagattgttcaagggccttcttattctttccatgatcctaggaaacatttagataggtgtgcatgaattatcatcatggtcaatcataaaacattttgtattgttttttaaagaacaacttatgtcctacttgcaacggtaaaattcacggtggtagaaatggcagatgactttttcactgccagtgacctctcctangaagtccccttcagttatctccctatattcaccatgaccttgcctttgtagcacttcacgcttctcgacctctttctgttatgcacaggcaaatgaataacttatagtgaagaagtcacaagcttcatgatggcaatatgcagatactaccttgagagcagcaattctctccgcatgcaacttctcaagctcttggtcctatagtgtagttccacagcatgatagataaaa

SEQ ID NO: 69187 - DNA, 426 bp, Oryza sativa
agcttatgatttaggagcaggtgagataaagttcagcacaataattgtaaaaaaaaaatatattggcacatatgcagaacatgagagcttaaaagacagcccattgatactctcttatcctcaagatacctgagcttttgcactgaactgggagctcaatttgtcttgattattaaattgatcttgctttccacttgaaatgtatgattcttttgcttcacgaaatttgtcccaagatttctcttcaccaccaatagcaggaagttgcacaggttgttcaatccgtgaacgccaatcacggttgtctgtctcagcgtagcggctatatgactgagtttgcacctgccagatatgatataacatcaaacaggtagtaatcagtaaacgtgaaactgcaccagtcttactgagcagatacacgttgga

SEQ ID NO: 69188 - DNA, 446 bp, Oryza sativa
ctacacagaataatttcgatggctgatcactgactgctggctgtctggaagctatcatcaagacttgcaaccttctcttaatatgtgtatatgtgatactacaattggtggcagtgttcacctctttcaaagcacctgattgcatctagagaacaccataaaaacacaaccttgtgtgtcatttccttttgtaagataggcttctctggtggagttgaatttgagtcagagtggcatatacggtgaaggctgtgaaaactctcaaggtaattgtaatgccaactgctgacaaactggaataatgccaacatacatgttgtaagtaaatgcacgtgagtagtaaatatgggggcattgaacgatgtttgcataaaagctggaaggatgttttggagctttgatgttcatatataattatcatggaaccttctgtcattgtatacact

SEQ ID NO: 69189 - DNA, 426 bp, Oryza sativa
  unsure (1)..(426): unsure at all n locations
agctttgcaagtgggttgtattttcccgttcccagaatctaatagaaactgaactctaattgatgttcctcatcgcgtgagagaactgagttagactctcatgtctttggtatatttctggctttgtgaactattctgggggtccaggctatgcttttatgctcttgtaaagtcatctgggaggggtattaacctcttctattgaaaaatgaggtttacatcttggtccttttgtgcacagaaagctccatctgatctgatatggggatacagcatcttggaactcctcagctaagagagaactctaattgaatcacatccatccagatccaggtatgtctccaatntatagtaattttattggttgcttcanggttcacacctcattgtacagtccgtacacatatagttatctaagaaacgtgt

SEQ ID NO: 69190 - DNA, 451 bp, Oryza sativa
  unsure (1)..(451): unsure at all n locations
agaagacatatcatcangcatcttcttgagaaaccaaattctcttttatccacaccaaaattttcaagcagactacgtatgtcctaataaaaagaactaataaagtggccaagctagcatatgttgatagataaaatttatgaattacatcgtcagtacttataagtcatcaacacaatgcagatattcaaaattccaaaaacacatctttgcttgaaattatcagaggagaaataacgagcattcaaatccatgcttataacttgcagaatatacactggattcaacaaatgcactttttaaggaaatgaagccattgttccattgtgcttagctccaaaattgatcattggtatatataaaggggatattcacttaatatcaagcagtggtaaaatattgcttgttctatatgtgaggtcccagatgtcatcgaatatatgttactaaa

SEQ ID NO: 69191 - DNA, 422 bp, Oryza sativa
tagcttctgttgctcgttgacctctctcatccaactctcgagaaaaccacgcctcatatgcatcaagcaacaacatcacgggtacgggaagcgtaaaacacgaaaaatgaggaccagaccgcggtaaacaggaaccaaccaagacgcatggtgctgctcgattcatcgaagacatgaacgagagaaaccgcgacaccaaacactccaagcaaacaaacaccaccaccaatggagcaagatcgaagaagagtagggagaagaatctcacggcgctttcggagaagaagtatggtttagggatggaggcggcggatgaaaccacagaagagaggaggatgaagtgggagagagatctcacctctcacctttgccgctgctcttgagacgcgagagagagagagatgcgtgaaagtggttgtgct

SEQ ID NO: 69192 - DNA, 354 bp, Oryza sativa
tatcatatcgttcaatctttcatcacaatatatataaataaaatggattggccaaagtagcatctctcgctcacgttgctccagcctaagggcaacgcgagcgccccccgcgcaccgaccaccagcatacctttctccttccctctaactcggcatcgctcgagtggcccaccggaaaaccatctggccgcaatgactgcggcagcatggcttcttcttcaccaaaacagcgtcagctggggcacccggcacccatggtataagcggctagatccagcaagggcacacctgcgcccacacgagaagtcggcggatctgtgcaatgcacgtcggcggacatcgtgcaacccctac

SEQ ID NO: 69193 - DNA, 412 bp, Oryza sativa
  unsure (1)..(412): unsure at all n locations
agcttgaaaagtgttcctatgataattcataatccataagccaaaaagatatcagaggttgaaaccaagatgaacatataaaaatgattcgataagcaataataaaagccggtcaagatgaacaacatgatgccatgagtttataaatatagtaaatttcatagaactacagatattctgactatagattgaagacgttgtatgataaaactacatatttagcggtaaatttatcacacaagtacatatttaatgccaagtttcgtaaaattacatattttatactgaagttatgatgaaactacatatttaatatttaagttatcacaaaactacaatctntagagtgtatatccatggtactaacattatgttagaacttataagtttgggataaatcgacactaaacct

SEQ ID NO: 69194 - DNA, 433 bp, Oryza sativa
  unsure (1)..(433): unsure at all n locations
atgctgctcaatatactggcgtggctcttcaatttctccttacagctttcaactgatgtacctaatatgcattggtaagataattatttaaaggtaacaacataatgagaacatgtagaagtgaggcatattggtgcccattattataattaatactcgaaagcatgtaagatcattgtcatagacaactatagaaattccccattattccttgatttgttgaaccagtacacataaaaaaattcacttaaccaggccggcctaagacagttatctntgatgaagtaacttcagtcccaaaactatcccaaataggaagccttttgacactatgtcatacatgtaattcaattattggacctacaaaccgatatctcccgtgctaataattaattagataatatatgccttncatggatacggatcacactgt

SEQ ID NO: 69195 - DNA, 427 bp, Oryza sativa
  unsure (1)..(427): unsure at all n locations
agctttctctcatgtgcaggtgaatttgatacacaaaagccaaatcagatgaaaaaggacacttgagctgaaggacttgctcaaggaaactccaataatgcacacggtgcccttttttcaaggggccccaactaattgcttcgtacataatacttgaaaaacattaaactcgctatcacttccaaagaaaaaggtgataggcaactagttaccaacaattgctcccaactgtcaaatctggaaataagagcaagctcatcgaaatttcttgatgccgatcaagaccggatcaagcttatgttttgctccggaaatgtgaaagcaaatttctatgaactgtcagatatcgcaagagnaccttatccagaaatttcattcattttccagattaatcgtaccaacaatagtaggaaaagatttcagaatg

SEQ ID NO: 69196 - DNA, 474 bp, Oryza sativa
  unsure (1)..(474): unsure at all n locations
aatctttggttcatggttatacttntatgtattctctttatgntatagaaggattcgtcttctttgtattgcaacacatgacttaatatgctatatgtatgctaagctcttgaatattaatgaacataattcttatgcttgatgaaatcattgtcaaaagggggagaagtaatgtgagaatttctgggagggaatctctttcttttaaaaaggaggagaagttntcttttggatttttgagcacgatgtgtacgtttgtacgaagtgtttttttttaccacttttgtttttatttttccaaacaccaaaacatttttaaagagtttgccaatgtgttcatcaagggggagattgtgaaatcattgtcatgattaatatttgtgatgaacaatttgctatgcgaatgatttaatcaaagaattggcttgagagatgtgtgaatgttggtgtgagtgcgtgtgactaatgtgggtc

SEQ ID NO: 69197 - DNA, 397 bp, Oryza sativa
aagctattattgtgcttcagaagggattaggtgagattgacgatgacaacaacatcataatcagctagcatcaccgacgatcacacacatatacacagccactcgatccatctgcaaatagattcacgacttggtcatgacacttaacaattaagtagttacacgcatgcatattactactagtagtataacgatgacacacatatacgtgtctctctcttgtgtgcgacgaggtcactgacgagctagcaaacgtgtcgtgagttctgtgatgggctagcaagcttatagctaggttaacgtcataaatggtggaaataatcgcggtcggcgacagttgaggaggaagtgcttgaagtgtctcgagatattcatctgcatcatccgtcatgaaaat

SEQ ID NO: 69198 - DNA, 399 bp, Oryza sativa
  unsure (1)..(399): unsure at all n locations
acatcatgtcgcgagtgcacgtagtgacaaaattaaaagtaactgctggagatgtaatggctattgtactgtatacaaccattaattctggattnttatattttagctttttaaaacttattttacaaacagaaatttaaaaaaacttattctataaatgaaccctttttcttgacgccgaggttcaatgtttcaatgcgaatctcagccctcgtagcagttaagtcttgcagatgtgaagaggatcggtgtcaaagagatgtataattttttataaaaggattagaatgtaaaattttttcttacaactagaccctcgacaacaaggtcctatttgtaagaaaattatttacattttaaattctttcataanaattattttacanatangatgtacat

SEQ ID NO: 69199 - DNA, 423 bp, Oryza sativa
agcttgggcatcttctgaagaatcttgaggtcatcctccctcagtttccagagattgatttctaacgatgaaatgtcgctgagagtttctttattgagccaatccgggagactgatatgtttgccgggaatcttaaatctcgccacaggtataggttcccagctggagccgaaacgatcaaagagggtaatggatatgttctcccgcgaacaaatatgaccataattgtccactgcgccctcaagcaagttcaccactttatgggaatccttgttgccggcaaccacactgatggagttggaacgctggccagcttcccaaggtagctctctaacattggtggtgctaatattcagagtcttgagctgctgcaggttccaaatttccatgggtagcttcgcaacctttgtgttactgacatca

SEQ ID NO: 69200 - DNA, 498 bp, Oryza sativa
ataagcctttacattgccttattgatagtgacgttagatacggtaacaatcgatcgcttggaactcgagttgactccgcactcacatgtctgtggcctattaagttattacatttttcaatggccaaattcttcaaggaaaccaagcatatgaactcttcctctggccagtacacaagcacatcacaagattcaattttcaaatccacaagttgtccaaaccatttccatatcccaactgttggacgggatgggcctaaggggaagaagaaggcgcagccacataactccatttccgaaagaggtgcttcataattctgatcaagctccagtcctgcattttcgtcactgacagacagtgttagctttgataatgaagaatatctagacctcagaattaataaggatagctctgccttttcttcaactagcttcaatatccgaagctttggtgctcgttgaagggatttcaacattggacagttcattatactagcac

SEQ ID NO: 69201 - DNA, 410 bp, Oryza sativa
  unsure (1)..(410): unsure at all n locations
gtccaagccaattaatgaacttgatgaaaggggtttcccaataatctaatatgcagatgacactttaattcttctcaaaacatcatagagagaggtgttttgtttcaaggcttcgttgaactcttttgcaccttctactggcctcaaagtaaattaccatatgtcttgtctctacccaatcaatctgtctcatgagaatagctgagcttttgctagtctgcttgggtgcaccatangtacaatgccttttacttacctgcgtttgcctatggngacaactagaccaagggtagtggactttgcaccattggtagacagggttgagagaagatngacagctagctcacaatntttgccacagggagggagactcactttgatcaactctgtgctttcctcaatcccaacat

SEQ ID NO: 69202 - DNA, 458 bp, Oryza sativa
  unsure (1)..(458): unsure at all n locations
agtctaacatggctcctctatctggtggtccttttcacggaaccaacctgaggccgaaccggaccactagagattccggcacagcagctggctatgggcctgtttgggaagggtttagcaaccgcagcttcccgcacaatcttcaacttccttcccttaaacagttctgattgttatatagattctaaaaattttttgtagttgttaaatccataaaataaactagaagttacaagctgaaaaatccaacttctctagattctcgcangataactatcaattcttataagtcttaagttttcaaatagggtatagggtaattgtcgagcgaagccacctggcacccgtcgccaccgccattaaccagggagctgtggaattgcctgttacntgccgctgcacagaccgtgtctcatcgccatctgctggagctactcngctgtgttgctccccgcatg

SEQ ID NO: 69203 - DNA, 427 bp, Oryza sativa
  unsure (1)..(427): unsure at all n locations
agcttataatactatctccctaaattattgggtggaccaaacttgttaggcgtattaactcgcaactggtgtcttcagattcttacagcttgagttcaaaagcttagataataattaaagcagctgcttcgtggtagtcccttatacgttttcaattggtcagcctaatttaagctgagccaaatcaacaattaatgaaatactcatgcgttacaaatgaaataactgagcacaaatcaataagtagtgttgttacttcctgtgttagcaaaattaattgggaacaacagacctttcggcatgtggttattggatcatcagaataaaatggtggataaccaacaagcatctcatacatgattgcacccanagaccacctgtatggcataagaagtacattgataaaatctatttatcaagaatcaat

SEQ ID NO: 69204 - DNA, 481 bp, Oryza sativa
  unsure (1)..(481): unsure at all n locations
ctggctgctganagttctttgcattcttctttctgngattatctttgtactgctcttaaagntattgctggcaccttatgttttcttcatcaaacaaggtcacatcagaacatgattactcangaaggttcatcattgacatacaatgggtgtcaagggattaccagcaacttcctgtcaacagttgaaaatgcggaggacaaattcgtgcataagattgtaacatcaatggtaaatcataatatatccctnggcaatcaaataataagcactggaaacaaggaaacaataaggaaacatacctatatgtcctctgaattcaagatgtacagatctatgttaagcagtatgctaaaacttcttgtgtgctacccttctgctgctcgctgtgctcttgataaactaagatgcctcgataaagactagccctactagatgacagtgattgctccgaaagttctcgtcgcaatgttgaatcatt

SEQ ID NO: 69205 - DNA, 338 bp, Oryza sativa
agcttccattttttggtatctttactcgaactacgaaaatattgcccaaaattgaagaacatctggttccttcacagagctggagtgaccggcaactgtgaaccggtcagatcgctacttgtgggtccggctgacccgcggttgttgggcgatcacatcgatagtgtccgattcccagactgtcttcatcaggtctttggatatctttgctcgggaggcatggttccggcttgtaatggtttctattctaaactgaacgccgaggacgacctgctgaagcaagaccaaccctctaaatgggacaaggctgggtcaattggaagaagaatccactccca

SEQ ID NO: 69206 - DNA, 408 bp, Oryza sativa
  unsure (1)..(408): unsure at all n locations
agcttcaagctctattactccacggaagccaaggtgtcttttgatatgctcttgaacaagtatgagaagaaaagtgttgaacaaagttgtaacaagggcaaaaaagcaagatcaccttctaaggagcgatttggtcattcaccaagaccattggagccgccttttactcatcatcctcaagtcatgccatggggaccttgtccaatgccactgccgggttatccttttccttacttcatgccatttggacatcaccaccaatgtatgatcatatgcctcctatgcaatttcatcaaagttggggagaaccaagaaggtcagcacatgagcgtttgtcttcaccaaacaaatgccggtttccatctataaatctggttgatgaaagaagcanggaagaaaagcgtgtca

SEQ ID NO: 69207 - DNA, 418 bp, Oryza sativa
  unsure (1)..(418): unsure at all n locations
gggcgatgacgggaggagcagcagagcctcgccggagatcaaaactctacggcgagcttcgggttgatggcgacgatgggcttcccggggtcttcggcgcaagggaacgggctgccgggcttgctcttgaccttgcggagccgagagaggtggcggcacatgagggcgacngccgatgcggcggcaaacggcggctggagcggctgccggcagcgagagagaagacgaacgcggcgacggcgctacaagcgacngnggagagagggagaggtggtggccgaaagaagagagggaggggactctatntatagccatgggagagagagatcgggcttggaacgcaaggaatcgcgccgggaaaacctatggtttggtggagagataaacacgaatcaagctcaattccgcgttgatttct

SEQ ID NO: 69208 - DNA, 436 bp, Oryza sativa
  unsure (1)..(436): unsure at all n locations
aattcagctcgtacccccgatccttttagtcacctgcngcatgcgagcttgctatntaaatctaaagaaaagcccagtcagctcgtgtgccggaatacacgttgttcacgttttagtacgaattagactcaatttcttattattattgaaaaaatgttctaaatattggcttttgtttcttttcctggaaatacagtattggcaagcggatactaattttttatgtgaaattagttggattcagttcgtcaagagagttatatatgacgaagaggacagataatcacttaatctgatgtgatgctgattgtacttcaaaaatgcaatctcagtccactctattgaacaattcaataaacataacattcccggccacaaaaataaaccaagagaatgaaacagcgttgcaatatgagaagatataaaatggatgatg

SEQ ID NO: 69209 - DNA, 381 bp, Oryza sativa
  unsure (1)..(381): unsure at all n locations
agcttgcatgtataagagtttctgtgtcaacgtgctttaattttgggagaactcctttgctatatatataattgtattaagcacacatgttctgcctccatggttaattcataatttccacacaaaactatcgataaaatagtgggttcatatgtttattatggttaaaggtttagcctatgcctggtgataatcaactttttgttcagatttatgtggatgatatcatctttggttgttcgacccacgctttggttgtagatnttgctgagactatacgcacggaatttgagatgagcatgatgggtgagttatcgtactttntgggaattgcaaataagcaaacacctcaaggtacttttgtgcatcanacgaagtata

SEQ ID NO: 69210 - DNA, 481 bp, Oryza sativa
  unsure (1)..(481): unsure at all n locations
ntcctgatgcctcttattcatatcacactatcaagtcttatcttatctctggaattcttgcctcctctattatagtctcaactgtctttccttaagttatgtggtttagcttcgtagattgcttctaccaatactatctattgagttgtgaggaagagtaaagagtggcatttattctatctttgtaaacagtgaagaactactcattgtcattgggcaaaagactgggtgatgtatatataaggataaaacatccattatttatttgcagtctgtgcattaattgtacgacacttagggaataaggatcaggngtttaattttcggtttggccgattctatcggaggtcaaatttaaataaaatattaccaaattcagaagataaaaataaaaatttcagctaaaataatatcgtacccggggttggggccgaaatgaccaaaatttcttccggaatttgaccctgctaagacaatgact

SEQ ID NO: 69211 - DNA, 410 bp, Oryza sativa
  unsure (1)..(410): unsure at all n locations
agcttatgttgatgatgtagtcgtcaagaccaagcagaagtatgatttgatcacggatctaaaagaaacctttgcaagtatctgcgctttcaggattaaattaaaccctgacaagtgcatcttctgagtaccgtcagggaagctgcttggatttatggtctctcataaaggcatacaagccaacccggagaaaatcaatgccatcctcaacatgaaaccgccaagttcccagaaagatgttcaaaagctaactggttgcatggcggtgctcagccggtttgtttcacgactcggcaagcggggatgccctttttcaagctgttgaagaaaacagacaatttccagtggggacccgaagcccananagcctttgaagacttaagaaacttctactactccacagtcttagc

SEQ ID NO: 69212 - DNA, 453 bp, Oryza sativa
  unsure (1)..(453): unsure at all n locations
taactttaatcctaacgcaatacttcaggcactggcaacccgttattcctagatatcgctctactacgtacccggacagggaggatttgagtgctcttgagggctgtcaccacctctacacccacctcaaatgtactgtgcgatacgcagcaaccactggagattaattacccagacaccgcgtctacgcaattaataactactctagtgccgatcaaacactaaagcaatcattataaataaatggactatagtgaacaatgatcctgtatgctaattaggaactaaccaagaagtaattctcactaagaaaatcttanatactcaggatgatatttctattanagcagagtaattaacaagatacaaaaataggaggagaataccgacaactccgggattcctcaattccttctacttacactctcctattctatatacaataaatacact

SEQ ID NO: 69213 - DNA, 361 bp, Oryza sativa
  unsure (1)..(361): unsure at all n locations
agcttgtacttcccttgtatcaacaaggagagcttatgaagcatggtgctccaggcaccaattgaaacactcactatagctccagccatgttgacctctntgtctaaccctattcaagatggggttcactatgtaatgagaagggaagaaatgaagatgcagtggctgtggatgatagaacggtgttgtatctcccatgaggtggatcttgcacatccccttccttccgacagntagttaacagcccacaattgattatttgccttaaagcacacacctgacatataacatattgtagtacccaccatagctgtgtttaaacatggcatcttgttaatttagaatatgctgtcctcgaaaa

SEQ ID NO: 69214 - DNA, 444 bp, Oryza sativa
ctaagcttgagcctatgtgcaagcagagagcccaatgaagagatattattgtttcccgggaattgctttcctcctagcctttcgtaccacgtggggtcacgtacttagcacgccataggcaagaagagtaagaatcagaagagaaaagcgccgatgcgaactgaagaagaagtacgtatgatgactattaccagcaccgaatgggcttcagcagggataactattcctagacgtcatagaggaaataccttccgaggtgcacgacagttgacccagcacctcctaagccatggcggcagagtatctgatagtgaagggtcagatcaagtctcctcggattatgaatatgagcccccccgacgtctctgcgaggaagagatggaatcaaaagcatgccccccgtgcggagaatatggacacatttctttgcatgtgtcttacact

SEQ ID NO: 69215 - DNA, 418 bp, Oryza sativa
  unsure (1)..(418): unsure at all n locations
atctgatattggagaagnttgaacaaatggaggccaagcgccggcaagaagacaagctcaatcaaaattttcagaagttggaggagatagaggctcgtatgagcaaagctttcgaagagacgattgctgccatcanggcaaccaccgccattctcaaagctgcatcatcttcgcacctatgcaccaccttctccagcgcccaccaactgtttgatggaatgccacaacaacaacttcacttgggtggcagtgaattcaagtcacatccgcgaggtacctgccccgatggttgccttcgagcttggggacgtcgaggacaaagatcctgttccctacatttgccgccaagacctttccaaagtacgcccaccaagtgttcgacgatatgtgtcagctccgacaccaagcctgatcacac

SEQ ID NO: 69216 - DNA, 336 bp, Oryza sativa
  unsure (1)..(336): unsure at all n locations
catcagcgataagccatgacatgtataaggcatgngctttatatatattaccctgnnacaaagcactgaataatggaccactgttggaaaacgtaatagcactaacacatgactattctctacttgatataggttcttacggcatcatacaactagcaagggaaattgatatagaaatatcttacataaagaactgtgaaacttacaatttacatataatgggcgcaatgtaccagtctaagatgtgaaagaagccaaaacacacaattcataacaaattgtgttttggtgcccactggcaccaacgatcccatgtgcagaaatggcaaaatgcac

SEQ ID NO: 69217 - DNA, 419 bp, Oryza sativa
agcttttctacttctgattgataggtccatactatactggaaaatggtaattgtgataagcattgtctcacttgtgaccaatactgactgaaaggggtagatgcattggaacatatattgttggtaatggtaatgcattgttgtaataactttgacccccagggtgtgcctcttaattaagatcagtgaatacgccattggaccagcttgttcttgtgtgccccattcgcagctactgaattccattttcttgtcatgctaaatactaatctgctggggttcgttaaataatgatctgttgggaaagggttcatgggtttttgtatgtcttatgggaaaaagttggaaggtaatccagttttgtactccagcaatggaggatatgttttcttctatgaaaacatcacgcccttgataca

SEQ ID NO: 69218 - DNA, 378 bp, Oryza sativa
  unsure (1)..(378): unsure at all n locations
tgcactcatgcatgtntcttcagattcgagttccattttgtttttgcctctgaatatttgtggcattaattattctggttgtcccagagcatcgatcaagctagctacttctgccattgttggccatcatcgattctcttctcgaccaagaataatacttatcactttccacaaatttgctntcgcttggccttatgacaaatgcgttttttttttgtctgtcaggacgtcatgaattgacatgatgccatttgatttgaatgttgaaatgctacaagaatgacctgtttggaggagctctaaattctgaatagcagcctgttggtaaccaacttctgagaatatggaaaagctctgaaacccagattctcagaaact

SEQ ID NO: 69219 - DNA, 425 bp, Oryza sativa
agcttatggcttagtggcaacaacaagtggctcaagatatcatgattttggaggaaggcataagtaagttagagggcactcttctccttttctttgcaagcctccctccccatttgccccttcttttaaagctggtggttgtgggagctttcttccctttgttctcttaagcgagtgcgtgcgtgggctcctgtcttatcatccccctaagaatctttgtccgttacaaaacgtcggtggggttgtacctccacttgtctctttacattctaactagcatgatggcccgcgcagattgcgcggctagcatcattatattttctctcatataatagcatatatgttttctcattatattattcaaatatattaaaataacaacataattttaaaatttgcaataactttacaaaactactaatgtg

SEQ ID NO: 69220 - DNA, 358 bp, Oryza sativa
actcgctagttgccgatgttcttatatctgaaagcaaacacccctttcactggctcgtgctacctttttacttcccgagctcgaccgctctccctctgtcctcgtctctttgcacgtggaggcagagagccgctgacgcccgtgcgccagctcgcgggccccactttgatcgcgccagcccgcgctccgcgtacaaattcgaccgctcgatccaccgaccccggcgaccaacgcatcctcgacgtctccattttctggttccctacgaaaccgtcgccccaccgccagccaacgccagctcgtgtgcgatctctcccttgcctataaatgctacccaccgagccgcaaattcttcctc

SEQ ID NO: 69221 - DNA, 357 bp, Oryza sativa
  unsure (1)..(357): unsure at all n locations
agctttgtggatatgtattcgcagtctctgcatgcaggatggatgtgcatggacgaaggttctatgcatcctgttgtgaaaaaaaaaatgtgacaaaactctctctgaagccgtgcaaaggcgctgctggagaaagcaatagtgtgttagttccaagtgaagaaatgtggtgcaacacgaagtgctctgtgccatcgtaaataatttgttcagttctgggaattggaacggtgattctgagaatcagaatttaaccacaaagataggatcttnggtttcgttcttttttgtcttgcttcataattggaaaaaggagaanaggtcaggttaaaaaaaatggaaaagggaaaacgaaat

SEQ ID NO: 69222 - DNA, 393 bp, Oryza sativa
tccgcgccaccgtgcccaccggcgatgtcttattgcatcaccctcgccgccgtcgagcggatgccgctggtgaagtctgtggtgtgggaggcgctgcgcatgaacccgccggtggagttccagtacggccacgcgcggcgcgacatggtggtcgagagccacgacgcggcgtacgaggtgcgcaaggtggagatgctgttcggctaccagccgctcgccacccgcgacgagaatgtgttcgaccgcgccggcgagttcgtcgccgaccggttcgtcgccggcggcgccgccggcgaccggccgctgctggagcacgtggtgtggtcgaacgggccggagacgagggcgccatcggaggggaacaagcagtgccccgggaatgacatggtggtg

SEQ ID NO: 69223 - DNA, 464 bp, Oryza sativa
  unsure (1)..(464): unsure at all n locations
tactaagctagcttccgagactagtcagctgagtgacccatctgctgctgttcctcttcttcttctttcaagatgataaactactacatgcatgatataacggatagcagaagcaagctaagccaccaccaccaccagcagcatgagcactagctgcaagtctctgcaatatcaccaatactaaggtaaatatatatccatgcaaaaaactatatatgactgagttatttgagtcttgttttaaaagttcttgaggtgtgtgggaacttacagttgcatttgctcttggatntggaggcaaacattatntgaagttntgaaatgcttgcaacaattcttctttttgagaagtgcatgcactagtactgcaacattcagtgtgaaagaaagctgcatgcgttgtttggcattcaaaggtcataccatgagatcaaaacattctttttacgcttcagtgcagtcat

SEQ ID NO: 69224 - DNA, 430 bp, Oryza sativa
  unsure (1)..(430): unsure at all n locations
gctttatgttcggcgcagtactaatactggaacttatgagcaattattgctctatttatcaccatctactctagacatatcttgtggaaactttttcaaatccaaaagtccagtatcttcctacaaattagtgaattaggaggagctctttgtgccgaaaaagaaagagcagggcaatatttcaaacttgcattcgaactgcgaaatatttatacaaaggaggagagatcaagataatgcagcagggttggttatctaataggctagtcaaacatgaggtggttcatagatctttgggcttcgatcatcgaggaatagagactctgcaaataaaagcagaggattgggattccattgctgtcattntatatgtatatggttacaattatttacgttcccaatgtgcttatgacgttgcacccggtggatc

SEQ ID NO: 69225 - DNA, 437 bp, Oryza sativa
  unsure (1)..(437): unsure at all n locations
ttgtgttntaaatagatcattcaatatctatatgatttacctatttatgtgtnttatctctnttacttattaaatatatagttagtttggataatctaataatgtatgtggataaaatattagctatatgatttagagcatataattgttcggaatttattatcacaaaatatgttttctatctaatatagaatgagggaggaggtatggcgtacgtacgtgtgctggtgcacgtgcacgacacggacggcccgtgtggatccttnttttttaactctttttattaactaacaaaatacccgtgctttgttacgggtaaaagacaaataaattntttattatgctaagtattgatcacaaatctagatgataattaggatggatgaagaccagtattgcatattgatatactcatattctcatcataataaagatgg

SEQ ID NO: 69226 - DNA, 444 bp, Oryza sativa
ccacacactatcacatggtgctttacttgcttatcctgcagggagggagaagattacggtgaactgccccgtcgaagagatctgatcggttagatggacatcttgagagaacataggttacagtaacaattccagctttgctatcttgcaggactttcgattcaaaatataagcaattttagataggttagccaaaaatataagtcggagagaatgattcattttccaataatctcataatcaaatttgaattttgaaaaatatatatatctcctttccaagctcgtgattgtgtgaaaatgtgtacatgttcatgcactagaaccgtatcttataaatggttatattatccggaaaaaatggttatatcatctgcaaaaatcttgaatccgagatatacttatattgtaaaatagaaggagcattgagcatgtatcttgagtt

SEQ ID NO: 69227 - DNA, 372 bp, Oryza sativa
ctaagcttagcttccgagactagtcgtctgagtgacccatttgctgctgttttctttcttcatctttcacgacgattaactactacatgcatgatataatggatcgctcaactgggatcagacaccaccaccaccagcggttgggacacatactgttaaggtcgcgcaatacatagtcagagctggtatggaatatatgagaaactcacaatctcggctgaatagctatgcacacaatcgccgaaaggagctcgctttcgaaacagtggattatgtgcatctccgtgtcacttcgctcatgggagtacatcgattccataacaaaggaaagttggcaccactctttgtgggaccatacatgatcttggaacg

SEQ ID NO: 69228 - DNA, 499 bp, Oryza sativa
  unsure (1)..(499): unsure at all n locations
tgtgagttagtggtgtaagagctttcagttataatgttatattgaatctcagctaagaagttttgagggaggagaaccaatttgtatcgccggtcatgtgccgcgaacaaccggaatccacgatccacacgttctccttccttttcaccaaggcctacacacaatcagaagtcgaagcctcagtaccggtgttagacaataataaaaatttatgaatccagtactgagacacatgaccagaagatccaataggcatatatccacgtgcaaaatcaattttagaattgtcagagaaattcctccgaggccggtctgaccgaggtacagtggccggtctgaccgccactgcaccgtccgtctgaccggtgtcctcgagggagaaaccaaattttgccacttagatgttganaagcaaactctctcttcnttttctgttatgagctaatctgaaacaaataccaacaatatgccatctttgccacaaaaagaacaaatatat

SEQ ID NO: 69229 - DNA, 500 bp, Oryza sativa
  unsure (1)..(500): unsure at all n locations
ctaagcttccgtctcatccagagttccgctcttcttcatcatcgtcgtcttctgatggtgganagagaaggngtagccgtggagtgaggatagagagggagagccataccgaatctggttggagagcgccaccggcagcagccgcctacacccaacgttgtcgcatgcctcctccgtctacccgccgcccgctgtcgtgcatccggacctgtaataaaagagaataaaagaattagagaagagtatataagattagagaagagcagagagaaatacaaatgagaaaacgaggaataaagtagatttatgttactatattntnttctggctttatctttattttatctaagctgctatgagttttctcgataggtgaactcaccgacagccggtggatagctagcaattgaacacatcatattgaagaataaaatgctcacttcatgcaactatatcaataaagaactaccactaagagtatatccatataattacttatt

SEQ ID NO: 69230 - DNA, 349 bp, Oryza sativa
tgtgcttctgcggcggactcgaactcaatctttatctctttttctcgccggcgccgatctccgatgatcgtcaagccgccggcctgctcagacgccgcggactgcaacaagacaccattgtagcaacggcagcccgacggcggcgggcactcgcaccacgacgacaacgacggcgtgggcccggccggacacgcactcggatactggtacaaccggacgaataggctcagccctggtggccctaatccacaggaccactgatgaacacatccattcacgcatgaatattgttgacagtgatcatatatatcaccactgtcagggaattacttgtaccacaccattctct

SEQ ID NO: 69231 - DNA, 322 bp, Oryza sativa
  unsure (1)..(322): unsure at all n locations
atgtcttactgtaaaatgctcgtgcgttgcaacatgaaaacctacccacttaaaactgtgacaccttattacacatgtagtattccagtgaaacgtgacattgcctcatgtgaatcgttatctcgtcacgctcgcttcatacaanatgggaggtatcgaatcatatgtgttgaaatcacatcaatattgtggaagacaacacagaagataatatcataaacaatgactaaccaaatgtaatattattttcttatcgcccaaaaaatttagaccagttaataattgagaaaattcgatcgatagcataggaagaaaaacagta

SEQ ID NO: 69232 - DNA, 450 bp, Oryza sativa
tggtttcagcacacgatgttcaacagtactatatttatatattgtctggatagtatagggactagggagcaaatagatagggaaaacttttaacagtgcttgtaacagctacaagttcatctttcatcctgcaaaagttggtcgttgcctagccacagaatttttactgcactttgacaaatatgcacagcatgaactggagtaatactacaggataagggtgcatagctacagttggttgcgtgctctgatgtcaagttggtgacatgttgccaatcaattccagccaggcgcactagcaatcttagcatccagatgctgaatcatctccttgagcagtgcaaacactcaatccatagtggccatgaaccagatctctctcgtcctctgttttttcctctcttatttcttcatttcatatgagactctctggttagaataaacagggga

SEQ ID NO: 69233 - DNA, 477 bp, Oryza sativa
  unsure (1)..(477): unsure at all n locations
taactaacacatacctttgctccatcttttccaagcacaaagtccatatcaccaatgaccagaagggactccaaggtctgtaactctgctctagcctttgccttctcagcaagaatttccatcttctctgcagtgaaaggaaacccttcccatgcatcttgaccatgctcatcaattatgtcagcaacattgttgttcagtgtcttcccatcaggaccaatcaggacaagtgtaggcaggcctctaagctcaaaataacgagccagcttctcacccatcttgtcttcctgagggatggcaagccaaggcatgcctgcaaaactctcattggataattcctcatcactgtccaaggatacagctacaacttcaaatntctcccctacttctttgagtttctcataacatttagcaagcaatgaggtaaattggactactgtgccatagccattcaccacatagcacaaaccaacgtac

SEQ ID NO: 69234 - DNA, 458 bp, Oryza sativa
  unsure (1)..(458): unsure at all n locations
ctaagctgagttagtgggttgctctttttcatctctggattcactctacttacttctaggctgtagcctntgacacttgtattctcttcttctggcatcacaaaatctgcacttctctttttccactcccttgttggtgcccatctctcttttggctttgccttcagacaactctagtgattaccacgcccttacatatatggaaaatcattgaaaatccaccatacaattttaagtgggcaaatttgacagctaaccagattgactagatggcatggcaaagatgcatactatggagaatgacaaaatgagagaagtgtgaatttttatggacaagagaaacatggtatattgttggaaatggcaaagtaattctctattttatgctatgaacaagacccctgattcgtttctatttgcctgcttgtcttatggcacatgaattcacatttatgact

SEQ ID NO: 69235 - DNA, 406 bp, Oryza sativa
gactaatacgtgacgtaatttcctcgtgtacgtgcacagtatctctccataaaaggaaagcttaactttctagcgagaactaaccacgccagtctacacccagcagtcccagcacaacatcgtgaagcatacgccttgcgagcaactctcatgttcactacatacctttaatatgctaactcgaattaacaagcctatatagcacagctgtagcgtacagagactcctcccttggagcctagcgagagaatagcgtacccgctcgtcagttcactatggctagcaaagctaaagcgggaaagttccaaaacgagcgacgcgatgcatgcggaccggccaagctagcgcacaacactacaagcggtcgataatcgtcacgttcgcatgagcgactatcttactctac

SEQ ID NO: 69236 - DNA, 372 bp, Oryza sativa
  unsure (1)..(372): unsure at all n locations
ggaacaatntaccgcagacgacatatgaagcgaagcacgtattatgtccgttgggccttgaggtcagaagaattcatgcatgtctgaacgactgcattntgtattacaaggaatacgctgacttggatgtctgccctatctgtggngcatcaagatacaaacgagcaaagagtgaaggtgaaggaagtaagtcaaagaggggaggcccaacaaaggtggtgtggtatctcccaattgcggagcgcatgaagagaatggttgcgaataacgaacaagctaagctggtgcgctggcatgccgaagaacgganagtcgatagtatgctgatgcacccagcagattcantacagtggaggacaatcgataggatta

SEQ ID NO: 69237 - DNA, 498 bp, Oryza sativa
  unsure (1)..(498): unsure at all n locations
attacggacctatgaaactaagcttatgcagcttttgccttgttatggaagaagcaaaacttactataggcaccaatattattctacttccctctctgtagtcaacagcaaaatacaatatgatctatagtatgatattacaataggaaatctcaagagtatagcaaatgttttctttaaaacaatcttgatcacatttgatttcattttaattntaatggcactggttcatgtacttagacagccccaaaactagtgagccaaaccaaagtataaactgtattttggtgaagggtacactaacgtgggacagcccaactggatattacatatgtacacaatgttgttgtgttcgtgtatagtgtctatgtacttccatccctcntttcatgctccttccatagctgtggntgtcaccatatntntgtactttgagttcagtaagcttcatgttcgcgggcatacttgtactataaaggttccaatacaacttgaact

SEQ ID NO: 69238 - DNA, 335 bp, Oryza sativa
ctcgctttctatgccccacaccgttgttttatcactagggccccctatacggttgttcttactcgcatgggtcagaaaatgcgaatctgcccaataaaacactgtaactgcctccctctccggatatgcttggcacccagcgcctaagctttaccacctgattatttaagctttatgcggtctcgctagcgtccctatgattttatggcttctattgataccttatcccatgatagcaagagacattcacccctccgatgactctgcattgttattatagatcagcttcttcaatcggcacaatgattagtctggttcgtatagaatatagcaca

SEQ ID NO: 69239 - DNA, 425 bp, Oryza sativa
  unsure (1)..(425): unsure at all n locations
ctttaagcgcacaacctgtattacggcaattcctttttaaattatttggctcattctccaaccgaatccaccctattgttattagttgcatgtattgtagtgattactgccttgagaagttaatcttttgttgttttaatgcatgtatcagctgaaaaggggtagccttcggtctaaatcacacttactgaaaagaaattttaaatcgtaccagaataaaagcttgtatacagcacttgagttaaaaagaaaggacttttgaaccaaacaaactaagcaagcgcattaaccatttaaccctctagggataaatntgaatcacagcaatcggaataaaagcaggcctccacaagaattcttttcattggttgtttcatgcctatcagctgagaaaggggagcctatggtctanatcacacttcttt

SEQ ID NO: 69240 - DNA, 434 bp, Oryza sativa
tgtgagctggcggcggcgttactcctatatgttcatctaatttcttctatagacaggataccttgctctccaacttgcaaatctagcctcgattccagttttccctgtcatgagctgctttgtctcgctccacacttactgcatccatagcactaagcatatgcaccgcatgcatcagagtggcactctcttcaccatcaggacaggtatatgttccatagtcttgaccatgagggttgtgaggatggtactggaaagctgatgaatccaactcttcttaaagcgttgacgcaactctccaatggccaccaaagctgcttcttgacaagcatggctgtacgatcttccttcatcttcaaacttaatggacggaaggtcttcacgatcactagccaacgtcacactaacacgacacttcttctcgttgtggcatg

SEQ ID NO: 69241 - DNA, 479 bp, Oryza sativa
  unsure (1)..(479): unsure at all n locations
ttatgagataatngaatggattcaaatggaggatgaacatagtctacctctgttccactggctgtctcccattctgtacaaaccttcttgataacagttaaatcttctgcttcggattcttgctctttatgtatcatgttttttcttttgaagaattcttcgaagtgtataatctggctattctcgtaccagtcaaagaagaaaatatttctcccttgctctctcatttcgttatgccaaacttctcttatcttcattctgaatgattcgccaacttcttcaaggtatcttttaatcttagctctatttgtggggagccttatttctctcctaagcaattctttgtcaatatcaaattcttcttcttctatagcaataacaaagcccacatcaagcttgataacattgatatcgaagtctgagattganggtcgtccgagttgtctcataggagcatnacaacatttgatggttgccta

SEQ ID NO: 69242 - DNA, 419 bp, Oryza sativa
tcaacccttatttcatctagcatttcaagaggtatgactctttcttcttcatctttttggtcaaatatcattcttggagaatgtgcccctacttcgcttggagtcattgcttcatcgccataaaccaatctgaaaggggtcatgccagtcgaccttactaccgtagttcttagtgcccaaagcactgatagcaaatcctccggccattttccttttggtgatccttctaacctcttcttgatagcttccatgattttaccatttgccctttccacagctccatttgtctgaggatggcctacagaggcaaagttgatttgcaaattaaggcctctacacatgtcttgaaactttccagattcgaattggcttccatagtcacatactatttcccttgggaattcaaatcgacatattat

SEQ ID NO: 69243 - DNA, 460 bp, Oryza sativa
  unsure (1)..(460): unsure at all n locations
actaagcttatatcctgngagttgcgatagtggagactggagaagccataccattttcattttgaagaccgaccagagactttgccctccatggtaactaaagctgcacgcaaaatgatgcatcgtattatcatatgattaattaagtattagcttttttaaaaaaataattaatataaaacatactgtntaatagtttaaaaagcgtgcgcacgaaaaacgagaaagctgaattgggaaaactggagaaggaatacaaactaaggatccctttgaatcttangaatgaaaaaacgaaggaataagaaaaacgtangattctagagcctctttaatttaaagtaatgccaaatgatnttttttangaatgggatttcaaaggattcttttccttcaagcctctntgatttatagaaaaggcaagtataaattccatangattgcatttctatgagtggat

SEQ ID NO: 69244 - DNA, 426 bp, Oryza sativa
  unsure (1)..(426): unsure at all n locations
tctcagcttgctgtctgtgaggcttacgcccgaacttgccgtccaattctttttggcggatccctttggtgaatgcggcgatgattacgtcgtcggtgatgtcagagatcttgttacgttgntcggaaaatcgtctgatgtaatctcgaacggattctccggacttctgaataacgttgtataggtcgtattgtgtgcccggacgctcgaatgtgccttgaaagttgcgatgaagtggccggtaattcagcccaagatccgattgtacctcggggcaatccatggagccaagatcgggcggaatccgcttaagccactggtaatagttcgccatggccttgttgtcttctcctgctgcgcggattgcgagactgtatacggtcagccacgattctgtggtagtagtaccgtcatacttttctattt

SEQ ID NO: 69245 - DNA, 306 bp, Oryza sativa
  unsure (1)..(306): unsure at all n locations
ttttttcgagataacacactaacgcgcatgagtgactctgcgagtccactactaatagttgctttgcagaattacagattatactgagctaatctcttcggaccgccaatatgaacagcaattgctacaatcgaactcgacaaattgccanatcatacgatgggtcgtcacttgcaaaatcctaaaattttcttactaatctactacgattcttgatacgatcattcaaactccactaggccctgagcaaaggtacacaacacatgccacagagacccacaactgcagaacatgctacagatcaac

SEQ ID NO: 69246 - DNA, 449 bp, Oryza sativa
  unsure (1)..(449): unsure at all n locations
ggccgcgcgaatcacgaagtgantatttgccacgaatgcactctactcactccaatatgtccaaaaatcatggtttggtgctatttgaacattttcattccggtctaaaacatcgcacccacctatggcaatattggcattaattcacaaaagttcgccgcgcgaatcacgaagtgattttttgccacgaacgcacccaacacactccaatacgttcaaaaatcatgttttggtgccttttgaactttttattccggtaaaagcatcgccaacacgtgtgccaatatatggcaatattggcattaattgacaaaagttccccgcgcgaatcactaagtgactttttgcacgaatgcacccaacacactccaatatgtccaaaaatcatgttntgggcttgttgaaccttttcattccggtgaaaaacatcgcacacacctatgccaata

SEQ ID NO: 69247 - DNA, 423 bp, Oryza sativa
  unsure (1)..(423): unsure at all n locations
tctgaaatgaggttaaggagactatttttcaaatggagcacaacaaagcaccgggtctagatggatttcctggtgagttttatcaagtttttttggaatgtcattaaatttgacttattggaactgtttaaagattntcatgctcgggaatttgctttatattctcttaactttggtactattattctttcgcttaagtgcgtagaggctatgaaaattcaacaatatagacctatatgcttacttaatgttagctttaagatntttaccaaagttgctactaagagaattatgggtgttgctcaaaaggtaattagtcccattcaaactgctttcattcctgngagaaacattatggaangggtggtcattttacatgagacattgcatgaattacatcatanagataaaagtggggtatct

SEQ ID NO: 69248 - DNA, 441 bp, Oryza sativa
  unsure (1)..(441): unsure at all n locations
accttnaaactcagttgttgtgcaattcttaggataccaatactttttttattacacaaacatcatatattggctaattgtatcaaacaatgatatgcgttaatctgaatagacctttaggaccctatttaagatcggtacctttcatgcccatatttccttaataagttaaaacatcttattaagaaatataaattaatctatacgtaaaacttttatatgacttaaaaaccaatgttaaaagatacactgaaaatatatcataatcaacttaaaagtttgaaaatataaatttaggctttagtgtattagtgcaatcaataagctcttattcacttaagccccttatggatcctaatatatgcagntattatgaccattcttntgacttatgcaatttagcccctaatctaagtcgaatttgacagatcaccacacacg

SEQ ID NO: 69249 - DNA, 349 bp, Oryza sativa
  unsure (1)..(349): unsure at all n locations
ctcaagctcgcctcatccaagaaagagaacgtgaacgccaccttctctctaggtngctncaaagattcgcgagatgggtgaagctgtgcccgaacgtgctgaacctgtcatcaacatcataagcgatgaggaagaagaggaagaccctgaggaaagagagccagctactccagatgaagaagatccatcgcttcgttccgacacaaggcgggattagtcgcttacttaagccgntgtcgcatttcgctgtgttagattgctagtttaagattgcttgtgagtgtgagggttttagatgctgctcacatcattggcgggatgtaacagcatgagtgtagctcttttgctt

SEQ ID NO: 69250 - DNA, 415 bp, Oryza sativa
  unsure (1)..(415): unsure at all n locations
ctattattttanngnntttgaatgttcgctcagcttgtttatgtgttcttgggtgtatatgattttttgataccgattaatatattaatgaattctggtcacggtgaaggggagctgctcgagcattggctcgactttttttattcttagaccacctcaaatgtgtcgttcactgggtggccgttagaaaatatggcattcatggatgtttcccaacaggtatctatagttgttcctgtagcagtgggtacctgtgtgtagtaccgtgtaacatgcatagtgattgctactagagagaattaagagatggtacctgtctatactacatgtaacgtgggacactgttgtctcatttcacggactatgcttgaaccaacgatcatgtctatacttgtgtctaatattcgcacatgat

SEQ ID NO: 69251 - DNA, 440 bp, Oryza sativa
  unsure (1)..(440): unsure at all n locations
cttcttcctctctntnttatatttctactcttactgttactacaactcggaggagtagcctacgagtaggagtatttctgtttgtatctctaacactttctttttctttatttcagttcaagaacttcagtcacagggaaggagacaaatggcagcagaagtggcttataagttgcagaagatatggtgcaggcatcgaagtgaagttgttggattagttgcaaccattttacaagtatatgaaacaattgtgcattgtgaaaaaaaattacaatgtataaaggccaagttgaatctggacaaacgattatggagacactgttaaatggtcccataaatattatgtatttcattctccttttaactgttggtccgcttaaaaagttagctcagactccaccactaataatatatgtgataggaacttatgagcagtagtt

SEQ ID NO: 69252 - DNA, 473 bp, Oryza sativa
  unsure (1)..(473): unsure at all n locations
ctaagcttgattatcatccaacgctcaaagaatgctggtgacttcttttttatataatgtgactttcttattaaaaaaaagaaaaaagagagttactccggtgctcggatatgaagatgaccgttgatccaacctaatctaatggtgtacaatacaaggtacctataaaaaggtacttaaaaagtatgccagatattagcttataaattggttgaaaggttagatccggaattctgtctatagtatcatattagatcggtataagaagttcagttgttcttcgtaaatctgttgtctgggatcatggagcagttctgtatggtgaatggccctggaggcccggatgtattatgaatgtcccgttatcgattacatggaacaaacatgcgttataggtggacacaatgccgattgacatactgaaagnctatgtaattatcggtatcctttattacaaactggtaatgacataa

SEQ ID NO: 69253 - DNA, 403 bp, Oryza sativa
  unsure (1)..(403): unsure at all n locations
actcagcttgggtatcatgctaacatgattatggaagatgagggagattttgtttgtttagaacggttcccagagggaggagaaaatgtcagagtgtcccacgatgaaatacctgatcttgatgagtttatccagatgcacaataaaataagggacgacgaaactcactatcagctacgtgaagacctagtggagcacttgtggcaacattatcctgataaatattgaggctctatttatatggttgaattccatgtaataaatagtatacatatgtgaggattggcaaaatcattttaatttgttcttcatgtattgaataaatggtgtactgttcggtttaagaatagtacaggagaattaatanaagtgcacttcctttatgcattttgttgaatatgtc

SEQ ID NO: 69254 - DNA, 455 bp, Oryza sativa
  unsure (1)..(455): unsure at all n locations
tgcgacgtcattaatcgatgagtacgcnctgctgggctggctcgccatgctgactgaagtcaatctgtcaccgaaaccaggcctcgtggatcgcattaactgcggtgcgcacaaagatatggcgctggaagatttccaccgcagcgcgctggcgattcatggctggctaccccgtttcattgaatttggtgcctgtagtgcggaaatggcaccagaagcggtactccacggattacgcccaattggtatggcttgcgaaggtgatatgttccgcgccactgcgggcgtaaacacgcataaaggcagcattttttctttatggctgctatgtgcggcaattggccgtttgcttaactcaaccaaccggtaacgccaacaaccgttggttctacggcggcaagtttctgtcgtggcctgaccgatcgcgaactgcgtaccaataatttacaactgac

SEQ ID NO: 69255 - DNA, 491 bp, Oryza sativa
  unsure (1)..(491): unsure at all n locations
tcacanagcgagggtgagaccgcgccgaagaggcgctattattacatcctcacaaaggcgctcggaaccaaagaacattctggccgaactcggggaattggtagcgatgtgccctggaagcatggactccctcagtacagctcccaatacaggaaacggaaagtctccaaggaagagagggacgctcgtttgaaggccgaacttaaggttgaggtcattcaagaactagaagctagcatgaatgcaagggtggaagaaagggttaacaaggtgctcgccgacatgaatataccccgagtcacaacacctgctgtgcaaccaactcctcgtgtacaacacgacgcgagtccgtcacagcatatgagtaagtgtgcatccacagaggtgccggcccctggtctcccgatcgcaccactagctgcagtggaccacatcgagggtaatgggtgtatccgatccatatctaatataagacatttacacattccaat

SEQ ID NO: 69256 - DNA, 355 bp, Oryza sativa
  unsure (1)..(355): unsure at all n locations
tgggcgaaatactccgaggcaggaagtcactggccggctcagcaagtgggcgggagagccattcccgttcgacttgcaatttgttgcacgctctgctatcaagtctcaagtgctagctgacttcgtagctgaatggacaccggtacttgcccccgaccccgagcccgccgaacaattctaggtgatgtgctctgacggttcgtggtcgcataagggggcaggcgttgcggcagtcctcttttagccgaatggggtgccgatttggtacgcagcaagactgcagntcgacacaaccaacaatgcagcagaaatacgaagccgttctctgtgcctaagaaaagcgaaagcactggga

SEQ ID NO: 69257 - DNA, 292 bp, Oryza sativa
acactcgatggctttggtagctgatccctctggtagtacttcttctaatgactcagcttttgtgtatggtggcttctctcttgccgctttacactcagtcactgaggagcaattagagaagatccctgaagatgatcttgctctttctgctaggaaattctcaagagcttacaaaaatgtgagagatagaaaaagaggaaaaacccatgaaccatttgtgtgttttgagtgtggagagcctaaccacaacagagtgaattgtcccaagttgaagaagatgagtgacaagacg

SEQ ID NO: 69258 - DNA, 382 bp, Oryza sativa
  unsure (1)..(382): unsure at all n locations
ctcccatcggctgattccgagatgctggagccgattatgattctaagccgatgacgtctttcccgacttccaaatttcattgttaacagttggccaccgcagccttgtggtggtgaccgtggctgctcacgtgacagctggaccagtaaccttaggagtcggagcactcgaccgcgggctccgacgatgacttctgcgccatcaccgcggcgtgcgccaagaaggggggacgagaggtcaccggcagtgaagccacaccgtgatgatgagaaaccggaagcggtggattnttctggcgtgagaagcacaatggcgcactaatgctgtggggcacaggcattgtaaggtgcgtgacccacagatgatttgtggctaaattatc

SEQ ID NO: 69259 - DNA, 408 bp, Oryza sativa
  unsure (1)..(408): unsure at all n locations
ntatccacacaatgtccaacattggcaatgctcttgtctctgtgtaacagaagatcaaaatctcacgggtaccatgatcattgactggggtggccacaggtataattatgggcatcgccaggatcatgcagtcccgcaccagtaggccaagtgctcatctttgcgcgaggtgctaaacagcccaccacatttcaagcaaatgaagctgctgccgtcagcaaaagcatctaaaattatctgcttccttccactctcagcaagtatgcagacttcatcagaatccagcatcatgacagggtcagagccaggtacttgttgaggattagtgtttgttgactgcgactctgctatagcacattgtgcaagcaaagaagcgagatcatcaacactagggctgggctgtgatct

SEQ ID NO: 69260 - DNA, 379 bp, Oryza sativa
  unsure (1)..(379): unsure at all n locations
actcagctttcggttcttggttctgccgagcatcgagccatctctttatatctttcttgagcggagcgccccccagaagcttaggatggcagtgcgtcccggctgcatggcgcctaagtggttcatatcagctggagagaggcgcttccctatttagctcctaaacgctccggccgttacctggacgaggaggctgacangcttaactagttgaggcgtacctagttctcccccagcctggtcgcccggagccgagagccgtgctctctactggggaacccccaagtggcatccggcgtggtcggggcgcacgaggacatcctactccggcatccacctggtcactcgaccggaagacatgaggagaggcccaccaacg

SEQ ID NO: 69261 - DNA, 473 bp, Oryza sativa
tcagcttgcgctgccagacttttcaagagaccgttcgctgaagactatctgtggttgtttattaatctatatagggaaaatgcagtatatatagctaaaattagcgatgagaatatggtggagaatgctcccttgatgttctgccttgttgggagttggtcattttggttgtagataaatgattctactcacgattgctgaagttcttttgctctgcctgtgaagtgcacgggaagattacattgtacagatgctgtggtcactttacctatcaaatttaacggcgagtgatgcttgcacttcttccatggaagatagtaactaaccattcgttcctctgggaagaaaatgtcagaattctgactgaatttctatgtttcagtgggtggagacttgagctgtcctgcattttgtgctgctgctgtctggatgaagacttcctcttgatttttgatgtccatttggccccatgt

SEQ ID NO: 69262 - DNA, 396 bp, Oryza sativa
  unsure (1)..(396): unsure at all n locations
acatctcagcttaaaatttgacagacacttgagcaaagaattggtcttctttgtttggagaagacagatcaccccaaggaccatatcaagtccagcccttctataaccccactgtcttctgctgtatcaagaatgacagctagagcatcaccatctaaattgaatagcaaaggggaaagaagatccccttgcctaaccctgtaaaagtgtgaagaaaggaccctgctcncccttgatttaatactgactatacctcgctcatttattcttttgatccatttgatcatgacaggatcaaagttctttttttacagaactctgtacagagatcccagataactctgtcatatgcctttcaacatctatgctaaacacgaacgctgagactgttcctat

SEQ ID NO: 69263 - DNA, 260 bp, Oryza sativa
  unsure (1)..(260): unsure at all n locations
ggcacctacctctctatcttgagacgtgtaccaccggacaggtggggactgccacttacatcaccttacgaggagctatcaacgtggacccgaataattgttgtgattgaaaattatcgcattgctgtatgtaacagcatacactgacattccggcaacagcaattcatcagtgtcttagacagnaaggagatacatctttcataagccataccgtgcatacgatgcaacgagctgaaattgacatcagctgacttcttg

SEQ ID NO: 69264 - DNA, 372 bp, Oryza sativa
  unsure (1)..(372): unsure at all n locations
cggagaatccatggggatacctagcgtgcaagccgcatngtttctttcttccgctgctaatccaaccgcactgtgccaccgctaaccccgctgcactgcgctgtctcctgccgctaatctcaccgccgaggccgccacaactgctacctctcagcctccttctgctaacctcaccgtcgaaaccctagctgatttaaggatattttgggggaattgggttgaaacgcactggtcagggcaagttatgtgtgaacgtatatgtggagggggctaagcacaaaagtgttgtatacgtggcatgccacattggcgtcaaacatggtcaaaggatgattggaccgcgagtggtacattaaaccaaattcacggatc

SEQ ID NO: 69265 - DNA, 323 bp, Oryza sativa
ttctccagaagccattttgttagataatattcaagttaatcgcgtatcgattgaatgttctgtgtctttagcccatttcaggagggatcttatcagagtacgtcaattttattattcaatactgcttgtggatagaattactctgttggcaatgtctttgttctagtaacaaatgaaggatcatctaatgcttaatgttagcaaccttcccgagtctgttgaggcgaccgaggcagccatgaatctgccttccgggggagtttctctaccaccgttgtctacaactcatacactcttgtcagttcgggaaagcatgggtgctg

SEQ ID NO: 69266 - DNA, 386 bp, Oryza sativa
tctgcacggcttgcttgcgatatatgccacgcctgctactatcaacacacattatttcataccgatgcacttgtgtgccttgagcaacaactcgatgactccgtgcctttttgaatttatcttccatgtactttgtcactacgtcgccaaacactatgttgttatctgacatggacggaccaatttttctgtatcgatccctaaagaacactcgcgtgccgcgaaggatgaaatcaacaatagccaccaatggaagtactccaactcctcgcattacccagttgtacacctctgccatattggttgccatatgccatatcgagatccatcggtgtcgaacaaataagacacttcttcttacgctcattctcaatccactgagtgaa

SEQ ID NO: 69267 - DNA, 378 bp, Oryza sativa
  unsure (1)..(378): unsure at all n locations
aactaagctataagtaccgattcacttaaaactaagacctatgaaatggttcccttttcttcaaggcttctaactggatcagattataaaccggcgcctattatagcttattggtgttaccttatagtaaaaaagaatcagcaccaatagtcataggtatcaattcttattataaaatacctacacttatatatgagtcattattgcctctttgtttaaaaaaaatgcctttcaatcgagccgacccaacatagaaacaccatgaatatatctcaagcgggatgcatggatttggttntaagagtatgtatgttatcttccaccgcaacttctctgtttcccccatccatctctatactcttttctcatctctgccat

SEQ ID NO: 69268 - DNA, 483 bp, Oryza sativa
  unsure (1)..(483): unsure at all n locations
ctattctctncttttgattggtatggaaaaatagaatagtttatatatgtgattgnngcagagaatttctcgatgaagagaatagaaaactgcctcatacaactagcttaacacagtccgtcattgacaaggtgatcaatagaagctttgctgattggttggaacaaaaagtaaagttgtgtgcattcaaatttctgttgtaagaaattatttagacagtagagagtaatgatactcttatgcaagttttagaaaatggtgcagaaatagatgaatagacaagagcattggctgcaaaaccgaacaaaactgttgntcgctacagtggatacattattaatggtttcaggttccacactatgagccgtcangctggccgctgcactcanaatagtggtgttgtgaacgtcgctgatgatggtgttaattactatggcagaatatcagacattgtagagctgtcatatagaaattacaagtagt

SEQ ID NO: 69269 - DNA, 460 bp, Oryza sativa
  unsure (1)..(460): unsure at all n locations
tgctagagcattaaaattactagccacatggatgtactgtttgttacttattcgancataagagaatgatgttcatatctatggaaatgtataatactacctccgcttcagggtataagactttntagcattgcccacattcatatagatgttaatgaatctatgcacacatatatgtctagattcattaatatatattaatgtgggcaatgctagaaagtcttataatatgaaacggaggaagtataatcacagcatagtatgaagatggtttaatgttctatagttgaaaagtagctttctgtattgctcctcaaaatatcataacacatctagcctaagatagaagcagaagaataatatacttttcaggcatcatagatacagcagaaagttggcttgcacccacaatatacccatatagatgcatttgtatgacgatcatcatggtcataacaca

SEQ ID NO: 69270 - DNA, 441 bp, Oryza sativa
  unsure (1)..(441): unsure at all n locations
tggatggagagtatctcgcatagaagttcattgtttctgtctcttattgtcacatgccatacactcatcctgactatagcaatactggtatgtagcatttgagagcctctttatggtgttatggactggtcataataagggagtttccatttctcgcatttctcaccactcaatcactcatccatattgatgtatacttctttagctgacttctccttctgacaaatttatgcatgttcttagagagaatttacagaatacttgcacatcattatatttatgcatgttctgacaaagctgtggctgatgacacttngttagtctcatatttctggaagactacaacaaaaatgtatatagtagtggggagggtaccacaagtgtgtcaattgactgaagaactngttagcttggcacctcataantaatcaatatatgtta

SEQ ID NO: 69271 - DNA, 434 bp, Oryza sativa
  unsure (1)..(434): unsure at all n locations
ctcaagctgaagtgtgtgtganaatgagtgaagtgatgtccttatatatacatgttatgatggntacagaacgcgaaatggttggaatgcccgtaaccgtcatcaggagtgcatctggagcgaccacgccgaaccttagcctgaacggctgagattgtggttcagctgaaccaggcctggttcagccgaaccctggtctagcccaacaggcccataaattgggttggatcttcctagcaacttgccttatccatttcttcgagagttgggcccatttttcaatgttgaaatagacttttggagcccaacacttgcatgaaatagtctgaatatccttccaattttggtggtttattacctgcatncaaatatacacactcgtggaatatgttatgaataagcactaccactatgntagatgtttatttcctatg

SEQ ID NO: 69272 - DNA, 412 bp, Oryza sativa
  unsure (1)..(412): unsure at all n locations
gaataaagaaacccgncaacagcagacactctctgtattatgttggcnactagccgagcgagtgcatgggccatcaaacttgtctacgagttctttcatgaaccacgtgagcggattctaactgataatctacgctcctcaaaccgagcggcttcggcctatgctctgcggctcctcctgcgagacagtgcgccccgtggaggtcgatcattacaacgacggcaactacgactaagacgatcccgctgggtgcctgccggaggcaatctcccttccctctccggtgcccaccactgactaccgtcgtcacctgacactgatccctatgtcgccagctgccattaccgactgccgacaggagagagccggatagggaatggagatatatatacatggagagacaaagagagag

SEQ ID NO: 69273 - DNA, 441 bp, Oryza sativa
  unsure (1)..(441): unsure at all n locations
ctcctncgccatgctggcgagctctatctccccgcaccttattgttagctctttctccccaacgctaggcaagcttcttctccccacaacggcggccttcctcccctacaccggcaatggcaagatgacgcaacgggcgatgcgatacggatgggcgatgacgtgtaacttctgagagatggagtgccacggaatgaaacaattcgcgtgctcagtgatatattctgaaagtgttgcgaattgaatggcaaatcctaaaggtggtgcgaattgagtggcatgttctaaaaaatctcctaacctttccccatatcaaaccccttcctattttgcatttttatgaattaactaagttaattcgactcttgctgtttattatttatacatcgctttcctgtttatattgtcccattatcaatgcatgtttatttgaggttactc

SEQ ID NO: 69274 - DNA, 429 bp, Oryza sativa
  unsure (1)..(429): unsure at all n locations
taataaggctggtcatgactgcagtaacaaaactgattgacttatgacaaagctaatacgacaaggaatntgaaacagatgtagtagatgtttaaaggacgcaaattacacttactgtctggactcttcatcggttactttngtagtcaagctgtacaattcggctagtataataggatcangcctcttaagaaataggtggcgctttaccaagaacggtgacttcaactcctcatttggtttcaccacaatcttagttgtgggagaagacatttttatgagtccatctacttgcattgcattcccatcagatctagtagtcnaaggaactttctgatctatacaagtcanacaaaggaagtacattggaaacaagtataatactcacttcaaccgttaacatgaagagtgaccaacacctgacaacaa

SEQ ID NO: 69275 - DNA, 272 bp, Oryza sativa
  unsure (1)..(272): unsure at all n locations
agaatgtgccgaantgggcatctcttttcttggacctcggagaaatcctgtccgctttatctttaacagatctaacgaaaggtgggctattttaaaccgtttacgagacacctcctttgagtcagtgcccataagctgtgaatatcccgacgtattttcagaagaaataaccaattttgcctccagaccgagagattgaggtcgccataatactggcaccatgcaccgtaccaattgcaaaaagaccctaccgaatggcatcttatgagtta

SEQ ID NO: 69276 - DNA, 409 bp, Oryza sativa
  unsure (1)..(409): unsure at all n locations
tatagctctagctcacattatactcgctctaacactcaacttctacaaccacattgtttagggagagctgtctattgaaagggtggagtggtccggtaccaaagccatccgagggtggaggtggtagtgctgctataagtctaacaataataagtctatctactctttcggaatcgtaaatattgaatgagatgagcatattttattaatttttcccccctttcgatttcatgcggttgttcttctaaatattagactttcaaaaggtttttctaatgaacccttcttttgtttnttcaaaggtcagaaatcatcaatcatgataggaatatattatggtcaatatgtaactttcttggttgaagtttgattacttatgctgttaaggagaaacacaagagaaaagtat

SEQ ID NO: 69277 - DNA, 460 bp, Oryza sativa
  unsure (1)..(460): unsure at all n locations
ctaacctgacagcactctattatagtactgatggtgtgtttttcttatagtaaganggcgaattggatcactgtggctcttgatatggggctcaaagctaataatgacatagcggatncattttaacatttcttacatatttaagtgtgcattntttttcctacttgcttgaatgttgtaggcttcttttacacacacttctggttgacatggaaaaaaatatttatgagatctggcatctgggtgtcatagacttaattcggtttgatgtaagtagatgagatgctgcgagtaaattaagaggaacacatagccatggtatgaactggcctgccatgacagctgcaactgcagctgggtaactacaccaaatccacgccatccttggagtgttggatatccaacagtagacgggagaaaacaagccttgactagaaataccattcattccgtattttcc

SEQ ID NO: 69278 - DNA, 465 bp, Oryza sativa
  unsure (1)..(465): unsure at all n locations
cagtatttcagttcagggtcatcacttgaaatgctgaatatatctgttcaacaaattacacgtgtatttctcagccaaagaaagtcaaatatacaaagaccgagttataaacatcaacgccaacaggttatgacttgcagcatgcattgatctgataaaccactccgcaagcgatcaaatatatataactgaaccctatattcataagaagatggtttccactttctaccatatagtgcagtngatagtgttaatttgtgctactcagaagtcataacacaacatacataacattacaaaggttcctctagattccgggttattacttaactttatacagaaactaactttaaagtgcaacaaatagtaagtgcacactgatcatcatattactctcaaactaacttaagttcgtaccactgataatacaccaaactanatcatgtcaacatcctcaatcataat

SEQ ID NO: 69279 - DNA, 419 bp, Oryza sativa
atgtttaatggatgttctagattcattatacatctattatgaatgtaaggccatgctaataacgtcttataatatgaaacaggatggatgtacttttttctttcaagagcaatatttctttctaataaaaagttgcaaaaaaaactatcataagtttaagatactctatgttcgggttccgtgggaacctatcctatccaaggaatgattgggtgtatccttccatatcacttaatccaggggtaattggattcctgccactttagaaaaaaggtattactacttgtattcatatccatgtcttccgaatacgcataaaattaaaacaaaatacctttagatgtaagacccacatgcacgatctatcttgcctccttcattctccactcctctttatgttccatctctatccaccttgt

SEQ ID NO: 69280 - DNA, 286 bp, Oryza sativa
  unsure (1)..(286): unsure at all n locations
tgcagcaatgttatcggtgggcagatccagcggtggcggtgatgtccgcggcacccacgggcggattcggcggaggggacatcattggcggcgggaagatccggcggaggggacgtctgtagcgccgggcagatccaccggtgttgntgattgtgtatttgtgttgattgaattggtggttttatgtgatgatgatgttgttgcgtgcttgattttggagtttctatgtgatgataaatgacgttgttgctatgattgattttggattgatattgggtcgattttg

SEQ ID NO: 69281 - DNA, 412 bp, Oryza sativa
  unsure (1)..(412): unsure at all n locations
tctcgtcttgccttaccaggaacccggtgtgtccgatcccttccttgttgttccaactattggcatgcgaggtttccctgaaccgactagttacttatccagggtgtcccattccaccttgtggttgcactntgattcatgtcgatgagtttcccacaggaatcggtccttatatgcgaatacgggacagtgccacgtatgcacaacctccgcatcgcgaggtttcacaattcattntattttcaaacacaccgacaccacatgtcgggttctgaaggcttcacaaacccatttcccaagttttcgacaaacaacggtgtatgtgggatnattggtatacgcgctcagagagcacgaataccgaggtaccacaagggtggagcgacaaggaatcatggtagtacgacctaca

SEQ ID NO: 69282 - DNA, 393 bp, Oryza sativa
  unsure (1)..(393): unsure at all n locations
gcttcgcagaaccctcatcgacggtggcagtgcactcattattctcttctccaagaccttggatgatatgcagattcctcgctccgagctataaccaagcaatgcgccttttcacggcgtaattccaggattatccgcaactccactcggncagatcactctcccggtcacctttggcacccgggaaaacttccgcacagagaatatcagctctgaagtcgccgatttcgagacagcataccatgccatactcggacgcccggcgttagccaagtttatggccgttccgcactacacttacatgatgatgaagatgcctggtccccgaggagttctatccctacggagcgacatctaacaagccgtcacatgcgacaaggagagttgcgacat

SEQ ID NO: 69283 - DNA, 441 bp, Oryza sativa
ttaacttatgccagacaaatattaagaataaactatttcttttgtaccagcagcaaagaatatattcgagaatgctaaaaagccaaaaataagaaagctccacagaacccatattgttcaaatattaagaatgaaggatcatcccataaacctacgtataaggaatgcttgactaagggagtagatcctttggatggcgaatatatcgattggaaaataattgaaaaatttgaagaagcattcccccaaattaataaagaattgaaagaagaaatacttaaagaattaaagacagaaatgaatgataaatttgaagaaatgaacaaagcatatgatgaaaaattcgaagtctccttctctgatgtagatactatggatttaggttgtcatgggcagccttgacaataaagaaatataatataaattgatataaatattcat

SEQ ID NO: 69284 - DNA, 457 bp, Oryza sativa
tactcagcttgaagtccttgaaaacaggtgaacttcttgctgctttgatccaccggtagattcctatgacatgtataaaaattgagatagcttgtacatgtcgaaacacgacggccacgcatttccttccaattctcctctcaattgttgatgcgaattaaataggtgcacatgaaacgaaattatgcagaagttatgcctaaaaatctctcttaatgtgcaatataaaatatgaacatattcatgaggcaaataagataatatatatcaagtaacatatatttcattgatgcacatgacatgtgcagggtactcccatatccatatagaaaccactctccgcgctatgaaactcacaaattaaaattgatatgacataacagaacacatctttcttcaagaagaactatcgtacgtgtattaactatggaaaagatcacgtcttaattttttacaa

SEQ ID NO: 69285 - DNA, 386 bp, Oryza sativa
  unsure (1)..(386): unsure at all n locations
cagcttgtctatatntaccagcgtggcacaacctttgacatatattattaattaaatcggagcaaagtgtaaggaaaggaaattatcacaagtatgacaacgaaccaaatttatcaaacttgcatgaagtgtggcacgaatcacatttgtcaaacttgcttgaagtgtgacaaattaatttatgatggagaatactcaaagcttgtggctcacatcagtctgaacttgtagtcataatgagtcgaatctaactaactaagctggtactttctcagatcatttaactttctaatatatacctcctctattttaaaagaagacatcattatatcttcgcatacatcctccgtctacaaaaaagatcaatcttatcacattcttgtttc

SEQ ID NO: 69286 - DNA, 449 bp, Oryza sativa
  unsure (1)..(449): unsure at all n locations
gcttcggcttctccttctgagtttatcagagatgagcttaaagtaatctcattcacactccagttattattttattccctttcatttaccgccctcaatttagtttctatcatagatgtgtcacaacagtaataagatacagttagctggtaccaatcttgtagcattttatgccttagctcatacacatattgggtcacatgttacaagtttgtttagctgatataagagcacttgcttctctttttgagaggaatctagatgttgcatgcgttgaggacatactgaaaatgatcattcgtgctctttcaaagggaccatgtttatcatctttcttggagcacgtaaattgccttggggctgctgcattttatcaatcttcttacacgtaacatactttattgtgtacgaacatctctgttnacatatcatgctgacagacatttgtc

SEQ ID NO: 69287 - DNA, 368 bp, Oryza sativa
  unsure (1)..(368): unsure at all n locations
agcttatctcanagttgataagttatgtactaatttcaggattatgtttgcttttgtcacggctatagaatatatgcattagtgtacttgaaacaaaacaaggtagagtggcccaatggcactatttgtctttccaaatcgccactatgtcagtacagataaacgaatacaggtatgatcatntgtatatggattagatttttcaacaatattgtatcaaagtattgttttcctcatatcttggactgtagtatgtccttgcaggatgtaaatgttaactcaagctacatttcatgaacatatttggatctcttttttgtccacacgcagcgtagcgcgtgtctattgctagtagtaattagacacag

SEQ ID NO: 69288 - DNA, 434 bp, Oryza sativa
  unsure (1)..(434): unsure at all n locations
agcttctgacaatgcataacgaatgtgatcaagagcaccacattcatagcgatgagttggaccaccttttttcctgtacctaacattattcatagctcgagaaatcttgttagcggccaaagccaagtcctcctcgaactgtttgagttgctcatcggacatggaatgaatcaaagcaagaacagtagaatttgatgaagaagcaccaacatccaaagaagtcgcggaagaaaccaaagcactagacttagaatcaactttacgagaaagaatattcatctgatgtgttttgatctttgtgtaaagtgaatccaaagtcaaagtagacatgtcaacagattcctgaagtgatgtaactctcatnctccagatagacatatcaagaccattcaaaaagtgacgagaaacctcagattatgtgtaattaacatcat

SEQ ID NO: 69289 - DNA, 374 bp, Oryza sativa
acaccgaacacgcacttatcggggttcagttttatgctggcggagcgtagactttcaaaaggttccgctagatccgagagttaggtttcttggttgcgcgtctttacaaccaagtcatcgacataagcctcaacattacgtcctatttggctacccatagaaattcgagtagtacgttgaaaagtaggacctgcattttttaacccgaagggcattgttgtataacaataagttcctatgggggtaatgaacgcagttttttcctcatcctccttagccatgcgaatctgatggtaaccagagtatgcatctataaaacacaaaaggtcgcaccccgctgtggagtcgacaatctgatctatgcgaggcagggg

SEQ ID NO: 69290 - DNA, 428 bp, Oryza sativa
  unsure (1)..(428): unsure at all n locations
agcttctcatacatacccctagaaaccatgagctagaaaacctaactactttagattcttaaaagacgactaccaaccagcagaattttagaattttaacctccctaaaaagacctaaattgccataagcaatggttagaattttttttgttaggtctaatttctgactaagttgatattcttctaatcacattgattttaatttgttttagattgatcactatatccatcatgtttgtggatctatcggctaaataggtttctcttattaccttcaattntatattgtcttggttcggtccgatctattagattgctatttgtcgacgtttgatgtctcgactaccgtatttggacagtatggngatcngtggtgctatgatatacgcgagactgaggtanaagagatggacacacggatttttata

SEQ ID NO: 69291 - DNA, 464 bp, Oryza sativa
  unsure (1)..(464): unsure at all n locations
gcaccgactgtacaagngaagntacagtcggattaaagtttgtggcttagntgtctgctaaggtgatatagtgctccaatgcacatgttgatatgtcatgctaacatatcccgtagtcgtctcgtcatgccggatatcacctctatgtcatgttggctccaggggttagtaatgttaaggtgtccataaaagtataattttgggataatcttctttgctggttttatagcaaattgaaataggccataaatattacagcaactcgataggtcacaattttttgggaaaattcttatcacaacatcaattttgataaggatttgctggactctagtcatgtggagattcatacaaatntctagtcacctaaaaatgcacgtagcaattatacccctatataatgtgcaatttttagttattntatatgggttcaaagtggtgttctatgcaagtctggtacttga

SEQ ID NO: 69292 - DNA, 424 bp, Oryza sativa
  unsure (1)..(424): unsure at all n locations
atcttgttttattgatataatagattttaaggaacaaggtntactggaagaaggataataaacatgttctaacttgtgagtaaaagaatgtgcaactagaatgttgttgactatcaataaatgtaatagcaggtagtatttttgtgtgcctaaattgtatgatccaatattcacttctatggtgtttcagtcaaaaatgcctataacacctacatcaagtttgtgaaatataatgagagcagactagcttactgagtgaccagaagatctgctgtaccttgtgtgtaaggtctaatattaacttctgagcaagctcttatgtaattttggacataagaaataatatgtatttcagaaaatagcagcaccttttatcttgtagatgtctactgatattatcaataagttcaagctccttacaatc

SEQ ID NO: 69293 - DNA, 400 bp, Oryza sativa
ctcagcttctatatgttggaattgctcgagtgttagcccaagttatattccttaccagacatttgaatcttccttacgcataacccatcaataatagcattaaaaaaaaaggccatctatcatcataattatcattgtttttttcatcaaggctacgcaggatattaaagtcaccaccaataagaattgataaggtttcatgactgcacatattaactaacttaacaaggaattgttccttaaactcattctgagtaggcccataaaccagaactaaagcccacttaaacttatccactttattacatagatggaacttaatatataagtcctcctcatcaataatgccaatgtctacattaagtaaattaatacccaatagaagaccaccaaacctacc

SEQ ID NO: 69294 - DNA, 346 bp, Oryza sativa
agcttgctgaaattagaaataatttcgacacccttagtcacggtttgtgcgctaaaatcaagcgcgcaatcgtagaaatgggaaaggaaaataagtattatgctaactagatgcttcctttcccatgagtaaaatagtagtaggtgcttggtttttgtttttccaatcatataagcacttgctatgaataatgtagctcattggtgttaaccccaatgtttgtcaaaatttgttttgtttcatgtttaataagtatgggggagatatcacagcttctgacgtgcacataatctgaaaattactgaatgtctaaacacctggaaggcactgaactctgcataaaatt

SEQ ID NO: 69295 - DNA, 470 bp, Oryza sativa
ctgcttcttgctatggctcatggcggagatcaaatccctggtatcggtgaaacgcttgccagtcagctagctattgttgcatcatagtgttgaagtttgcaacctgtgcatcaacagactgttgccattcccgtgactgtaccacattatcctccaaggtgtgttgttcgctccctgcctacagttcaagtgtatccatcctccgggtgagttctcccagatcccctcgagaggagacagcgacacatccaagaggatgaaggtggaccacttgaattggaggagcgcgagtatactcagtgcagctcctacggctcatgccatcggccgtcgctggcactctgtcaagacgaaccaccagcgtcccaatagtccccatacatttacactggtggtgaagaagaagaacgcctctgaagtgcttctctgtacattcgtcatgttacactgcgtgggacatcacgatgcaa

SEQ ID NO: 69296 - DNA, 422 bp, Oryza sativa
  unsure (1)..(422): unsure at all n locations
tgcttaattgtgtaagtggtagactgcacaactgttacacactgcatgcagattgctaaaattggcaggaccatccgctgttttggtgatttggttgttagtagtactagtactttgattggtaggatcactggatcatcagtgtgatatatatgatgcctggtgagacattagccacttaattccttggtggcagccctgcctgattgctggttgcttgagctaacgcaacacagcacatggcaggcacgatgcatgttgaattggtatgactggatggatcatacggtgttcaattaggattcgattagatcatgaggtgacaaatcatgcatgatgccaatggtcttgtcangatagggaaaaatcttatcgacgttattatttatgctccttatatatagttcctagcttatgtacat

SEQ ID NO: 69297 - DNA, 367 bp, Oryza sativa
tattccgaccgcgtcgacacgaccagaggctcatgggaagaatatgttatgaacgacgtatataaatacaaatgtaacggagaacaatcacagcggagacgcacgatttatcgtggaaaacccctttaatgcgagaggggaaaaaaccacgggcaccaaccagcaacaatctcactatctcaagagttttgggttacacgcctatggcggcttacaagagagataaatcttcggcccaagcctccggcttgtgcctacgatgcgcttctgcagaagcccggccaatatcttgtagtggattgggaacatctcctaccgaatatatgagagataatgagatatccgattctatacgagatcgaatctg

SEQ ID NO: 69298 - DNA, 432 bp, Oryza sativa
  unsure (1)..(432): unsure at all n locations
gctnncttgttctctgagcgatggatggcacgacactcaaaagtgtgttctatggcaatgggcggatcgaaggagtcaaggaggcgggagcagactacggctgtatttagttcagcccaaagtttaaaatttggttaaaattagagatgatgtgactttaaagttgtctgtgtatgaaaggtttgatgtgatagaaagttgaaagtttggaaaaaaaactttggaactaaggctgtgtttagattcaaactttcaactttttccatcacatcaacatatcatacacataacttttcaatcacatcatactaacttcaacccaaactttcaacttttgaaggaactaaacacacagcctatacacagcctaccagtgtgagcagtggtcgacagagcccgtgcgctactacccgaaatggcacctgatggatg

SEQ ID NO: 69299 - DNA, 463 bp, Oryza sativa
  unsure (1)..(463): unsure at all n locations
tttgcctacgtnnttgtgtntatagagctttcattcttgttcaggcccagagnntggactcatgttaattatggtcgatatggagattagcataattccaaattccaagtgtgtacgctgttgcttaagtaactttggaatgatttaacttgaaatattctactgcttttgtaaccacataaataatatacgaaaggcacacgcgcgtgcgcacacacacacacatttatcagacttctcaatgttcttctgttcatttagaacttaaataccaagtactatcccatcaaccatgtctaatttcccatgtttatgcttggttcatcaatacaagcgttgaaagtagaaaattgtacctggctattagatggacataaacattcctgagataattactgaccagcatttaataatacagatacttcacagctgtggtgcactttacactggattggtgtctgag

SEQ ID NO: 69300 - DNA, 440 bp, Oryza sativa
  unsure (1)..(440): unsure at all n locations
agcttaacaagatcgagagaggccaccgtgatggagagaaattggttgagcatcatgtgttgcgtgtccacaaaccaggaatgggaggcatcacggatttgacgcacaatgccattcaggcaatctgttttctcctattgttgagttagttctcaatgaatcattggaaccgtatgctacgaatgctagagttacacggtaaatatgttcagaagcacatttacgagaatcggcatgtacagaaaatgttcacgttacatttcgagcaatcacttataattttccgcatggaacaaatgtgaaatgatgatctacttcttggtatgttcaagctcactggccacagatatcagcgtagcaagggaataccgatgcgaatatttttttttatgtggaaggactacnaaatttgtgtatcgatgtatgacatgtgtggctac

SEQ ID NO: 69301 - DNA, 407 bp, Oryza sativa
  unsure (1)..(407): unsure at all n locations
atgccataatttctattgaatatattttggtgagtacatacaaatcggaggtgcctaaaaggtttacaacttcatcctccaatgtttntttttgtcatattacatttgcacctatgttttgcacacttttttgtctccaaaatttagttgtaagttgatgagagagaaaatctgtgtggcgaagaaagaatatatagaaatctagttcatttgctaaacaaggttttataaaatagttgagaaggaaaactctagtgaaagttaatcttaaataatagaaaacaaactaaaatgaaaattaaaagaagtaaaacacattaaaattagtgtaaaactttagaaatagtagataagaactatttggtggnatattctatgaagtttgtatgaatacagatatgtcatta

SEQ ID NO: 69302 - DNA, 364 bp, Oryza sativa
agcttatccgttttaggtggaaaaacagatttaacaacttgctgattttcagattcatcaagtttcaaactagcaactcgctctttatcagcttctacaatttcagcaggggtcaaaggtagcgaagtaattttcttttcattatgcacaaaagtgtatttattactcctaccattgtgtgtagcataattatcatgttcccaaggacgactcaacaaaagtgaacaagcttgcattggaaccacatcacaatcaacagaatatgcatatgagccaatagaaaacgaaaccctgcagacctgtgttacctttgctcttccggagacgtttaaccactgaatatggaaggatgtggatgtgtacg

SEQ ID NO: 69303 - DNA, 462 bp, Oryza sativa
  unsure (1)..(462): unsure at all n locations
tatgagtaagaccttctcctatttagaaattaaccttgctgtggcccatcccanatgagtatatatttattgttctttaatggacatatcttcaacatgtggatgcttctaaactttntcttgggttaggatatcaaaaattaattacctctagaaagatagcattgactattgtacactagtacactatgcctgngaaattaagtgctagcaattcaattgttttcgatgatatactatgcctaggaatgcattatgtagtttgacataaaacaatcttctcctatgtgcttcaccaaagaataaagtttcaatacagtttctttaaatnttcatttcaactagttcttcaccagtctgtgtgcagtgtggcacgtagcactgtcattttcttcaaaagtaaatattacctcttannacctaaatttgcatatggtacattataccataaaagagaagtac

SEQ ID NO: 69304 - DNA, 393 bp, Oryza sativa
  unsure (1)..(393): unsure at all n locations
ttttcttacacncgacggattgccggcaactacggatccgtgaacattagcttagcacttctccacaacgccatagaggccacgatgcacatccagataaccgaagtgcgtggcagtgggggcttcaacatgtctatggcttgtcgtgtcggtcaaatacctgatgaaatcaagctctttgaaagtgttgccattgccaagccgtgtcagctaaacaagaggtttgtgcttgccattgtcaagcgcggcatcttggtgttagacttgaaggttaagcggagtggcgcctcagaggaggaggagccagtctgtatgctccgtggcttgaaggcaaaagcacatagccaagtcatcctacctatgatatttgatggcgccaccattntggtcagt

SEQ ID NO: 69305 - DNA, 478 bp, Oryza sativa
ctgatgtcatctgtggactggaggattccatattctatcactttagaagctaccatgctaacttcctggcgagcgccaatggcactaatgtgctcaatggtggtgaggcacacccccctgtgcgcaaactgttcttcgccgaattctgggactcacaatctggtcgatttaacaaatcaaattcaaagcccatctgctctcctgttcaaaattataatgcatgtttcggtgagtcactcaactcttgttcctactctactactatctccgtttcaggttataagactttctagcattgtctatatctatatagatgttaatgaatctaggtaacatatatataaatgtggataatgctagaaagtcttattatatgaaacggaggaagtaatttttatttttgtcaaggaatgtattatacaggcacaataattgttgcaatcgttattgcaatttgatgcatgtaatgcctactgga

SEQ ID NO: 69306 - DNA, 360 bp, Oryza sativa
agcttgaaaaatatgaaaactcgacttgttgaaaattcataggaaacttaaaaatatgaaaactcaactttctgaaaattcattgataagcggtaccacctaagttgactacaactgtgtcgtgtttgttctcctgagctgattatatacaataatacaaatggtctgtctctagtatttctcacgaggtgtgccccagaatcaagttcattcatactccattcataagccatagtacaaagttcagacacgtacacacaaccagtcgttcatacattggagtacactggacagacacaagatgcccgtgcacacacacactatcttcatctctaacacacagacacaaccctttatacc

SEQ ID NO: 69307 - DNA, 492 bp, Oryza sativa
  unsure (1)..(492): unsure at all n locations
acactgatgtanaccatgcatcttgtgctgcagatggattgattgccttactggctaaaagaaagtgttcaccctgccaacaagatggcgattctcagggcgctgctgacatagagataccagaccttccagaggtacaccatatataaaatgttgatgatgaaacatcttactagtagtagtgtagtgcaagtaaattatgacgattactgcttcaattgcacaaattggtccaccaacgctattaaagtttatgaacggagcactttgatgctgtaacctcctacagccctgctgcattggaatcttctttgttttgctgccattgaatagcaacatgctattagacaattaaacatcattccatccattctttctggcacaaatgcaaagaaacaaatatgtgctgagcacttaacacctcatttgggtaaagaccatatntgcctagaagaattcaactatacaattcatagtacaatagtacataat

SEQ ID NO: 69308 - DNA, 336 bp, Oryza sativa
  unsure (1)..(336): unsure at all n locations
agcttattgacttcctcatgcagtcangctctctacttgataaaagtgagatgaactattagcgcattttcagtttctaacagtactcagttatgaatataacatgcaagtacatgtgtttagaatgacctagataatatccagctctgcataatgaaaaaggattacagaatacacatcaagggcgagaaagaagtgacttacatactaactgaatatggattttctggctacactgaactcagagcccaactacaaccacctttgccttcaatggtacaactgattaagaaagtcacacacaggcgttggagaataacactattagtaattact

SEQ ID NO: 69309 - DNA, 450 bp, Oryza sativa
tactcatgggcctcgacattccttctagaatatctgctatgttcgtttgaagacgatgctgttaagaggcttgtattcaaatccataacgtgtacaacttgatctcttgtcttctatgggccaaaagtgacatggtgagttaaaagtatacttggagaacgtcttggtttggtccccaatcaactttatcatccatgcattcgttatgctcggactcttttacttcgtacaaacatgaacctctgctaacgaaaacacacataacttattgtgttgtaacgtttgttcatatatataacaagtaaatctaatgtagaacatatgcacctttggttgattaatacataaagtagacatggtatattcgagctagttgtgtactcttagctggtatggactcgaagtggtcacacagcatggtacgtgcgcttgcacttgatacattgacgt

SEQ ID NO: 69310 - DNA, 331 bp, Oryza sativa
agctcgtggctaacttatccaacagaagctatagagggactcaacatgaatgctttacttagacttaaaccatctaactaatctagacttgagaactaggttgaaatgagactaacttatatgaatgaactcccagctacggcaagaacatcaaattgactctgaaaaggacgggttgaaagcaaaagtgtacctcacaagctattatattgagtaatgaatgcatgaaataatacctattgagtatggctatattaagttgtagaaagcacagaatgtagaataagaaagcctgtgatgtttgaaatgtgcagtatttaataaaatcttg

SEQ ID NO: 69311 - DNA, 419 bp, Oryza sativa
gctgatcatcatttttatgaaatgtgtgtaaccaaagtgaagtgcatgaatcgctgacaactggctatttatagctcagtttcttactagaataagttctacaagcatcttctaccatattgttatcaaaataagcactaaaagatgcatctatactatgatcaaaatgtttagaatggtagacatggatcatgcgaattggaggttaccttatcgtcaaatacggtgttgtaaagagaaccatgcttgagaaccacaccttgacgggtcctattgcacgtcttcatcaatatctcctggctatacgccttgagatgatgctatatggactagcgtgctcgctcatcaagatcgttcaatgtgaccactgttatctcgtctccgctcgtcatggttgatgaagaattccttgattaatt

SEQ ID NO: 69312 - DNA, 350 bp, Oryza sativa
ctcagctttgaacccagcttcttcagcttctaacttcgtagttcaattttcatatggtctgttcactttgatagcaaaaatttggcaactcgccaaaattttgatagaatttattatatagctaccacaatttggcagcaaactaaatgtagccacttttctgacaactttatcaaaatttggtaagattaaaaatggcatcaaagtgaacaggccccaaatctgtaactacagattctcagaagctgtgaactggtttagacagcttctaacagatgcagcttttggccaaaaggtacagatgggacaagctcctccatacacggctatatctctatcttcgtcgttgc

SEQ ID NO: 69313 - DNA, 400 bp, Oryza sativa
  unsure (1)..(400): unsure at all n locations
agctatgttttgtcttagttgtaataatattatttattaatatgaataattntcttgtatctgtacatggcacagaaggctatgccgtcgtggcatggctggaggtgttgtgcttggcttgcctgtggtgcgtgatttgttgcctttcatccttttcagggcgcccgtttaaactcaagtttaattcctttgtgtggcactagttttcaatccttttattntacaggagaaggctagccggaaaatggtgaaatgtgatattatgatggatggacaggcggagcttattgctatgagagcactattatgattagtatataacttctatattgggtctgttccatgagaacatattngcagtaagtattagaacctcttttattgtgaatgccggttgtaa

SEQ ID NO: 69314 - DNA, 428 bp, Oryza sativa
  unsure (1)..(428): unsure at all n locations
actatatctacaacttattttattatataactatacatacacatgctaaatcattatttgtaaatcatttttattatatttcaatccaaatcatttcattaatatctaacatatattccacagcaaagcgtgggacatcatcccatgcttgaaataactaagcatcctgatgaagagagatggacttactacagataacaccatgagtaccttcgggttagaaatattcagcacgtataaacgtatataaacacatgtagcgtatttaatttaaatacatgacagaagaatactttcttccaaaattataacgccatgtcacgtanacatggttcgtctgagttttcatccatacctcgcaactcaaatacgaataacctctttcgaaatcttcgagaaactcnttttaataacatcctttcacgtcc

SEQ ID NO: 69315 - DNA, 436 bp, Oryza sativa
  unsure (1)..(436): unsure at all n locations
atcttttataggagggaatttagacatctaagcgggcctcttataggcccgcttgcgacaatatatattcacgtacggccgcttaagaggttcgtttgtgaaaataactagatgaatctcttaaggggttacatgcgaaaatgcattatctcgcatgcggcccctgaactatttcttggtggagcgattcttcatgcgcaaatagtagtgatatataagcgtccagatggtccgcatggaacctataagggttctcgtacagaaaaaacgtttgctatgaatctggataaccgcgtgtccagattcataactaaaagttgntatatattgggacggatgtagtaatcaatatggaccggaagagtacttcatccgttccaggatattagcacctatgattggatgaaacgtattctaatatgatgaatctggatat

SEQ ID NO: 69316 - DNA, 459 bp, Oryza sativa
ctcatggacccaaaccatatcatgaatgcaggtatttatccatatagattgttctgagaaagatctaactcaacaatgcctctctaattcatgaaagaatcatgaattcctccatcaagaaagttcccttccatacggagagagcttaattggacacagtctccatgagcacagggaatttgtcctgacagcctggtattggaaatatttacaatatcaagattgatcgagccaccaatctctgatggtatatctccatacagctggttgtgagacaagtcctatcatcctgaaagagaggaatgagtaacgagctcctctggtatgctactatcaaagctgtgtcattacacaattataagcttctagattcttgcaactccgtaacgagctaggaatcgatccactcacattattttctgtaattgatctccttagatgattatataccaatgaatt

SEQ ID NO: 69317 - DNA, 402 bp, Oryza sativa
  unsure (1)..(402): unsure at all n locations
agcttttttcattntttgttcatctacgttgacacataataatataggctttgatttcaaattatttcctgaagtcaagctgtctggagaacatcttgaaacggtattcaaatacaaaaatggcgatgatgtccgggagatagccaaaattaacattactctccaaaaagaagagggtggtttatataatttacgtggattggatttaaggggtgcttcttttctggacagaacttcagtaactatgatattcaatatgtgaactggggaacgtcattgtttgatgttgatactccgtgtatttttaatgcgcctgcttacaacaagagtaatgaaaaatcattaaaacctgtgagcgaaaacgggttaagtggagtattgactgatcngtataataaaata

SEQ ID NO: 69318 - DNA, 419 bp, Oryza sativa
tactcaatgtttagcttcttgcttcatcaaaatcttcctttgacattagacctgaattgataatcctgcagaatgcaatgtcatgatctctttggaggcgatgaatatatacggtagcatctacatgctgaagaataaacaccaaggaggcacatagtgcaactaatatagctcataaaatggataatgagatccatgaatcattcaacgacttctagattactgccaactgtgataattagacttataagcaaaggagaaacttcaataactgactaaagacagtactgttactcttgtgactccagaatgacaggcttcaactattgccatacgtatatttccaccttgcttcaatacaccaatgtaattccaatgttagactaccaagagcatctcgttatccccttccctatata

SEQ ID NO: 69319 - DNA, 458 bp, Oryza sativa
  unsure (1)..(458): unsure at all n locations
ctagaactatcaacatatctaatcttattgttgncaaagacatcctgcaaaacccttgcagtattagatgccttctgacctctcatcttctttctttcattatctacaccatctgagacaaagtttgccttaaacaattcatgcacagcagcaactgacatgttgacttcaaccgctggttctacgctggatttacactttgttcacatgaattgtacattccaacaccctttttaacactagaaactactgttatattgtcaggcctggcatcaactcttggtggatggcattcatctttatgtgcctgcttccagtgagatatctggcacttgaaagttctgcaaccataaaaatggaattactgaaatatcacattttggtatagaacagatgacatagattttattaaccaatctagattgatgcacacaacataacttgtcaagtcatgataa

SEQ ID NO: 69320 - DNA, 433 bp, Oryza sativa
agcttgtataccttcatgggccgactcttatgggccatttggataagtgattagttgcttctagcaagttatatgtttatgggaaggtcctcttgtctatagatgtttcttctttggatatttatccgcgcatatgaacttcttttctgccaatccatttttcagatcaatgggcagcagtgtgccttattcattaagggtagcccgtactggatggctcctgaagtaatgaatatcctacattcttctacacttctctagttatttgatgaatatatgcctatcttctctccgcttgtataaaaatcaaccttgcttctctcacacatgtaataactatgcacgttataaaaaattctaatggatgtattctgctgttacatatggaacttaggatgcacggttttataatagctacctcaaaccaccatgg

SEQ ID NO: 69321 - DNA, 449 bp, Oryza sativa
  unsure (1)..(449): unsure at all n locations
actcaagcctattgtggggtaaaaatcattgcacactgggcatcataatttatttatgcttaaaacatgcggaagaggtgtctgctagacttttaattttgctgaacaaccctttcaccaatttttcatctgaagcaaatgttgagatctgttttatatatcctttcatgagtaggtctctttctttcttttatgtttcttcggaaaattgataatggttgatggaattacatgtctgacatggctctaagaaattggaatgtagtggcattcgtctattgatatgttgcatattgatccttgaataatattgctcatgtgggcatgttacagtttccatctaaaatatcactagtgaaatcatgatcatgttctttacgctatatttgctatttaattggcttgccaatctgtgcacactctagatgntcttcggttcctataggtct

SEQ ID NO: 69322 - DNA, 433 bp, Oryza sativa
  unsure (1)..(433): unsure at all n locations
tagcttactatagagaagagaanagctgatagagccatacccgaactattccgaaggctttcggactcctaatttctactctattcctattccaccaactagatactactaaactaaacttgagagaaatgagagagctattgcttgagtgttgatgaaaaaatcgaacacgccagcctggcagatctgcttagctccagtgcaggtccaaaggttgatgagatgcgggtgtgccagtcagtttgatcctacaactgacaaaatatgcaaataatagacaaaacagccaatcggctgacaagccgatggagtagttccagccgatagccgataatagccgatgccgataccaaccgatagcgatagggtntaagctatcggctatatgtccaatgtagataatgatatataggcaatctgcttatgatgatgt

SEQ ID NO: 69323 - DNA, 403 bp, Oryza sativa
tagcctattttccacgattaacaactgagatcctcaccgtataaatgcttattcgtccagattgcctacagctagctttcagtccaacggcatggtgaagatcatgatacatatgtacctggaaagttgaatttacacataattaagatgcgtatcactgcgttaggcgatcaagctaggcgacaattcaagggttaatatttggtgtgagataattgtgatcatcagtatttgctgctacagttgacagatgatgagaatgtgaggtatgcattcatcctggccaactcaaatggagcgttttaatgattggagtgtacggcctacatttcaaatatttacaagtctagttaaaactataacacgagtatatagttacttataccaactctgctattttata

SEQ ID NO: 69324 - DNA, 396 bp, Oryza sativa
  unsure (1)..(396): unsure at all n locations
tctntattatctcaaccattttgaataagctctttatgtctctctaacaaccatagcccctggaccatgatagtactggaccatgatagtacttgaaaaactgcagtgtccaaacttcttcagccattctgataagggtaaatttgatccataccattgtaaatgtgtctattcagataacatgcctgaaatttttgctgccgatgccacaggataatccgcgcgaagcaccagaagaaggacatggccaacgagcgccccctcatcttgttagacttcatgttcctcaaagccatccttccgacgctcaatgtctcaccgcgcaaccccctgaccctcaccggcgcaacgttgtcgcggcggcctttgctggtggcagctcttcacctgcccact

SEQ ID NO: 69325 - DNA, 409 bp, Oryza sativa
  unsure (1)..(409): unsure at all n locations
agctntagatctgatcatctgatagagtctaatcaggtatcaggtagctggtggggtttgatatagtgcgattttaaggtttaatctagattggtctgagttgtactgagggtatctgtgttgatccttttggaatatactcaattttttataattttggccactcacgctatgcgttatttggggagagctcggatggttttgtagctaagctgacaactaattgtaatgtattgtatatttttgaggcgttgctatgcttgtggctntgtgtcaagtgttcttctgtttcaggaggccttctatataaaccaattgttgattntgttcacctgcaattgaaatttcattagttattntgtatgtatttctggaaatagatagcccgccgtgccaatgtgccatactg

SEQ ID NO: 69326 - DNA, 337 bp, Oryza sativa
  unsure (1)..(337): unsure at all n locations
gtgccaaacatgcnctatatatagcangaaanaaaaaaaagttcagcttcnttaacgccgccacccgcaactcgttaattgttggtcgaggggaatagatacgtcacgaggatgatccatccgccgtcctggccacggtccacggcccacgcacttcaatattcggcccaacaaacgcgcaaccctgtatgctgtagctgatgcaacgtcccgaaagggtctccaccagagtcagctctaaaccctaaaccaaacgtaccaccaccagctcacccgacaaaatataggcatagcaactaccccctccgtcccataatataagagattttgagttttt

SEQ ID NO: 69327 - DNA, 422 bp, Oryza sativa
agcatgtatgactttatttcgagcttcgttctgtcactgcagatgtataacttcgagaacagttgcccatgcccataacatagatgttgattctttcccggcaaagtaaaatgtcttacactcatcaattacttcttcaatccccactctgaattctctaccaagtgtaccggccgatcacatcatcccaagcatatagttcgaatcctcacacttgcttccattgatctccatcaatcttcgcaaggaattcctgacttcctggtgtgcatatgccgtcgacggttcttctatgttgcacaaacccatgagagaaagacgctacaattttaccgcttaactggcgtattgaaaattatcggtccacgccagccttgaggcacacgcaacctcacctgaaccatgaaatatacttgtcttca

SEQ ID NO: 69328 - DNA, 490 bp, Oryza sativa
  unsure (1)..(490): unsure at all n locations
gcttgaatgccttcantttgtgtggcgcagtttatttcggcttaatcttcatttatgcgcaactagacttttctcctagctttgctaaacattatacattttgaaaattcaaatgcattttgatacgtcagttgtcttcaattttgaaagttagcaacttaattattctttaacaaagtatagtaatgcaaacatgcatatattgggtctaatgagaaacaaattgtttttccatttaaatatttttttgtacaaattatactatattgttggttctagnaaaaaatatttcagtctttaatgctttataagatgcgtgatttttcatatgccatttgctattcttttatatgaactacacgccatcttgngtttttaatagaggaagctgctaacattttcgaaagatgtttgagcattcattttatntaaaacatattgtgtatatgtgtgaacatggtaagtaactctaataataaaccaagttata

SEQ ID NO: 69329 - DNA, 356 bp, Oryza sativa
agcatatctaatctgttgctttgggcagcgatagtggcaatcgcacgaaaagaaaacggccatgacatcgcctatatatctctctcttgatctttcggcgctcctctatgaaatgtacactacccactgacggagattctatagttatagctgctgctgcttactttataactttagcctaatggacagatatagtggggcccccatgcccttggttgaccaaagaaaaagtaaattacactgaacgcagtcttggatctgatatagtagtataataataattgtagactgactgagagaaagcttatcttagaccggcaaatagtactcgtggtagcatcaacgagattttgcta

SEQ ID NO: 69330 - DNA, 462 bp, Oryza sativa
  unsure (1)..(462): unsure at all n locations
ttgtatggtttgaacaagctcctagagcatggcatgatagtcttaagaactttntgcttgcgaaaggctntataatgggaaaggttgacaatacactatttgtttctaagcatggtgataatcaactttctgttcagatttatgtggatgatatcatttttggtttttcgactcacgctttggttgtagatattgctgagactatgcgcaagggaatttgagatgagcatgatgcgtgagttatcgtacttttctgggattgcaaattaagcaaacacctcaaggtacttctgtgcatcaaatgaagtatacaaaggatcttttgagacggttcaagatggagaattgcaagccaatttcaacaccaattggttatacagctatgttggatcctgattaagatggtgaagctcgtgatcaaaatgaatatagaagtatgaatggatctttgttgatctaact

SEQ ID NO: 69331 - DNA, 444 bp, Oryza sativa
  unsure (1)..(444): unsure at all n locations
agcttcaagatcacacatcaactaccaattgtcctgganaatacaatttgacccacagctcacaggcccccactacaatttgccgaatccccaactagaactacacacatacaaccaatcccacccccaaaattagcagtctagcgtcgtcaaacgcgcatcaacgtcctaatcaatcccaggcaggcctaagcaactgggatctcaagactaaacaagccatgctcgagaaaatccgcaatcgaaacgatccatcccatttcgtaccatgattagacacaaagtccggcttgaaaaatcacctagccaccaacccgcacgcgcgcgcgaaaaggtaacccaattatgtcacgaacttatgcaccgacagctctgatctaacaatggcccgaaatagcanaaccacgtcattagacgtcctaatcaagacctaacaaccacggg

SEQ ID NO: 69332 - DNA, 477 bp, Oryza sativa
  unsure (1)..(477): unsure at all n locations
catatactacaagtcactctattgtcttgactatggtaatatatgcaaaaagcacatttgatattatagtcaccctttcctctaatccaatcatgtttacaatttaattgatccatcatttcaacctttagacctgctaattcgtcaattaaatctaactcttcatcggatgattcatattcttcgttgatagtttcaacttcgtctgtttctatgatagaatatattgattcgtcatcttttatttcatcatcacatactaatatgttttcgtttacgctatctataattagaaccctctcttgttcttcatatttactagaatatctcttttgatttttatttgggcatgttctacttaaatgatctggcgagttgcatataaaacatctgcatgttttgtcatanggtttctttggaatatatcttcttacatttcttttatgtaagaagggtgctctatatctgatcttctta

SEQ ID NO: 69333 - DNA, 457 bp, Oryza sativa
cactcgacccggatctctaagcacctgcagctgcagcttgaagaatttgtagttattgaaggatgatcaacctgaagctgtatgtcaactacaccgtctgcatcacaatactgtagtgtggacctctgacactgaccttttttcacaatttattaattattgaagccaaatggccaataaattgatcgaaattttgtgtcaagctaactacaatgctctagagaaaaggtgaacaatctatacagacagccattctgcaagaagaaaaaacagaaagggatagtcaatctgcctgaaaagatcagataaatatgttgaacagttaaactgcacaagctagtattgaccttaattaagctccatttttttcaataaagtgcatgcctctgtgtaaaacatggtgcatgcctgctgcaagtactagcatgcacaatcagttcatggaaattttagatga

SEQ ID NO: 69334 - DNA, 347 bp, Oryza sativa
tgcacgcacaggctacagattatggttttttctttttgactaattcagataaggagatccgtcgctggcacggattatatcagatatactcctccaaagagaaaacaaagatccgcaagcgaagcgtctttttgttccactttgtaagtggagaaagaaaaaagcatcagatatgctacgcgcttctagacctatacaatttgagggcaacataagttatggggagaggatttggagcaccctgaacgagcaatgatgcaatatatgctgatgcgattttttaaaaagagaaatgttgatgagtccatacacaccagaaaaataatttgggcacctgaagtctttct

SEQ ID NO: 69335 - DNA, 429 bp, Oryza sativa
  unsure (1)..(429): unsure at all n locations
agctttggtacagtatcaactgacctctncggaggaagataagctctcaatgcaagtttgctcaaacctaacatggactttagtcaaaatcaaccgaagcctccgttgggacaatacgaagtaaacaacatagccctccacttaattntttttagataattggacttcatatcttaacatttttataattttataatatagaatttacacacataggaaataggcctctcaacatgtgtttttctttgttagtactagttgttatttgcatagttgatagttgctagaaaaaatttgagcaccgttgagggaaatctaacgtatgtaacattatttatgtacttgtagttatctcgctcctaaatttttttggttttggtcacactaaatgcctagtcggattggagaaatttagcaagaatatatttg

SEQ ID NO: 69336 - DNA, 456 bp, Oryza sativa
  unsure (1)..(456): unsure at all n locations
tcgtggagacaagatcaaggtcagattcaagatacggagatttntatcgaattcgcgcatttgatcccacaacctanaaaacgagtgtaatgtcgtttgtggccgatgtaatgtgttctgttaccaatgatcttttgtacgatggatactggtagctatcttgtatgatcaagacatgtttttagatatccatcaggttaaacttgcaaaaatttgggcatcaatttcttgtatgacatttgaattgaacagatgaatgtttcagtctataatttcagcaaagagggtgacntactccaattttttcttcagtctaaatgagactctgcatctttcattgatgataccaatggaaaacagagtcctctgctttcattgctctgtctactatactgcaagtctagagttggcctanattagttcanaaattattctagcttatctaaaaacgttcaa

SEQ ID NO: 69337 - DNA, 432 bp, Oryza sativa
  unsure (1)..(432): unsure at all n locations
agcttgtctgttagccaacattgtatggcggacacttgagcttgaataggtgatcaaaagggcctcgaggtccatttccaacgacaagatctttactgtgatgaagagcaaattctacaaaattcttagccacctggatagttcacatgtgcaataaacaacaaagtgagcctactgttgtgaatagaggatatgaaaagatacatataacacaaattttcaggaaaccgatgtccaccggaactgattagcaaacttatattggtatttggtaagactcaaagtctcaggatgacttatgcatgctttgttctgataatatgatgggatttgcaggtatacacantttttcgcacataccactgttcttgcaagagaacgagttctgacagaaaataagccanaacacacatgttcaatatatcactggct

SEQ ID NO: 69338 - DNA, 496 bp, Oryza sativa
  unsure (1)..(496): unsure at all n locations
ctgtcatgatggcttgcgttcttgggattagtgcttccatcgtcatgatactctaatcttgtctatgtaaatcatcaagttatcatatatgcgttataatctgtattagtttcataatctaacctataatcagctcgtatctatcaatgcagagtagccgataaagttagatttcgttattaatctagattatatagcatatctaccatctttaagaggttttcatcatcttgattagatcttgtatttattcttatgcttaatgttgcatcggttcagttcgatctattaagtaatatttataattatgatatctagcatgtcttatgattatcagtagagatagcatcggagtttcagccgatcttacctgatttagccatattntctctaagtacttggtttacatgctaaatctggcctttatattaagatcttattacattanagtatattaggcttgttggttgatatattttgtctggttaatatctta

SEQ ID NO: 69339 - DNA, 374 bp, Oryza sativa
  unsure (1)..(374): unsure at all n locations
agcttgctctacatattangaatagattcatactcatatcctggcggatgctacatgcatacctcttcttcaaggaatccatgaagaaaagcattctgtacatctagttgttttatgcaccaacccctaaacacagcaatagacaagacaatcctgatagtaacagctttgactactggactgacagtatctttataaactataccgaatctctgttcaaatccctatgcaactaagcgagctctatacctgactagacttccatcttgttttcttttaattgtatagacccacttgcagtctataacatttctaccttgcttaagtggaactatgtgccaatgtttattattcatcaaagctcatactctata

SEQ ID NO: 69340 - DNA, 486 bp, Oryza sativa
tcaagctttacctcccgcagacttcaactggtgagttaagttcacttttcttcttttagtctcgtataaaggtggtacacactacatctgggtcagtagaaagtagtaaatagaaacaaattatcaaaacaagcagtaattccactatgagctgcagtagagtgtgattgtcagcttgaagcccatgcactatttctatcatggaatggatcaatgccatgttgtattcctgagagcaacccttgtgatatgcactcccgagagtggcttcagatagcttccatgtttggcaacttttcctatggaggaagcaaattaattgccacggaatggtgtgtaacgaaaagaaatgaagttatcgaattcaatcaatagtttccacagttgtgacagagggattaacctgtgagttagcacagctgacaaacttcatgacactgacggaggaattgtgacgcactacttgagtaacgttttgatagtaag

SEQ ID NO: 69341 - DNA, 355 bp, Oryza sativa
atctagttatctttatatttacttgctgaacattaagctgtgattgaatgcttgtgcaagcatgtgctgctccatgttataatgactgcatacattatatttcttgcaaaataaactgtaactttaaatatattgtcatgtaatatttctcaggtgattcatatatgtaagttttgaactgttactgcaatcaagaaactgttaatattgatggagttcactgcaaattctcatctttgggttcttcattcaaacaaggtggagaattatcatatcttgtaatgcgtgagttctgtcgatatatgtttaaatcgatttatcctctaaaatccaaaagacactatgtcttctcttc

SEQ ID NO: 69342 - DNA, 455 bp, Oryza sativa
  unsure (1)..(455): unsure at all n locations
actcagcttgttgtataacctacaggccagatcgatggcatttctcgtttagaggtgcggcggcgagatggtggtgtccatggagcgttcgcacggccgttcgacgactacggcggcggcggtgacagcggcgccggcgccgttcctgagcaagacgtaccagctggtggacgacccgtcgaccgacgacgtggtgtcttggggggaggacgaggccaccttcgtggtgtggcggccgccggagttcgccagggacctcctcccaaactacttcaagcacaacaacttctccagcttctgtaggctgctcaacacctatgtaagcatatatacatcatgcatgtatatatatatatatatatgccgcaataatttcactcattatgttatatgcatgctgtttttntcgctagctgcttccatttcatcttttgatctcctctagtttctactac

SEQ ID NO: 69343 - DNA, 381 bp, Oryza sativa
  unsure (1)..(381): unsure at all n locations
agcttcacttactcctaatgaaatagaagtttcatctctagagtaaatgaaacaaaataaatgatgtgtcaagaagctggactataggatctcatatgaatagaaacactggtgtatgtgtaaaattggtctggccatgtacatgtcattggcaccgttttttagaagccaccagtaccatgtccagcattctggcattctctagcatataatactctttctgtgggactgtagatgttctcgtaatggtttggaagttttttttgtcgaatacgcaagatgcatatcattgcattaataggagtccaaacacgccaaagaacagcaagaagtacaagacctcaccaccgcanaacaacccattgcataggcggttacatg

SEQ ID NO: 69344 - DNA, 403 bp, Oryza sativa
cttaatctcgctccgttattttttgtccaccgttttttatcgtcttctgttttctggatgtgactcccgctcgggcgttcgatgggaggaggttaaaatctggcgttaacgtcagcgtccgatttacgtgctaaactactttaaactgagttttcttctaaattatttatccaaatcatgatccgattacaccattaaattcattgtaattaaatcttcaaaactagaccacacatagatatattccgacgaaaaaattatcttattattgaattatttttaaatattgcacgatattccaccaggtatatcggaattgtttcactaagtagatcgaaaatggttcactcgtttaaatcgagtgttgtttaccttatatataaacaatgtttagcaaatagcg

SEQ ID NO: 69345 - DNA, 358 bp, Oryza sativa
  unsure (1)..(358): unsure at all n locations
agcttgtggagtctaatttcagatggttttggtcccatgtcaaaattcctaccgagctgccaggaatctgcaaaacaagccacgtacctcatccagtccgaatctaaattgggttttgggccttgtaattatgctgtgggctcaagggggtgtgcgccctanggcaacctangatatccctaatcatatntattcagtagccgtcattgtttagagttgggttttgcttagattattctgtgaagaacagtttcactgctagatcggtttgtggaaccccaaattcaagtgcttaatcattcatatgcaattgtgttgcaatctatcttgttcttgcttatgttcttcgattcgtatg

SEQ ID NO: 69346 - DNA, 419 bp, Oryza sativa
gcgtggaatccagcgtactttttcaactcgtgatgtctattgtcctattcacaagacgaagaatcatgacttctcaagctgcaaggtctttctccgcgccatgaagacgcccactcctaaggtccagcagtcaagaacctctctcgaggatacagacaaggaacaaggagtgacgttgaccttggattgattcattggagtaatcgacatcgatccccacgagctatcggtccttcacttacttgaagactatggctcgtcatcttcaagtacaccatgcgatgtgtttgccatcggtgggactagcacatccgcacaggctaacgcagaggcggagaaccagacgggcacgccggcccaacatcttatcaccgtcaacgcaatactgagaagcttcctacgaccctgtgcttaacgat

SEQ ID NO: 69347 - DNA, 445 bp, Oryza sativa
  unsure (1)..(445): unsure at all n locations
agctntaaggtctacattagaattttttgttacatacgttgacgggtacaatttctataaaacaatatagcgctcgacaaggtttgtaactttctagtcaaagttatttcatttaagaacatttaggtgccgaaatattcgttacaaattcggaatctactttttaaaataggatgattttacaaacagatctttatgaagtctaaagttttaaaattcatagaaaatacaccttaagtccaattgagttaatccaaagttctatgagatccttacaatatttcctcaaatatggcctagtcaattntttttttgatatttcctttattatgaacattcacaaatgtcaagttgcataacacatcaaaacatacaatgggaacttgacataagtgaacaacgatattaccaaaatatggaccttacaaattaaatgaaaaaatgg

SEQ ID NO: 69348 - DNA, 392 bp, Oryza sativa
  unsure (1)..(392): unsure at all n locations
tagaaagtgtgagttctgtttgtctgaagtcaaattcttatggcacgtgatatctgctaaaggagttgctgtggatcccaaaacagtgaccgccgtcactgattggaagcaacccaagacagttactcangttcncagctttttgggtttggcaggatactaccggaggttcatcgagaacttctccaaaatcgctcaacccatgacacagttgttgaagaaagaagaaaaatctgtgtggagcccgcaatgcgagaaggcgttccatactctcaaagagaagctggtttcctcgccacgtttaatcttaccggatactcgcaaggactttctggcgtactgtgacgcttcgcgccaacgattgtggcgcgtgctcatgcacgaaggtcatg

SEQ ID NO: 69349 - DNA, 316 bp, Oryza sativa
agctttatggtctacattagacatctttggtacataccatgacggggacaatttctataaaacaatatagcgctcgacaagggttgcaactttctagtcaaagctattgcatttaagaacatttaagtgaccaaatattccttacaaattcggaatctactttttaaatatgatgattttaccaacagatctttatgaaggctcaagtcttaaaattcatagaaaatacaccttaagtcctattgaattaatccaaagatttatgagagccttaccatattcccctcaatatggcctactcaacttcttttttgat

SEQ ID NO: 69350 - DNA, 407 bp, Oryza sativa
agctttcctacaatggtttttctggccaaccgccctcaaagacgcctgcgacatggttcaacggtgtgaagcctatcaattccacagtaaacacacaaagctgccagcgcaagcactccagactatccctctcacttggccgttctcgtgctaggggctagatatacttgggccattcccacgaggacaaggcggctacaggttcctattcgtagcgatcgacaaattcaccaagtggattgaagcgacacccacgggggaaatcaaggccaacaacgccatcaaattcatcaaagggatattttgcagattcggattgccccaccgtatcataacagacaacggctcccagttcatcagtgccgatttcaggattactgcatcaggctgagagtccagatctgatt

SEQ ID NO: 69351 - DNA, 444 bp, Oryza sativa
  unsure (1)..(444): unsure at all n locations
actcagctttggcttggttgaagggagttgaacatttattgatccctgcatctactatctcaagtaanaaatctataaaatagttatttgtccaaaaaggggccttattgtaggaaaacaaccctcacagacataaactcacgagacatttgtcacagctgcaaattttcttgatgatggcatttataagcgatcacaaatatacatgtacaattgacaaccacataccatctttaacacgaaagattgttggctagtctttttcggctgcctcagctagaatataaccagcccttaagaaattaaatagcaattttgtttctagagaaaacaacagagaggactagctaattaatagaccttagtgtgtgaagaatctcatgccacacaagcgttcaagggtccacatgtacgtncagtcaaagtcgcatctacgtacattac

SEQ ID NO: 69352 - DNA, 440 bp, Oryza sativa
  unsure (1)..(440): unsure at all n locations
agcttcagtacctcgctgtcctgggcgaccttgtcacggagttccttgatgatggggtgcctgtggttgatctcgagtaccctcttgccgcgcatgtacgcctgcttgctggcatccgagagggtctgtgactgcatgatcttctccatgttggcgctccacccgtacttggatgtcaccaccacgcagggggtgtcgctcagccggttgctgatcttcaccgagtccacgctctcggtgtcaagagccttcttccaccagtcggtcagctccttgaaggactccttgaggtccttgagcttagagtccttgccgagtttgagacccttcttggagacgttctggaacttcttgtcctcgtagtccatgaggtattgcatcaagtactcgtcaacagggtcagtgaagtagataacctgcaacanaagataacaaaagta

SEQ ID NO: 69353 - DNA, 426 bp, Oryza sativa
  unsure (1)..(426): unsure at all n locations
nggccgctccttgaatctncttcttcctgacatcaagggctatcatcactcctcccatatcacaatccctgttggcagaattgcacaagaggtaaacaacatcatcgtcgtcgatgctcaaggcggtgtaagacatagccaggcatcctatggacaagctggagcccttggcttcctcatcatcgctggtgctgagcatgagtgtggagattatgggtaccccatacccacacggcatggttatccgactagtcataggggatagcttatatctatggaatatttaaccgatcatgacttgggtattacgtttccttttatattatgaagcggcctaaagtcctgatttgataatattgtaaaatagatttaggaaaccgataccgtattggtaaggtttctatcttgaatcctgcccccatccta

SEQ ID NO: 69354 - DNA, 357 bp, Oryza sativa
gtctgatgcagaattacaacaccgttcatcatcatgtgaccatattatgccttgccgcatagtgaggccgtgccacgatgaagtcaacccctagcagtatctggtaatcatgatgagatccacatgggcagagactcaactaggcagaataactcgagtaaattgcgccccttaaccgcgtattagtattcgtgcagcaactgtgcgtgcgtgtgtgcagcggagaggcgtggacatcaacgtgtgccagcccggccaccactatacacgtatccatggtcaactctgcaacttgtcggcttcatatatatgtatatatatgaaacaactagtatacaggactaattgtgatccttt

SEQ ID NO: 69355 - DNA, 318 bp, Oryza sativa
gttggcaacgaattcttaacaagaatgacaaaaaaaaaagggaaaatgaaaagagaaaatatcatcgagctttggcgctgttaaaaaaactcgacacgacattacttgcaaaattaagcctagtaattagcggtagtagtatgctcgtcccttctacaaacaggcgagagagagagtgagaaaatcaaatacgataaatggcaatgcgcgctcgatcaggccgtcgtgcgaacggctcagctagcagcgcggcatcttcttcttcttcttcttcttcttcttcttcttcagctactgatgcggctggcgccgcatgct

SEQ ID NO: 69356 - DNA, 307 bp, Oryza sativa
gatcagtgtatatgttcaatttggcgctatgacagctatattgtatgctctcattataccgtggacgtccgacgagcggcgtgcagatcataggtcccattcaactttaattatcaaggcggtattgggaagagctagaagatgcggatgactacgacatttgggctgccgaccaacaggtgcagacatttactgcgctctacgatcatgtatcacgacagtccatgcaaaaacggtgtagaatagactttttccacttacgtcaatacagctctctacgaatgatgaacaagaacacttgtttcat

SEQ ID NO: 69357 - DNA, 482 bp, Oryza sativa
  unsure (1)..(482): unsure at all n locations
ntaagctatntaaaatgctataattatttatacttcactcttttttcactcccaacccctaccacttgtaggatgataactagatagcagcagaagtgtatgtaaacacatctatctatatatactatacagttgaaacccacttagtggtagttattgctataaagctaccacttgaaattgcaccatcactaatctttctcacccttagattgtgcttttcaagcttcagattatcacctaatcttcctagcccatattaatcaatgtttggatgttcgattntaggtacttctcaacaaatttacaagtttcaatccatatattgttgttttgcaactgcagtgtatacataaatatcccacaagaacatgcagggtgtcatctggtaacctagatacagagccaaccacttgcatgaaaaagttgacataaaaaaatatcttgtgcacttgtgatccacaagtcccttggcatacttc

SEQ ID NO: 69358 - DNA, 389 bp, Oryza sativa
  unsure (1)..(389): unsure at all n locations
taaagccacgaaccaaactcatactatgagtcctaaacaccttagcaaaccacgaacaagatccaaaccacttaacctagtgagatgatcaaatccaacatgttcaagtctacaatgccaaaacatcacatctttatcaaacttaacaaccaaacatgttatcacaggtcaaacagaattttcaaaattagctntaaacactcttccatagcgagaaatattcagcacaatcaccacgagaatcaaaaactttacttccagttntcttatagagaacttcaaactcttcatcaacaatttgtgaaaccgaaagcaaattgtactntaaatcctcaaccaaagctgcattcttcaattcaagtattcatttaccttaaccaaacctgtag

SEQ ID NO: 69359 - DNA, 336 bp, Oryza sativa
agcttaattcttttgatcaatgattcagcccaaccattttttgtgtggacatgtggaacagagtgctgaacctgaattcccaatgccatacaataatcatcgaaagcatgagatgtaaattcggcagcgttgtccatacggattgattgaatcctatgttcagggtaatttgccttcagccttataatttgtgacatcaatttggcaaaggcatggtttcgtgtcgatacaagacacacatgagaccatctagtagatgcgtcaatcaaaaccataaagtacctgaacggtcaagatcttggcacaatagggccacagatatctccttgaatgcat

SEQ ID NO: 69360 - DNA, 473 bp, Oryza sativa
  unsure (1)..(473): unsure at all n locations
tcggcgcactctatatattgcgggacaagaaagaaagagtctatgccatggatatcgctgcaagactatcagcgattcctcaagaaatcgctgatatagaaaacactaagctcgaactagagcaaatgctgggtgtcctcggggagcctatatttctggctttcgtcgatccagcagtgatcatacaagatgatatagttcttgttcagaaccaaatccgcattcttgaaaacaggaagaatgcgctgctggaagaacagcaatcgctcatcgtgatggctgcccaccacggtgactaaaatagaaaaaggtagttactcgtctatctcaacgtaaatgaacgaagtcacttaaggcttcctactactactgctccttcttacttattntccttgaatcataatatctgactatcaatacttgtatataatgaaatacaacatggtgtccaacttagtggtaaggattattac

SEQ ID NO: 69361 - DNA, 440 bp, Oryza sativa
  unsure (1)..(440): unsure at all n locations
agcttgtatgttggaactagcaacctctctgatagtatatatgtccttatcgcggatggaatcataaatagtttacgaaagtacacgtaacattctgcttggaagctactccactaaaacattatacttatgagttagccgtacatgatttaattcgtttgagtatggatacactaccacatagcatctttagagattataggtactgtacatgggcggagctagaacaaaatgtagagggatgccacttgcttaatttactctacatcaagtccttgtctaaatttgtatccaagggggtgcacacataatgaaaatgggtgaggtacagctctaactnnttttaccgggttcctgggcaccccatgagatactctacctncgcccctggtacctataatcgtttaaaaaaatgaatgcattgatactcgaatcaactg

SEQ ID NO: 69362 - DNA, 428 bp, Oryza sativa
  unsure (1)..(428): unsure at all n locations
agcatatgatcgggtggattggaggttctttgagcatggtatgtacaaactgggtttcgctcatcgctgggttaagtggatcatgtcttgtgtaaccacngcgagatatgcaattacatttaatggaacgctgctgagtacatttgctccaactagaggatttcgtcaaggggaccctctctccccctttctctttctcttcgtggctgatggcctatcctgtttgatggacgagatagtgcgagaagaatccctttcaccggttcatatctgccgtagagcccctgtgatttcgcaccttatttcgcacctccatgctgttcagtactgccaccccggtagaggttcagaactctatcagcaatactctgcagnttgttaatgcatcgctttgagacaagatcttggttccctactccgatgggagg

SEQ ID NO: 69363 - DNA, 389 bp, Oryza sativa
  unsure (1)..(389): unsure at all n locations
tagcttaatatcgaaagatacagaaatagattatttcttggtctactaaatttcttatgactgcaaggcagagatggttacaccagaatgccccttgcaagcattcgggaactgcagacagtctactggatagtccataaagttacatgagcaaactgatgcaacggttacacgaaaaatacatgtcacatctaaaatcatatgtaaggctgcagatttgcccaacaatgtgaaaatggtttgtcataagaaactttaaacaaacaagctggactaattacaacggcttcagatgtttgttgtggctcaggacctatacggctataccattccatctccagtcatatcggagcanattanaaacatatgcctgacagctacgaaaatct

SEQ ID NO: 69364 - DNA, 419 bp, Oryza sativa
  unsure (1)..(419): unsure at all n locations
tcaagctctctcatactanatccaccacgcttgatgaattttatttcctgnaaatacacataatgttaaggaattgcatttaatcttaacatgatgataaatgggcagtacatattgctttcaatatcttaataaaggatacataggaactgacagaatattgagatcccacaagtggttcaaatatcaagacacacagatcatcttcattgtcatctccattgctcgttgtcttcttgtgagggttcaacgttatctgacgtgcagctacactggaacagacgcacttgattaaaacataataaatattatgaacttggcagacattggatctatgacgtggataaagatcattatgctatttgcacggagattgtatcagaaacactgatgataggaataactatgatagtgggagc

SEQ ID NO: 69365 - DNA, 426 bp, Oryza sativa
agcttctatgcacgaacaaagggcaaaacagatgctcgttggcaactttcagctcatttggacagtcagggatcagtctgaacaatgaagatttagtgaaagataagctcctaatagattgtggggaagatcaagattgtgtgattggtatgcactatgtttttttttcttcagattatttaagtttcatacttgtgtgcttattttgcatgtaaaacctataccatgcacctccagtaagtgataattgcatgccaaatctattatgggcagctcatgtccttttctaaggctgcacatatactttcttagaaaactctgcacaaatcttgcatgaggctaggattaaaccagattttcattgggtattcaatgcatgtttcagatgggatagttgccttgggaaagtttgatgcccttcacatt

SEQ ID NO: 69366 - DNA, 392 bp, Oryza sativa
tgagttctatctggccaggcagctttgtgcctgaccgtattgctgtgttagaatccataccttctaattcgttagacatgagttcgtacttattactactagtatattctagcatcattagaaagaactattgacactcaggatatttcagcaaactgttcatctggtgtgatcctgttgactgctatatggggtatggctgtctttagaaagctaacatatgattttcttctgaatttttcctagctttgataggtttcagattgtctccctctatccaatgctaatgtgtgggatctttctaccaccttgttgctctgattacaccattcacaatttcttgaaatatgttggcctgtcgatcttatactgcagtccattgaggcacagtt

SEQ ID NO: 69367 - DNA, 440 bp, Oryza sativa
  unsure (1)..(440): unsure at all n locations
agcttttttatagctgttttgctatgtgaattttcaataatgtagccaactttaggttacactcatcatattttacaaagcagttggtatatcactcggatcatgttattcagggatttacaccgcatatgctacatattaatatcaagtcgcttggttaactataattatcgaagccactcggttggttggattatttattccttgactatatgcttggtttgttcacttaaccgcatagtcgagggctacacctattaggtgcatctagtcggtgcacctgactttattttccagccctccacagtcttcagatttggtaaaagtactcgggagaccatgacaaagatgattgaagcactcggctntggagtaatctggttcgagagaagaatatcttttcgactgtgaaggtctcaggggctactgtggagaatatg

SEQ ID NO: 69368 - DNA, 64 bp, Oryza sativa
aactaagcgggtgctcttgactgcccacgtattgggaaacccaacttccattaacattgatcca

SEQ ID NO: 69369 - DNA, 404 bp, Oryza sativa
agcttgtcaacggttttgtaatgttcaattggcgccgccgccatgttgaatcccatcatctaatcgtggtcgatccgaggttgggctttgtatttcattggtcaagtttatccttcgtcatcaaaagggcatcagttcgtgctaattgcaacagattacttcaccaagtgggccgaaactgtgccgctcaagaatatgactcatacacatgtaactgatgttattttgaagcatattgccatagattcggtgttccgcagacattgactattgatcaaggaacttcttttatgtctaatgaagtgaagaattttaccgaatcttattggattaaattgttgagtgcttgttcttactacgctcaggctaattaatggacaagccgagtctagtataaagacatt

SEQ ID NO: 69370 - DNA, 377 bp, Oryza sativa
  unsure (1)..(377): unsure at all n locations
agcttnctcaccgtgttcgcctgtaggtccacggctacgtgggtacctgcctagctaatatggtggttgaggcattcggaggcacagcaaatcacgcctgtcaagaggcatcatacctgatgatggccagactacgggagcgccacaactttatcttccacgacacggcgtaccgatttcacccttgtcgagccagcggtgatgatgtcagtactttccgttcgacagccggcgagaacgacaccacctttggtcacatgtgtgctatgatgaggggataggataggatgcactcggacctgcacaaggcgttcaaggccttgaatgatgggaagctcatgatgatcgccgctctgaaggacgagatatcccgcctg

SEQ ID NO: 69371 - DNA, 412 bp, Oryza sativa
  unsure (1)..(412): unsure at all n locations
tggcgatctaatatactactaacccaacaatctaaaacatgctatctacacaacacatatctaagtgacgcattcccaatcatgacaccaacatgagatgcatatacatttgcttggattattgtcacggattgtttatntgattaatataatgattaatattttgaagactaaacttaaaaatagtttagaataggttgtctaatcactgtagtggagagaaagttttcttttttaagaaatcatnatgtttaagaagtgaggagcaaataatccgtggtaaaaatcttgagaaacattataaaaggagcatggccattntctcgtaacaagtggccaggtgctagaggcaacacaagtacacaagcgccaaacccatatgctagagttaaaactacatgcttatcttcac

SEQ ID NO: 69372 - DNA, 397 bp, Oryza sativa
agctttaactcatgtcttaataatattaggaacaaactactacttggaaccagcagccaaagaatatatacaaaaatgcgaataagccaaaaatatgaaagctccagagaacccatattgttcaaatattaagaatgaaggatcatcccacaaacctacgtataaggaatgcttgactaagggagtagatcctcttgatggcgaatatatcgattggaaaataattgaaaaatttgaagaagcatccccccaaattaaaaaagaatcgaaagaagaaatacttaatgaattaaaaaaagaaatgaatgataaatttgaagaaatgaaaaaagcatatgatgaataaattgaagtctccttttctgatgttaaactaaggattaagttggcatgggca

SEQ ID NO: 69373 - DNA, 424 bp, Oryza sativa
  unsure (1)..(424): unsure at all n locations
tcgattgtggggctnttgttccggtcggtcggaatcctgacatgaaaaaagtttaagggacattctgattgatcttgacaagcaaaactatatgcattcaaatacaacgacgacattggatgaaaggcagctcatcaacggaatcaaggatctagtcgagaaaaagaggtgctgatatataattatatattcagttattcaatcaggtcgcaaagatttgggtgattgttagttttggtagctctagtatgcttactttatgcctaactagtgttatgtacactcgtaataattctactccctccaagtaataattccacaggtaaccttgcaaaaataaaatacaataaaaatccatagatgacctcttgccnaaaatatgttatgcctcttccctccgaattacagattatacttaatcttg

SEQ ID NO: 69374 - DNA, 409 bp, Oryza sativa
  unsure (1)..(409): unsure at all n locations
ctcggaccgggacctctaagtcacctgcagcatgcatactatgtttcttccctcacgccgncggcccctgcaagcctgaatccagacaacctccaagagttgcgaaaacttcccctattaaagcacaccacaaagcatgctgtgattgcactgtcacacagcgaaagcacaagactagaatacttgctgaccactgaggcgaaaggataccgggtggcgaagatggctgaccttggattcggcgatgccaggagtggcaatggcagcatgagccaatgctccacggggaaggcgatgctgctcgccctcggcaagggcctacctgagcaagtactatcccaggagaaggtcgtcgagaactaccttcaggacaccatctgcgacgatcctgcaacaagggcaaagctgg

SEQ ID NO: 69375 - DNA, 422 bp, Oryza sativa
agcttaaaatataactcaaacacggatatgtacttccaaaagcaatcaatcttaaaacctacttaaacacggacgacgtaccaaaataccggcaaaaacatatttaatatttataatagtagagaagagatgagttaaaagtttccaaaattatgataaagtgtaaaatttgaggggaaagatttaaattttgtgttaaaattttttaaatttgagttataaactttaaattaaaaatagaaacgtacacgtgcgccagcaacaagctagcgcatgcgcgaggtagcgatctcgaagaaacttgccgatgacatcatttcgtttgctgtgggcccaaggcgattgtgagccgaagccaaaagcccaaaaacaaccgtgggcacaaaagccgagcccatataaatatggaaaaagtacaccgg

SEQ ID NO: 69376 - DNA, 461 bp, Oryza sativa
  unsure (1)..(461): unsure at all n locations
taattaatcatctggttgtttgctgatttgttagtcgcaactaaactttcaattnntaaatttaatttagagttcatttgaacgattntgttcattgtagttcatttttcatcattatcttttaaatcttaatttaaaaacatatataataaaagtttcactcataaataattaattgttactttgttcctttttcacaacttatcagccatagagctaataagaggcttagtttagggcacaagtaagcttaagactacaacgcaatccatcattttgggccgccaattttgtaaaagtggattattccccgtgtaagaaatgagaggggagaattagaccgatcccttgtctattaaaattggtggggttcaattacatatattgatatttacaattaatccttctatcttcttcctcaatccctaagggaaatggnataaccgaacaaatcccaatat

SEQ ID NO: 69377 - DNA, 385 bp, Oryza sativa
  unsure (1)..(385): unsure at all n locations
tgctngattccaagatggattttgcaaggcaaaggtataatgtatctaagaatgtcttcttagccttttcccggtcttgatgtttggtgtataccggatttgctagataggcgccgtactatcaagaggggtctatgaagcgagcttgtggatgatcttgtgccttattagttcatatgcatgtaagtgtattcggtgggcttgtctagccaagtgtggtgagttttctcaagtcctaaacaaagagatatgtgggcaaatcctatatggttgggtagcctcatgtggttatgtccggcggagaatcctttggagtgtgagccctttctccctgagaaacattgtgtttcttggatggattgatcatgggttggatagcgctttg

SEQ ID NO: 69378 - DNA, 496 bp, Oryza sativa
  unsure (1)..(496): unsure at all n locations
tattgacaccatgactgttgtgatgttaatggatgtgtggtttgttacanaggtgcctttctgcctgttcaacatattgaccataataggttcttttcagaatacggctggttagaataattctttaatatggcacatacgattagttatatcttaaatatgatcatgctgatgtattcagntataacctacattcataagaaagtgcacaataagaagatgtctcaatcttcctaaccttctatgttactttctcaagatttactcaatgaagtgttccgatatttattttagcttcttgttgacagggaatgagaattcaatcttatgatgatcagttgcttcatttagcggctgacttagctcaaagattgctacctgcatttgacactccaacaaggttactacgttgtctattagttactttgtggactcacacatgtttctttgaaacaatggagtatcttaatatggtatgattatatcagaatttgat

SEQ ID NO: 69379 - DNA, 413 bp, Oryza sativa
agcttggtatttagtgatatgatgtcattatataagggtaagtatgactgctggctaatgggaaatgttcgaagtgccccacaaccgccatcagggagtgatctgggacgtccatgccaaaccccatgatcaacggggatcagggaagttcggccgtaccaatccgaaccttagatgagccctactggccttggcttgagtcagtggacaatctgaacacttctctatccatttctcagaagtttggagcaatccattgatgcttcgatgaagttcataactcatcctagaatggatacatatttctcctcactatattctgagtgtcctctcaacttcaggtgtatcacctacatactattatacctcattctatggaaatgttgaagcaacacctatcactatgttggatg

SEQ ID NO: 69380 - DNA, 433 bp, Oryza sativa
cactgcaatctctttataggattgctgttgctctctgtgtgtacgagaggttccttgtgagcttgggtcgatgtccttcccgggtgtcgctcttgtttgttcattttggcgctggggtagcatcgcattaaagtcgaagctgctgtgtcacttgggtgtcaagcttgtcaacgataacatacgtagactgccgtgtcgactcaaatggcaagcttggccgatgccttgtgtcgggctccgtcgtggtagcttatgatacgttagctcgtggtgtggcgttgtacttgtgggtttcgctcagtgtttcctaattaactgagcactgtaagggttaatcctcgtttcttctcaaatgggatatcttcctcttaatataatacagtcgcaacggtccgaccgttccaatataagacattacatatcttcttgactg

SEQ ID NO: 69381 - DNA, 378 bp, Oryza sativa
agcttctgtgtatcacatcgaatatacggacatatatttaaaatattaaacatagtctaataacaaaacaaatgacataatccgcttataaaccacgagacaaatttattaagcctaatgaatccatcattagcatatgtttattaagcctaattaattcgtcattagtaaatatttactgtagcaccacattatcaaatcatggcgcaattaggcttaaaagattcgtctcgcaatttacatgtaatctgtgtaattagatttttttgtttatatttaatactccatacatgtgtccaaacattcgatgtgatggggtgtaaaattttgccagggaatctaaacaggcctgtagtaatttttctgtacatacacttt

SEQ ID NO: 69382 - DNA, 486 bp, Oryza sativa
  unsure (1)..(486): unsure at all n locations
cgcatgtatctgtaatacgtgtgcatcctcaaagcagcacgcttgagctttatccaggttatatagatcgattatgcatgagaccagtatcaacgcttcaactatccgcaaatctccggagcagtgatggcagagccatctttgtgtttgttattgggtaatttaaatccattctttttaatacctatactaattatacactctgagaaggctcccctgtcaagtagaaagacggagcactaattactttttaaatcctattatcatagctgaagattgtagggataattcatattgaaataataatatgccatcaaanataccatgatgcaatggacttggtagacaggatggaaactattggacattgcaacatactagcaaaagacacaagtaaactagtagagatgcagtgcacttggatggattcagtagaatggtatttgacttgaatagngaataacactagcagcatgctcattacac

SEQ ID NO: 69383 - DNA, 428 bp, Oryza sativa
agcttgtcttcaaccttcacaccagcggatacagaatcttcaatgagtgtggcggatatcccagcagccgtgttattgcgcctgaagtttttaaacctcgactcgccacgaagagtgtatgccatgtccttgccaacagactgcaaatcaagccccagtgaagtgggtttcccctcaccgtgcttaagtgaacttgcgacctccatttggagggagcaatccttcttgtcttttgaaagttgaccagacactgataaaggaactttacctttcacagcaaacaacctttcaacatttagaccttcataaccaacatcatgatcccatccctgggtctccagcactggcctgacaagccattcactcggtgtgtccaggagacgatagcgatggctatgatggtcagaatcaaacgatgagggcaatac

SEQ ID NO: 69384 - DNA, 449 bp, Oryza sativa
gagatctctgtcttattgtgcatcctccgagggcgaccggtgcggccagtcaactgctgtagccggtcgggaccgctgacagtgcatcgcgcgctccacgcgcacgcactctataccgactgttgtgccgacagcgactcggactgccgtggctcgcctgcggacgacgtcgtcggagacaagccgctgtaaagtatgacagtgcgcgcacacacccacacacacgtgaggctgcctgcctgcccagcctgtgctatgctcatcagcatcagacaggatcagatcacagtcttaattagctgctgctgctggtgtactaatttatggagtaggagtacttaccatagatgcataagcttgcactctgctgagcttgacctgcatcagtgtctactggaccatgatcttgatgacttgatgaatcatcgatgcgtcgacctctcggtagc

SEQ ID NO: 69385 - DNA, 423 bp, Oryza sativa
  unsure (1)..(423): unsure at all n locations
agcttgcacagtaggccaatggttaccatcctcatcaacatcctcatactatgccttatttatataacttgttggtagctcttttcttctcttcgaacagcacctgtggcactttcttcttgaaattatgctccaagactttatcagcttccactttgtcagtgggatcacatttaaaacaatactgccaaatcaagcaagaataatattatttttccacgctgttgagactatcacaaatatgaggaaaacttacccaaaattctttaagaactcggtcagctggtgacattattctttcatttgtagacctcttgtagtccctccaagtaagtgcaggtgtcctgcattctacgagaccaanagcaccaggatagaacttacgcaatagtgcaccttgcacttgtgatggtctacgagatg

SEQ ID NO: 69386 - DNA, 220 bp, Oryza sativa
tttcttataacggatacgtatgcggggaattcaactcctgtacgcttgagaggatagacgcccgaaaaccaatgacctctcaagttgccaactggtgccattgctcagtttcctggctcacatttcctatcacttatctgtgaccattgatgttataaatgacccatttaatgtgatttctcataattaattatccactgggatatattctcaaatccca

SEQ ID NO: 69387 - DNA, 403 bp, Oryza sativa
agcttattctgggaatggatgcttttcgccgagtcaacatcgtcattgtattggtccaagataacagagccaatagcattgataacgtccccctaacctcctcgtgaaaagtaggtggtcacttatatgaagggggctaattaagtaaggggggcgacgccattgtttttggcgccgatgacatatttgtacatatttttttattataaataggtccctttttaattataaataggtcatttttcatattgttttacaagtaggtcctcgacgtcaataacattgacattgtcccttttctacaagtgacttagctttcgcggcaagcctatagagatgacgtcaatgtcattggcaccgtcatgttgttagactaatgtgctgataacgtgacgttgcaaaa

SEQ ID NO: 69388 - DNA, 426 bp, Oryza sativa
  unsure (1)..(426): unsure at all n locations
tgactgaccgaactgatgatgagtntgtcattaataactcatcataagtgcttatatgtactagtagtccttgaatcaatagcacggtagctaggatttgactagcaaacattaaatttgactgaccttatcctgtgctnttaaaacttacttttagtttaaattttaaaatcacacacttaaaaaacctgaaacaatctactccctctgtcccctaatataagggattttaacattntacttgtactgtttgaccactcgtcttattcaataaatttgtgcaaatattaaaaataaaaagttatgtttaaagtactttggataataaagtaagtcacaaataaaataaataataattttaaaaatttttaaataagacgaacggtcaaacagtgcaagcaatatgtcanaattccttatactccc

SEQ ID NO: 69389 - DNA, 413 bp, Oryza sativa
tagctgcgtttatctcgttgtctgtattggccaactgtctggattctataccaacaccattttcaggcatgccaaagctgtgattatttcacgccacaatttgaaagttggttaatactgagacgatgtgactgaaaagttgaaagtttgtgtgtagcgaagttttgatgtgatgaaataattataagttttgaagaaaaactttataactaaacacggtccaatttagttagcaccacaaaattgatgaaacaaatgccgaattgacatgcaaaaaatatacccttccaaaaagttgaaatctatgactaatattaatatttatatttttccgatcgtcacatctaatgttcggtctgttgtcgtccatacacaatctgattctgttagcaatagccatctaataaaattgc

SEQ ID NO: 69390 - DNA, 400 bp, Oryza sativa
agaccaaatgagatctttgtttctgagccttccagaactggttgaatccgagtcggagaggaagtgatttccaaagtcatcgttaaagaagacgaaacttccaaagcgaacgtttgccttggggcgaagatgaatccaacgattcctaagattgattcaatcgcacttctcgactggaaactcagcgtcacccctacctgctgcaccagctatcgatgtatttatcaacgataataaagggggtagcatatgagacctaaagtggatggatgcaagtagacaagagtttagacatgtttcaagccttcttgatgagagataacatcaaactcttggttggtggattggatcagctatattgtattgatcatggtgatcttggttgtgttgtcctcatgga

SEQ ID NO: 69391 - DNA, 373 bp, Oryza sativa
  unsure (1)..(373): unsure at all n locations
agcttgaatggcatacattttgatatattagattctgtcaaaaaagtaatggtgatacattacacactaaaatatactaaaataaaatggattagcatagcatgaagcacaactgcagtgcatatgcactcgcactagcaatcttagagcgaaatatattaacataagatggtgggcatgcctttgcactgcgagaactaaccaaatacatattaaaagaaacttgagcaatcaatcattaaagatcaagccatcatgtgattcttcagatactgtgtgaattatataaaataggccccaaccctgtttcctatctacttagactntaaacttctaaaattcagtaccttaaagagtcacagacagtgaaatg

SEQ ID NO: 69392 - DNA, 382 bp, Oryza sativa
accatatcaccattgccgtccaaactcgctctttctcggcttctgagaccttcccgatatctatatggaggatcccgaagttctcacatgccgctatcccgcatcatgtaaaccatcttccaatgacagtactgtgcgccgtgggcctaccactagcgtcaacctctcttatacttgcacttgggtcggccatatatattgtgaccgcggatttctactagacctacttgcacttgtcccgcccgacatcgacgtatgttgttcctgcggctattctgcaccacatacaggaagcaatatattgctaaagggtgctagcatcacattatgtggtaatgtggtgacatttatcctataattaacatgaatctcgggtggtgac

SEQ ID NO: 69393 - DNA, 388 bp, Oryza sativa
agcttaccggctagggtgtttctggcctacagctgtgtccgatgcggacaagattgtgcggacatgcgaaggttgtcaattttttgccacacaaactcatttgccatcccaagagttgcaaaccatcccgttgtgctggccgttctcggactgggggcttgacatggactgaccgtttagaacggcagctggcggatacacgcatatctttgtggctatcgacaaattctccaaatggatagaggctaagccgggcatcacgatcacagcggatgaagctatagatcttttcatcagtattgtgcatcctgttcgggtacctaatcggatcatcactgatgatggcactcaattcacttgcggagcatttaaagactttcgcgaatac

SEQ ID NO: 69394 - DNA, 377 bp, Oryza sativa
  unsure (1)..(377): unsure at all n locations
tgaggatgtatctgttaatgtacaaagttctttgtcaaaagcaaatgaagatgctgaatcgttgaactttgctgggccaaagagccttgcagagctgatagcaaaaaaggttgcaggcagtttaatgaagagtagtcgttctttaacagggccagttcgaatgacatccgaaatagttaccatcaaagactcttcggaccctgttctgtttgatggcccaaaaccattaaatgccatcctgaagagaaaaagagaggcagattctggaaatgctaccgattntggcagcaaacgggaagaacattctgggggagatgaagaatgatctcagaatgatttccgaaacatcgaggatgacatagttggaatgaacaccg

SEQ ID NO: 69395 - DNA, 432 bp, Oryza sativa
  unsure (1)..(432): unsure at all n locations
agcttggtagtgtgtgtgtgaagtgagggagtgagatctatttatagggtagttatgacggttgtgagaaggggaattgtccgaactgccccacaaccgttatcaggagagcatctgcagcgtccacgccaaaccccaggatcaatggtgatcagagggtttcggccgaacctgngctgggccctcccggcctggccttcggcctgtggactcccctgattctcctctatccatttcttggagttttgggctgattctctggtattttgatgatgttcacaacccatccttatatggatacttgtttctcctcactttagtctagatttcctcccaacttcggggtttaatacctgcatacaaatatacacaaacactttttgaatacgtgagataaacacctatcactatgttggatgtttattatctgga

SEQ ID NO: 69396 - DNA, 483 bp, Oryza sativa
  unsure (1)..(483): unsure at all n locations
ngcacttagcaccaaaccgcacccacatccatactacatcctatggctgaacaacagtggttaggcgaaggtaacaaaactggtgcacattaattttgcaattggaaattaccatgatgttgttgaatgtgatgttgtgcccatgcaagcatgtaatattctgctaggtagaccatggcaatttgatagggattctatgcatcatggtaggtccaaccagtactcttttctgtaccatgataagaaaattgtgttgcatcccatgtctcctgaagatatattgcgtgatgatgttgctaaggctgccaaatccaaatgtgagagtgataaaaaagcccaatctgatggcaagaaacctgagacaatcaatttgaaacccaaatgcttacttgctactaaatctgatattaatgagtngattgcatcaccttcagttgcctatgctttggtatgcaaagatgctttgatttcactttacgatat

SEQ ID NO: 69397 - DNA, 417 bp, Oryza sativa
  unsure (1)..(417): unsure at all n locations
agcttgatcaagcaaaacaacctgataatggaagtttgatcgtatccagtaagccattcatgagaaagaaggctattgttgagacttaccacaagattgcctcctcagctcctgacgccaaaacgtccacctgcctcttctcgcgcccttttctgcattctcatgcgtatttccgtttgctcgcactgcaacagggctaaccaggcagctgggcctcacgcttaggtcggtcacagtgcggtgagctggaccgggacttcgttgcgccatggaggattttggtcgacgtgtcgcgtgcgcccgcgaccatactatgcgactcgtccccacgcatagcagcgcagaacttcatccgagtgaattaaaataatcactacagtatcgtatagcaaattaaaagttntttgcgtgtcctaa

SEQ ID NO: 69398 - DNA, 422 bp, Oryza sativa
tgaccttcagtagttaccccggcaaggaccatcctcggccatattctgcatcttctaccaatgacttgcccaagtatcaacgtcagttgtcggtgatgctcctacggtcttcgcctgttgccctagcaccagcaggtttgcgaggcgccactacagccgtggcgaaaggcgagaggcttagaagaatggaaagaggcgaaagctcattgtggcgaaagagactgctactagagcggaaagcacaagggcgtaatagcttatgaaatctaaggaaacagtcacagtgaaaactaacgagcggtgaaaaagtgaaagtgacccggtggaatatatagcccggcaaaacgacgggtcgactaacaaccaatcaaaactcaccaagtgtcacccagggtatactaaacagtaaattcctgtctgat

SEQ ID NO: 69399 - DNA, 335 bp, Oryza sativa
tccgcgacttgtgctcgagcgtcctataatcatcagacgaaacgagtccgccaccaaactacgaatgattaaaaagctttccaagaccagctgccatatgcacgagatagtaccttataactgacaaatctgataaaaactgctctaatgtgtctgcacatatggaaacgcacgcctaactttcaaaagagattttgcctgatgcccacagaaaatgatctcgtcccatgcatgcagtcatgatggctatataaaaggagaaagtctctcacctattgctaagattggagccactgaactggcagaaataaggagaagtcagcagctaaaaaaag

SEQ ID NO: 69400 - DNA, 387 bp, Oryza sativa
agcttatttattgcggcgacatactgctataccacaaagcctaattctgaagagccactgctgggctagtgaacagcaacaactaggggcaaattgcacaatcatatcaccgagaatctcaggtcaccatgcttcttgccggctactgctcctgatgcttcttagaccgacttctctctgcacttccagactaccttcacaggtccctatgtcgtgctctatatacatgcatgcatcgtaaaactcactagctggtccataaactaactatataatgaatttgcctgccggaatgtctcaattgctcagacagtgcggcatggagacagcgttgttcccaagccacaggcgtcttgctaacggggaactgcatgaggaaacactttg

SEQ ID NO: 69401 - DNA, 320 bp, Oryza sativa
ctcaaatttgcgcggataccctttcctagatataacggttacctgtagctgcattcccatgggtttggattcatgtcgctctacagcattcactaacggattaacttcttgataggcaatttctggttccctcaccattgtctccaacacaggaagagtactcttcctttctttcttgacatccactcgcagttgactgcctctgtaaatattctatcttccaacttgtgcatggtagcccatattactagatttttatacttggtaaaactatggaaaattaaccttcatttctacgcccgtatgcatttactaatggc

SEQ ID NO: 69402 - DNA, 404 bp, Oryza sativa
  unsure (1)..(404): unsure at all n locations
agcttatccagtgcgtcgacttctggctatactacatagcctacttctgtggtgccactgttgggctagtgtacagcaacaacttggggcaaattgcacaatcatttcaccgggaatctcagctcaccatgcttcttgccgtctactcctcctgttccttctttggccgccttctctctgcacttccagacttccttcacaggtccctatgtcttgttctatatacttgcatgcatcttaattctcactagctggtccataaactaactatataatgaatttgcatgcaggaaggtttcatttgctcggacagggtggcttgcagctgcgttggttcccatgccaatggcgttcttcctaatgtggaaatngcatgatgtaaacactctggtagcaggaacagc

SEQ ID NO: 69403 - DNA, 445 bp, Oryza sativa
  unsure (1)..(445): unsure at all n locations
ctcttcttcctgcggctggatctcgctcatgtatgcgttctcatttgctttcttcttcctctcattcccattcccccctaccctcagatatgcgtggataccctttcctctgatctacaggtttgccctctggctgccactccccatggctctggattcaagtcgctcttcaacattcactaccgtattcacttcttgaaggccaatttctggttcctcaccattgtatccaataaaggttggttactctttctttctttcttgtcatccactccaagttgactgcctctgtaaatattctatctttccaactgttgcaatggtagcccatatatactagtattnttttcccttggtgagatctagtggaaaaattaacttacatcttcgaacgcctgtaatcatctatcttagnggcctngtgttataactcaattaatatgtc

SEQ ID NO: 69404 - DNA, 363 bp, Oryza sativa
agcttcaatgatttatatcgcagtatcactggaaggattactgctgaagctctgaaggttagttgtattgttctgatttttgagacctttattatattcctttcttgatgttaccttacaatagcattattttgttgtttctctgcaagagagagttttgaaagtcctacaagtatgggcggactgtgtcttattttccgatgcatatctgaatggactaatagctacctttcttagatcaagccacttatgggtcatcccttttcactctctatgtggtgatacaccagaaattgaaaagaatgctagctctgacgacggcagtgatggatttacgctcaacgaagatggtgccttgtccac

SEQ ID NO: 69405 - DNA, 293 bp, Oryza sativa
gcacttctcttatctgttgtgccaagacgccttctaatgacagtgtttaagaaaaaaaaacatcctccctctgtgcagcctcaatatatcgatctgaacatatatagttgcaacacagcaaataagcttgaaatattagtacattccaattgcagagagggatgagtcatcctatcccaaccatctgcggaacgcaaaacaaacatccggcacttgacatttgccacttatagcagcacatctcgcacgatacagcagtccgattcctccttaccaatacaacgcataaaaat

SEQ ID NO: 69406 - DNA, 416 bp, Oryza sativa
agcattgtgcttaaataataaatgtcaatgccaatcataatcatataatctgctgaaaaacaattaacaacatagatcaactatctggttccacattcacaaactttcacgattacaattgatgtatgcatactattcaaacaaacacattaaactctaaattgtacgtatggactactacctccgcgcataaaataattgtaatgttaagctgtctggcatatatttatgtttgagaataaagactataactgccatctttaagaggtgtatagataatattgacaaggtggtcgatggcataatatggagaaatctaaatgggaagtgttaatgatacaatactactctttgcacaactatttaggacaaaatgatccataaatacatattatagacagagggtactagcgtat

SEQ ID NO: 69407 - DNA, 436 bp, Oryza sativa
tgcaagcttttataattggaagattatattgaagtttcaatgtggcagcaaagagtccgcctttatattataactggtgttaagggggatactgtttttgcgcctcaaactaagaaggagatcagtgtacgcaaatgttcagtgtttttatcatatttctttttgctcaactacattcagaatattttggactcgctatctgaaaacgaaaaggggaattgcgtgacatgattgcaaaatgatacaatatgactttgattgtttgattaatggccataatccttcgtgtgtgcttagcttatagtaaggaatagctcctttccgattaacaagctgttctacagaattttttttccataatgatctgctaaatttcaactcagttgagaagagactcaatttgaagcattctgtaatcactttatttgtacttaac

SEQ ID NO: 69408 - DNA, 491 bp, Oryza sativa
agcttatggtcgggactagtcttgtgatgtgatatcaagggctttatcatcttcagatattataggagataaggaattccagatgaatgagtttgtggtgcacctaggtcaggtcagccaccataactatgcaatttgcttaatgatttctgtatctcatgcagtcatataaaattatgcctaaacatgtcttttgattaagtgcattgatggccttgtagttggtattcaatctgcttaaaattctttgtacgaacactgcatggcaacggcgcaagcttgtgaagagtttgcatgattggagtaccatcttcatacaggtgtgcgaaacaaataatgctattactgattttttaaaattattttccctttatggctttgggtaagaacgaatgactgtatctaatctagcgatgcacgtaagctgagttgggctggagtgtaccactggcctaatagcactcatgtcttgaattaggaaccgattaatg

SEQ ID NO: 69409 - DNA, 414 bp, Oryza sativa
tgcttattattcaacgtcgtgctgccatgtagcttaattactgtgtgtgatcttgtgtgtgcttcttatatttgatcagctgtttgtttcataagagtgttcatgaaatgagtttgctaatacgcacaattgagctctcgggttcattccagcaaatacatgctttctgatccgtgcttgtctttgcccgttatccggagggctggcgccgaatgtgtaatattgcaagaaccccaaaatgtatgatataaatgatgtaaactgaaggcactgtgctggaatggtaatggtaatgaacttttgggtgtttgatttttgtctatatatactagcaaaccatattaccatgcaaatatcttcaggctgaggcctttagagccaacggcactacaatatggagtgggtgggggggga

SEQ ID NO: 69410 - DNA, 407 bp, Oryza sativa
  unsure (1)..(407): unsure at all n locations
taccgatatgctcgcgaaaaccggtcagctttggcgaaatcatcgaaatttcaatcggttatcagaaaaagaggtaaactgatctttttttctttttttaattcgntattcttttcttttctactgtaaatttcagtaaatacacggaatacatcatttntttntgaaaatttatatcccaacaggctttgtaaatatcatactatttataagaatttatttgattatctttctttttttatcaattcaaatttaaatttggatgatactcaccaaaatgtcagatgacttctactttcaaacctcgtcgaaacctcgaaatttcatccgatacggcgacgatgcaatactagtactagtagagccgtcctcgtagacgccgaagaagtggaggcgcgccgcgtccg

SEQ ID NO: 69411 - DNA, 436 bp, Oryza sativa
atcttgactcaataagaaattcgatgtgatcatcatgcagtgctcatcaaacttcttacaactatgtacagtattatcttttaaaataagtagtgtgcaccataaaaacactattactaactaggtcgtccttctcacaacaactaatcactgaggatatttctttatcagacagcaacgaaatatataagtgtactgaaaggaaaaaggttctctttatatatgcatagacattctagttgtttcattatgcttaggaggacactaataaagcagaactttccatctctcatattcaacacatcatttgtttgcctgacatacaaaacagggaaaggatcagtgcaagcgttacagatgctgcatcgctggtcccagtttaagctattagataggttgattccaatgttgacatctctcttactacgtactacta

SEQ ID NO: 69412 - DNA, 402 bp, Oryza sativa
  unsure (1)..(402): unsure at all n locations
ggacgctngagaaacaaggctggtaaccacccatggagaatacatggcatcgtcggccttacagcgcgtaacttctatgtacagcgacatccaacttcgacgtgctcatctaatagccctggatgccaagaaaatgcaaaacctccatatgaaaaccttagacaaactagcaatccgaggatgaccaaatggctccatctttaccgctagacccaataaatggccctacacctcttcgatggtacatgaatggtggaaggcaagcgccaaagcaggtaatgtgcatgttggtccttctagtttcatgagagatttggaattaaagaaaccagaggacctttcagcacatggagctctcggtgcccaacttagtctccaaaattatggtggagaccaaaacgt

SEQ ID NO: 69413 - DNA, 348 bp, Oryza sativa
  unsure (1)..(348): unsure at all n locations
ctgaagatgcagtttgattgttnattccatgacgctagtttgtatggatgtattctggatatgctcggattgtcatataaaagattgtgattgcatggatgacttagcatatgatgagtcaaagtctaccttttggattacattatgtctttatcgtgaattttttggtggatgatggccaattggcttttagtagaagtaccaacttctggcggtttgtcttgcatgataaatttaacaatattttaagtgctgtcatctgatagtaagatattggctctatagaacacatggatcatgtattacttctaattattctttatgcctagatggctagtagagatattt

SEQ ID NO: 69414 - DNA, 421 bp, Oryza sativa
  unsure (1)..(421): unsure at all n locations
ctccattctccttccaaaaccaacctccggattctttggcaccatcatctttggcctaggctctgcaatgaccactcctttccccttagtagattcggctggctccggccgaatcaataccttattgtcatcacaattaattgtgttcaccagataaggatcatgatcaagcttcatcttggaaccatcgggaaacttcaatcatccttcatctatggccgactgaacctgtcgtcgaaacacattgcaatcattaatagaatgagaatgagaatcatgtcatttactataagctcgacggttcaattcctctcgagatggtatgatatggactntacgtaatctaattatttttctttgcaaagataatcaaagatcctatcacatttgtgcacatcaaaactatacttaacctcacttt

SEQ ID NO: 69415 - DNA, 435 bp, Oryza sativa
  unsure (1)..(435): unsure at all n locations
agcttnttggtgtgttaagcaattagtggcatatcagcacactcccaaaggttcccctgcctcaactatctctgtgcttcttgcctcgtagtactgcacaatgaatccatccacacatacgtcaagccagccagattcagttcaacatgacgcatcaaaataagttgtgatgaaacagaggtggtatttcccttgaatacatgccgacatcaaaccctgtattattcccttgagatccattgaaaccctagattatgagacctggaataactaaagattataggatgggaaaacgcccaaatttgaacctctattcaccgtcaaaccctagattgctaaaaccaccgaatcagtctaatattagcctaaggagagaaagacgtacacgaaccctatgcgatcaagaggagtaaaatccagaagaatcaacagagt

SEQ ID NO: 69416 - DNA, 353 bp, Oryza sativa
cttcttttctgaagagggatagattgagcattaatgaggacaatcactgtacttagccagccactaccggcttatgcatgagttatgcaagggaggtacacgggaataataatatatggactaatgttgtgctactaaactagtatttaaaagtcacttagtcgcccaaagccattttgtatagactattctaaagctacacagtattattaaacaaggtcgtgaaccctcacgaacctgccttaactccatgcctacgatgattctgacctaactggctatccgacctgagtcccatgcttgtcctagccaagccaggcgcaccatttcataatttaattgtggagcatatt

SEQ ID NO: 69417 - DNA, 463 bp, Oryza sativa
  unsure (1)..(463): unsure at all n locations
ttgaatcaacctcatgatgtaaggggcataatanattttctgagtgaaggtccccttggagatggcaatctcttgcatcatgagagacacaatgtcgaactgacgaccctgaatgattgcatcgatgacgtgccaagccacccccctaatgtcatcattgttgccaaagcgaggaaggatggtagctctcacaatcctcgtaaccacactgggatagtcctcaagccggcaaccctcccatgtgtgtaccacactcaatcttcataaaactgagagagatagtctatggagagtgaattgtgagtgtgctcctcatgcaaatcatctccaaagtccaagcgaatattgaggagccgccggaattgccttcgagagatagaacactggaaggtggtgggacatcacttcatctcactatagtctccagccaccacactgtacatagaactgccgatcaatatca

SEQ ID NO: 69418 - DNA, 382 bp, Oryza sativa
  unsure (1)..(382): unsure at all n locations
agcttgccctagaggtaaaccaaattcgagaacaggtgcgttgtgtgtagagagatgatcgatcgagatgctcaccaggatgctcctgctcgcgagattgatggagatcggcgcaggtggcgggcgaagttccctcgcgggccgacggggaggagagatactctagggggagaggcacaatattnttcggcacagatgaatttgacacgttttgggctggtggccgaggcttgtaagttgtaacaccacacggnttcatcaaattttgcggcttgaaaagaaaaatctaaacatccaataagcttggctcactacagatttcatttttgcacaaggcccatggggataggcatacgctncaaaaatcatggatttgcatgcg

SEQ ID NO: 69419 - DNA, 429 bp, Oryza sativa
tggattattccacccgctcataacatgattaataatttatatagaaaggattcatgtgaacaagaatgttggatcaaagcttaaagctccatctaataaagatgaaatgccttgaccttaacaatgattttcagaagaacattggcatatgactgatcattcatcttaacactaggaacaaagccattgagaataatacccatctcatgaaagctatttcttcttccatggccctacaaaacacattgatgagatggtacgaatatttaagaattctgacggcagaaataagtaatgtgtaacctattaagctattaccatagagaacacaatatttactttctggtgaaacacacagcagaaattcatgaggaccaagaaagtttgtctcactttttaaacatgcgttcacccttacaacaagagtac

SEQ ID NO: 69420 - DNA, 171 bp, Oryza sativa
  unsure (1)..(171): unsure at all n locations
agctntgcttcttgataagaaccgtaaaatggagcatgaactaacacagctgaaggttggttggcctttaatttggatactaaaatgcatctaggcgatttctcgtgcatacagaaatgcaaggtgaacttagttctctgttctgactagccatgttcctataccttgaag

SEQ ID NO: 69421 - DNA, 128 bp, Oryza sativa
accctgaaactcagcttaccaccaaaagctgaccacaacatggcattcttgatgctgaacctacctcccatactcacttaggcaacccggcagttttctaagaaaaaggaacagagcatcctcttcct

SEQ ID NO: 69422 - DNA, 410 bp, Oryza sativa
  unsure (1)..(410): unsure at all n locations
agcttctacactggaagttggctttccacaaaaatatccattcaaataaactcctacattggactatgctttcttctcctggaaaagatcttggcaaaaaaagaatgacaaaagggggaaaggcatggctatgaaaaaaaagagaaaagaaaaaaaagaaggaaataaaatttgctctcaaaacattgagcaaagaaaatatagccatgccccctccacaatcatgccaagaaaaccaatttggagagaaagtataggaaaaaggagaatcatttctttattccatcattccacaacatatttcactgttccattttcaaccacaaataaagatccttgatctaggagtatgattgatgatcttcttgagtccatatttnttgctctgcaatatatatgatgcaagtatg

SEQ ID NO: 69423 - DNA, 476 bp, Oryza sativa
  unsure (1)..(476): unsure at all n locations
tggcgcatacganagaggacgagggcttagaaagacacgcgcgccccctacctggcgcgccagatgatggagcgtggggctcctcaccgggagaccgcgcatgcccccctttgccggttcggccggtggcactaagtgaggttcttcgccctcgatctgaagaacgtcagcgagagaggaaatgcacaagacacgggcgacgtagataggttcgggccgctgagaagcgtaacaccctactcctgtgttctggnggatctgtgcgtgaaggaatccagagagccggagagcgagagagagttcacgctctcccgcccattccccctccttccctcactttttctcctacgcctgngcctactttttctctggtcccgggtcaccacatgggcccctccctgcctaagaatggaaacatgctctttacaatganggctagtcttacagcggaagtaacctctgacaagcagagcaca

SEQ ID NO: 69424 - DNA, 328 bp, Oryza sativa
agcttaattcttgtttaatcgtaacagtgaaaattgtgatcttgcacacacttcagtattccattttattatttgcataatttagttttccattgtgcaattaaaacaagaggcggatctattcattgggtagggtgggacacccccccccacaacctctctgctactcgtccttcttatattagtgatgggccatctaaattaggtatagcaagttgtgaaaatccaacatatcatcccgcatcaagcatcaacgcagctagtgttggtctgcctcttcacaacacatgcacgcacgccacatatgggtggacattctgtctaaccg

SEQ ID NO: 69425 - DNA, 348 bp, Oryza sativa
tttttgtcaaaacaggtcaaactgacagcgagacgcgcctgctgattaacgtgacacaacaatgggttgaagaaactttattttattgtttatcttcatatggagatctctcttgctagctatgcatactaagcaagagtccagacttcaaatactgatgtgtattaactattaacgcaaatcttgactggtcactgacatttgcgcaccaccaaccattttatttgtctgggagtcccacttgtctctgacacatatccgcggttcgatgctgaaattctgatgaacctggaagacagattgccaatatgcatattgagtagttcttgaacaccttatatccttgct

SEQ ID NO: 69426 - DNA, 381 bp, Oryza sativa
tatcttgttctctagcatgccgaagaactgtaagtcgatactatgctgaggcacccatcaaattcatatcaatggaggacaatctatatgatttaccacgaattctcaatagacccaagaaacatgcttttcgcaatatgtacggacggcattaaactctttggtgatttgagcaatcgatacagacaatgtcaggtctaattgttaactataaccttcctcccttgttgtgtttcaaaagaaagtacattatgcttgtcatgctcattcaaggaccgataaaactcttcaacgatattgtatgttttcttgaaccgataattgataacctttgaaatgctctcggaatgatggtacactaacataggacgcattatcact

SEQ ID NO: 69427 - DNA, 467 bp, Oryza sativa
cccttggtcgagacttacaacgctcgtttatgttttcatgctgtatagcatctgtgggctctagatatgtttcgccatagactcagaatgcctgatgtcgaccagattcatttgcttgcacactccctactgtaactcagcttcagaagcagacacataacctctcttttctttgctggtacagttgcagaacatgtaatatctgtgtaatgatgatacaggaatggaaaaattattaccgttcatgttgatgaattcccttgtatgaacacatcaaatggacatacgcatggaatatataccaggttaatttttgacttttcacctgtcgtcctgaaaccgtggattgttgccaccttgaaagataaaaatgtgggtgcaagtttggttactcaacttttatgtgccagggtgacatactgattctggaaagaattgaagactgttattgatgatggatctactta

SEQ ID NO: 69428 - DNA, 103 bp, Oryza sativa
  unsure (1)..(103): unsure at all n locations
cccgnnggcagggggtggggtttactttaccccggagcagggagttggttaacatccaggtggcgaccaccgtaggatgattgcatgtacatctcattattga

SEQ ID NO: 69429 - DNA, 437 bp, Oryza sativa
  unsure (1)..(437): unsure at all n locations
agctntgtcaggatgatcaccttcctcttccttatcagctttgctggcatgttcatcatcatgcccttcangaaggtcatgatcattatgcaccggttgacattccccagcggcacagcaacggcgcacctcatcaatagcttccatacacctcaaggtgtcaagcaagcaaggtatcatcaattaaactttacatggaaatgtttctgttggatcaagtactattcgaagccttagattacacaatcaaattgactatttgtgtttgcaggaagcaagtgacattattgtttaaatcgtttggaggaaccatcgcatggtcgctcttncagtggttcttcgcctctgggccgggctgtggcttcaaattcttccccacatttggcctcgaggcatataaacacgggtaccgcatcagacatgcatggatggaattc

SEQ ID NO: 69430 - DNA, 327 bp, Oryza sativa
  unsure (1)..(327): unsure at all n locations
atgagtatgtttgctttttntttctttcctcgctctcattggtttttagaaccaacaggaccagtgttgaaattgatcttgtttatttcgtttgggagaaacctgttagctgtgtttgagacatctgaattttgtgcactctgaaaatgatatatgccttgacatttactattttatttcccattgacagattatacaaggacatgccgagcaacaaaccggcctactatttttcttctttccggatggagtcacgatcgctgttgcacggacattntgtctatgacgcggtaagagggagggaataaaaacaatacatattatgga

SEQ ID NO: 69431 - DNA, 405 bp, Oryza sativa
agctttttccaagcgggagcttgacaaaacattcagtgagcaacagccttctgagccttgtttgggaggatgttgtccgggaggatgagctccggcgggatctcacggaccacgccgagcatcgaatcatactcctcgtctttgtgggcatactttttcctcagcatcttctcgagctcgatctcgtcgaaggtcttggaattctcggcagcatggacttgggccagattgatgtagttcgttgctgactgagcaatgaacgctatctcctcttcagtaagctttcttaggaacttggcaggattaccgacccagacctatcagtgtcaagaaaccatatggttcaataaaggcatgttatatatttagttatataccatatacataccaaaagatattcaagtc

SEQ ID NO: 69432 - DNA, 393 bp, Oryza sativa
  unsure (1)..(393): unsure at all n locations
tcctcaaacatgtaaagcctgtcgaggtgctggtgtggtatgtatcctttgacaatcttttccccgagtatgccacatattgatatttatatatttactttaacaaccttcaaaatgttgtcattgagtgcagatattcatgcagcggngtataatgagtatagaaactactctgtctaagtgtggtggaagtgggaaaattgtgaaggcgcatctctgctctaattacatatttttatttatattgttcttgaagagtctatagctcttcatgataaataaagcccatctgtcatggctgctttgttcaacaattcactcagtggcggcccaacacaaaatatagctatggcgaactttaaatgtcttagaccgaaaatttttttataaaaa

SEQ ID NO: 69433 - DNA, 382 bp, Oryza sativa
  unsure (1)..(382): unsure at all n locations
tagctnggctatggctantttctgcccttcaggacgcttctcttttcggctggtctcctcctcagtttcttggttggatgatgatgtatatgcaccagattcagaaatcttagtcctcttgttcttgctgtcctctttnagtatccgtcgccattttggttgatcctttaattctctccacatatactctaatgtagaaagtttatcattggtttctgatttatataatgcatgggctttcttcatgatcatatcatcagagaatccactgctccaggtttctctagctcgagaataagctccacaaaattatgcaatggccttcttaacaccacccccatgtgctttcattgcacgactggtcttttgcggtattgctaga

SEQ ID NO: 69434 - DNA, 304 bp, Oryza sativa
  unsure (1)..(304): unsure at all n locations
aaaaaaaggcaaatcatgtagcactaagaaacctttcagaggagctcanagatatcgaacgatcatgaaaaactctgctggtcaatgcctttacgcatttcatgtatctatcaaatactttgaatggttttcccanattcactgaccaatgcataaagatggaacatgagaaagatacagaatatacgcacacctgatttcatgaatagcacaacaataatttactgacagttangtgatggattttctgttgcaagataattaccacggcaagttgtggaacaagtaacttaagaaatgtgca

SEQ ID NO: 69435 - DNA, 428 bp, Oryza sativa
  unsure (1)..(428): unsure at all n locations
gctgtttcgtgggaaatttttcactattctgaaactgaaggtggaacaatatacgcagatgtcacgtctcatgccacaagtacgtcacagagcacatatacttcatgctagcatcatcatgctactaaagattaacggaaaatgaattatattcccaggatttggggttaataagtcacccgagagtctgatttagttaataattagctatgggctgtttggtatatntttagatccagcttcatctgtcttagaactggaactcaaccaaacgaattcatctctccataaaaaagagtggagtcagctggaatattgtcacaaaatgaacgagatgcgaagctgatccacagctntattccagatctaatttctggaagttaaattaaaagttagaattatatcanacagccaccttagtggagtat

SEQ ID NO: 69436 - DNA, 143 bp, Oryza sativa
taactcctgatccgtttacaacaatttagattatcgtaccatacagcgacctgctaaagtaagcatgacaagtttttatctacccagcagggcaatttaggagtcttttcaatacattttactttgaaatccggttcgctttc

SEQ ID NO: 69437 - DNA, 381 bp, Oryza sativa
gagcacctgagccacgacatttttatttaagggaagcatatctgagttcatgcttcaaaacatgcttcagacttcaggatctctccatttcatctaccatatatctatctggttaaccgtccttcctctatctgaataatatggggaattctagccttttagagcacatattgaagcttatgtcgtagtcaccttaatatttgataaacaataggtcttcagacaacatgcgtacatagcaaataatgcctgtcaggattagcgatatacctcatatagccaaccggatgcatgggaaatctagaatctaaggcagtcatattcattagatagtacaccaactcgaccaacatgcacaggacatagatcagtctctctctc

SEQ ID NO: 69438 - DNA, 470 bp, Oryza sativa
  unsure (1)..(470): unsure at all n locations
cttctgtgcactgagttgttatcttattgttagtctacggattntgtgttggcggttgcattatcttctatctatttgcttgaaatgaggcagaactgccatgctttatatcaaataaataagaaagaaaaatagctaaccaattcggaaggaactcacgtttgaggtatgttagtgcaagagtaaagagaatattgaagagcatgatgaattcgagcaatgcaccaaagccaatccaataccacttggcttcagggaagattccacgggacataagggcttgcacgcctagggtctcgttggagagagaattatttaagactttgtcccagctgtgccccaataactcattcactgagacggcattctgtgcatacatcatcggagatatccagtatgcgccaatccaccatctattcactttatctgctagtacattcataaacatgataaataccccgtcacgttgc

SEQ ID NO: 69439 - DNA, 392 bp, Oryza sativa
  unsure (1)..(392): unsure at all n locations
agcttctttcaacactctgaagtanactggctacctcgatcggatactattttcttaggaacaccatgcaaacacacaatccttgccatatacaattccgccaaacggctttcagaatatgtggtcctcaccgggatgtaatgagccactttggtaagtctgtcgactatcacccaaatagaggtatgacccgatgacattctgggtagaccagtgatgaaatccatccctattttctccacttccattctggtatctntaaaggctgcagcaaacctgcgggtttctgatgttctgccttgactcgctgacaaacatcacacacagctacatactctgctatctcacgcttcatancttgccaccanaannttttcttgagatcttggaca

SEQ ID NO: 69440 - DNA, 352 bp, Oryza sativa
  unsure (1)..(352): unsure at all n locations
cctatatactcnctccatctactttngatagttatatttccaaatctgagaagtttatttgtgataggcatatttcaattcaacaacctatcatcttaatgactttctcggatttattgcatgactctccattcttccacacaagattggttatattggcatcgagaaatgtaaatattaatgaatcgctggtttacgacgaatgactagtagcatatttaaatggatgttaagtagaattacttatctttggtctgtgtgtcaagatgaaatatgactatcaaaagtagatggaaggagtagtatttattaaacatttaaatgtctagctacacatattctaaaataggga

SEQ ID NO: 69441 - DNA, 423 bp, Oryza sativa
  unsure (1)..(423): unsure at all n locations
agcttccctttatctgccttctacagcacacgtcacaacacgaggtcttttggagccatagcgcgcgcgcccacatgcacaacgtataatatgccatgaacaactgaaaaacctgatgaattgcccaaatggtccaataaagctaccattttatcctaaattggctttcatttctattgcttttctctgacaatgaacgatggagtaagaatgtaccgtttcctttacaaataaactactagtatttgtattgagatgagaaacaatatagatgaagcagagggggtgaggggctgggtgtatttaaatgagatatagtgtgcaatataantaattatatcattaggctgacttctagctagatcataacacatgattgattgagtttaattatttatacttaaaatggataatatattttta

SEQ ID NO: 69442 - DNA, 471 bp, Oryza sativa
  unsure (1)..(471): unsure at all n locations
ctcagcgtgccacaccagaacctgcaccgactgacttcaacgcanagtttttatttctntactgcgagatgctcttccatttgcttgaactttggggatatgtagaactcctaacgcccctgtgtgggtgctggcgagccgcacatggcatgcgctacctcacctttctcggctgcaatgtcctatttagacttcatcaaacaagttctattcttttcgacagatatacagccttggaagccaaaccggagttcaaatgacgaaatcatgtccataccacaagaaacatattatttactcgcggaatagacctcttcctcgtggaagcatatcctgcgccagtaaaagcactggagaacagactagtgttgtaccaacacggtgtcgaggggcacaatgattatggataccatctctatctacgctgagatctattgtcttagacatagcttagtcgctcatctgatgtat

SEQ ID NO: 69443 - DNA, 203 bp, Oryza sativa
  unsure (1)..(203): unsure at all n locations
gaaaatggctacatcattctatcccggtactgctccctaatcttagaaataagaagggttcccatgccagatccagtgccatctcccaatgaaaggcacacttggaatcctgcaacctaacaatataggaccatgatgttagtcatcaatgcaaacagacttcgnacatgcatctacagaatgctaccgtgcgttcaacgaat

SEQ ID NO: 69444 - DNA, 438 bp, Oryza sativa
  unsure (1)..(438): unsure at all n locations
agtcgaagctcttcaccgagttgtcaaccccgccggcaattatacgccattcgatgaataccctcaaataaccaaagcggtgtgggaggaattctgctctctcaagaacacccaagagtttagggaatcaagcgaggcacatcgcctactgcaacagcggaatgagcacccgcatcggctgggcaccgcagggtacattggcaaggaggcaatagttcatacaatggcccaaagaagacatagttgtgaagatgactcctcgtccaagtcgaccgacggagcttacacctcccaagtctaagctatcaattgaggctccccgtagaccggcattgtcagtacctcattctcctgatggagctaatatggacttggcagatatagctcanagctgggctccaataaagaccacaagaaaggccgatagcttcccaccac

SEQ ID NO: 69445 - DNA, 465 bp, Oryza sativa
  unsure (1)..(465): unsure at all n locations
tctgacctgtactaagcaacatgtctgaagactgccattcttgatgtttgtgcagggtagaatcctgtcagtgatagcaaccttcctgtatcacttgaagaattcagcttacttgcatcatcataacatcttcctaaggcagctaatattacaaacctctcattatctggatgttgccggttaaaaaagctaatcttgagtggactgcctaaacttgacgaattggatctttccggcacaatatagcataaactttacctggatgccatgccagcagaaaaacttaatcagctctctttgtgtggttgtctgcatcttgttcaatnatgggtcatatgtacataaccacctgggtgagttcatttatacactgagtcattggaggcaacagcaatacttgtcccgtcagatgatgataatattagatccatgcgtatctggacctggctcttcagtctacagtgt

SEQ ID NO: 69446 - DNA, 451 bp, Oryza sativa
  unsure (1)..(451): unsure at all n locations
catcagctcgtcccggatcttaagtcactgagctgcagcttgtctcgtcctctattacagaccctgcactggcccctttgtcaatcctactgctatccgctgcactgttagacacagagttccagatggtggggagaagatactgagtaagatagaaagggagggtggaccgaagtgcaacatatggatatattacctgtacaaaaacaaatgcttaaatgatggtccaagtgaaactctggtaataataggtggcctaatattttatatacatgccatatttcattttaacatgcaattttgtgtttataggttggtgaccaacaccgangatatcttttggagctgatgctgacaaagcttaggtatgcagctggtgaagggaattcagaatcatcaagtggagaaatctcanggtctatcagtgggaagatggatgccactcatggat

SEQ ID NO: 69447 - DNA, 485 bp, Oryza sativa
  unsure (1)..(485): unsure at all n locations
ttggctggtgatttgtatctgattctagtcctataaaatgtcatcagntatattatntgatgagccacatgataattatattctttaataatacaagcacatgtagagtgttcagatgaattactccatcacaatatatagctacttctagtgctcaaatcttgtcgtcgcaaccaattacaacctcctcattcaatttctccacctaccttctccatctcaaccaatcacaacaatctcgtgtttcacctgtcttcttaatctcagtgaattttttttctagaagtgcttantatttgggaacggagggagtattaaataagctgacaagtcactacatgtctttgtgtcatcagtgctacctgtggaaaagtgcaaacatggcgganaacttatctatttgtcatgacagttcanattctggagttaattcttcgtttagcagcacttgcaaaantngtactcaacanagctgtgaaacatgt

SEQ ID NO: 69448 - DNA, 459 bp, Oryza sativa
  unsure (1)..(459): unsure at all n locations
agcttagtgtgttaatcattgctgtagacaaaaattatttgaagaaaacatatnttccaaaacatggagcaactaattaatctgatgaataaactgcaggaataggagaagatgtactgccgcttcaatatatttagccttaagccttagtggaattccatagtaatttttaaaacaatggttaatatcttaatttttttaaaaaaaaactcaatttctcagaaatggagttttttttaaaaaaagataagatattgaacattgtttcgaaatatatcaaaacatttcggatgaatttaagggcatatttggttggtaactaatattgccacacattggtggctaagcttangggtctctttggttgacaatcaaattngccacatctaaccttaagtaagccttagttntagtagacaatgttttgattatgtcacaattctactttgcttaactctt

SEQ ID NO: 69449 - DNA, 253 bp, Oryza sativa
ggactattaagagaacctcgagatccactttgggagtcctattactttgaggagacattgctgctgtcacccacgtcgagctttaccttttggttaccgcgcgcttgtgggtgctctatgccgcacagaactttccgaaccaaattctcctgggattgggaaagagataaaatggtggcagcagtggacatcctactctcaagaaagccgccgcagttctcgcttgcttgatgggaagaccacaatggtaacc

SEQ ID NO: 69450 - DNA, 431 bp, Oryza sativa
  unsure (1)..(431): unsure at all n locations
gtgaagatgatgaccaggctgtttccgtaatgagtgacacagaaagaacaccatcgggtgcacccaagcggacgccttcaactgcttctgcccccgttcattntacaagagtgagtgtctctctttgacttgttctgaaattacttccctcttcggctaattactcatagactntgtgggtgcagaaaaagaaaactgctgtgaagaaaaagccagcagcaacgattgtcaagtcagccccaccagtaagatgtctttaattcttttacttaatcaaactcaacctgctctatataacacttgtctattctacagcctcctcctccttctccttctgtacagcaattgtcaagtgaccagactgcatcagctgtgtggtgcatcacatcgaggaggaagaacaaccagctgctcctgctatccccagtaag

SEQ ID NO: 69451 - DNA, 313 bp, Oryza sativa
  unsure (1)..(313): unsure at all n locations
tcatacacttgagttaaaaatatgtaatctacttcaacttctatatgcttaagtggatattccgatgctgattttggacgttgtagaattgataagaaaagtactactggaacatgtcattntcttggtacattattgattggatggtcttctaggaaacaatctaatgttggtcaatcaactgctgaatctgaatatgttgctgctgctagttagtgttcacaaattctttggcttttatctactttgacagagtatggtcttacttttgagaaagtacctctcttntgtgataatactagtgctattaata

SEQ ID NO: 69452 - DNA, 483 bp, Oryza sativa
  unsure (1)..(483): unsure at all n locations
tccatcaataaaataaataatacaaatgattcactgtaattatttgattgatcctaaatccatctaacaacataacctctagtatatgactgtcctatttagatggatgcatgcttagccataatccttccataagccatttgatagactaaaccaccgattagccaaatatatatgtatcccataaatgctatgatggttaactcctaaataggccacgttgacaatagaaagattaagaaaccttagcccctagcgtggttgggatccattagcaaacacgaatagtacantttgttgcgcatatttgattgttgtttgaatattggttnttctcgcgtattatagaccttgtgtatcgngtagtcgtgaggcaacgtctgcaacttccaggaggtgaanggtgatcaagattatatcaataataaggattatcctgagcaaggcaagtcatcactattccttgaacatngtgatcctaat

SEQ ID NO: 69453 - DNA, 301 bp, Oryza sativa
  unsure (1)..(301): unsure at all n locations
agctggtgggttnntgtgacggtcattatcgatcagtttcgaccaacaatattaccaaaatagagaagaactagtgatgcttgcaatgcataaatatgtcagaaaaaaaaattccactagtattaggtctactaaccttttgcagagaatgacaataaagtggaggagaatcgacatcaacatagaagataaatcaatcagacgatgtcgagaattagacttatgcatgaatgggccaagaactcagaattgacacgtcaaactgggccaaaatttacaagtctacataaaggagcaacag

SEQ ID NO: 69454 - DNA, 388 bp, Oryza sativa
  unsure (1)..(388): unsure at all n locations
gctcttacaagatcttaccaatgcaagtggaatggtgtcttacaccaactcaaccaagcaccccaatgaaggttggatgtatcgatgccttggcaaacactagcggtacggctgtaatcaaatatgtggagctctgggtaggcttaaatatgtagcaaaggaatagcaaatgctcaaatcagataatgccaagttgaataattgttcaaagtcaagtaccgcgctggtcctaggctaaaacgtactagagacgcgagcctagacacaaacgataccacaagatagcactatgaacaactcatgcacaactctgatatatgaagtttagctcaaacataacaananatnctcttttctttctttcttctatcttctctcttttattttc

SEQ ID NO: 69455 - DNA, 285 bp, Oryza sativa
tttaattttgttgtaaaaaacggatatatgaaattgaaattaatgattatgatggaaatagttaataatgaattttggagaaaggatgtatatgttaaatttaataaatgtatttattaaaaatttattagttgtaatatgtaaaggtttaatttaaggatggagttgagaattttgtagaagggcccccccccccccccttttgttgtttgtgatgagttaaaagaataaataaaggaatgtaagttgatatattgagaagaagagatataagaaagttattat

SEQ ID NO: 69456 - DNA, 356 bp, Oryza sativa
  unsure (1)..(356): unsure at all n locations
tagaggaattaacaccagnggcttctcacatcgaatttactctacttgattgtgtacaagctaactaaagtgtaagagcatctttcccattcttgaagaggtactacgaggtaccatgagatactatgtactatgaggtactaggtaccatgaggtaccaacttaatctaaccgttgatttatgaggggtatgatcgggctaaacaaatttagggtggcgctaatccctcaccctcttgatggcgatttgcttgcttgctcgtggcggctcaaagggacccaaccatgtactgcgtcgccagcggcaagagctgcacgggaggatgcgaggacgcaattgccgtgctcctctacag

SEQ ID NO: 69457 - DNA, 458 bp, Oryza sativa
  unsure (1)..(458): unsure at all n locations
agcttggagcatgagcgatgcctgcaagtttcaaggtggatcgtaatcggaacagaaacactgaaactttagttgcagattttggtgagagtgcaattgggagggtggctccagtggactctggaatttggtggattattctactccgggcatatacaaagtatacggcagatacctagttggcagaatcaccagagtgtcagaactgcatgaggctgatactgaacctatgcttatctgagggatntgataccttcccaactctgctctgcacagatggctgctcaatgatagatcgtcgaatggtatgagctntcaccttgnattgatttatntcttgacatgtatcattaanaacagtacagttcagttgatgtggcaacaaagaagctgaatgtttctgctntttcttcttagaaccaagcaagttctgtttttcaaaacattttttaataaac

SEQ ID NO: 69458 - DNA, 458 bp, Oryza sativa
  unsure (1)..(458): unsure at all n locations
ntggaaaccttcagttcctaacaacaatcaccattactgattacaatcttcatggtggtgtgccaaaggagatcttcatgattccaacaatagcggaagttgggtttgcattaaacaatctcagtggagaacttcctacagaaatagggaatgccaagcagctcatatatttgcagctttcatccaataatctgtcaggagatatacctaatactttgagtaactgtgaaaatttgcaacatgttgagcttgaccaaaataattttagtggaggtattcccacctcgttcggcaaattaattagcctaaaatttctcaacctgtcacacaataagttaagtggatcaataccagtgtcacttggtgaccttcaactccttgaacagatagatttgtcattcaaccatcttacaggtcaggtcccaactaaaggaatcttcaagaattcaacttccatg

SEQ ID NO: 69459 - DNA, 432 bp, Oryza sativa
  unsure (1)..(432): unsure at all n locations
agcntcagtggtctcccataattgaatgttttatgattataattnttaaagataatgtacctatagtataaaaaatgaaagaagtgcatttctggtgatcttttcaaccgatcgatnttttgtactattatactgaagtctaacgagtagtatagttactttcggataaacgaatttctacctctttgaaacgagtaatatattaggttaggacaagcgaatctgcacccttctgaaatgagtaattattttgagaaagttttttttgacggatttcatcaataccatatgtcagaagaaaataatcgtaactcgtgcggcaacaganattactaactaatgtcgactagtatggatgcgatatctcgatattactctgaaggctttgagataatcaaatccaatggcttaacaaaaatctactatacatac

SEQ ID NO: 69460 - DNA, 394 bp, Oryza sativa
tctccaatgaataacattgacatgaagatggcacctatctttgtctatgttaacgatgccactgccactgagaactgtgcctcctttggtcttcacgcaccgagctcatctgatactctgacgctgatgatgtagaataaaattggttcacatattattcatcgagctctttgaaattcacaactattgccttaaaagaaataatattgacacaccatgccaagtaaaagtatttattaattactagcaaacatgcatatgcgttcaacatgtgaagaatattttcacgatcgattacaactctaccaatgtatacgactgaccgaagtatgactgacaaacaatatcacaatagagtcagacatccttatagcattgaaccgcgttgcactct

SEQ ID NO: 69461 - DNA, 427 bp, Oryza sativa
tttctggcctactgcaatgttcgacgccgacataattgtgcgcacgtgcgaatgttgccaatatttctccagacaaaatcatctaccagcttaagagatgcaaacaatcccgctgtcttggctcgttgcggattgggggctcgacatggttggcccgtttaaaaaggcagtctgcggttacacgcatctctttgtggccattgacaaattctccaagtggatcgaagctaaaccggttgtcacaatctcagcggataatgcccgagacttcttcatcaacattgtgcatagattttgagtgcccaatcggatcatcacccgatatggcgcacaattcactggcagagttttaaagagcttttgaagacttggaattaagattgctatgctcagtggacacccatagcaatgacaggtgattgagcat

SEQ ID NO: 69462 - DNA, 431 bp, Oryza sativa
  unsure (1)..(431): unsure at all n locations
tatcattcttacatggcaacaagccaacagcacaatcgctgtggatgattaccactgctatacataaaattgtgttggaattgacagcatgtgagaccaatccaatggagaatatatccacatctacaaaatagttactctaaagggaaagcccttctgggttgtgtgcttcaatgtcaacatgtttaatcccaggcacaatcttttggatctctgacttcagccgatccactttatactcaagagcttcactacatcctcacctgtacaacagtgtttttcaaataaagatacaagccataattccgtattaaaacaacatatatatattggataccgtcagtagacatgacccctattaactncgtatcattcctggacaatgaaacctcccggaactgtataacggacaaagcaagaagctcanggat

SEQ ID NO: 69463 - DNA, 411 bp, Oryza sativa
  unsure (1)..(411): unsure at all n locations
gcttgagttgtacagagtgcaacttgttacacataagccatctattgtttcaattctttttcagttgttaaggggatgtattgtgtcaatcaggggtgtacggcgccacggcggttagacactatagaccatctgaagaaatcccctgctgttcacatttttctttttcctatgtgtaaattgtttaacgtaaacatcttatatctgcttgagaagaatattgtttcagcaaacttctaaatgtaatgggtacccatattgctgacaacaaaatatgcatgaattacttgcctatggtctatgacagggcaagggcagatgctccactacttatattggaattgggatccagaagaactncatgatgaacagtatcaacagcggattgcttggatccattggcatacctac

SEQ ID NO: 69464 - DNA, 507 bp, Oryza sativa
  unsure (1)..(507): unsure at all n locations
tattacggaccttaaatctcagctttgtgcagatgtactggccttaaaccttggcatcttatttcttaactcatctgccttgcagaaaataaatgaagataagcttttcaatctgttctctctatatgggaacatagtccgaatcaaaatactgcgcaacaaaccagatcacgcccttgttgaaatggctgatgggtttcaagctgagctagctgtgcattatctgaaggtactctcatattcgcaattatctgcttcattgcattgagtaaaactaattntctattttcatatgtatgattactgttttgccgcattttggatgccaatgtttttcacagggggcagtgctatttgcaaagaagctcgaggttaactactcanagtacccaaatataacaagcgctcctgatgcgcacgactacacgacttcaagtcttaacaggttcaacagcaatgtaatcaagaactaccgtcactgctgcgctccaaccaaaatgatccaca

SEQ ID NO: 69465 - DNA, 226 bp, Oryza sativa
attgaataatacttcgcatagcgcttgcaatacaactataccaccaatgacctcgagctagcatctgtcatcctgcgtctaaaactggcggggctaattcatcggcaaccgatgtgaaattctacactgcccacaaaccttaaatattcatctcccatacagacctgaacctaacgcaataaaatggttataactcttctaagattatgacatgggtctccattat

SEQ ID NO: 69466 - DNA, 460 bp, Oryza sativa
  unsure (1)..(460): unsure at all n locations
agctttcttcagcttgattggctagataatggtgttcttttcatacttaatggtgtatcagttgagtttgatctattaagtcgtgcttagaaaatcaatctctagcctgccttctggttgccgattagggtagcatcagagattcagccgatcttatctgatttaactatatttaccctatatactttattgacatgttaaatctaccctttattttaagatcttattgcatttaagtatattaggcctttgtttaatatattctacctgctttaacatcttagtatagagtggtatcgaagtattagccgatacatgctagatctatatgatcggctatgctatgaacatatatagtcccattattaatatatattttgatctatcccaatcacttgatttaagtatatatcgatataanggagatatattggtaatatctatagccgatcgagtagat

SEQ ID NO: 69467 - DNA, 479 bp, Oryza sativa
  unsure (1)..(479): unsure at all n locations
tagacctgacccactcaacaatatcttcaagactctngctctctatgtgctttcctcctatgatctatcctatagaaactgctcantttgcattccacaatgatagatgccaccagaggtggtgctcatgaaagcaatgcattttctgggatcacaataaatcgatttaggggggatcctgatcagctcttcccttcatgtatccatatacaaatctgattggtcaatcaattgagaatccaaatttcgtattgcatgtcgaacatattgtcccagatatagatttnttgaagctacattacctgcgtggccgtggctgaaggtgggtggcggttgggtggcagccacagcacgagatggtgcaccagttggcggtagcgggaaaatgttcttgcgtaccagcatgcctgtgcacacagaaactggtgctatacatcgtgaagctggtgcgttgtacatctgatgacaatatttgtcaa

SEQ ID NO: 69468 - DNA, 196 bp, Oryza sativa
actatgaatgcttgcaatgcatagatgagatcgacaataaacattctactagcacgaagattacgagactctcacaaagcataaatatacgatggagcagagatctcattgaaacctgcgaatggacaaacagacggagtctgaaaccaaacctaataacccatggggcacgaactgctaaaagacaccatcaatt

SEQ ID NO: 69469 - DNA, 452 bp, Oryza sativa
  unsure (1)..(452): unsure at all n locations
tgattgtgtgcgaatntagagctggcactacctatgtagttataagaacgcgcatatatttggtgtatgtttcttagttntctactaacaatggcagggatacgcaagataattgnggatagctgcgctcaacatcgacatcttcgtcgagacatgaggagggatcaacatgaccattatgaggtaagtgatgatgttctaggtaagatcaaatctgcactgccttatttcgagggagactatgatcctcgtgcttacattaattgngagctagccggtgatagtgaatttcataagcatgtcttgtctgagaaacaaaaggttatgtgtgcctctagtggtttacataaacatgcttctaatgagtggaaacatctttgtaggcataacanaataccacaatctcggaaagacctgaaacgatatttcagagactgttatgttcccatgta

SEQ ID NO: 69470 - DNA, 387 bp, Oryza sativa
  unsure (1)..(387): unsure at all n locations
tatgccggaaagccgaggtgtggcctatgcatctcgttagttaaggcctcatgaagtgaactatcctaccaatgaccttgagttagctgctgtcatacatgctctaaaaatatggcggcactatcttatcggcaaccgttgtgaaatctacactgaccacaaaatctaaaatatatcttctcccaatcagacctgaacctaatgcaaagaagatggttagaactcatcaaagattatgacatgggtctccattatcacccgaggaaggccaatgttgttgctgatgcgttgagccgaaaaccgcagtgcaattgcatgtccgtaaaaccccgatcggagaccttgtgntcagaaattcagaaactcggtttagaaatggtaccacat

SEQ ID NO: 69471 - DNA, 445 bp, Oryza sativa
  unsure (1)..(445): unsure at all n locations
aagaaagatatataaaatattctgtaaatactttttagaatatcttttacggttataagagttaattattaattcgtttatactctcagataactatagaaaaatcatcaatttcagctatctcaagcagtgcctaactgcctacttacctgtggctctgggctgtcatttcgataggaaaggagaaagttctgtacttagtagtactagtagatggaagaactagtacattacttattacggaaaacaagttacgaattgctgctgattagctcgtgtgtgtatagtcgtcgtacgttgagtatgagtcacgtgcgtgaggtcttgtactctcgtgtatgatgtgtgtcatgaaccctttctgaaagtcattcggtgtgccactactagtcagntcgccagagcatgtatggtggtactatcgtatgatgctgaagtacatgac

SEQ ID NO: 69472 - DNA, 449 bp, Oryza sativa
  unsure (1)..(449): unsure at all n locations
tttggatgggccatctgatttcaccggtgaagtgattgcttggactagtggaaataaagacaatgagatcgttctacatgatacccaagtgacaggctctccaacaaaacttggagatgatggatctattgagttatctcgtcatatagtagtagtcccattggatgaagagctagtgctcaatgttattttgtttcatggtgatgaccatgaagacgaatgctntgaatttgttcttaccaactatgatgaagaatctagtttcaaagaaggccgttttgagctgcatgtgaaggtcatctggacaggcgtagtgagaacgggagaacacaagatgtgggagagcacagggagaaatagaatgttagtggtgattaagttaaaatcattggaaagatgttaatagtaacctctctggcgaggaaatgtcttttgtatcagcattgtat

SEQ ID NO: 69473 - DNA, 446 bp, Oryza sativa
  unsure (1)..(446): unsure at all n locations
ntagcaccgtttcctgtggttcaccttcaccagcagatgatttttatggcctttccttggcaactctggagttggcaacagcgggagaggcaaaggcagaggcagaggcagaggcagtgatggagcggttgcgctgtggatatcggggtggtttggcttcattcggtgccacacttcaattcaaatgttgtcggatttaaatatatcactatatgtgtttgaaacatttgtgggaaacatgtatatatccttaagaaatgtgtgctatataagaataccacttactctctctgagatgatttatggntcctactagtggggcccatctttgctcacgtcttgtcccgcttgaggttgcgtacttcctatcacaagtgacgataatctcaatgataaacttattctcaaacatcttcaaaanagaacttatgaccaatgatagtaaa

SEQ ID NO: 69474 - DNA, 429 bp, Oryza sativa
agccttattccgatcagtgcaatgggttccatctacggcatcgacgacctcgtcttcccacccgggcagacgttttggttcggcagcctcgactttctcaccaacatctttggcaagatctctctccttgactcggagtccgaccagtcgggagagaaccagaattcggcccccgtttggactccaaacgcggctgaaagttaactcaagaccatctcgaccgagtcggcttcaaaccactcgggcgagatcgcatcttcaccaacgtcaccagatcaagatgatggggtttacccaccgatcctgatgaagctccccgacgatttggcggccgtctccatcacgccagcgtctctttcccgtaggcctatgcggaagtcggcttcaacaccgatttcgcctagcttcagggaagttggcgtcatcctc

SEQ ID NO: 69475 - DNA, 480 bp, Oryza sativa
ctaaaactatagacatgaactaatgactccgcgttagatattatttaattcattctcaaatatgaaactatgtgggatttgaagagatgattttgccacggtggcgatctaaatggacaataacgtggcaatgacctctcatgtcaggcttctttcttatacatctattattctcttatagcagggcccacttatcatttctttcttctaatcagtaactttctctcttaatccttgaccacaacgttctccagttctacatcgcatctcactctctctaccatgggcattattcttgcgtgtgtctcgggggtggtagcaagggcggagctagaacgatattgagggggttccaccaacatactttagtctatattggatagagtttaccttgatacgggtgtctacagtggaatcgatgaggtgtatatatagtgaatattgataatctatagctgaaaaacttctgaaccgggtcct

SEQ ID NO: 69476 - DNA, 398 bp, Oryza sativa
  unsure (1)..(398): unsure at all n locations
agctntatagttntatttagttccttcgactgtaactttgtaaatattttttgagttatataaaattacactgctcggcaaagccctggcagtatttcaggtcaaaaaagatttcatatagatngaaacgacaaaccaatcgacgtcagagattggaatcatcgatctcattgagaatgccctcgagcaaaaacaatgcctttgatctccgaagttgttccatcgcacttcttgatggataattcgacgctttccctacctgtcgcaccaactgtttaaactgggaatcggaaacatgaaaaanggtatcgcacgagacatannagtggatggatgcgaagacccagaattagacaggttcaggccctctcgatgagagggtaaacccctacacctgt

SEQ ID NO: 69477 - DNA, 498 bp, Oryza sativa
  unsure (1)..(498): unsure at all n locations
ttacggacctatgaaactaagctganagaaactaatgccgctatgagactaggggctgagctgttacacttgaagacacaactcatgaagacgcaactggcactgcattggctcctgtgacaacaatgttgttcacctgaccttgcggctgctgatgcttcagcttcggacactctcttgcaaagtgccctggcttgtaacattagaaacacacccgctgttcccttgctggttctgcatttgttgcactaacatgttgatcaattgggtctgttgagccagcacttgagcaagggttgggttctcttcattgatattggttccacttccactagcgtgagtgttcaccatctgttgcagattacaaaggatagaaggagaggggttacactaaagataagaccttaaccaggttaacactgatctgatgtgtgtagaccattatattgttcaagntgaataagcaagcaacctagtatagtcacacactcatcaatg

SEQ ID NO: 69478 - DNA, 368 bp, Oryza sativa
  unsure (1)..(368): unsure at all n locations
agctngactaatatcccgatccgcctgagaacgtacttcgttcgggtcatatcatccagcataagaagtcgntgagtagtttgttgaggaatccatctcttgaacctatctcgtcaaaatcctgaagcaccaaaatccccctacctggcgcgccactgtcgacggttgatgtcacgattccggtatttgcatagtatggggatcgtttgtactaggatatacgcgagattgtagtaaaagagatggggacgaggatttttatacaggttccnggcccctgaatggtcaggtaataaccctacatnctattgatatgggattatatgatggaaaccacagattacnaagggaatagcagaactcgatga

SEQ ID NO: 69479 - DNA, 70 bp, Oryza sativa
ctaagctatcaaaactgattgggatggtagtaaacaatattacgttttgaacaacacacatagtgcgcat

SEQ ID NO: 69480 - DNA, 454 bp, Oryza sativa
  unsure (1)..(454): unsure at all n locations
nagcttagtttgcatcttaagcgcactattttcttgtggactcatggaaatgtggtgcttatatcccagcatttttcttgtctcaatcatgtaccaacattgtttatatatatgttccctttttttcctccagatggtacaacttctgcttagctacgaggcgcttgaagtcaatgctatcaataatcagaatgaaacagctatggatttggctgagaaagttccttatggtgagtctaaaatggaaataattgagtggctgacagaagctggcgcaaagaatgcacggaatgtggggaaaattgatgatgcatcagagcttangagaaccgtgagtgatatcaagcacaatgttcaagcacagctcaatgagaatgccaagacaaataaaagagtgacaggaatagccatagagctccgganactacacagagaagctgttcagaacaccatc

SEQ ID NO: 69481 - DNA, 370 bp, Oryza sativa
  unsure (1)..(370): unsure at all n locations
ntcgcgagttctcaacaagagcaagcaagagagcanagccatgtattcgcgccaccctaaagataataattagcccgcgcaccacaccactaaacccgcattaattaatccccgccccgtaacacgagccccctccctcttttctttactcctcgccccagcgcccgccgcgacggagcgaggcgtgggaattcgcgacaccacacagcttacgccgccgtcggtacgcggcgagcctctccctggccgcgctctccggcggcgaggcggtggggtagtggtagtactagtagtagtagtagtattgcgggaatttttgtgggggggtgggtgggtggggtcacctcattataatcttactctatccatg

SEQ ID NO: 69482 - DNA, 478 bp, Oryza sativa
  unsure (1)..(478): unsure at all n locations
ttacggacctatgatactaagcttggcaacattcagcgctgcgatgtgagaagcacggatacttaatctctgcctcaagcaaggatctccctgcgagaggtctttgtgtccagcaacctgagtgcacatagcagtgagtgggcagatatagttaataacaaagatcagtagttcgggactagtgataaatatgttttttagacactaatttggagatacatttctgtgcagcattttctagaagtatctggagcttaattattgccaatttataaaagatgcttgatcatttagtcagacaaatgcaggatatacagcttggtaaattgaaggagaacattaccaaccagttgccagcatatacaccagcagttggaggcaattatactatctagcggtatataaatggataanacgtcttagaaaatcacctgtagaagaagatgcttctgttcttcatagtttgctctaagacgag

SEQ ID NO: 69483 - DNA, 451 bp, Oryza sativa
  unsure (1)..(451): unsure at all n locations
agcttgttatcattatatatcttgcctagaaaaaagatagctaagcatgaatttccacatatcttttatggaaaaaaaaagaacatatggcccctaatcgttgacgcaagtatataccttatacgtcacgtgattttactagctatgtcatgtgagcacattcttaggccaatccacttggcacctgtacagagagaacaaagcccgcgagactgaatcaacacaaggacaatatacatttgcttatgaattattatgttaagagtaaattgcacgcatgatgcaacaacttggcaggtgggtgcaatttgatgcaataacttgaataatgagcgttctagtacaacaacttggcacgaatgtgcaatntagtataagaactttataagtgatcgtattaatataacaacttgtcatgaggtacgatttgatacaataatgaagaagtatg

SEQ ID NO: 69484 - DNA, 497 bp, Oryza sativa
  unsure (1)..(497): unsure at all n locations
nggcatccttgtacttacttgtaccctcatggatctccgctctcttgttccaaatctcatatgcggtctcaagggtgctcactctatcgaactcctcttggctcanagagttgaacaaggcattcatggcttgggcattgagttggaggttgcggtgatcaatctccgtcaagggtgtgccggtgatagtaaagcctacatccacaatactccaaatatggaagctcatagctttgaggtgagtagacattctaattttccaagtggagtagtttgtgccattaaacatgggagccttccctacttggttcacctcgttcgacatcttctctctatgcggtgaagcccaatcaagagagaccaagctctgataccacttgtagatcgagatgtcgactagagggggtgaataggcgatttanaactaaataacacctaatcaaatctaacctaagttgctaggctcggtaagggtgaactctaactaatcaactaag

SEQ ID NO: 69485 - DNA, 384 bp, Oryza sativa
  unsure (1)..(384): unsure at all n locations
agctntatcgagtttagctcagacttaaggctgcagaaagggtaagaagagggagaagagcgttgattgcaatcctacgtataaggaagccagggagggagtccatggcatggagtaatcggacaaggaggcgaatgcccctgcagttcccatgatgatttctcatggcagcccgtccgactgcgagggcggngaatgagtggctaaggcccttcacagtgcaacaccgtggatcggtgctatgatgcaccacgtcggaatcgagcttgcgtggcgctaggttccgcgcctcagaagagacactcgctcccacggagagaagcgctatagagcgcgttgccccgcgccctcgcccgctcgtgacctcgcgccacccgtggaagt

SEQ ID NO: 69486 - DNA, 494 bp, Oryza sativa
  unsure (1)..(494): unsure at all n locations
tgganggacaccaagcggtacatgcatatgttctaggggttttatggtcaatcaataatttaaaaaatcattatctctttctttctctaattctttaccgcactaagtccaatcccactcacttccatcaaaaacaggggtaaacgcctcattcattgaaaaaaatagggcaaaaaacaacaaccctaaaatgtaggcaaaaaacaacaaccctaaaatgtagggtaaaatcggtattggacatcaaagtaggggtacaattgtacaaacaaaattgtccctttctctgttctccctcggtccaatgcaacctatatatgtcttgtgagggctactntgaaacgaagattgagggatgaataggaaaaactagaattctcacaaaaaatcaagcgcanaacanagaaatataaaacacattaaaatatatgaaataatcgtttgattggaccgtacgaaaaatgcaagaattagatgagagagataaactcata

SEQ ID NO: 69487 - DNA, 442 bp, Oryza sativa
  unsure (1)..(442): unsure at all n locations
atcttagtatctaanaagttgaagacaacaaaaaccagagcttcatggattatcaagcattgagtcagcttggtctcttgaaacaatgttcccctcgtggaagggaacacaaattagtcgagctactcctcgaaagtgttgtatattttattagcgccaaaacactctctgaatgttggacgagtctctaaaaaaaatagtttttgtttatctaccaaaaggttgtagggtcattagcctacctataatgatcactaaagtttcatattaactcaaaccaacagtttggaaaaatggtttcaatttctacccatctnnttttatacacaaattaaccggatgaggttntgaacccaaatagctntaagacttccaactnttactaaggacaaatcctgatttccacttaagttgattaattaaaacttcangatgttacagt

SEQ ID NO: 69488 - DNA, 443 bp, Oryza sativa
  unsure (1)..(443): unsure at all n locations
ctcactgtatggatgatactgaaagtacgtatctgatttcattgcacgaaggtntgttacatgggccatcgtcgattccttgctgcaaaccaccctgtacggaaaaatagcaagcacttcgaacagaaggcaaaccatcgtactaagcctaaacatcgcaacgggaaagcagtgttcgaaatggtgaaggatctaaaagtagtatttggaaaggggcctggcagccaacccatatagagtgaagatggtcacgtggcgatgtggaagaactctntnttttgggagctactgtattgngaggtcttggacgtccgccacgcaattgacgtgatgcacctcactaagaacctttgcgtanacctgctgggcttctagggtgtatatggtaagtccaaagatacacttgaagcacgcaatgatctgaagcatatggaacaacgcga

SEQ ID NO: 69489 - DNA, 291 bp, Oryza sativa
cacatctgtcacggccctgcggtcccctcgatcctctcacgtccttctcgtcagtaaggatggacctgtccctcttttattcagactggtgctccctcggatatacgacaatatcgtcctatccggcaccatagttgaacacaacactgtaatacgaacatatgttaaacacaatatcaatgctactgcgacaatccgagcaaatacatctagctaatacaataagaattattaaaaataaaaaatacagctaaactaaaagcagatgcaggttgtcgattctagcaataa

SEQ ID NO: 69490 - DNA, 461 bp, Oryza sativa
  unsure (1)..(461): unsure at all n locations
agctngcatatcatgatagtatgaagtaacagttctggtatcttgttttaaacattgtagtttgttgaacaaaatgtcagcataatacatgggaacataaacatctttgaaatatcgtttcaggtctttccaagattggggtattttggtatgcctacaaagatgtntccaatcattagaagcatgtttaattaanacactagaggcacacatatacctttgtttctccgacaagacatgcttttgaaattcactatcaaccgctagctcccaattaatgtaagcacgaggatcatagtttccctcgaaataaggcagtgcagaattgatcttacctagaacatcatcacttacctcataatggtcatgttgatccctcctcatgtctcgacgaagatgtcgatgttgagcacagctatccncaattatcttgcatatccctgccatttgtagtagaaaac

SEQ ID NO: 69491 - DNA, 463 bp, Oryza sativa
  unsure (1)..(463): unsure at all n locations
nttctttccggtcaaaaacatcgcacccgtgtgagccaatatatgcttatattggcattaatggacaaaaggtcgccacgcgaatcaagaaataagttttttcctcataagcacacaatatgtccaaaaagcatgttttggtgctttttgaacattttcattccggtcaaaaacatcgcacccgtgtgagccaatttatgccaatattggcattaatggacaaaagttcgccgcgcgaatcaagaagtaagttttttccacgaacgcacccaatacactccaatatgtccaaaaatcatgtattggtgctttttgtaccttttctttccagtcaaaaacatcgcacccgtgtgagccaatatatgccaatattggcactaattgacaaaagctcgccgcgcgaatcaagaagtatgttattgcccgaacgcacacaatacactccaatatgccataaatcata

SEQ ID NO: 69492 - DNA, 442 bp, Oryza sativa
  unsure (1)..(442): unsure at all n locations
agcttcatattatttaataaataacatttatattcccgaatttcgaagtgtgtattaacataaggaaatagaaagtaagggataaaaagtattatattttattctatatacctatgatattgtaattaccaatttcaaaaattcgaaactatcggnttcattattgagcacttaaagcanaatacacacacttatgcagaacatacatattagaagcccagcgaaacttttttatctttatttccggtaggtaacaccaaccgngactaaagattatttntattcccggtgttgcttttgtcaggccgcccaggatctttaatcctggntagtaacacagcactttaatcctagttggtacaaccgagactaaaattgaaataaacgcacggggagggagagagccgcatcgcgtcttaattatctctgatgactctctttc

SEQ ID NO: 69493 - DNA, 455 bp, Oryza sativa
  unsure (1)..(455): unsure at all n locations
actaagcttacgaatcttcgagaaaacccgcgatcgacgaanatccgatatctcgtactatacgcaaacaatcgaatacctaaacataagaccaaaagaaagatcctatttagactaattagtagtgccattaaatagagctcaatttacggaattattggaagtggaatggagtcaatcggagttgcgaattgggtgatatgaattttgaaagtttaattggagtttctggaataggagagatgatttatggaatctatagaaataatattctcaagaatattattgacagtcattgaatccgggaccaaggaaaatgattcatggaattntggaataaggaattgatttatggaacaagggtggaaaaaggaaatcaaggagggatgtatattagacttgtttcggtggcattggtgcggtccaaatgctaacgcggctcggcaaaccaaatg

SEQ ID NO: 69494 - DNA, 372 bp, Oryza sativa
  unsure (1)..(372): unsure at all n locations
ccctgtgcgccgacgcttcctccggtaaatccgccacatcccgagctccgtttgaaaatttgttgaggggaaatattcctcttatcctcctctatcctctcccccaagaatcggagcaaaccgttgagtattttatccgaatcgaactcgttnttgagtttatctccaaaaccgagtttttgatttcccggatcgatttcttgcgggaggagtccgatctcttcaatccaaggctataaataggacccnctagtcctcctctttcgatttccccctctcccgtactctcccgtgcaccgtagcccgacgtcgacgccgcatagtccgccgccgccgccggccgggttgcagccgcgccgagtcgccgtcttc

SEQ ID NO: 69495 - DNA, 482 bp, Oryza sativa
tactagctttgccatgccaccaaataagtgccaggctctcttcatattctccaatattcaattaactcgctcagtctggccatcagtctgcggatggtatgctgtgctgaagttcaaacgggttcccaattcctcttgcaatttctgccagaactctgaagtgaattgactgtctcgatcagacacgatcttcttaggtacaccatgtagacacatgactcttgccaagtaaagttctgctaacttcttccctgagtaggtagtatgcaccggaatgaagtgagccactttggtgagccgatcaacgactacccaaatagaatcgtgccctgatgatgtcctatgcaaacccgtaatgaaatccattccgatttcttcccatgtccattctggaatctgaaggggctgtagcaaacctgctggcctttggtgctctgctattactcgctggcaaacgtcacagagtgcgacaaattcagcta

SEQ ID NO: 69496 - DNA, 468 bp, Oryza sativa
  unsure (1)..(468): unsure at all n locations
agctntagtcgaataattcagtggagccatcgntgtgtccatagcatatatatccggccactctgattatgttgaactagatatttctgaacttcgcatctacatggtgttttagttcttttcttttcgccactctgattatgttgaactagatatttctgaactttgcatgtacatggcgttttagttcttttcttttcgaagtttttgacattgtcaattaagttgacaatcaactacttctgaattaacaaagagagaaattggacctttttttttcattaattaacgagctttctgaactntgcatctacatggcgttttagttcttttcttttcgaagtttttgacattgtcaattaagttgacaatcaactacttctgaattaactaagagaagaaattggacgttttttttcattaattaacgagcagtcagttatatgaggtaccatcaacaaatgcaag

SEQ ID NO: 69497 - DNA, 260 bp, Oryza sativa
tcggatgtgcatcgactacaccgacctttacaaggcatgtttaatgttccttatcccttgcctcccatagatcagaatgtcgacttcacaggggggtgcgacctcttgagtctctatatgcgtatcctggtaccatcacattctcatggctagggaagatgatgaaaaacctgcgttcattactcccataagaacttattgttatacgaccatgccccttgtgttacagaatgccagtactacttttcaacgtactactg

SEQ ID NO: 69498 - DNA, 424 bp, Oryza sativa
gccctcttctggtcaaccggaggatgacttccactaactcctcctcctgattcccctccacatcactttccacgtgaacctcctggatacccttcgcatccctctccacgttccctttctcgtcaaatactcggtaggatcctccgtcccctcttcttcgtccagaactggctgccttcctccgcgattgtatcgaacaatatctgttcctcatcgcgatcagccaattgttcatacaggaaacatctgctaaagcataagacatttatggtttaataatctcatattagaactcaaataatcttatatgctaacacataacgacagtcatgtatgctaagtgtactgtcgtaattagaccctatcaatcttaaagctaatctactacaatctaatatcttaactaaactacatagtgtgaata

SEQ ID NO: 69499 - DNA, 429 bp, Oryza sativa
  unsure (1)..(429): unsure at all n locations
tgctnggattcacgtcagcgaggtactttcagaggtcttcggcgtctgggaagtggaggccggtcttcttctcctcctcgcgaacccaacggcggcagcggcgaccgaaggcgacgaccacagcgactgcgcggggctgctggagcggcggccggaggtagagagagaaggagctcgcggtgagagcgtttccggcgacggcagcggacgggacttgaggggatgggtagaggacgactagggggtcctttatataggcacgggagctcggttccgggcccatatcgacggcaaaaactcgggaaagtctagtgctctcgccggagtaaggaaatattataccgcgaaattggaaaggatttccatagaaacttttgtggatttcttggcgaaaaggaagaggagaatgagagggatccattcccgcac

SEQ ID NO: 69500 - DNA, 480 bp, Oryza sativa
  unsure (1)..(480): unsure at all n locations
ttncatgaagtacttgcacacccaaatcggagttcgcatgatttcgtggcggccgtcagaagttggcgctgccctgcagtccgaatccaccccgcgcgaatcctcttccctttggatcctctccatcgttcctgagtaaaacacgagtgcacgcgtctccggggtataaagacgaggaatatgaactcaagaaagaactcaccttataatttagttgacatgcacgagcgcgggtaataggaccatcatgctgtacatgggaggacgtggatgtatcgatggtgttgatgtcctcatcacagaagaatggtgttcttttccttggtcttcaggttcaagtcttctagggaaagctatggtttacttgtttggccaaggtagcttcaacctccactacgaaggccctgacttgcaactagccatggaatcatcctccccaccatcgtcggcacaagatggcttgctgttccaatggaagaa

SEQ ID NO: 69501 - DNA, 459 bp, Oryza sativa
  unsure (1)..(459): unsure at all n locations
agcttgtgctatttgtgtgattggggtacaaagaatgcatgctcttgggctctaagggaaaaacaaagtaatgaggttttctgttggttttgcaaggtgagagctgatcctaaactcaagcagagatggaggggaccgtgttcacgccatcgctgcaaggcattaagaatgtcaagtcagagagcggtgtgatcctaacgaagccgtttcttgaagtttgcaagcacattcttcctgtgctaggtaattaaggaggagtttgttntgcattccaagacagataatctttatcaacgaaattctgtttaacctatctttnttttaatgtagaataagttggatcggctatgtcaatcgtgaagaatgacattggtggtaatattacggtaagagaacaaccctccttttatgtcttcttagaagattcatgcagctatagctcttctcaatgtaatgatg

SEQ ID NO: 69502 - DNA, 486 bp, Oryza sativa
  unsure (1)..(486): unsure at all n locations
ctaagcttatgagncagagaaaacgattttaagtcgcgaagatctggttatatataatgccatcccatttcaactccaagttccaccaagcaatcaagctagagcactaaatccatccaacaaattagtgctaattaattggatggattaagcttaattaggaaaggcctgtcataaagagctaattaagcttagccgctcatcatttttttaagttcgatttaacgatatattccatgagaaaactttttatataaatgatgcattaaaaaataaataaataaataatcaattaatcatatgctatgtgggtttctcattgtgcgtatagctaatcagccaaaacctatgggctgaaaagaactcttccctaatanaacactgaagagcaagaaatgacttttgaaaccataactattagaacttcttacgaaaagagaaaaccaacatncgcagtccctcgcaatggtgagagagagagaggag

SEQ ID NO: 69503 - DNA, 356 bp, Oryza sativa
gacatagttgtgacctccgagtggtttcactatctataaaaaccaatttttctagaatgtcccaggatttcaatttggtacccaggcggcgccatatacatatatccactctgtaatatatgatgaatggcgtcttgtagtttagaaacccacctatgcaaatatgatttttacaaatggcccccttaatacgattgcatgtaaaaatatggccgagccactcatggtgctaagctcccaaccccagtcggtctgaggcaccaagtgctcccccttctactagctcacctctcctcactctctctcacacaccgtgcctatccctatccttcaaagttagcctggagtcccatacg

SEQ ID NO: 69504 - DNA, 442 bp, Oryza sativa
  unsure (1)..(442): unsure at all n locations
agctcatttggctcctgagcgactagaactgngggagagctgagatatgcctttaactgagtgagggcatgttcagcttcctccgtccaagtaaacggccccgagcgcttgaggagcttaaacaatggtagcgccttctctcccagccttgatatgaaacgacttatggcggccatgcaaccggtgacgcattgcacatccctaagtttgctgggggggcgcatccgctcaatagctcgaatcttctcggggttggcctcaatgccttcggcagagaccaagaacccgagaagcttgcccgcacgtacaccaaacacacacttatcggcgttcagctgtatgcgggcggagcggatgttctcaaaagtttccgctagatctaaaagtatagttctttgttgcgcgttataccacctagtcatcgacataagcctcaacatta

SEQ ID NO: 69505 - DNA, 183 bp, Oryza sativa
ctctgacaggaaaatcctgcttcttagagcaagctggaagacgacttccttcaggttttgatcttaaattcggagcacattttctggacatgtcacaccctggaatcctcttttataaatgtgaaaaaaggaattttacatttattagtattaaggtaggcttgaataattatgaaatttgac

SEQ ID NO: 69506 - DNA, 433 bp, Oryza sativa
  unsure (1)..(433): unsure at all n locations
agcttgtctatcaccacttcctctgctccttctcacgccgagtcattgccatgtaggtctaagggcattcctgacatttcacatgaattctctctcctcttcaatcggaaattatttagtcagcacggtgtccactggcaaaataccatgattatgaagtgtccccccaaaaaaaagatagtattttgcgttgtcttagggttaaaaccatataatttcagcgtcctgtagcaaaatttgtcttctagtagtagagtcaaagttttcatctagggtccgtttatcataaatttcacaattcttagtttagatggttaatttgtcgatgatagccgtgttatagttttcactgtcttctttacaaaaagattaaccattttaattgtaatgttattgtaaaggctggcanaataccacgattatagattggttt

SEQ ID NO: 69507 - DNA, 368 bp, Oryza sativa
tggactgttaagctaggatgtgatgacacaagtcacttacaattattcgaataaggtccagaaatacaaaacatctagagggtcctcttctcttattctaatataatattgactatggataaattaatgtttaccctgcacataagccgactcatcgaaaacattattcctaaccaagtgacaaagacaagatcgttaattgcaccatactaatcataagacaactgacgaaactgcaacatctcttcaattccaagagttcctattgccaactatactttacgtcataactgaatgaagaatctaggaagtgatacatatggtatgatcctcggcacaaacctgatgtgagagcacgatctggaagc

SEQ ID NO: 69508 - DNA, 447 bp, Oryza sativa
  unsure (1)..(447): unsure at all n locations
agcttgctgctatcgccataaccgatattaatcagcagaatgctcttcagcgtgctgcccgtaaaaaaggcgtcgtccacgtgttgacggtcaaagcccgacatcgggccggtatccagtcccagcgcccggcaggcgacgatcagatatgccgcctgcatggaactgttgcgaaacgctgtttcttcggcaagttgtgggctggaggtaaaccaactgcgggcatcaccgtggggaaacagtagtggtaaccgttcataaaattcactgtcccangcgacgatagcggtgactggcgcggtcagggttttttgcagattgccgctggaaagtgccgggcgcagacgttctttccttctgccgtgcgggtaacacgatccgtgccggagaacagtagctgatgtctgcctcatttcatcanggataaatctcccgtacgctcatcgc

SEQ ID NO: 69509 - DNA, 404 bp, Oryza sativa
agcttatcttctacgcttcatgaatggatcagtcagaacatcaccactagcttggtatcgtcgccgccgactggtgtcttcgcctataccggtggttggtcacaccaccgttgttgggcgtctacgtcttcaccgactggcttgtcttcgtttgccgccgactggtgtcctcgccttcacggtggttggtcataccaccgttgttgggcgtctacgtcttcaccgaccggctgcctcatcccccgccgactgatgtctccgcctataccggtggttggtcacaccaccattgttgggcatctacgtcttcaccgaccggcttgtcttcgtctgccgccgactggtgtcctcgccttcacgattggttggtacaccaccgttgatgggcgtctacgtcttcaccc

SEQ ID NO: 69510 - DNA, 350 bp, Oryza sativa
ttaaaagtgacctgctgactatggaggaggaagaggaacatcataaatctttcgcatttgcgtagacgccgcacccacgggcccctcttaattgatatctttaattctcataccttgaactggaactaaaacaagcactcgctgtgctcttcccttgaattcttttccgatatcaactgcatgtatctggaatttgttcccccagatgtacgaagtatcttacagtgtgttttcctagctacaacgtaaccagatctagatgctcgatgtcttgaagtatctcacattctccctctgtcgtcatttgccggttgatgctgctggattgcgatctatgattgatatgcacg

SEQ ID NO: 69511 - DNA, 476 bp, Oryza sativa
  unsure (1)..(476): unsure at all n locations
ctaagcttgagcctcttctaagtttttagctagcattcagattattgatggntatttcctctaacaggaatggaccaacaatgctgcacaacatctganaagcctgtgacattgacccaaaagttctcaaacctgaagatagaagattttggcactgaagtctcaattgaaatttgacagggcacatgatctgagatgtactttgaggttgctgtgaccatggtgtgagggaacttaagagtccaagctattgaggtaaaaacccaatccagttattgcagaagaggctgctcttgcatattgctccaggtgaagtttcttcctttgagagggatttctactaagcctgcattgctgattatttcattaaagatgagaatgtcattcatgtctcctcctaggatgtttctgttctcaacagaccttataaaatngaaatcccncattataattccacactgatctggctctatgtc

SEQ ID NO: 69512 - DNA, 474 bp, Oryza sativa
  unsure (1)..(474): unsure at all n locations
agcttggtttagaggcaatgtttgtttgcaaatcttttatttgaagacattttgaaatcactatgtgatttatttctttctaagtttggggccgaaaagagacttgcatctcgattcgactttaagagatgtttttcaacagctcctttggtaatgtaccgacctcccgggtcagatcattacttctcggctcccagagccattccacttgattaatcggctcccagagcctttttcattttctcggacttccagagtccagctgcccagcagcaaagcaatccgccttcactcgggaagcctagtctatgatgcccacagacatcccgaatcacacagattcgttctgaccactcaggtcatccatcttgcacataggctgattctggttacgaatcccacaccacaacaacttttcacaaagcacagggcaacanatctacgcaacgggaaccacctcacatccgcccatag

SEQ ID NO: 69513 - DNA, 201 bp, Oryza sativa
caagcgtacgaaaatgcgagcacagagaaaacaccctacccagaactaaactccagcagggtcatgactaacattagagacagtactgatggaacagaggaatcacactgacacaaagctgagatatctaccagcagaccaacagagaaagcgaggcaaaaaacaagacatgacaaggttgtacacagcaagaacgtgggc

SEQ ID NO: 69514 - DNA, 257 bp, Oryza sativa
  unsure (1)..(257): unsure at all n locations
agcttgcttcttctatgcttgttcactggagcaactagagggattggaagagccatctctgtggctcttggcaaagcanggtgcaaggtaattatttctagtctgatatgttcaacagccgaaaaaccaacaaccttgattactgttgttatttcttggaaaagaacaataacaaattttcttcttgtcagacttctaatttttttctcagttactcatctattcttgcacaaatatatgaaattgcaagttcagta

SEQ ID NO: 69515 - DNA, 267 bp, Oryza sativa
ttgggcgcccctgacagaggcctttcacggcttctgaacatgcccagctggcaagagcgacgactcccctccaacttcttcgatcattacaaccctggatgcctcattactctggaacattgcacgcgctgaaaatcactactgcttagattgatagacacacaggaacgattggaatgtctttcccactcaaagtatgtcgttgaatcttatacttgatcatactgaacctgctctatgtatcactagaacgttcttcagacttct

SEQ ID NO: 69516 - DNA, 444 bp, Oryza sativa
  unsure (1)..(444): unsure at all n locations
agctttgtatttcccttgctcttgttctgggccttgtgcacaacattggcactggactgcccaacatcgcccttagacgcggcatctttttcctgagctttctccttaacatcaagagacgggatcaagccctcaacggagtattcttgactcttgtgtttgaatgcaggacggaaacttcttcaagatagaggtagtttcgcaataatacaccaggccacaaatttgtcgggtaagacacacttaacgagttcgagttccttagccatggtttgtatctcatgagcctgttcgactacagaacggttgtcagacatcttgtagtcatgaaactgctccatgatatacagattattgctagcatcagtagcaccgaagttagtattcagtgcatcccacaactccttagcgtcngtcatatgcatatacacctcgaccagacaa

SEQ ID NO: 69517 - DNA, 367 bp, Oryza sativa
tttaattgatccacgacgtctgacataggtgcgaaggaccgtgaaaaaggttcgaagatggagcgagcatctaaggaacaccatcacccaagggagccactacaccttttgataacagctaacctaccattccctctcacaacttcgactacgagccttccgggcgtgctcctcaaattgatgggacacattacgccgctcggagcaccacataaagctgtatttaactctttgcatcaacgatccggatagcagttgtcaggtattgacgtactcatgagacatggactcacttggagcaagagcactcatcatcgcaatgctaagccccaatgcatactctacgcttgagcctgagagtcaacaa

SEQ ID NO: 69518 - DNA, 454 bp, Oryza sativa
  unsure (1)..(454): unsure at all n locations
ccctctcctaagttggttagcttagcattcaagatgattgcatggttatttcctctaacaggaatggaccaacaatgctgcactaacatctgaaagcctgngacattgacccaaaagttctcaaacctgaagatagaagaatttggcactgaagtctcaattgaaatttgacagggcacatgatctgagatgtactttgagggtgctgtgaccatggtgtgagggaacttaagagtccaagctattgaggtaaaaacccaatccagttattgcagaagaggctgctcttgcatattgctccaggtgaagtttcttcctttgagagggatttctactaagcctgcattgctgattatttcattaaagatgagaatgtcattcatgtctcctcctaggatcgttctgttctcaacagaccttataacattgaaatcctccattataatcccacact

SEQ ID NO: 69519 - DNA, 350 bp, Oryza sativa
agtgattgagaacctgggcgtgcagtccatgagtggatgtgacaatgaacaagaccagatgattgagtcactgcacgagccactcaccaggagaggtggtgccgcacgggcgaaatgaaagagagcatcggcgggcacagctgccacatcatcatccatagcgaagcaactaataagagagagtatcagggccaggcctaaacttgctcaggccaaattcgacagcaatgattctgtcttgccgaatgatagcattggtggcgaggggaagactaccctggctcacgtcatctactatgatacaagggtggaagctcacttagcaagagacattggtctgatttcggacc

SEQ ID NO: 69520 - DNA, 404 bp, Oryza sativa
  unsure (1)..(404): unsure at all n locations
agcttctttgtatatataccagccactactagaagagaaaattntcatggcgttggtctatgattnttgctggcagaaaaatgccaaaaccgctagcaaagtcataacaagggggtggggggcaccgaccgccagcgaaaatggatctttgctggcggccacgctataccggccgtcagcgaagatatgttcattttcgctagcggtcacttagatgcaccgccagaaaagatgtgataatttcgctagcggttgggttatatagtccggtagggaagatacaattatntttactggcagcccacttaagcaaccaaaaatttgattttgctggcagtagaacaacctccatcttttagcaccacgtacccatgtgtccttatccacccacctctncacaataa

SEQ ID NO: 69521 - DNA, 400 bp, Oryza sativa
  unsure (1)..(400): unsure at all n locations
agcttactctatgcaactcttgtcaccccagcttttcatttgaacagcgtgtggcgtgattctaggtaactatctccatttactggtagaataccagatgtgtctgcataaactgaattatggcatatgttcccctcgttctccttcagagaactagcaaaattcacttctgttactaagtttgcatttacagcatagtcattctttttagctgtagctgtgaagtgggacagntttagtttccttttcttttcttcgcaatattaacataagtatatttcttggcatgccctgtccttttgtgccgtcaatcatcctctgtttgccatttatcttgtacttccacttcagaaatgtattctagctttctggtnttgntattgtaatcatagacctctgt

SEQ ID NO: 69522 - DNA, 306 bp, Oryza sativa
caagcttggttcctgaggagctggcagatgtccttactccagctgcttatcttgaataacatcaattcaagttggagaaagccaagcagagactagccgaacgccgtgaacgcaaagaaattgaagttactattcaggctaatcggcaactcgtgcatgaagagaagtccaaacttgatcagctatcggaatgcccgatcaagtgtaatattagtcggctagaagctcgcaagatcgatctcttggcacaacttcaagaatgcaacgcccgaattggacctggaacacaaaaaactagccgatctc

SEQ ID NO: 69523 - DNA, 434 bp, Oryza sativa
cggtcgacacttgcctgagaccaaatgtggtttctacgccttggcgaaatccgctgcttgtggtggcccacattcgcctggcatctttttcgaagtcctacatgctccaagtgtgcccatggacagctcggaagtcatgacaatcgaccaagagaaactgggcgaagacctatatgactggcgaaccccatttgtgaaacaccttgaaactggttggcttctggtagacgaagcagaagcgaagcgtttgcaactcatagccacgaagtataggatggtctcgggtcagctttaccgctccggggtacttcaacccttacttcgttgcatctctttttgcgaaggcgaagagatggcataggatatacatcatgggctatgtggcgcgcaccaagctgcaagaagagtggccctcaaagtatttagacaacgag

SEQ ID NO: 69524 - DNA, 420 bp, Oryza sativa
agcttttcaatggtatataactcactatttaataaaatatattaatatcaaatgattagattatggtcaacttaaaaatgtgctaataaataaaattgatattgtacagttaaatagatgtcaaataaatatatttaacatgttttgtcactgtagcaaccacataaactaagtataagtaatgtctcaaatgaatggatgtataggaaaatactagtgcttatttaatattcgatggccatataattaaattcatgacttacaaattagttacataaagtttagcttcatattttgtaactaaaatattaatactcatagatgaatctgtaacttgattatgagaaataataacagagctagtgtgataaatcacctatacgaaataaatacttaatgtcatggtctttggaatagtat

SEQ ID NO: 69525 - DNA, 398 bp, Oryza sativa
  unsure (1)..(398): unsure at all n locations
agcttgtcttgcntctccaggagcatcaaagaccacaacgtctgcagacttcttcatggacctactcaactggaacacagggtgcctgcaaagcctttcgacacctttcctaaaactaaatttgtcgaacaggccttccacatttctgttgccaaattctataccagggctgctgacttggttattcgaatcattaccaagaggagatgcttcgctatggcgcttcggttggcctatgtcatgcttctccggaccttcaaatttgttgtactcacgatgatcaaggaattgtttatgtccaaacagcagctgatcacaagtagccatatcatacataggtttatctatgcctttctgatctgaacatatgatgggtctctccaaattctctggcgtct

SEQ ID NO: 69526 - DNA, 437 bp, Oryza sativa
  unsure (1)..(437): unsure at all n locations
agcttattgcgctcaaaccctaatttcccaagattgtctccgcccctggcactcgcttactcaagattggtgttcccacatcctttgcccccactcgatccacatcacaccaataccattctaaccttaaaccgtcttcctagctatctctgttctcatcctgagattactactccctccgttcccaaatgttaatgctctaaaaatgctaatattgtctacagagtttgaaacctatattgcttatatttaggaatgtagggagtatataccacgcatgcccccctcctcatgtttacatncttcctctaacactgcttgattgattttggtggtgtgggatgcgtgtctgtgtantggcgtagtggcagagttacatagaaggttgcggtgcagctaacaccacggttattttctttccgaaactcccttacaag

SEQ ID NO: 69527 - DNA, 311 bp, Oryza sativa
atcacgtaatccgccaacccacagtatctcctctaaactgtcttcgtaggctaacatgtcagtgtgacaagacgtgtatcacgacctccaaataatggcgtgcatgtacgcctacaagctacatgcatgcatggccctgaatgtacacatgcagtcgtgcgaacacgaagacaattcgatgatatattaatctaatctaaacacctcccattattcgaaccttcctataaataatcgccatgtagcacaacaatattcgtcacagtgtaaagtctatatatgcaataaacgcattcacagtcgccagaaat

SEQ ID NO: 69528 - DNA, 172 bp, Oryza sativa
ttggtcgctgtttccacgcatgaagttgatccgaaagcgcgctggtcggatgttaagctcatgttctaccagagcgaccatccgaccgtgctcgctctttggggggggggggggagtatattataatttaatcttccttatctgtttttcctatattttaccctatatattt

SEQ ID NO: 69529 - DNA, 430 bp, Oryza sativa
  unsure (1)..(430): unsure at all n locations
agctactttcaaagcatacagctntctagatgaatatgacgatctctagacagatggatcttatatgaatcgcatgatgaagtaccacatgagtggatatacaagaaaggaatccaaatcttgccgatcgctcatgttatgatcatctacatcctaggtctccgcgatccgtcatctggcttatgttcttcatgtatcattcagatcgaatgactctatgaaattacgtcgatacttctacatattatgggtaacgtaggagacatccctatcttcccccgtgggtcttaattaccactgcttagctttcaattcgcctctgaccatcagattaattgtgaataacccgtcctcctctcttttgaacaaggtgcgctttcgagtctgtgcgtgcttcaaacaatatagtactctccaattaccatatctc

SEQ ID NO: 69530 - DNA, 408 bp, Oryza sativa
tatgcccttaggcacggccatacataacatacaaatcacacgtggaaggggtgggcaattagctatagcagcatgtgctgtatcgaaactgattgcaaaagaaggtaaatcggccactttaagattaccatctggtgaggtccgtttggtatcccaaaactgcttatcaacagtcggacaagtgggtaatgttggggtgaaccaaaaaagtttgggtagagcccggtctaagtgttggctaggtaaacgccccgtagtaagaggggtagttatgaaccctgtggaccacccccatggtggcggtgaagggaaagcccccattgtagaaaaaaacccacaaccctcgggttatctcgcttgaagaaaacttgaaaggaaaatataggaagtttattctcgtcccgaagt

SEQ ID NO: 69531 - DNA, 410 bp, Oryza sativa
agtcagcaactgtgtactgaaacgttgggtttgctgttttgagcccactgtaatgcatgtgcacatgtcttggctgtaagctgaatactgaattcgttgcataatgccgtatggatcacataaagcacagccagaatggatcagtacattggctcctgcctgagaatggttggaatctgatgagttgcttgaattcctgaaatgtggttccaaacaacgtgtgtaaatttccattcagaaataccacatgttaacttcaatagacgaattgatcattgtgagctggttgcctctttgaggctaaaccattattgtcatcgataagtacctcaaacctgaaaccttgagagtggagtgatgattcggaagcaaggaagacctgtgcactgatactgatgacaattgaaata

SEQ ID NO: 69532 - DNA, 240 bp, Oryza sativa
caacatccaagcatcttccaagacagcgggcaaaacctgtaagctacctgatgggagacacactcatacaaatatggaggagctgacacatggataagcacccggatcacaagctgactatagaagtgaaccgaacctcaacgaggacaaccatacccacaggaaaacttgactcacgagaaacaacaagcacatgtgtacaggaatgagactgaagaactaggcacaacacgcaacatc

SEQ ID NO: 69533 - DNA, 436 bp, Oryza sativa
  unsure (1)..(436): unsure at all n locations
agcttttctgtccaaaaccaagaaagattntcattaatatttttaattatgatgtataacaatcttaatgttttgatttattgctcggtatttctatcactgaaaaatcgtttttacccgttcgggtattttttttttcaggctgtgtgagtcgtcacgaagtgtccgggcggcctaaccatgttccctacctggttgtagctgtcaaggagatcaagagattgtgggtagaactaaaccagcactttcttcctatgtacatagagactatagagggtatcatcggagttacctgagcgggccattnntttttttctcgtgaaggagaaagaaagcatgcgggtgggtgagagagaccggaagcatcattgctacagttgaagatgagaattgagatgagataatgccgccgtctaagctctcaatggaaagatct

SEQ ID NO: 69534 - DNA, 461 bp, Oryza sativa
  unsure (1)..(461): unsure at all n locations
agcttgatctgaacttgtgctggtttaatttatggtgaataatgcacaagttatgattgtatccgcgattngtatccgctcgtagaggaccgaacctgagagcgagaatctcgcctatgcttgtatccgctaacgggaccaaatcagagggtatggtaggatgacatgaaaagagtatgcatgcagaccactcctaggcccttactcatttggccggaccataggaaaaagtgtgtaataatcatgttaaaagccatcaaatgaaatgaatttccttgtctcatactcgctggctgagacgaatgacacaacaaagagggaaaatccctttggcttgtactcatgatggccaagcctangaacatggcaagaaacataatttttggttcgtactcattggccgaaccggatgacacagcanaagaatctattacatgagtagagaaagatgaaccgaaaga

SEQ ID NO: 69535 - DNA, 431 bp, Oryza sativa
  unsure (1)..(431): unsure at all n locations
gcttgatgactttatatgggtntccaacccaagtagatggtgattagtgtagcttgcaagaactggggcctcttgctcagctctgggttcttggactaagtaacctagagaatgtacctgctatctcgttcgctgcaaaggctaagcttggtgagaaggcccaccttagctacttgatgttagaatgtagtagtagacttggtgaagatggttttgtacaagacgagaatggtgtccccacggaagagcagcggcaaatcgaggaggtgttcaatgcgcttaccccgccactgtgcatagagagcattgagattagtggccattntggagagcagctaccaaggtggatgatgtcaagagtagcaggtgcatatgagaggttgtcgatggtgatcatggatgacctcgcttgctgcaaccaactcccagat

SEQ ID NO: 69536 - DNA, 402 bp, Oryza sativa
  unsure (1)..(402): unsure at all n locations
gaccaaggaagcaaattgaattgataaaaaatcacactccgttattatgatgatagcccccgactgacaacttcaagaagaaaacttgatgttgacagtcaagatagggaagtacagtgataagcttaagcgtagaaacgacgaagatgttcgatgttccaagagttgtcgacgagtgtaccgtcttcgcgcttgagtcgataggaacctggccgggtgactgcagagatgataaatggcccttcccatagaggagataacttgtgccgatctcgtgtagtttggaatttcctcataacgaggtcgccgactagaaaggcacgggatcgaacattgcgattatgataacgtcgcaacccttgtaagtatcgagccgactgaatcanagctgcttcgcggact

SEQ ID NO: 69537 - DNA, 344 bp, Oryza sativa
ttcaaagaagcatgatccttccttagagacttgaacttgacaatctccttctcactataagcaaggagcttctcaaacatactcactagctcatcataagaaacatcatcaccatcattattactctcactatcactaagagaaggtaccttagaggagccctttgccatgagacaaagtggagcgaaaagtgatggagcctccttgatggcaacaacggccatcttcttcttcttggagcttgcatcatcaccaacttcttcctctgacccggatgaggcggagctcttctcatttgagtcccaatccccgatgaatgcctcaatcttcattcctttcttctt

SEQ ID NO: 69538 - DNA, 436 bp, Oryza sativa
  unsure (1)..(436): unsure at all n locations
gctttttcaaaactaattccagnttggagccggactaaagcattaaagtagcactgcaatattctcttgcactgatcgagtangaagcatggaactactcaaatgttntacaaggatcatctacttaccattatctgatcctcttgaacccacagctggaatctgcatcacttgaaccccataggagcctgngccagcaacagcaaggcacagctaccagcagcgaacacatctagtatgaatcttgcattanacagcttctagcttgattgngtgctttgtaaaaactgataaaacaaaaggtgcttcctctccaggatggatggttgtgggcacaattgtgtatcctttnggataaggctccaacactaattcacatgatatctcccttgagttaacataatctgttccacccactgattcatgcatgtagata

SEQ ID NO: 69539 - DNA, 467 bp, Oryza sativa
  unsure (1)..(467): unsure at all n locations
agctttttatctcaaaaaactttccatttaggtgcttttgaaacatgaatgtgatatattattatcttgaaagagaaaaggaacatacctcaagtcctgtaaaattcctatattccaaaggaatcttgactattgctatagaatattatagtaaaataatatttntctgaaatgtttggttgtatatacacttgtggatatagagaccggattcttatccattatatataaaaaatctcagcgaaacatcattgtgaaatgatcgccgcgaaacacgtttctggatgtaaaactaactntgctcattgtgcaccaaatacacgtgtttccagtattccacgttcacatctgggaggattcatgatcttgatgttattacgtgtggtctacaatggatggactctctcgagagtgccatatctcatattggaaagctagactctgacttctcgtgccactattggatc

SEQ ID NO: 69540 - DNA, 270 bp, Oryza sativa
  unsure (1)..(270): unsure at all n locations
cttcaccggatgatatacgggcgtgcagaagtcctcggcgacaccctctcagatgaaggcttgacgtttcggggcctgccgccgcactctctgccggaccgagcttgcgcccggacgcactgcgagacagtgctcaatcaactccctggggaccctgggtatgtacgctggtctccatgcgaagacatcagcgtttgtccgcaggaaggagacgagcgcatattcctattngccatccagaagaccaccgatccgtgtggtcttggatgg

SEQ ID NO: 69541 - DNA, 422 bp, Oryza sativa
  unsure (1)..(422): unsure at all n locations
agcttctttctatcgcatgaaagagatcatgttcgccacctcgtctccagttagctgcgaagattcacgtgacgggtgatgctgggcccgatcgtgctgaacctgtcatcgacatcataagtgatgaggaagatgaggaagattctgtagaaagagagccagctactccagaggaagaagatccatcgcttcgttccgacgcaaggcggaattagtcgcttagctagatcggtgccgtagntcgctgtgtagattgcttgtttaagtttgcttgtgagtgtgtgggtttagctgttgctcacatcatgggtgcgatgtaacagcatgagtctaagtcttttgcttgtcagagtgtagatagttcgcgatatagtgataatggctcttaaatgttaccatactcagttaagagtaatatagaa

SEQ ID NO: 69542 - DNA, 365 bp, Oryza sativa
acgctgagctcaagctcaatcttctcctcggcataaccatttctgagccttggatcaactgtttccatgattgaaccgctgcgccaatagtcgagcacccaatcgacaagcaccataggagctttctgctcaacaagcctacgcccacatgtaacctcgagaaggaatgcgccaaatgcgaatacatctgtatatggtgtagctttggcgcggtgtccaagctcaagagctaagtaacccattgtgccaactacatgagtggtgtttggtcaagaccatggtcatataatcttgcaagtccaaaaatcgccaaccgaccgttcatctcaacatcgagcaatacgttgctggctttgatgtctcgg

SEQ ID NO: 69543 - DNA, 322 bp, Oryza sativa
tcactcgaccgggtcttaagcactgagttgcacttgaaaatgctagggacctgctatcccaggacgctggaaatgaccgagcccctattcgtgtgttttttgatgcagcctaccgcttgtatatgaaatttatcattataagagatcttatatagttggtgggcccggctttctggacggataaacctacgtggaaaagcaatttcccgcggacagacgctgacagcgcaaggcactcggcgtagggctagccacgcactggggtttctctgctgtccgccagcgacagggggggccaaagagatgcttatggctcaaacac

SEQ ID NO: 69544 - DNA, 425 bp, Oryza sativa
  unsure (1)..(425): unsure at all n locations
gattgagatcctctgatgtaaagtcagaggaacgtggtaactgacatgtgggtcccaccgctcgtggggtcactgggaataactttatattataggttccgcanaaaaaagatacaggctcaaaaccggttatatatatagacacacacgcacacacgcgcacacacacaaaactgcattgtagggcctgttcactttgatanccattttaatcttaccaaattttggtaaagttacctaaaaaagtggctacatttagtttgctgctaaattttggtaactatataagaaatcctgccaaacatttagtaagttgccaaaattntagcaatgccaaattttagtaagggttttttgacatcaaaagtgagcaggcccgtaatttgagccatatgaaccatacacagcaattgctaccttataat

SEQ ID NO: 69545 - DNA, 449 bp, Oryza sativa
  unsure (1)..(449): unsure at all n locations
agctngctatttattgaataaagcagggagcaatatttacatgtaaggagttaaagtaatatttacaaagaccgaatatgcactaatgtaacatctctgctaggcgtttggttcccgccgtagcccaggttttttactcttctttaatctttgcggtgaggggcgccgtgcttagctccttgtttcggaagattcggcgattttgctcgttccaaatctcccaagagattaggagaattagggatctgtgccccagctttggtaacccttggcatgtggcgagagattcccaccattcgtgaaccacgctcgcctgtgcccaatttgtcggcgccatgggcgcacaggctaaccggttgacaatggcatcccatatattcttggtgtatctgcagtctgccagcaagtgaatagcggtctcattagtgtgtctgcatagcgggcaaaca

SEQ ID NO: 69546 - DNA, 489 bp, Oryza sativa
  unsure (1)..(489): unsure at all n locations
cttcttgccatagtaagcataatagctcactgcagtgacatnattcacagtgcacattgaatccatatcagcattcatcattgttcatattaaaactagatcaaaatgcaccacttcaacatttcatcaacccaatgcaaagttggtaatggtaataactactatatgcttaatttgcttaggatataagagtgagcatagaatcaatcgaacagcttaaacggacatactataagcaaagatccgtgtacgttcatctatcaataaatcgtgagagcaatagcaaatcaatcccaatgagcagggcagcaaagagatcctgtcctgaaagaagaaacaaaaaaaaaagaaaaagtcccaagatagcacacgcgcacacatatantaaattttctcagatttgaatacccaagcatgaagcatacaagagatggaccatttgtggaanaaagatggagagagagcttacgagaggngtggtggtggtgg

SEQ ID NO: 69547 - DNA, 391 bp, Oryza sativa
  unsure (1)..(391): unsure at all n locations
cgcttgtttgtctgctcatcataacggaagtgcaagaagatggacgtcctattgccccggccgaagcagccataaactatgtacgtcacagcggctgggttgtgcgggataacgtgcctgtcagtacggtgtactggcgaagaacaagggcacgcggagatcatgaaagctttgtcccagattctgagaaagagatgctgtggaccacaatgctcgagacattcacccttcctgcnggtacagaggacaaagtgaataggtggactctaaagaagatggcagaacagtttcagagctttcaagggagatctgtaccagaagtatatactgaaggggcagacaccgaactttgacacattcccaaagctaatggatcactgggacgagttcg

SEQ ID NO: 69548 - DNA, 441 bp, Oryza sativa
cttgacgatttctggaatacactatcttgtgatagcgaaatattatgtttcatcgaatgacatatgttaatgacggaacgcctaatatctcggttatttcggcgaaacatattgcatatctcctcatcactataagcttttctgtaaattacttctatcgaccttatcaatctattatgtacacaatattaataaaaaaaatttacaccctccatatcatataataagtcatctgaatactgttatagccaaaattctttagatttgatcaagtctatacaacaaatagtaaaatctataacactaaattagtttcattaaattgaacaataaacatattttgataaccatgcttgtttcatatcgataatactattatatttttctactcacgtcggcaaacttaaaagtgtttgactagaaataatgcaaactacttat

SEQ ID NO: 69549 - DNA, 420 bp, Oryza sativa
  unsure (1)..(420): unsure at all n locations
ngacaatgcatatatacaacgtgcatatgcgaatgataactgatgntcgnttatcgaatggtattgtgcatctactatataagctatttatttcattgatagcgcatatgtattgtgatacattggtcgacatcatgggagactcacttttcacaacaaagtcaaactttaatgttcacaatcatcaccagttactaataatctgcccttatcaccaacaatcgcttataataactgatacatcgctaattatacttaataattgttatttattactaccagatgtcaattcctgccaataacaactgatagttgctaatgagcacctagacaacctttatgttcgcaataattaccaccaaagaggagatacttaatcaaacttccgtaaggtacttacttaagaggtgatctgttcat

SEQ ID NO: 69550 - DNA, 382 bp, Oryza sativa
  unsure (1)..(382): unsure at all n locations
cttgcagctgttttttatggctatccttccagttgaaagcatggttgcacagatnaactgtaccataattaaatctcctgtacaaaaaattaacagctaaaacctctaattcagtactataggagagaaaacatgtccatgtttttctattgtacatccaatgcatttcattggggcactgcgggtaggccactttactgtgcttcaatgtccttacaaggacagccatgtgactatgcacgacgatattatgtggtgaaagtgaaacatccaccaaccctaccctatccaccatcccaccatggagagccccatgcagtggtccagactccagagctgcccatgtccggaggaaatcaccacggcccgtagcgtaattctg

SEQ ID NO: 69551 - DNA, 504 bp, Oryza sativa
  unsure (1)..(504): unsure at all n locations
gaccttaaaactaagcttgcatagtgattcgtgcaaaaagaaatgagtctccattattttccataacaccattgtgaagtgagaagttataattaactccacaaggaataaactggaataaagttttcatgtagaagattaatataaagccccaaatcttttaacattcttccttactcagattagaagtgcttcagcatgttaattgctcctattcactttcaacatatatgcattgcatggtttgacgtttgttatttcacaggatgaacacgagacacagcgcagacttgcaggaacagatgcgaaagagattcagcggttttatgagcattattgtaaaaaaaatcttgtggacggtcttaagacaaaaaaaccgtaagactggccattgttgcatcgcattaactatctctctgtgcanaactacaaatggctcagactttatcaatggtctcatactattctttgaatgccttaaggaggagatggctagacactatc

SEQ ID NO: 69552 - DNA, 409 bp, Oryza sativa
  unsure (1)..(409): unsure at all n locations
ccatggagagaattcattgaatcccgggaaatgctttcctcctagcctttcgtaccacgtgggggcacgtactaagcaagccaatagcaagaagaagtagaatcacaagagaaaagcgccgatgcgaactgaagaagaagtacgtaagatggctattagcagcaccgaatggtctccgcagggataactattcctagacgtcatagaggaaataccttccgaggtgcacgacagttgacccagcacctcctaagccatggtggcagagtatctgatagtgataggtcagatcaagtctcctcggatgatgaagatgagtcttcccgacatcttcgtgaggaagagatggatcaaaggcattgcacccgtgtggagaaattggacacattgctagcangtgtctcacact

SEQ ID NO: 69553 - DNA, 470 bp, Oryza sativa
  unsure (1)..(470): unsure at all n locations
tgacttcagcagcggggcgactccactccacaggcaatcctttttgttgcgatgaaaccaacctctctgagacggctccaactgagaagaacttcaactctggtgtgggggaaaagagagcaagactgagtactacccactgtactcaacaagttataccggaagaggaggtatgatgcatgatataaccaaaggaggctaggggttcttttgcataagctagcatttaaaaacagtagttgatagtagtaaaacagttgtagtaattaagcagtactgaccaaatcactgtccaacgctacaccacgttgcaacaggcccaatcaaccacctgaactacaccagttcattaaactaaactaggggtgagactaatcactgttaatcttggtgatcgcccataaccgcaggcacggctattctaatatgtntactctggtcagaggtgtacaactatacccacaagatac

SEQ ID NO: 69554 - DNA, 399 bp, Oryza sativa
  unsure (1)..(399): unsure at all n locations
agctttactatctctttntactgaggtctanagctcagtactcttttcacgtagaatgaatgccctgctgctacactataaatggctggtggctgatgatgagggaattttttgctttgtgacttcgtatatcaggggatagtggagaaaggaaagctggagtcattcaatttaccaatatatgggccctccattgatgaagtgaagacagtaatcacacggaacaagctcttttgtattgaccatatcgtagctgttgagtccaattgggatccctacgatgacttggaacatgatggcatgcacattatccctcaccgtgggatgaacgtcgccaagtgcatcagagcagtgtctgagcccttgctggcaagccattttggcgaatatatacttgac

SEQ ID NO: 69555 - DNA, 349 bp, Oryza sativa
ctcacaaagcgaggttgagtccacgccgtagatgcgcgaatttagatattctcacaaaggcgctcggaaccaaagaacatcctgaccggactctgggaattggcagcgatgactcctgtaagcatggactgtcacaatacagctcccaatataggaaaccgatagtctccaatgaatatagagacgctcgttcgaaggccgaccttaatgtagaggtcattcaagaactataagcaagcatggacgctagggtggaagaaagggttataaaggtcctcgccgacatgaatatacctcgaggcacaacacacgctatgcatacaactcctcgtgcacaacacaacgctag

SEQ ID NO: 69556 - DNA, 440 bp, Oryza sativa
  unsure (1)..(440): unsure at all n locations
atgcttgtatgttgtgaatanagaaatttccaaagtattgggcatacaccaagcgcacactgctttaacagatgtgcttaagtccctaaaagacacatggtttcaccacacctggaaatatacgacatatgtggtgtaaaatccgagtaaataaactcatataggatttaccaactgcctggaaaatgaccaagatatataatcagcctaagccataatattggtcaataaaaatgcacacttacgtggcaaaaagcaacgatattgtatccaatcaattgcttaaaaacccaaacaacaccttgacttatataaaanagttagcggngcagctatataaagctttactggtttgacacctttaagatgcattgtaccaactcctaaaaagttgagtaattgcggtataaaanggatttaaggtattgggcacttaatca

SEQ ID NO: 69557 - DNA, 360 bp, Oryza sativa
tcttggtttccgcaggtgcggcttgatattcttcatggtctgcctcctacatacacatagaacataatcgtggggttggaccacttctcttgattatattgaggacacatgtttgtctttgtgatagaatgtctgccatatcgtccaagagcattataagatattcgtgcacctaactgtttcgaatgcctactgtgcttctacagcgtttttgagtcactatagctagcgcagtcgacacgatgatatcacaacacacgctgcatgttcccctatagtgctagatctggagcttactggcctagattataataaccgaattaactattacttagttccgttcatgcaagcaactagacg

SEQ ID NO: 69558 - DNA, 450 bp, Oryza sativa
  unsure (1)..(450): unsure at all n locations
agtctcctctcgccccgacctctacagggtcgcgaccccgaccgagggcccacatgctatagagaatagatgacaaaaccaggaatgtagcagctaagatgaagtggctcatcgagaaggctaacatcgctgagatttggcggacgtgcatatgcctgcgacgcgcgacgaagacaaaggcgaagcagccggcgacacgcggcggagttgcagcagtcggagacgcagcgaaagtgcaacggccggcgacccgcggccgagacggaggcgcagcagccggcctgggcagaggcgcagcctcgcagggagctgacgaggcgcagcagcttgcaacgactgcngtagcgccgatgcagtcgctactcgttgactggatctttctttatttattcttttgaattgaaaggtcattgactcgatctggatggatggctccgtaactgtatgtat

SEQ ID NO: 69559 - DNA, 466 bp, Oryza sativa
  unsure (1)..(466): unsure at all n locations
tactgcatcanatnaacctccgaaggcgttaaccatatattatttctgtaagattttgatatccttatatggcttgaatatatccaacagctgaaaaaagaatagcaacttcagaatatgatttttccataagataccaaaagattaagcagaccttgcaataggcaatggctgctactaggagtataggaatcctactctatgttccacagggtatgccgcgtcctcttatctgaagtgtgtatatgtctcgatatacctttatgtttagtgatctttaatgacgggtgtgttcagatgtgattgctgcaacggctttcaactactgcggctgcagcagctgcagcagcaattgcagctgatcaaggcatgatacctcttgtctggtgacttgatggcttgtcgcacacatatatcttaatataaatggagtcttgtctcatataagatgttcatgtctgcgaac

SEQ ID NO: 69560 - DNA, 277 bp, Oryza sativa
  unsure (1)..(277): unsure at all n locations
ctaccactcgactcatcgagccacaccanatatgcatacaggcacagggaatcatgaatggctagtggctaattgctaaatgcgattgttaaacatcttctgctcaaaatagtaaatcagtcggttaaataacgtaacattaaaactccactgatcatacgcttcaccaccttgaacaggcccaaccaacctacctgaaccacagagcattgagactatttatgatgagtgagactaacttccgtgattctggtcgatcgcctataatcacgggcac

SEQ ID NO: 69561 - DNA, 448 bp, Oryza sativa
tgctcgggcagctggaggaggaagaagacatatatatatatattatatatatatatacacatctctatgtggataggggtgtgactttagtcccagctggtgttatgaacctggactaaagatcccggggggcctgacaagccctgacaggatttgaaccaagactaaagatctttagaccgcggtggttttaccaaccatgactatagatcaaatataccgcgtacccttccaggtttttattgctatcgggactactgtggaattcggccgaccgaccaaagatggtttctccaccattgtagcccatacatccacaagctttgtgcatatctcatgaatacattgcgaatatcccaaggttacagtcgttcatgtatgctttttaaatgctcaccacctttgcaatttgagaaggctaattcgttttcaaaataatcttggtata

SEQ ID NO: 69562 - DNA, 316 bp, Oryza sativa
  unsure (1)..(316): unsure at all n locations
cctaccattcagagatgggctaatgtgaaccacggcatgtatccactcctgctgcangaacctgaaaagtgctcatggcgaactcgaatttgatgcatgaaccgtaacctaagtcactttccatggtatggtaagttacactatgatttccctggacaggtagattgctatctacggattgtaggggagccaaagcttacttgttcgatggtcacgcgattataatatcctgcaacctcgtatatcatactccgtaccatgttttctgcggtacatcatgttgattcaatccactctcagataatatgctgggttt

SEQ ID NO: 69563 - DNA, 386 bp, Oryza sativa
  unsure (1)..(386): unsure at all n locations
atcttcttgacctggtaaatgccgggagcccacctcatgggatggcatgaatgcggagcttagtaccaccttgcttattctatgagagggggacctccttaaaagggaagatgccctcctagccacttgaaacatgtgtattgtagagaacaggggaaacacgcgcgcgctctcttgcctggcacggcatggcaggcagcgcgcgtgcacgacatacgcgtttaatggtccgcataattgactactacacttgcganatgcagtctacttttgcattttgtttgcccacattggattcattttgtttgaaacgtccgaatatccgtgctgcagacgactggatccgatacgtaccgcgattatcangtcgtacgccatgagatcgt

SEQ ID NO: 69564 - DNA, 463 bp, Oryza sativa
  unsure (1)..(463): unsure at all n locations
actcagcttgccaagctgatgattgattgaccaaaattatatttattcttgttcacttccctgcgtacagatgtaccataaataaaaatagtagaagaatgctaaaaatatatagtatttttcttagagaggctgtgaatagttgaaatgacaggtagctagtaaaatatgaaagttatacagatttaagtgaaactgagtgaaacaagaacaaggcataccttagaagaccactagattcaaactgtaacctagttggacagtccaaagcatcaattgccactatcctagttntccgtctacccatcgcatcaaagggtttgctatctaagtagtcaccagtaaaacggaatgaggaaccatacctgtataaagcaagtcaagagtttataccacgtaaaaatcatcacaagttgtaaagaatagcatccatanatcacgccggtngataattgatatatgc

SEQ ID NO: 69565 - DNA, 391 bp, Oryza sativa
  unsure (1)..(391): unsure at all n locations
gaaccttatttatctgagaaatatcgatcttatgcaaaggtccaaactaagccaaagggtaactgcttggccacagtataatccaccaacgttcttctaggacatgctctaaactagccatacaactttcgttgtcaagcaacttattagacagacactacaaaccattggtcatcaaccaaaggtcgccatttagcactggatccatccgaggagacgaggacctagaccgggtcaacaccctagtcaagctattggccgttgtagtaagtgggaatcgtgcctattcacagcatctaccctcgggcttattccgctagatttgcctncaattntccggtgtcctcgcaagacagcaggttccaaataatattgagaagatatgtgcaca

SEQ ID NO: 69566 - DNA, 485 bp, Oryza sativa
  unsure (1)..(485): unsure at all n locations
ctataaaactaagcntaagttcttcctagggggtaggctgaccttgattaatttattgttttcctcaatcccaacctattatatgtgtttaaatntcttttagctaatacttaattaattatatattaataaattatcatgttttccatgcggcgaggtggagttccaaactcacaagcccaataactcatattattgcaaagccactaacatatatgtgagtacaggtacacctactagtaacatccttttgaatcgcagcaacacatcaatattacaagcaatataccactataaaatcatcgatattaatattcagaaatgtacaaaattgtttctataaaatcttttataagcgtcatgtctcaaatagcatggaatcattgtacaaaaggcacaagcacggtattgcaaaaaacctgtanatgttatttacaccaatctataacannattctacanaanatataatttctaagatcttat

SEQ ID NO: 69567 - DNA, 486 bp, Oryza sativa
  unsure (1)..(486): unsure at all n locations
tgtaggggtgatttatgtctactgttggagcgatttttttctacaaactcctccnaactgatattgtgaagagtatcgggaaactggtgggcatgctctaaacaaacaagaaacatttatctgtatatatcactacaaaatttgaatgtaaatactgattctagaattaattatgattgttttgctatttttcaatttagcagctttgtctttcagactgctacgaatagaaatataaaagttctagagtaaattgtatcgatggtacagtaacttaatagataggagaaactcggtacgtaaacttagggaacacttatttccgtacacgtcttgtgcatccgaaccaagccaaatgagtatgctatgtttaatcttaccgagttgaacctttatcangatgctacataggtacacatatcagcatgatgcgatctagatatgcatgtgctcagtcagatgtataatatgggacgctgatcatat

SEQ ID NO: 69568 - DNA, 417 bp, Oryza sativa
  unsure (1)..(417): unsure at all n locations
agcttatgatctgtatctaacaacacacatgtaccatggtgtaatccatgttgaataattcaatgaagtccacataaactgcagttgcattctctcatcgntaattatatatggccatgaaagaaaaaagttataccatgtgttgttgccatcatatgctatataagtttttatggtgctaaactgtacatctattccatttgcaaggaaaaatatatcatggcctacatgatatgcccttagccataaaggcaagtggtgaagtcataaaaaagacctatggtgctaaactacatatctcgtctattagcaaggaaaaatatgtacaaagagctatgtgtcgcatgagccaacctaagactagactagatgtctagatgaccatgtacgttaactatgctgtaacagatgctacac

SEQ ID NO: 69569 - DNA, 405 bp, Oryza sativa
  unsure (1)..(405): unsure at all n locations
tactaagcttctaacttttttctttaaatttctaattgtaatcaaacttttaattntgatgttgaactaaacacagcctaagatgactggcccaatactaatatgaaagattaataaaatgcttgccatacattcgagaaaattgtcacgagcaaccaaaggttttgtttggcttgactaattgtattgtaacatttgtttccatttgactgtgtcaaacctcctccttattcttacaacttgacatggatgactctcctgtgcaattattacgctctttgaaacaggttgtcactattctagatacactgattatctttttcattgctctgaataaaatacgttttcgacctttagtgatctataatgtacttggtgtcccggtgctcctagcagtgtagttaa

SEQ ID NO: 69570 - DNA, 413 bp, Oryza sativa
agcttgttatattagtggaccactaagctagataaattgtgaagtgagcgtaacttaactggttagtttacttgtgatggaaccaacctatcgacagtgagacgttcgtggtgattacgtcaatatcaagatatgttatctagaggtgcgtggtgacttcgtcaatttcaagatatattggcttaaacttatatggtagggtgtacgttaattgcgaagtgagtgtaacttaactggttaacttacttgtgatggaaccaacccgttgacaatgagacgttggtgatgatttcgtcaatctcaagatatgttaatcaagtcttatataggtaggggtacggtgtgtgttaattggtggtatggtgtgcgtgtgtgtatttataggggtgagtgtgcgtgcattgtgaacacct

SEQ ID NO: 69571 - DNA, 416 bp, Oryza sativa
  unsure (1)..(416): unsure at all n locations
tgatctgatcgaatcgccggctgtgacgcctatatatttctaattcgatctccaacggtgtttgagaaaggttacaaatatttggccactgatctaatggctctcactaatgctggattatgttaatacgtgcctcgtgccctcgttcgtgtttgcatgacaacaatacaccacttcnttgtgttctccgttaaatgtattgtattaatccttctacctgtgtcctagaatataataactnttagctataaatttagacatatatatatttacattcattactaaaaatacttatattctgagacggagggtacctctttgtcacatgcatggcncttccgagtggaaaatataactcattttttattccatacgcgtgctacaaatcccgactatatactggactaactactatg

SEQ ID NO: 69572 - DNA, 428 bp, Oryza sativa
  unsure (1)..(428): unsure at all n locations
agcttagttgtatggagacaaaaacagtgcataataatcacagaggctacagaagaaaaaccagtgagtgcaaaagttgaggcagcaaatggttgttcctaagtcctaacaaactactttctgcttctcaacaagaaaccacacatataagtcttacagacagatgccataaacctctcgaatgctcttgttgcctaatacatgcaatctaatacgacgaatatacatttcaaatctgttcttttatttattcattcaaacaactgaggttagaaactactacaaatgaagaacnagtgtctcttcataaatgtcatacgaaaaccaaattgtgttataagtttagtgatatttatttacatgtgtacattacaacagcacttgcacaataaagtagcactagcaccatttggttgacatattatata

SEQ ID NO: 69573 - DNA, 393 bp, Oryza sativa
taacatagctgtataggggctaaataattttcagtagaggagtacatatcaccatggtactgccaatttagatctctaacgaatatgaataaacaagacattttatggcttatctggtctataatgtagccccccccccccccccacacacacacacacacaaaaaaaaaaggaacatatttcaccactgatttttcacaatgcaatgtctttatcctcactacatattaaaagaagcattgcttgctcatgtactgctggatatcgtggagaacccctaaaaataatttggaacattcaaatgggattgtttcttagtttgaaaaaaagatatacttatgaagtataactagcgataccacaggtttaaacatgtgttgaacaccattattc

SEQ ID NO: 69574 - DNA, 402 bp, Oryza sativa
agcttacacatcatattaatccgaatgtcttagccgattacaaaattccaagtcatattacacaaagattattcagataagtatcgctggatagccgatatagctctttgcctaatctgttctacttcttctatggcttgggcatcttgagcgtcggttccaggaatgaccttcaaagatttggtcatattagcaacattcttgatagctgattttaaccttgctttttgttcttcgatagactgtgggagatcggctaacctcttgtgctctagatccagttcagcattgcattcttgaagttgtgctaagagttcgatcttgcgagcttcaagccggtcaatattggatttgatcgggcctttagataattgatcgagcttggctttttcttcatgaaca

SEQ ID NO: 69575 - DNA, 437 bp, Oryza sativa
  unsure (1)..(437): unsure at all n locations
ctcgaattgcatgcatgaagatcttgtgccaaaattacaagcattaagaggacacctgaatgtggaaactagataaaaatgagccagcagctcatgtcagataaacaattcagtacatccattaaaaaaattaagcactatggcagttatgaaagatttttgcttctcaaggtacaacaaaaccaagtacagaccagggacacatacatttaaccagttcaattgtcacccttcctgatttaatctatcatcctagattataattatactatattgcagtgactatagtattcatgtatacggtaggctttattttatagaaacaaaattataaactagcagtcatattactggtgaatgtgggcgatcatctctntgtgatcctgtgtctctcatgtctagtccctctttcagacanatgatgagttctataattg

SEQ ID NO: 69576 - DNA, 350 bp, Oryza sativa
  unsure (1)..(350): unsure at all n locations
agcttgtctgaacccacaggcagagagatcccactgatagcctgcagcgttggacaattactcatcagaagattaggttatagaatcgacgcaaattcctctcaatcagatgattaggttatagaatcgagcaaattcctcactcatcagatgattaggttatagaatcgagcaaattcctcactcatcagatgattaggttatagaatcgaccaaattcctcactcgtcagatgattaggttatatagaatatagcaaaatcctcactcatcatatgattaggttatagaatcgacgcaaattcatcgcagaaaatagttgagtggngggagacaataatcacctcggt

SEQ ID NO: 69577 - DNA, 312 bp, Oryza sativa
  unsure (1)..(312): unsure at all n locations
tactgctactggctatcaaaaggctcgcttttgttgatttattatatcttgttctactgatcattggaaacatacaatattaggaatagtagaagacccctcttgagatccgtgactaatccgcagttactttgactaagttcatcgaacccaaccgccatgtgcttatcttaccccccaccgttntctctactccagccattttcagactccaacttgttaaatttgtacccttacacgccgtacccacctatccctgcggggattcttctccgtcgccaatcgatgaaagtctctnactacgctgaaaat

SEQ ID NO: 69578 - DNA, 401 bp, Oryza sativa
  unsure (1)..(401): unsure at all n locations
agctttggattagtgccaccgcattggtgttggctaattaaaatacactacatggtgggctgtgggtgcatggttttgctagacgtgcccatggcgattaaggaccggttcgcgggatgccctggaagaatttatcgtacttaccacaagccagcgtgggcaacggctgggcttgtagtgtagcttttctctagccgacgtacccangcgagggtgggcgtgatggagttgggtcggccggggtgtccggttgatcggctgccggattcaccgcggcacgaaaggggggctgcccgttgcctgctggggacgggggcgaaccctaaggtgtggtgcgatcggttagagggggttatgcgaagggtcctgtcacgggctctttcggtatgtcgtgtggcatg

SEQ ID NO: 69579 - DNA, 428 bp, Oryza sativa
  unsure (1)..(428): unsure at all n locations
tcttgtgttatgctggctgacatgaatngtcgttggtgcataggattgggttatttccgtatctgttgatggaatgaagatgtttagccaaatcagtctattttgtcaaattgactgaatttggacattcaaagattactaagagaagagtgggggtgtacttaattactttatatttagggtaccatcttgaattcttttgagaaaccacatggattgaccattgagtgatttctgtcaatctctaagaaccatatcccataaatatatacatatgtagtacaatgatgctggcataagaaaattgacggagttgcaacttacaactgcaacaagcactggaaggcatctgatcacctgcaatgttgtgacaatctgagaataacagctttaccaaatcacaacggcacaatacatctgactatact

SEQ ID NO: 69580 - DNA, 411 bp, Oryza sativa
  unsure (1)..(411): unsure at all n locations
agcttgtttcctttatgctcgatcaagagaaataacgggatgggtaccgccgtcgccacgccgttaatgtttgtggccgctggtttactcgtgggttttcagattggggattttacggtgataggatgcataagaacagggatactgttttcagagccctttggtccgtgggctatggacgcaatgagaacatcgcgttcgtgagaaggccggacgctctagatcggtggcgtccaattgttttaatgggacgctgcggaattacgttgtcctgcttacgaataanaatccaatacctcagtgtttacataaaaaaatatattttttgttttgctcagattaccaaaaattgggaattttcacatcagtatccatctgttgtgatgtagtacgtagaagaaaaacagcatg

SEQ ID NO: 69581 - DNA, 325 bp, Oryza sativa
  unsure (1)..(325): unsure at all n locations
caatgatagtacattcccctgtgaggaatataagggccactcaaatatgcccgcgagttaaccttataattgagggaagtgactttctagccaaaccgatagttctagactcgcaaagcttggacatcatccataggatggattggttggctaagcacaaaggacagaaccaattgtgccgaaagtccatcaccttgcaaggacctggaggaaagcaagtccgctttacctctaacacccctaccgcaagtcggtctatcctaacctgtntacaagtcacctncttggagtcggtgcccatagtctatgaatatcccgacgtatt

SEQ ID NO: 69582 - DNA, 417 bp, Oryza sativa
  unsure (1)..(417): unsure at all n locations
agcttcgtggggattagatctattaataaatatttgactgagaaagccctttcagaattaatgttgccatgcattgatagaagctctgctgaatttcgtagtatatttgctggtgatttggtgaagcagatggggactatcagtgaacacatcaaagcaatagcaaggaatggtacgaaacaatctggtttagttccatcaggaactgaagcagcatcgaacaaatccagtagccgtaaagggattcgaggtggaagtccaaatattggacggcgagctccagttggtaatgatccaactccttcttcagcatctgctctgcgagcaacagtgtggttgcgcctccaaattatcattangtngcttttcattatcatggcggataggtgaggcttcattaaggacacatgtcatttg

SEQ ID NO: 69583 - DNA, 394 bp, Oryza sativa
actcagcttgtaatcctatgatcttcggaatgaggtcagctactctatctattttcacacagttattttgaccacagctagcaagcttgtcaataatcaacatgccaagtgcaggaagatgatcatagtatgtcaatgaatgctctttgggaactttccagtactctgaaatctgctgccatcttcgtctgagtatgcagttctgttcatggatgtccctgacaagatgtgtctcgcagtatagtgcttcactggtctgctttgttgggcatcattgattctaatgcatcgctttcttggtattgtggtgaaagggcttgcttctctgtatattactgaaaggattccttttagtggttgggcaaatgaatcactgatgcgagacatatattga

SEQ ID NO: 69584 - DNA, 414 bp, Oryza sativa
agcttctttggagctcatagagcacgcatcgtacagcaatggaggctgctcttgtcagagcttccactgggctgatgaaagaatgagtgcgcaagaaattcatacaccatacgagcattagttaattattgcctactctgtttcaggttataagactttctagcattgccacatttatatagatgttaatgaatctaggcacatatatgtctagattcattgacatatatatctagcattgccacatttatatagatgttaatgaatctaggcacatatatgtctagattcattgacatatatatgaatacgagcaagttagaaattcttataatatatgaaacggacgaagtatttatattttggtttaattgagtgagacacatcatatcgttgaaaattttgagtacacat

SEQ ID NO: 69585 - DNA, 389 bp, Oryza sativa
  unsure (1)..(389): unsure at all n locations
agcttattataaaatntgagtatattaatatttcacatgttccacgaagcaagaatgcttctcctgatgctttggctaaactcgcagcaacgcttgtgctcccggaagggaagcccgctcaaatcatagttgaagagaaatggttacttcctgccgtcttggagctgatcccggaggaatatgaggttaatcatgtcatgaccgttgatgacaangaggatgattggaggaaacctttcctcaattattttaaacatggcatcatgccaaacgatcctgtagagaggcgaangctgcagcgccgcctaccgtcttatgtctacaaggcgaacaccctatatcggcaatcatttgggcaagaaattctcttgangtgtgtctcgagggat

SEQ ID NO: 69586 - DNA, 348 bp, Oryza sativa
  unsure (1)..(348): unsure at all n locations
tccttatcaacaagatcacctgactgagcacacaattggtgattcctattaataggtgtagtacttggacgacaccccagcattcctgtatctatcagtaggtccaacacatacttcctctgagagagaacaatcccctttgatgagcgagcaatctcaatcccaaggaagtagcgaaggggaccaaggtccttcacctcaaacacccctctagctttctcaggccctgattttttacatatcactagtatactatatataacataccagncagaaggtatgtggctcctagttataaagacagggatctcattcttgaaaaccactatacacacctcgctgaactat

SEQ ID NO: 69587 - DNA, 402 bp, Oryza sativa
  unsure (1)..(402): unsure at all n locations
agcttcgtttaaatcggtttggaaatcgatggattcgagttcgaatcggatcggttntcctctctccaagccgagctttccttcgccgtctccgccgccgtgggccttcgccgccgcctccttgcacctatttaaggacccccgagctctcctctacccgtcgccaccctcgccttcgcctctcgtcgtcggaagagctctagcgccttgtgccctagcttcgccgtcgccggcgccgctccagccgtgcgccgccgtcgtttcagccgtcgccgtcgctcgggaagaccgccgtcggttcgcaaggtcggcgccgtcctcgtccgccccttcgccgtcgccggagaccggcggagctttatcggcgtcgcaacccgaagggttcgcacttactctcgtggc

SEQ ID NO: 69588 - DNA, 404 bp, Oryza sativa
ctagaatcgatccatgacatgccatctgtttataccacaatgcttcagctaatcttgtatgccattgccgaggaaaatcaaaaatctttctcttaatcaacttgatccaactcttattagatgccttagcttgcccattagcttgcgcacaatacggtgaaaaattcagcaattggatacccatgctatctgccccctgaacaaatctcgaccaaagatgatcttgtctattgtatcgttgaggaaccaatcggagatgatatgtcttgcaaatgatacatccctgatcaacttttaaaggaatgtttaccatcgtgaatatcggtgcacaatataagggatgattacgatttttatcccatcttaaggcatgctgtatgattaagcgcctgccttttatgtca

SEQ ID NO: 69589 - DNA, 440 bp, Oryza sativa
  unsure (1)..(440): unsure at all n locations
agcttcggtgtataaacaaccagcctcatctctgcacgatccattggtcttgatatagcccaaacccatgttgttctgtgcatgatccaataggcccactcaactgcagcatacgtatacggaatcatacggcaaaaagacccgcataacatatatgcacctccatgcagatatacagcacacacacagccttgtgaagcagaccatcatgcatgaatcttccaagccatcaatctgctgctgctgctctccagataatagcatcatacctgcacttagaaaacaaaaccaaacttctaaagaatatattcaaatcatctaactactcattaaaaataatctggccatttgaactacctaatcggccaaattacattattaacacatgcccncctgtttttggaatatattataaattaccaaaacaccatactaatatt

SEQ ID NO: 69590 - DNA, 313 bp, Oryza sativa
  unsure (1)..(313): unsure at all n locations
tcngatgtgcatcgactacaccgaccttaacaaggcatgttctaatgtcccttacccnctaccacgcatagatcagattgtcgactccaccgcggggtgcgacctatttgtgttttctagatgcatactctggttatcatcagattcgcatggctagggaggatgaggaaaaaactgcattcattacccccataggaacttattgttatacgacaaccgccttcggtaagaatcaggtctactttcacgtctactcaattctttggtgccaatagacgaatgttacgctatgtgatgactggtgtgaacacca

SEQ ID NO: 69591 - DNA, 314 bp, Oryza sativa
agcttctatctctttctaaaaaaaacctggacaaaattaaagtacatcaatacttaggaagagtcaatttcgtccggcaagtaaaagcccacatccaacccaggctgtccagctcgaccccagccgcacatggtcatcgcacacgatcgctcgatggatctggcaacaggctagatggttaattaagatcggccgggcgacgagctaactgtgcggggtgtcgttgttggtgcccggccagcgttgtgacggattataggatgacgtacgagagagagcaccagttctgcaaatggttgtgcaaaggcggtggg

SEQ ID NO: 69592 - DNA, 442 bp, Oryza sativa
  unsure (1)..(442): unsure at all n locations
actaagcttttggtngatgtatacatggatgttgagaanaccaatgttcctatcgattatctagatccaacaaggatctgccaaacccagcatacggtgacattatcaaccgtgactaactgcaacatcgttactatttagcgatcgttatatatgtttcttgctctacccaatgtatgggagcgttgtggtcctggacccccttgattatgaacacgaacctacagacatttctaccatcttcaatagtagtgattctaatcgagcgtgctacttttatgaattatattgaaccttcccttctactaacaatatcaaatctacgggcgacaatactgcaggtaaaggtggaaaaactgcaacaaggagagtgctagtgctacatactgccgcatactccccactaatatattaatttttactacatgttaacaatcatcta

SEQ ID NO: 69593 - DNA, 415 bp, Oryza sativa
agcttgagacctgctattaggaacatgtctacaaagattgaactaactgatggatggtatgtggttgctttctctgtattgcacgagttgaagctgaaagatgttagaaccttttccttttcgcaggtattctctaaatgcgtcattagatctggcacttttggagcaactagagaaaagaaaactttttataggacagaagcttcgggtactgtgctatttcaactagtcatgagacatgactataatttactcatagcacctaatatgtatttcatcttggcagatatggggagcttcactatgtgggtgggctgggcctgtgtcatttcatgaggtttgactaatcttctaagtctttaacctcataactgtgacattgactacattgaccatatatcaatttttggtgact

SEQ ID NO: 69594 - DNA, 425 bp, Oryza sativa
  unsure (1)..(425): unsure at all n locations
tgtttcactacgtggacttaacctgtcacacaatgccttcacatgacacatttcatcgcagcttaattctctgactcagctggagtcattggatctctcttggaacaaactctcaggggaaatccctcctgagttagcttctctaacttctcttgcttggttgaatctttcgtacaacaacttgaccagaagaataccgcagggtaaccagttccctcatttncaacagctctttgaagtatgtcacctctgtggaagccctctctaaaatgtgatctcaggctcacatctcaagtgcatactcttcggtaccacgttttggcggacaacttggcggacctttgtcattttttgcctgggtcacggggctatatgcagctggtcaatatgtgccaaaacatgaaccaaaacagatgtattaccta

SEQ ID NO: 69595 - DNA, 430 bp, Oryza sativa
  unsure (1)..(430): unsure at all n locations
agcttctctgatgctgttgagatctccagccgctgtagacacaatggggaaagttgattgagttgtaaaaaaatatatataataaaggtaatactttttcgccgggctcataaaagtattacccccaaaaaaaccagacaaaataaaaaaaaagacagataacagaaacagagtgaatgggtaataaaaaaaattgtagcactactaaatggtaataaatttatatcacgtcctattcaacttgactcaaaattaaagaaacaaaaaacatattaagcaagactgactgctctntatttgagcttgcctgcaatttgtattacaagaacaaaagcaatgctatatattacagacaggattatcatcggtggagcannatacttgcagatacanagcacaaatatgtaacacatttctcaaatgaaatacc

SEQ ID NO: 69596 - DNA, 394 bp, Oryza sativa
actctggatttgtcagacaataactttcatggagatattcttatgtcactgtgcagcatcaaacacatgaaggacttgagcttatcaaacaataattattctggtaaaatgccgacttgtgtgttcactgattatcttgagctgtggaccttgagtgcctcaaacaaccagcttggaggtctggtgtatggtgggatgaaaaaactgtccgcggtttgcatgcacctacaaacaacaatttgaggaacactgctgaattgtaggagcctataatatggtttgctaaacagctgtcgtgactgacacctatttgaattgttaatgcagactaactttggacaatacggagatcctaaaattgagctgcagatgaattaactttaaacactataga

SEQ ID NO: 69597 - DNA, 428 bp, Oryza sativa
  unsure (1)..(428): unsure at all n locations
agctttattgtntgacaccttttaagatgcattgtaccaactcctaaaaagttgagtaactgcggtataaaaggattttaaggtattgggcacttgatcacgcgcactttggcctaagcaaaaagtgcctaagtccctaaaagaacgtgacaggccacacctgaaaatatgggctgcagacatattaagcctaggccaaaaaatatgccttcgacaccctttaaaggatgacgcatataacatgctcccgagtaataaatcttccgagtaatatagaccaagtgtagctcatatgaatagcttctgatctgaatgattatcccttatgggatactccaaaataaatataataattgaatcccgactggcgcaagtattcggttgataacctttacggggaataataatnggtccagtctttgaacata

SEQ ID NO: 69598 - DNA, 430 bp, Oryza sativa
  unsure (1)..(430): unsure at all n locations
ctcagctgatccctatgctcgactcttcagtacggtttcttctttctaatgttgaatgggagtagctacctaatgaaatctttgtgatatagatggaaatttatcttcttttgaacttttttgcaaacatggattgattggatattggagtagcacattaaagtctagagcaaactctatcaagcctagccgcctgacccgagccgaaggtttcctcanataaccggtttgaccagtctgctgaatttggaaagctaagtggcctcaagtttatttaggctagttatccttgagttaattataatatagccttcagtttatttagtcaactatctgaccacaacttttataatgaccttcccccatattactattagaaaaatgatgctgatttttaatatactattatatgtaacaaacaatattctac

SEQ ID NO: 69599 - DNA, 171 bp, Oryza sativa
  unsure (1)..(171): unsure at all n locations
tacaccgcgccccctgagaaccagctggtgcttcgcttctgttcacgggagatgcagccatccgtactgaatgattgtggtcgggcctgaaagacctcgccttacagcaataccattgtgtggagactcagggtttganggagttcgaaatctgaatgactggacaaactg

SEQ ID NO: 69600 - DNA, 416 bp, Oryza sativa
  unsure (1)..(416): unsure at all n locations
agcttgttttatcaacaggtgcattgtttggcctagagctaataagccgtgaaacgacttgttagcaatgaaaaaatatttaaaacttttatatctatatcttcaacaatttaaaagccaatattataaaataaactaagatgaaaaatatccaaaattaaattctaaattttaaatttcggcaacactttataaactgattgacaaaagaggggacttgccaaaaataaatatttatcaatatacacggttattgtcaaggttgagacttcctttgtgattgtgtgaagagatcaaccatgtaaatagtttgtaatatggtgtagtaccgtttacaaatctcaatgccagaagtaaatgtcaaggcaacgngtattacatgcattatccttatcttaaaggaaacaaatacacat

SEQ ID NO: 69601 - DNA, 395 bp, Oryza sativa
  unsure (1)..(395): unsure at all n locations
ntgtgtgaattntcatgtgatcagggaaaagtgttgtaatttcaatcattcttcgncagcgcttaagctcgctacaacataaagaatgaccagcagcacttctctcaccttgaactatcaggtaaagtggttacttcatgcaactcaacatacagaagaaaaactaaccgtatacacaaagcattagagttctccaaaggaaactcatcaccctgctctggaccaatggggaccaaacacatccaagagagaaaaagaagagttgcaacgagctgagaatggcgacccttgtttcatgctgagaccccaccataactgacacactttatttcttactccctcatcccagaaatagcaacctaaaccgaatggggcgatcctatactacaatctga

SEQ ID NO: 69602 - DNA, 343 bp, Oryza sativa
  unsure (1)..(343): unsure at all n locations
agctataattatttatgtgagnncncaannaaacaattagagtattattgtgccgagtctcaatctactatatatagaataaatagattgaacccctccgtgcgaaatatattgctatactactaaactcgaccaatctgctaatgtattaatcatgacaagtcgttatattaaattcaatattaccccaagaggcttcacaaatatataagttcaccttacggtcgattacccatattaatttaaatagaattcatttgtgcggataataaataaatatgagtggccataacttcggataagtctcatgacgattatattcttaagataggtgcattcaact

SEQ ID NO: 69603 - DNA, 225 bp, Oryza sativa
  unsure (1)..(225): unsure at all n locations
tagaggagaatccgtgctggtcactgtcacaaatcactgatatatctctacctctgattttttttttaccttcgaaatcgataagttntcattatctgtgtaggatgcttcagatgctgccagcagtgctatggttagtgtgttggtctaaattcagaaacggtgcaacaattatgcgatgctgcattgacgaagttgatgaaaaagcccagtcaaagcttccaa

SEQ ID NO: 69604 - DNA, 313 bp, Oryza sativa
cgcagctttttatttatatattcatgacatatatgatgagagagcttgaactatacggcttgagctcattaattcagtctagatgattaattgcttctgcctggcacgatggctctttgatctcaaaatctattgtatactataaattctttatacgtcctattaacgcttttaagcccgtatacatgtgacactactacaaatgttcctgggctgtcacgagacatacgctctcatttctgaaaaaaatagtacatctattttctaataaaagaattccaaacctgctgttcagatgctggtagctaacatc

SEQ ID NO: 69605 - DNA, 343 bp, Oryza sativa
  unsure (1)..(343): unsure at all n locations
atcttaggatgtgcaatgcgtcaccggttgcatggccgccctaagtccgntcatatcgaggctgggagagaaggcgctacccttatttaagctcctcaaacgctccgggccgtttacttggacggaggaagctgaacgtgccctcactcagttgaaggcgtatctcagctctcccccagttctggtcgccccggagccaaatgaacccttgctactctacttatcggcgaccccgcangtggttagtgcggcgttggttgtggagcgcgatgaggacaatcctcattccgcgcacccccaccctgtgctggcttggcccgggagagacaaggaggaaagcccc

SEQ ID NO: 69606 - DNA, 385 bp, Oryza sativa
tcatcagttccaacacgcatgacaacttgctgtgcttcgacttgcatccatcatacaacggcatctggcaatcttccaccaacttactaaacttctcataatctctgtcgttgtcctctgcgtcttcaatgtcatgcaacattgtagatagacattgagtgtccaaatctatggtctctccacctaaaagagaaggtacgaacatgcccctcagctgggcgggtcttacatctgatcaacacttttcactgcgaataggcgcctttgcttcatgcttggccacaggatatttttatgaatcttcttataaatgacagccttatcttgcttcacattgtcatcttacgcctacatgccacatggctgccatctacttttgcatatc

SEQ ID NO: 69607 - DNA, 303 bp, Oryza sativa
agcttcctaattaacttatttctatcaatgtaaccattattaattaaagctaagtacattgatttaaccgaaaactgaccattttgatgataatttcatctaaaataatcagaagaattatttaactggaaatgaacaatagaagcacacaactcatgccaaagtgttagattctgaccaactaaagctctcctaaagaaaacattaagcggaatagaggccataacactagcaatagaagcattcctccttctgacaatagcatataaagatgaatacttatctctaaaggccatattacct

SEQ ID NO: 69608 - DNA, 186 bp, Oryza sativa
agcttatttctactactataactatagagaatacaatggataccgagaattgctccttgaggtgtgtgttgcaagtgaagatagtgagcactatctatagcccttgaatgatgggttgtggattggcggtactggtccgggaaaccagcacaaccgtcatctggatagcttgaggagtccgcacgt

SEQ ID NO: 69609 - DNA, 297 bp, Oryza sativa
cttctatggcatatacccatggacaattcacggcatagtgtccttgctctctacaatcatgacaaaaggggacatgctcttttggcattggaggctcattgacctgggtggcaaatgctcgatcaaacacacactgattctggtcttgacttctaaccaaggtactgtgaactaacagatactcgaatggacaagggtgtgccttgtaactctttgagccagtggggatgagtgaaactgagtactgagcataccctgacattttctttcttgtaaacattgtcaggatgagtgaag

SEQ ID NO: 69610 - DNA, 429 bp, Oryza sativa
  unsure (1)..(429): unsure at all n locations
agctagtttaattgcttaatcctccatgggttagctacggcatcttatactagcccatgttggaatgcggaatatggcaacccttctaaagggggaacacatcctcaagctcactaatgtcacatttgagaaagatcgtttgtgtagtgcttgccaagccgggaaacaagttgggaatccacatcctatcaagaacatcatgactacaacacgccctcttgagctttttcgtatggatctattcgggcctgtggcctacataagtattggaggtaacaagtatggttttgtcattgttgatgatttttcccgcttcacttgggtgtattttctccatgacaagagtgaagcacaagatgtcttcaagcacttcgccaagcaagcctcaaatctttatgatntcactatcaagagggtgcgaagtgacaa

SEQ ID NO: 69611 - DNA, 270 bp, Oryza sativa
agcttgtgaccttagccttgcccgcatacaccatgaagtgtgcttatttgttttttctcgaaactccagacagtgagaagtcgctaaattatgagattttttttaaacaattgcatcatgctggctggtatgaatgctattggtcgccaaaaccgtaatgattacaaacgaaagtatagttacgatcttaaatttatagtatatattaaatttaccaaaaatccgcgcctgggaatctacaataatatgccacaatagtaagtctaattt

SEQ ID NO: 69612 - DNA, 245 bp, Oryza sativa
  unsure (1)..(245): unsure at all n locations
agctngaatcattagctctttgcttngataccaantgaacgcgttgagatgtatcctagagggggggtgaatatgctttcctgaaattatctcaacaatcgcagcggttaaattaacagtgcccggaaccttctggtgaagaacacccgaacttcctggcagagatgagcagcccggaactttctgaattcttgagccacgaactttcgggcaacagaaaaaatcaaaatttggggaagccaaac

SEQ ID NO: 69613 - DNA, 320 bp, Oryza sativa
agtaaatgatggaaaatgtaacggtaggggcatggaaaggatcaaaatgaaattttatgggtacagaagggatcgggtaaattttacgggtatgaaagggattgagtgagtttttaggggtacacagggaatttactcaaaaaactatgttaatcgctttctctctcgccttattggtgaccaaagcaataaatattttattgttgtgtgtaagcagacgtcaaagatctataagtatccaatctctggatagttcaacataatgttgactaataaattattctctatccaagaatgtagaaagtaataacttaaatata

SEQ ID NO: 69614 - DNA, 373 bp, Oryza sativa
  unsure (1)..(373): unsure at all n locations
agctntatcactattttccaatttgtgtggcatagctctctgataactaaatatgtgtaaatgaattcattgttttttcctaacttaaaaattcagtgaaaaatgcacggtgcccggtccgttttcatatttgaagaattcgagttccataccattttgacaatttctttgcaaacagcattagcgttggagctaagactacactacccaggcaccattcaattatcacaaacgaaatacacatctgaacatgaattcttctcaactactaatatgaagtgaaccatccaattaatgattcaactggacaaaatatttcttcagatttctgagaaggtcactgatacattcgttgctgacctatgtacatgtg

SEQ ID NO: 69615 - DNA, 380 bp, Oryza sativa
  unsure (1)..(380): unsure at all n locations
catagccactccatcctatccctctgtccattctaccatctcgcacaatgccaccattcacctcacaaccttcttctttcccaccctatgtgcacacacacaatggctaataaccaatatgcagactcaattcgacacgatgttataacaatttatttgcatgggcttgaagataaggcattagtcattttgcattccctacccctttatagncccataggaaatctatagaggaaagcaaggcccttatgtgccaaggacgtgaactttagtgttttgaagaacagtacttatacactcctatgcaggacaattggtgaaaaaaaagcacaattatcaatattaaggaattcagctatatgaaacaaattatgcatatg

SEQ ID NO: 69616 - DNA, 418 bp, Oryza sativa
agcttgtttaatgtattatgctgaacgctcataaaaggatgatctggcttttgacattctcgcagaatagtatactacttgggggataagttcaagaacgtccttttcccccaaattccaataggcaaacaaaatgcttggattgagctttactccaagctaaccacagatggatctgcagctagctagcatcgatcatcaatcaatcaagcagctggggctagcttagcttggtagagcatgcattcatcaccatgtgggcccttagggagatatcgtcaaaaaccccttcaggtcccatgcatactagtggccttgtgggggcatacacagcttcttggagagcagcaattccatctgatcgtcgtggagcactgatgcttagctgctaacatgttacagggtaacagctgaattc

SEQ ID NO: 69617 - DNA, 362 bp, Oryza sativa
tgacggcacggatggagacgcatatgggcgggcgagggcactgtcatctgtgtcagggttagggtcaccgccactataccacctctgcgcccctctccggcttctcgatccgaagctgatggcggtgagctgcaggttggccaccgttcttccccccttccttctgctttctggccatgcacggatgcgcttcccctttttcaaacaacattgtccgttcttaagaggtctcgtatcaaggaggcgcgcaacccgggtagacatgtcccaacctctctctctcgggcaaattactactggatgacatgcacacccctcacgactatggtgggaaatgtcatcgtacaccacagaatctctac

SEQ ID NO: 69618 - DNA, 424 bp, Oryza sativa
  unsure (1)..(424): unsure at all n locations
agcttgtattccaaattattcaatcttaaaatacaaccaaggattggcatgtaattttttctatccattcatatggagggcaccatttttcatagtatacaaatatttactatgtgtactatacgagcatggtgccaaatgaaactattctttggttctttcaggaatcgtcatgtaacaagtgtttagcacatgactggaccaaaggagggacatgtgctttccctttttatatctgtcctgtgcatatctttttgctgtgaaggaatagtagtactttttgtgtttttaagacagcgtcatagcctcaatacggaactttngattnntattgcaattatcatggttgggagtaagttagataggtagtgagtatatatatgtacagaatcataattctttggggaggatattcgtgctatgt

SEQ ID NO: 69619 - DNA, 312 bp, Oryza sativa
  unsure (1)..(312): unsure at all n locations
tcactttanactactctttagataatcttttcactttgtactacaaaatattacctttacttttgttgcactctgaaccactctaaggttgtgttcgggagtaaaggttaagaaccgtcactccctagcacggaaaacagagcagcgattagcgggtgaataattaagtatttgctattttttcaaaaatgattaatatgattttttaagccctttcttaaacgggacaatacaggctatagctagctataacatatttaagagaaaaggagagagaaaagcatggctacaatctgaccactgacatggact

SEQ ID NO: 69620 - DNA, 402 bp, Oryza sativa
agcttacatactgttttccctttcgggaaacccgaaggtaggtacaagcaagctgttcttaccttacacagcgttataacacaactccttgcttcaatatactatgcaaggtaggctaaagtcactactactaataacggtggaatggagggtgagagcgcgcttggaagctttgctctgaatggtgtcttcgttgttgtcttcctcagctgggcaggcccctccttttatagaggtcaggggtggcgtcgcctgtgcctcctgcttatctcttcgctactgtggattcacgagagcaggctatagttgaggcctttcctgccgaaagttttattcttcacagggatatgtcattcaccgcaccctatattgttcctttatgcttatagggagtacttctgg

SEQ ID NO: 69621 - DNA, 417 bp, Oryza sativa
  unsure (1)..(417): unsure at all n locations
agcttcttaatgaatctcttccgatactaaaagtttaaaatatatgtatatattggtattggtatgctctatgatattctcgagaggtggngacatttgtatcctatttttccgcgataattatcacttgtagtataactaaattgccccctgcacatgctgaaatcattgctcgcgccactgttcatatataatgtgtagtcaagtcccgaaatctctgaatttttccctgcgaccagccagaagttacggatacactaaactaattatactagcttgcattagcaacacaccatgcacttgaaggagaaaaaacatgctttgtttttacatatatagctgtcatcacttaaggacatgtttagcacgatttaacatataaattaactctaagatgagtangtgtagagtgaagtg

SEQ ID NO: 69622 - DNA, 321 bp, Oryza sativa
catgtggaagcgctagcctgtttattatataatgctgcgctgttgacatgcggaccccacatgacaacctaaaggaccgtcggagaccgagtacacagagacggttcacgggtcgaccgaagcggaccccgtgtgtcaaccgatgcgagtgggccactaacggacttcactagacacacacgcgggtctgtacactcccgaaccacgcggttatcgagcgataacactaacacggacactacacggtcaccacccgcacacgtgaactactaccgacaccggtacactggtaccggggtcgactaccgcacaacgggtact

SEQ ID NO: 69623 - DNA, 316 bp, Oryza sativa
  unsure (1)..(316): unsure at all n locations
gaccaatcgaatgcgagtgtctattcaaacctcaatcatcacatcccctctctaccactttacaccgtggaacgcactgttcttatagagagaaaagggcttttccatctttctaacccgaaatgaaatggctgacgagagggaagctccttttggcgcgacccccggaagaatccttggaacggngggcctgtactcaagatagacacgggctacaaccacgtgcggggttcaatcctctcgcccagcttcaagggaaggcttacttcccgaggtagaaacagacggatacgactaacatgactggatctcttct

SEQ ID NO: 69624 - DNA, 434 bp, Oryza sativa
  unsure (1)..(434): unsure at all n locations
agctntatttaaacatgtttacagacttgaataatacaatccatggcatgcaactataggtgcctagaccccaccaacgaactgaaggaaacattaagatcctaaatatcaatagccacaagaatagtctcccaacagtaaattttaaatggaaaactctgcatgaaattagagggctaaaagaacattggactcacaagaatgcaccaatgcagctttattcactcaggtagacttattcaaaccaagtagcaattaaagcaagaaacagttcggcagttacaatgacaagtttttgaagaattgngggatatagcacataaaanagagttgccccactcggtcaaaagaaagcataattggatgtagagcctcatcttgttttcaagaacaaagagaagacgtacctttcggtanatataatatacaacaac

SEQ ID NO: 69625 - DNA, 376 bp, Oryza sativa
  unsure (1)..(376): unsure at all n locations
tgcattaaacacctaagttcccgtgacttgctgagtgcgatattactcacccttgctctatataaatatatacatagttcctccgccctgaagagaagataacgtgaagtgaagattatggtttcgtcctggttcccagcacgtcgccatggtgggtgttgtgggtgttaagtatcgtatggtatcccgcatgcatgcatgcatggttggttgggtgttttccttccgccgtgtcgtcggttgcattctcgggttgttctgagctgcaacctaagttaaggtaaataagtcctctatctattttaaggagttgctatgattcatatttgtcaccgtgggtaccagcactatgtcctgngactggtaccgagatcgc

SEQ ID NO: 69626 - DNA, 335 bp, Oryza sativa
  unsure (1)..(335): unsure at all n locations
agctntttttaaccaaaaattagtagacaacagggcatatttcttccctataattcataccgcagtataattatgttgagacttgagatgatcagcactgaataaatgaactcttaatctcttataaatttgcacagatgcaaaccaacacccagaaatatcttagcagcctgcaggcatggttcatatcgatgcacaaaaacatacggaatttcaatcgaagaattatgtcgctgaaatacccanaggtataagtgagtgtcatatggaaaaaaatagaagtagtgctgttgaacctgacatcggcggcaacgaatacacttctctgcctatgt

SEQ ID NO: 69627 - DNA, 414 bp, Oryza sativa
tttagtcaaggctgtgtgctgcactcgtctgtctccttatctctgctagaaaacgattgcaaacaaacgattaaaaacacaatagatcaatcattaaagacacgagatttaacgtagaaaaccctctcaaagcaggagagaagaaaccacgggccagccagcaaaatatcttcactatatcgggatgaggttacaacaccacactcgcggttacaagagaatatattggcggactctaaaaggatacgatcgacctcataactttgcagggtagttatcacgttatatatggatacggaattgatatgatatgaaggagttacagaaagactaatctcatatcaactgcctcatcacatggtcgcatgactctgagacgattgggtcaccaaatacttctgacttgcggacact

SEQ ID NO: 69628 - DNA, 426 bp, Oryza sativa
agcttggacttctctacgtgcacaacctgccgattgtgctggatcgtagcttcaatatctttgcgctcccggcaatcggctaatctctgcctggccttctccagcttgaattggtgttgctcaaggtagacggctggagtaagggcatcggctagttcatctgggagtagagcttggatatctgtgaaccttgcccggatcgagccacagttggtcaccaagttgtccagtgatgcttctagccgatgagagatatcctcaagcgttctcttcacatcatcggacagaggagctatagctttactagtggtgtcttcttctgtttcatcgagataatccttgatgtcgaaggaaaacagatcggctaagtcctgcaagagataatgttatggatgaataaggattaaaacatgattagccgatctc

SEQ ID NO: 69629 - DNA, 444 bp, Oryza sativa
  unsure (1)..(444): unsure at all n locations
ctaagcttccaatctataaattattggatgatcatgatgttgatttgatganacttantaagaactccaacctctgtgaaatctacctttgagtctatctctcttattcaattgtagcatttttcttatagcccaatcaaaccgctgttcatgtgtatttactttgttttgcaattctctattttacacttctattcctgtcagaatcaggcgccggcttatattctctttttttcattctacaattctaatggaccttaataatttgtccgtatagaataaggcaatagtgggcttcagctactaccgatttatggagtaagagacaacaaaataggagtttgctctacaaactctagatatacattaagcttgtggagaagagtatataacactgaacacttatactatctttactctatataatatgctgtatcctcatca

SEQ ID NO: 69630 - DNA, 436 bp, Oryza sativa
agctttatctttgtcatactataccaagaaggtaaaacactctatatatgagaccctaatccacttattatagaatataaaaataagccaaacatgagatacatcgtaaactattaactattgctgatcacttcaacaaagctatgcggaaggcatgccctagctctaggtggaataaagacatcaccttgtggaggcaaataatcgtcaataatccgtttcttgataggtaagttatcttttaaaaatttgttcacaccactaaatataattgtgtagtgcaagggtagctaactattcaatttccttacgaatttgtcaggatcttttggtcatctcttgatgtgtacatggaacaaatgaagaactacatttgccagctattaatgtaagacctgacaatcattgatcattcatatattatattatattattt

SEQ ID NO: 69631 - DNA, 354 bp, Oryza sativa
gtgtgaaccatcaaaactcgttgcgtgtatcattattttcagacatagtgcgagtgatgttccaatggtcaaatcttgcatgtctatgacttgtagagtttgtatagtctatcagtgctgatgcgacacacatatcattatcttcttaataatgattttggggttccgacaagtaaacatgtacttgtaaaatgcagctatgtcatggactatgttttctatttaacaagatggtcacttccatgtgagctacagctaacacaagttctccaattatttaactcgtcaagaggagcttattttattatatatcgacatatctggttgggtttatactgtgcaggtcatcaaaat

SEQ ID NO: 69632 - DNA, 420 bp, Oryza sativa
agcttcgtttttcttgagctatatggggtttctttgggttttcttctttgtaggtaggtgaccaggcgctgtacaatgggttcggggccgccggaatgcatggcgctgccgtcatgcagccgccgacgttcgggcaggtacgcggccaagaaccagtactcccgtgggttcaacttcttccccaattcattctgcttctttaccagcgttggaaacaactgcctgcctgccgcctccgcggcgctcgtccgccgtcgccgcgctcggctacccccgccgctcatgcctgcttcgcttgccaccgctgcgctagcccgccgtcgacccgcccgtctcggtccgtcgaagaagagagaagagaagattataatggagaaaagagaagaaaggggaagataaaagagatgtggtgccacatca

SEQ ID NO: 69633 - DNA, 351 bp, Oryza sativa
ctcaagcttactaagtactatatagtagtactagtagttagtggcgtgcttctgtccctctctctctcactagaaactagaatgtgtatatgcgtagcatccattcacacgttgttataattgcatttctctggtcgatcagctatgatgtgatgtgaaaacgcgcattcctgctgtgccgggggctatcaatatatgtaagtgttgacatttgtcatttggcccagcctagcaatcggcgtgcttcccagacaggccactacttattgacctgttataaagctgggggcagccaagacaaagtctaatgcttaaagaaacgcatattatgcataacatggcctcgtcatt

SEQ ID NO: 69634 - DNA, 362 bp, Oryza sativa
  unsure (1)..(362): unsure at all n locations
agcttgctttctattgtgcaaagtanagagctcaacggagagaatccattgaatcccgggaaatgctttcctcctagcctctcgtaccacgtggggtcacatactaatcaagccataggcaagaagagtaagaatcataagagaaaagcaccgatgcgaactgaagataaagtacgtaagatgactattaccagcaccgaatggcctccagcacggataactattcctagacgtcaaagaggaaataccttccgaggtgcacgacagttgacccagcacctcctaagccgtggtggcagagtatctgataatgaacggtcacatcaagtctcctcggatgaagaagatgagtctccccgaca

SEQ ID NO: 69635 - DNA, 344 bp, Oryza sativa
tctcttactgaaggggggagaaagatagagcaagaatgattcttttttttactcagcaagtcacaccggagatgcataattaatgcaagggggtacaaggggataataatataagggttaagttttgcagtaaacagcatttaaaagtcacttagttgcccaaagctattttgtaaacacgatcctagagctatacaatattattaatcaaggccggaaccctacaactgcttaaccaagctacatgatataccaactggaacccgccctggttccactcgtccaagcaacccagccaacattcaatttagtgtgagcaatttaagattaaaactaactggaca

SEQ ID NO: 69636 - DNA, 146 bp, Oryza sativa
gtcaatgtataccaccgttgttaaccgcctcaaattcatatcggtccgaaaccactgcttctcgcattttgaaccctggagaaacccattaatctctgttaccatttcacgcggtatttcctgttcggtgcatataactggcaagc

SEQ ID NO: 69637 - DNA, 81 bp, Oryza sativa
cacaaacaccgacgggaacaaaaccaccgagcacagcttttcccccacaaccgcacaggagccaacagaacgcccgccaca

SEQ ID NO: 69638 - DNA, 92 bp, Oryza sativa
cgaaggaccaaaatctagaaaaagcgactgggacgcaataacacgaaaaaaagctggaaaaccccgttatgagcgcacccccctccaaaaag

SEQ ID NO: 69639 - DNA, 417 bp, Oryza sativa
agcttgcttttattcaatcatgcaaccaatacccgctaactatgcgctcctcaggatcccaaagaccacccctgaatgatgagctccttacgatatcccatcatggccatccgaccgggcatggaaacggaggagtacccataccgggaaagttccttacaatgctaacgcggaggaatatacgtactgagctgccaccatcaccgggccacctctactgacctgcaacatataactgcaattaatgggatttaataaactaagcaccatgctcacattaccacggactacctcatatcgcttgaacagacgtagagcaatcataaacatgaacattaaacccacaccacagcatatctctccgaagacagtttcacaattatatctagacaagggcgaactatagtcagtactcga

SEQ ID NO: 69640 - DNA, 399 bp, Oryza sativa
  unsure (1)..(399): unsure at all n locations
agcttcattcaagatggctttcctcgacagcagtgcaattcatagacgtgatggccttgtcgaaacagaaccatcacagttcgcaaagacaggatatttcagaaaaaaatgatattgtgtggtacatgctgaaatatactcttatctatcgcaccttttgatcctatgactctatgagtctaagtgaccagtcaaccaacccctacacagccttggcatgacagtgggcatcactctatatttttaagatcttcgccacgctggtagtcaggtttggtgattagaacatctgcttgctggactgggatttggctagcacanaggtcccattagttgtgttgtagtgaaaaacatggaggctatatatcattaggtttcaataacactctgtggatgaaa

SEQ ID NO: 69641 - DNA, 416 bp, Oryza sativa
tgtatgcataggatatgttcccgaatttcggacctcttggtattgatgctcacacatctgtttgtcagcccattaactcaaacaacgacgcccaattggccacacatgatgatgatgatcaaatggcaaattaaagtatgtttcttgttagtcgttatttcctcgttacttctgccatatgtacaacatgcatggattgatgcatgccatccatcttgaaagcgtacagaagtgagaaacagcttcatatgacacgacactgtgtcaagacgtctttctcttttttttttataaaatcatatgcagtgtggataatgatgggctacccatcaaataattttgaaatacaagccactatggaggatgctggagttatacacttgtattagaagggactataaaggagagctctatac

SEQ ID NO: 69642 - DNA, 407 bp, Oryza sativa
  unsure (1)..(407): unsure at all n locations
agctttatccgacttcgtcgccgagtggactgagtgccaagaagacatgcctgaggagaagatggagtattggaccatgcattttgaccagtccaaaaggctttcaggcactggagcgcgggttgttcaaatttccccgactggagaaagattgagctacatattggggatacatttttctgcgtcccacaacgtggcagaatacgaggcgcttcttacggactaaggattgcaatctttttgggaatttgcgtctgaagttcgtggaattctcagttggttttaatcaagtcatgaaaagtggtcctaccttgatgataacatgaccgcctactggcaggaaagtacgcangtgtgaagacaaatcgatggacttgagctcacccatgttcttcgacattataatg

SEQ ID NO: 69643 - DNA, 427 bp, Oryza sativa
tggaaggagtccaaaggaagaacctcacgatgataccaagttcaccaagttgaacaagaagcaattcaagaacatgaagatgaagaagttctattagaaggcgcttgatgaagcatttgcagctgcccaagaatcaagcgatgttgaatttgagagtgatgaggatgatggcaaggggaacaaaggcaagaatgatgtttgtctcatggcctaagcgggatgaaattctgattggatatgaggaactccattcctgtgtgaatatttcagaactattgtagacttggtatagattttaattgagaaaagatatcattgaactctattgatttttatgtgaatttaaataaactttgttatatatgagaggtaatttggagttattgagaaatgactgtaagatgtatagttatgtaaagataaaatt

SEQ ID NO: 69644 - DNA, 428 bp, Oryza sativa
  unsure (1)..(428): unsure at all n locations
agcttgttcttaagaccaagaagcaatggtgctctaatattcatcaaaaaacatcacatctgcagattttccgatgacagatacttcgttgacttcagctctactccctccgtcccaaaaaaatgggttttcgtgccaacgtttgactgtctgtcttatatgaattttttttataattagtattttcattgttgttagatgataaagcatgattaatattttatgcgtgacttatctttttaatttttttataactaggaaggtggcccgcgcgtatgcgcgggtacttatattattgaaaggtaagattattgttgttcaaaaattttgtctcatagattaagggcaaactaaagttcggataatgtcattttatgataatttaagggttctatntttcttaatatatctntaaaaaccattcacaa

SEQ ID NO: 69645 - DNA, 422 bp, Oryza sativa
tgtgcatgtgtcgtagtgcagcaaacacatgtgcatgcacatagacaatttaattagctcttgtgatcatatgaaacagaagatttgttgtagagagttatcaatgagtcgcggtatttatagcccacgagagttgcaggaccactgtcattactaattgtaactggttgaccaatcatgctaattaattaatttagttaattagaccgtcgacactaccacgcagtaacatcatgtttggtgggtgtcgcttgagtgaacttgtagtgatagtacacgtttatgtttctgtcatgttgaaatttcagtggtcataaagttaatttttgcctcggaaaagatacttgctactcatatcgagcatttgctccttagatcgtttatatttcaatatctggaatgtgcattaaattatatatgat

SEQ ID NO: 69646 - DNA, 415 bp, Oryza sativa
agctttattgattttcccttatatcttcagatcttaagctcatggggtccacatgtcatcctctgccaatatacaaaaaggcctctatggttcctaggaatataacccgcagcccaacatgtgtctatgccacagtttataaaaagtccccatatttctcttgtatttacaacatgtgtctagctacggcggccataatctatgaccgcgttggtgcgagcggacgtggttctcggcatgctaaggcatgtcgagctctggctcgtttctataccaatgggtgcatgcatgcgtgtctactgagttcttgggtactcactgaagcttgaccgcagcttggattgatctgaacatctgtgacagtggagaagacgacccggcagcgacagaaatcggcatggcgacagcgtcgacg

SEQ ID NO: 69647 - DNA, 298 bp, Oryza sativa
tgacctgggcagccaattaagtggttcgccgatcataccgagctttgttggcaataccttgatggtgggcttcaagaaactgacgctgcaaaaagataaagatatgggccgctttcctgccgctaggctttgcagcccgcccctcttcatcaattgaaatttatcttaattacctctgatcattgtagttgaacatcttgaaaattatatctcgttctttttaaagaaaagaataaagaacaatgggaatggttcaaatgcgttatctaacttgtaaagctattgaagcttgtgtttg

SEQ ID NO: 69648 - DNA, 395 bp, Oryza sativa
  unsure (1)..(395): unsure at all n locations
agcttgtgtttgtttataattntcagaagcagatagccatggatataggcttgatcagggttttcaattttgaaattgtgatttatgccgggggttgccaaaattttagaaatttcgagacgaaattatttgaaaatttgactgaatttaaataaaattagaccaaattcacaaaaaaaatgtaaaaaacagaaaatttcggacgagatttgagcgtgccggtgcggggtttcggaaattccattacccaggaacaagtgggtagatggagtgcttccactcattcttgatgcagtgcaggtcagagtggcagattccacagaacagaatctttatcgccacatcgtcatcttcagtgctcctgcagaattgcaagtaattatcagaaactacta

SEQ ID NO: 69649 - DNA, 409 bp, Oryza sativa
  unsure (1)..(409): unsure at all n locations
tatcaattggttctaccatatgttattgggttacatcttttttataaatactctaaantactttatagatataaaaggttgacaattaattaatttattccattacaagtttaaaacaaatatgatntttttatgaagcttccttagtccttacacaacgtataagcttctacatatatatgtttcactatttctttcatgatttttttttctgaccctctttattcatatattagagggaatcactccacaaagatatagccaaaaatattatgcacatgtgaaaatgatctanaagacacacagaagttctatttttgaattttaggggtcatcatgtcacttactgattaaggatttagatttaagattggtaaggatatatatgagaacactgtaactatggata

SEQ ID NO: 69650 - DNA, 209 bp, Oryza sativa
gcatatttttttttttttgacataaagaattatactcttgttgctaaaataacgagcagtaaaggatatatatgaatacatgcatgggtataaaaaggtctataaactttcagatgtgaatggtaataacacctatataatcctgatgtgataataccactgtctatattttattatacaatggatcgcataacccttatatattaacc

SEQ ID NO: 69651 - DNA, 369 bp, Oryza sativa
  unsure (1)..(369): unsure at all n locations
tacttctgccccggtnagaacagctcgcaattttttttgtgaattcaacatgtgcaaaaatcagcgattntacaagggttttcattcaaaagagaacagattttaagacatgatttctcacccaaaataaacagttttaactagaatatatgttggttttcgatgtgtgaggtgaggctttgtacagcttaaactgaaattacccctgacttctgttcagctgtgtcatntcggaaagagagacccaccaagttgagctggagctattacctgtttaatagggatcaacagaaaaattggaatttataacattaatggcattggggctatggatattcggcatacatatgagtggctgatatgattttt

SEQ ID NO: 69652 - DNA, 306 bp, Oryza sativa
  unsure (1)..(306): unsure at all n locations
agcttggccatttcttgtgcaccgaatcttgatcctatctgctggaattgccacttacatccacaagacttcgacatgtaccgcttgcttttaattgtcttgaaaaggggtggagctatcttgacaaaaagaagaaaaggagacagactttcttttttctctgngaattggaatgtaggtacatcaaaggactattgacatcactggttgctgaggaccttagcatctttgattcttctgtgggaatattaattccttgaaacggataaatgattggtgtgtgaaaagatgccatttttgcataag

SEQ ID NO: 69653 - DNA, 335 bp, Oryza sativa
gagccatgtatttgtgtagcccccgactctttgtttatttggaaacaactgaacatagagtcgagaattatagcttcttgttgtcgagtagtcatcacttgattgaagatatgtgttgaagatgtccaagtagaaatcatgaatgttggagagccacttgttgtaattaaataacacggcatcgcatgccgatatgtcgagcctcacacaacgcatggtgggatgtacaaacttggagtgcagcatagagttgcaggccgaaatataagagaatcctccctgtgacaagtggtgcggataatgacacatcgcgcacaaacaaccgttgaaacatc

SEQ ID NO: 69654 - DNA, 419 bp, Oryza sativa
  unsure (1)..(419): unsure at all n locations
agcttggctttttctcttgaggaatttcacgatatctcttggttttcttcgaggattgcttcatttctgcagttgattcaccgagacgtttagccccagatggctgcacaggattgggatcttctacaattctcaagggatttgcactggaatcatatagtttcatgaattcttcaagtctggcatcagcataattcttaatcacatggcgctgagcaatcctttccttttgtctaactcggagcttttcactgttacaatcagaaagtaatcaatgcctgatgataagggcacatgcganagtaagtatatgaatccccagccttatcatgagggagagggagggagattaanggatagatagcatactatttttccttcaaagccagtccagctgcagtgtattctcgctttggtca

SEQ ID NO: 69655 - DNA, 352 bp, Oryza sativa
  unsure (1)..(352): unsure at all n locations
gaaaataatgtacagcgaagacaacaaaaatcaaagtatgtaatgagctttagtttcaatacctcttctgcagacaagggcttgtcacgttgaccagatccaccttcattccaatcaccaccttcaaaatgcctatgagattgagtgcggaagagattcaccccccgcggtctattgctttgtacaaaattatctattgcattgtataccatacaatgggaagaatgttgagtggataacgacgaaacaagaagtagtaatgttaccttgatacatacaangctactagccaacatcaataaatacacgtggaaatttattcagaaacaagggaaaattttatttatctctt

SEQ ID NO: 69656 - DNA, 428 bp, Oryza sativa
agcttatgtttatttgcataccactatgtactcttttctgcagctttcaggatttttggagtattttttacttatcttgattccctccacgttaaatagagtttcttcatcaggtttgctcctctcctcaatagaaatcttatcaaaatgctcctcccaagaatcgatttcgtcgactgtttttttcacatcagcctaaaattaaatgtacacccaaataacaaaacacggtgagttaattcacagggtcataaattagtggaacacaaaaacgttgcgtttgtctcgaaattaaaggttctgaaaattgtatatttttcttaccgataaggctgaagagaaccagtaatctttctgacggttcaaggaacatatcgtctctgcacaaatggggcatgaacatatataaatttctcttctactctaag

SEQ ID NO: 69657 - DNA, 409 bp, Oryza sativa
ggagcacagcagaagcagagctctctctctatgccaccagagtgctggctgtggtcgactcactgcagaaaacaagggaattgtcagccacatataaatattacactatgactgaatcaaaattgttaatataacaaaacaaacacaatcattcaggcattcggcattaacacctaccagcgtgtatatacggaaaaaaaagctactaatcacaagagtaaatgatgttatctatatgtagtgaacaagtattaactgcagcatcacatactacccataacaaaaacataactacaagaaatgtgagctaagaaacaagcatactatgacaatacaccacacagtgcgctacaacactttaataacatatctatcttatgaatttgatattgtaagacccaaataaaca

SEQ ID NO: 69658 - DNA, 426 bp, Oryza sativa
agcttagatctcttgacatcaggtacgagagtttcccatgatccactttttgaaccgatcgattaaacatcgctttaatttgcttcccttcaataataattattctgggctacttagtagctactctagctaacagaagatgacaaaagccaaagatgcacacagtactcagagtactaagaccaaataatcaaaccaaataagcccatgtgatgtaccatcaacatcagtgtcttcccaagccatatgcttttgcattgccttgcaattgcattgtatgcacggagagaataatcggttcaggaagagaaaagaagccaaagacattgttgtcctcatcgccatggacggtttctccaacggggaaagatgcatagccaaaagggcgagacgatctcatctcatctgatcgatctagtacacgcc

SEQ ID NO: 69659 - DNA, 405 bp, Oryza sativa
  unsure (1)..(405): unsure at all n locations
acccttatgtttcccatcttctatttgcactttctgttgcataattggcaaaaaaggggttttattgggtttcttttgtttggattctgaattcttggtttccatagccattactccaccctctggcctaaaatgtgcagtcaacttatgtggatgaaaatttgggaaacaatcaattcaataaaatcgtggaaactaccgcactgatatgatagaagtttttttatttaaaaaggaacattacataatatctatgcggggagatgcataatacgncatgtaaattcagatcaaatcaacatgaaatttctttgcttgaagatatatgatatagttagttgctttttcttttgagtcaacaccatgctaaacacggccttatctgggagaacatgaatgtgactg

SEQ ID NO: 69660 - DNA, 385 bp, Oryza sativa
agcttagatcattcagaagagaaactctgatctggatcaatctcctgaacaaagtctcaactccgctctcgagatcaacgatggcgaactccaacgcctgtaattgctcctcctggcatgcaagccttgtcttctgaaatgccttggagacaagtgaccacttgctagaatttgatgttgtgatcttctttgacaagagatgtgaagaggactcaagcattgagatggcgacctctctagcttcggccaacagcttgatcaccctggagccctcctgctcagctgaagcagacttcttgctgatcttcttggactgcttttgcaccttcttggtcagacgaatgaaatactggatgttggcctgaacaactgtagcatcccttct

SEQ ID NO: 69661 - DNA, 325 bp, Oryza sativa
aagctgcctatgaagttggtggaggaagagcttggacggtcactcgtcttgcttgacctctgcaatgccatgcaagagagcttcatggagttgaggatgagtgtacaagagatgatgttggccatcaaaacgggagaagatgccgctgctcagtcaggatacatcggctaccagaagcgcggagcattcagaagtcaccaagactgtttgataaaggctgtgggggaaagtatacaaacagaaaataccgctattgctgattactctgttctgcgaaaatgaaccctatggtcttgttcgccttcaaaacaatctgtcaaagaca

SEQ ID NO: 69662 - DNA, 380 bp, Oryza sativa
  unsure (1)..(380): unsure at all n locations
agcttgttctctatattcagatttctcctatagctatactggctgcagaaaaaatgccctctcatggtagaaaatgtacctgataagatgctgttagtcttggggccatcaaatgttctcctgctcgaatttacaccttcattaccacctcgtggttcttcaagttcatcttctccttcagaaacaacagatgggctcgcccaaccattanctgtgctgtctcctttatttttacgcgcaaactttagaagcctctntaatccctttggagaatctttatgaaaaactattgcaggtgggttttcagcatttccccactcaataatttccggctcattgctatctgcttgcagcatttgtgacaatgagtgacggattct

SEQ ID NO: 69663 - DNA, 429 bp, Oryza sativa
  unsure (1)..(429): unsure at all n locations
tctagcacttcgcctcttccctttttcagacatttcttcacctcttcttctagggccacaatggcgatagtaccacacaacagtagagtttatgttccatgatatacaatataaaggaaaagatgtaactactccagctggtagcccatctatgcctattattttaatgcattcttgccatggaattgttgattggacccagaggaatgcacgcattatttgaggacattaagcttgtattctggatacagatatggatatancaatgcgagaggatactttgagttagagacaattacagagagtcaaggaaagaagaagtcaagtcatttggaatgcacagggtctaaatacttatctttatggtacaaatatgagtcgtttttttgtgaaaaaactcttataacatttacatgctatagactttgt

SEQ ID NO: 69664 - DNA, 435 bp, Oryza sativa
  unsure (1)..(435): unsure at all n locations
agcttgatttgtatgcatatacattgtagacataagccacaagcattcaatgcaagaggctctctcacaagcaaaaaaaataatgaggtaaaacagatatgcgcagatattaaggctgtgcttagatcaagggtgaaaagttttgacgtgtcaaattggatatacgaatatacatttaaagtattaaacgtagactaataacaaaacaaattacagattccgcatgtaaactccgagatgaatttattaagcctaattaatccgtcattagcaaattttactatagcaccacattgtcagatcatggagcaataagggcttaaagattcgtctcgcaatttacacgcaatctatgtaattagtttttntatatttaatactctatgcatgtgtccaaacattcaatgtgacaggatgaaaaaatttacaatggga

SEQ ID NO: 69665 - DNA, 431 bp, Oryza sativa
  unsure (1)..(431): unsure at all n locations
taatgtaaatcgaaacaatcgtgtcctaaattactaacatcacagtttaactgagtgataaatagataatagtcaaagggaaaagggaaattatttgtatggatgagttaaatactactccctccatttctaaatatttgacacagttaaattttaagcacatgtttgactattcgtcttattaaaaacttctgtaaaatatgtaaaacaatatgcgcacatatagttatttacaatgattagatataaaaaagaataatattacttaatttttaataaacaacggcaacatatttgaaagtcaacgtgtcaatatttatacggaggaaatactatgttaanagttttaaaatacctttgaaacgcactgaaatcatactgtataaggtctgatgatcatactatgtgagcagccattcatcgctaagtaa

SEQ ID NO: 69666 - DNA, 435 bp, Oryza sativa
  unsure (1)..(435): unsure at all n locations
agcttgttcacttctatgtgctgcgataataaggagcaaagcaaacaagaaaattgtaagaacacagtcgcagtaccagtactagcaatgattaatataagcaacaatcccaggtttttttttctatcatcaccagatcatgaaacactacagattcacacaacatatagtatcaattagcaacagcaggggatctagaatctgtggtatttgtgcaaaactacttcccttcccttctgaagtcaatcacgaactgaacaaacgcgcccaaatcagctacacgataggtgtacggaaccaagaattgctcacggtggggagaagaaatatgggggtaggaatcagaaaccggccgcaccttggtgatcttgagctcggtgaagacgtcctgaagaacnnttgtagtctggatcatctcgtactccgtcttggcgg

SEQ ID NO: 69667 - DNA, 224 bp, Oryza sativa
atgatggcggacgaaggcatcatgcggtggtacaggtatgaagactggttctggcgccgggatgaggtgagctcacttgatctgcaagactatgggaagctgttcgatgcagagtgcgaggcattgacagccgtggaatagatgataatggtcaggacctaacctacattgagaagtgttgaccgacattttctaaatcatacagcccgaaggtgtacctaagt

SEQ ID NO: 69668 - DNA, 97 bp, Oryza sativa
  unsure (1)..(97): unsure at all n locations
agctgnttctttgtcctatcactattccccttgcgccgacctctccgagctccccatcgctatcgcgccgtggaaacaccctccgacaccgatgacg

SEQ ID NO: 69669 - DNA, 402 bp, Oryza sativa
  unsure (1)..(402): unsure at all n locations
tacaccgaacacgcacttatcggggttcagttttattcgggcggagcggaggctctcaaaagtttccgctagatctgaaagtaacgtttcctggttgcgcgtctttacaaccaagtcatcgacataagcctcaacattacgtcctaattggctacccaaagaaattcgagtaatacgttgaatagtaggacctgcattccttaacccaaggcattgtcgatacaataattctatggnggaatgaacgagtttttcctatcctcctaccatgcgaattgaggtaccaagatgatctaaaacacaaaagcgaccccgctgggagcacatctgatctatgcagaggggtagatcttagaatgcttgtaggtcggtatcatcacatcagctgcgtcgcttggacac

SEQ ID NO: 69670 - DNA, 269 bp, Oryza sativa
agcttcattttatattctcacagatacaccaagagctcgagttatcctatcctttataaccttttccaattcctatcaccaccctcgaatatactctctcactcaataagtgcacaaaaattgggtggaggaagcataatcacatttggagatgctataacaagctagggaacactagagctaaagtggaatggccaaagaatgagcttgggtcgagtttgctatatataaccgttaagtgacgtcatttaaccgttactcacatattt

SEQ ID NO: 69671 - DNA, 381 bp, Oryza sativa
cggaccttgaaactaagctctgcacatgtgagctaatgcacattttctgtttcccactgtgtgttttaagagtgtgaggtctagatatttgtaaattgtgaagaattgtcaactgaaatggatccagatattagaacatatgtgaccagttcctttcttcatgtccatgtcaccatgtgagttttattttgtcaaacctcaaaagcccaacttaagctcacgtgcgtgtgatcctactgttgtagaagatcacccggagggacaagttagtgatccgtgtcaccaaaatttcctttgtaactatatttttttcagtacgaccttcgtatgaatctttaatcctctgtttgaatctgtaatttttttagtacaactctagat

SEQ ID NO: 69672 - DNA, 428 bp, Oryza sativa
  unsure (1)..(428): unsure at all n locations
agctnttttctaccggtttacctccctcatcaaggtcgagatgcccattggttgccataggtgtcttgatgggctttgcatcctccaagccaaacctcttgagtagatccttgatgtacttggtttggctcacgaacgtcctatccttgagttgcttgatttgaaatccaaggaagaagctcaactctccaatcatggacatcttaaattccctagacatcatatcaccaaattctttgcaaaatacctcattagtagaaccgaatatgatgtcatcaacataaatttgacacacaaagaaatcatcaccaatgatttttgtgaaaatggtggtgtcaacttttccaattttgaaatcctttgacaaaagaaaatttctcaatctttcataccaagccctangagcttgtttaaaccatanagagctt

SEQ ID NO: 69673 - DNA, 385 bp, Oryza sativa
  unsure (1)..(385): unsure at all n locations
tggaggtgcgctaccttgtcatactcttcacataagaggagatacgcaaagctattaagcaaattacctatagataagatgctagggctaggcggnttcatgatcaacttctacaagagttcctatgacataatcaaggacatagtggcggctttcaactccatgtatgaactgcgggcacctcaacctcctccctcgcgaatgtagttcatccaaaagtggggcgacaagatataatttaaccatagccaatcatgcttcccagaccactgacttagactgcttcatgctaccattgtatctcggaaaaatgcttatacgaagacatcaaaatatcttatgcgaactataggtaggtactccactactctctgtttaactacat

SEQ ID NO: 69674 - DNA, 414 bp, Oryza sativa
  unsure (1)..(414): unsure at all n locations
agcttaatctccagcagaagctagcatttattaattgcaactgaatttggttcataactcaacatatcaaatggcgaggttgtgtggtaaatctgccaccaccgcaacaaccaatttcataatgtttgtgtaaaaaaaacaaaatttgctacggaacactcaaagattaaggtctttgctcctgngcatccgaaaaacgtgacaaggttcgtggacactctaaaaacctggtaatttattaggggacaccatcatcattattttattattattcggttaaatggagaaaaaagcatttataaaagacaagcttaccctttgggttcgtaacttgngtctgttttcaaactttcaacttttttgtcacaccaaatgttntaacacatatatggagcattaaatatggacgaaaaa

SEQ ID NO: 69675 - DNA, 370 bp, Oryza sativa
  unsure (1)..(370): unsure at all n locations
tgttggacttcagtatgcttctaggactcttttctgaagcangggcggatccaacttgggacatggtggttcagatgaacccccaaactattctgtgaacaaacaaacaaacaaacaaaatgttactagctagttgtattaagagaggtttaaggctctcaaattaataaagaggaggagaagagcttcttccagatctaacacaaactagtaggtaacaacgcagcaattcatgtccgggaagataatcgaagaggctcaccagatccctccctccctcccttttgtcgcaatggaatcgccccctgctgttgtgcggcgccaaagacggagagaacaacaaaagaacgcaatttttttttaccataca

SEQ ID NO: 69676 - DNA, 338 bp, Oryza sativa
  unsure (1)..(338): unsure at all n locations
agcttggttctcagcgacgccatgtgctccggtgctcctcctccggctgatgagaggagccttcctacgtacagaaggctggaaatgctgctctcctcctcgctgtggaggacgttccttgatagcgcaatcggccggttgcgctgctgagaagacaactcctgaccatggcgtgccaattgctgatcgccgccggaattgttcatcgttgcggtcaagcgaagcgagacgatgcaccggccggcgacggggataggagggcgagagagagagggatatatatatgatcttgcacatcagttcaatcaaagagntttcttactttcaagataattatt

SEQ ID NO: 69677 - DNA, 406 bp, Oryza sativa
aattggaatcgatgagtagctctcatgggtgatactttaagatagacatggtcaccaacatcaaaacttagctctcgtcgacgacgatcagagtagctcttttgacgagtttgagcttcttttaatcggtcccgaataagagtgacattcttttcagcttcattaatgatagcaggtccaaagaattgtctttctcctactccggaccaaaaaagagtctaattttctccataaagagcttcaatgggacattggaacttgttgaagctttgtgtggagaatcacaaagaagacatttccagtaggtatgtcaagccacaactcgagctgtttcagattggttgtcttcactgactctgttgtgggaaagcgggtgggacaatggttcagaagtatgaatttcaaa

SEQ ID NO: 69678 - DNA, 418 bp, Oryza sativa
  unsure (1)..(418): unsure at all n locations
agcttattgttcagtcattagaggggatggatctaacaaactatttggtgctctttttttcccctaaaattatgtttggatttagaatcaatatgtctctttatgcggcgtttctattgtccgcgttactccagatatatattggttaaagcgtgtaattatttcaaggagatattttttggattgtgggatccatgcctagtgcgcttgtgtttatgccttcatggccatgggatacaatgcatagtggcctacgggcagtttgaaattcatgacagatcaacctaatgtctaatattgtggtcattggtcagtcaattggtntactattgagtcaagctagctgctntntttttttgctgtattgatattactaatttggtgccaacagattgcttgccaagtggattctttttgc

SEQ ID NO: 69679 - DNA, 255 bp, Oryza sativa
  unsure (1)..(255): unsure at all n locations
ctgccccgctgactatattatatagtcaaggtgctgtttgggtttatcaagcaattgattggatataatatcattgctttttgccatgtaagtgtgcatttntattgaccaatattatggcttacgctgattatatattatggtcattttttatgcggttggtaaaatcctttatgagtttacttactccgatgttataccccggtgccatatttttacgtgtggtgaaccatggtcttttaggactaagcacat

SEQ ID NO: 69680 - DNA, 363 bp, Oryza sativa
agcttttcttgatcagcctcatggctgagcaagcaaaggcacccgacctctcttccagtgtgagtggcgacgacggggagccgaattcacgccgtcgagctcgtacttcaccgccccctcctcgccaaagtactaaacagggggaggcgctcgaaagggtcgaaagatcccgcggttcaccgatcgcgggcgatggaagagaacggcgagatggggagcgtcgcctcctcgtctacggcgacggcagcacgccccaaggtgcgctccaagctgcgggcgcgctcttacgccacccacctgtcgtccctgacccggaatctccagcccaacgatggctggacgacgtggccaaattggtcatga

SEQ ID NO: 69681 - DNA, 406 bp, Oryza sativa
atgctttactcttaaacgagaactagtaatattgttctgtaagatttaagatcctgtgcgagtgccatataagatttgacatatggatatgagggtttgtggtgctcccacgtcagtcaataaatcaaatgtataataaaaggttgaattggtttgtggcctaaataaaccttaccaaattttgtcagtgctaaattttggtaagttttggcatgactaattttagtaaggcaaaattatatttggattgaagccataatagtctaagttcactattgaaatgacctattttcttatgcatgacaaaatttggcttcaaaccaaatagacactaaacactattgaaattgcaaatattggaagcctaattaggcctctaccaaaccaccctactgacatttatata

SEQ ID NO: 69682 - DNA, 59 bp, Oryza sativa
atatggatatgatggtttgcgggggtcccgcgtctgccaatcgatcgaaagtatactca

SEQ ID NO: 69683 - DNA, 341 bp, Oryza sativa
  unsure (1)..(341): unsure at all n locations
agcttatgacaatgcgagcgaatgtgatcaagtgctccacactcaaagcaatgagttggacctcctcttttcctgtacctgacattgttcatagctcgagaaatcttgttagcagccaaagccaagtcctcctcaaaatgtttgagttgctcatcggacatggcattaattaaggcaagagtggtagaatttgacgatgaagcaccaacatccaaagaagtcaagggagaaaccaaagcactagacttagaatcaactttgcgagaaagaatattcatctcatgagttttgagtttagtgtanagtgaatccaaagtcaaagtagacatatcaacagactc

SEQ ID NO: 69684 - DNA, 351 bp, Oryza sativa
gagataacgagctagctcgcgagccttaactagtcatgagtcctagagactagagtgaaggcccagcccaacagacaacagcccaaggcccaagcccaactcctccggtggctgagagaaaacactaacctcaccgcatacgcatctctctctgcctcgatcccttttttgcccccacaactcagccacatcctcaatgctccgccgctaggctgcgccagcgcactggagcactgggtaacactctctccctccgttgcagcgcaatcgtctctctcgcatgcgtgcagcgcgacgtacttcgcgccacttggcgtctatcacggccgcagcgcgccctgcaaacatact

SEQ ID NO: 69685 - DNA, 430 bp, Oryza sativa
agcttatgttttatacgctaggctgagggagctggtaaaccttgtcgtggttgctggctataacgatgtcaagaaatccaaggacagagaagaaatcgcagagattgagaagatgcatgaacttattaagacctataacttgtttgggcagttccgttggatctcggctcaaacgaacagggctcgcaatggtgagctctatcgctacatagctgatactcatggtgccttcgtgcaggtatagtcatcagtttaacttacatgttatatccgaacatatggaatgggtggtacatgtcacctacatattgacttgccttaccaattacagccagctttctacgaagcattcggtctcactgatgtggaggccatgacatgtggactccctacttttgcaacagtacatggtggacctgccgagaatata

SEQ ID NO: 69686 - DNA, 139 bp, Oryza sativa
  unsure (1)..(139): unsure at all n locations
cacataatagcccnccttcgtcatggtccaacacaagcctttcccaattaaacctgccggatcgatccgatccgatcacgacgggagaatcaaccgggatcgcaatggcgtctaggagagccgcggcggcggcgctgct

SEQ ID NO: 69687 - DNA, 392 bp, Oryza sativa
agcttgttggtttaactgcgtcttcttcaatgagctgatgcctgttggtttctcacttggacttcgtcgtggttgtggtcacctgtaatttatagggacagttggcagcatgccgaaaagtgtacgatggatgatgtcacagtaacaggcccacagcatcagctgcatcgcacagcgctggtgcagctatggcaaccaaaattctgttacgcagcaacatccatctgatctgactattctttaaaactggatttaacatccatcttctgtatctgatgttgctgcaatggattattaagtactaaggatgcggtagtggctgcgatcgctaggatggagaattggagacggttgactgtgggcaggaaccatgaccacagcctcctcacgtg

SEQ ID NO: 69688 - DNA, 335 bp, Oryza sativa
tctcaatcactctgtgtttgaggactagtagtacttaatttttctgctcaatctacagcaccgacaccaatatttttaataaacattaacatatgagtaattaaacttgaattattataaacttcagaaaatatttaattaatattttaaagcgaatccgacctaaggtttacataatgcttgttgcggtttaaaaagactcctttcctttttctaatattgacgcatgacttttaacaacgtcgctatcaaagcttataattgaaactttgttactaaattattacataacaatgtgaaagatatattctaattttttataacaacgcaacttt

SEQ ID NO: 69689 - DNA, 369 bp, Oryza sativa
agcttatgtattctacttttcgatggatttggtcccacgccaaaatttctaccatgctgctgggaaactgctaaacaagccatgtatctcattcagatcgaatctgatttgcgttttgggccttgtaattgcgttgtgggcttagcctaagggggtgtgcgccctatggcaaccataggacgttcttaatcatatgtattcagtagccgccatcttttagagtcgggttttgcttagatcattctatcaagaacagtttccccactagatcggattgtgaaatccccaatccgagtgcttaatcatttatatgccatttgcaatctatcttggtcttgcttgtgtcatccgatcacatgtaaggataac

SEQ ID NO: 69690 - DNA, 429 bp, Oryza sativa
  unsure (1)..(429): unsure at all n locations
actaagcttatactnntgtccgttgagataagattatctggggatgcttctattgtgctcctgcgtgngaaanaaatatcaaaaaaaaagttatgcctctctcctcagcactagagagagcaagcaaaaaaaaataaaaaaaaaagaggatccagcgagcacaccacaccattccccctttgtcaccaccttctaccaccggttcttgttttcgatgctgttccgcttggttatgggcgtctttgggtaagctcgcgttttacttcactagcctggaccagcactgtacactataccttgacgatatcaattgcttggtaacgggtttagttttctgagcatgtttagccacaacagtcacaaacccaacgctgacagctgcgtcacaccaacacccgtcatggtgtactggggtgtgccctctgggca

SEQ ID NO: 69691 - DNA, 401 bp, Oryza sativa
agcttgttctgaatgttgctcaatgcattcttatcaacaaagcatagtacaataacagcaatgcccactccaaattcaattgcaagctgtcacacaagaggctaaatattcagaacaattcaagaaaagaaacactctacaacacctgtataacaacttataaaaggatataaacaagtcagcattacaaacccagaataaactgattgccataagtgaaatgaacgtgaaatagttcttccgtccaacacagttatttagccactgccaaagacatccatatcagctatccaaaatttaacgttgcaagattgcatcccaagaaagtacaagaaaaatttacccgacaatgatgatcaaatccatcaacacatttgtcacaacttctgcagtggttactg

SEQ ID NO: 69692 - DNA, 395 bp, Oryza sativa
  unsure (1)..(395): unsure at all n locations
ctaagcttataaccatggaaaagacactgagttctgaatgaacacatggtctattataactaatcccaccctgtaaactaattatccaaaagctacgaataatcagcacagtccagccaattttcagatcacatcttctaaaaggccaggaaacgtggtaataggaagttaattacttgataggacagtataaggagttgcgggggtggggactggggatccagctaaggggtcattctgccaataagataagtgcactggcaacatcttgtcttacaacctgtggctgcccatngctgaatataattcattgtattatcatattgaggtgggattgggctacataaggacatatatgaggttttctaatataagccgtgctttatattgccaaa

SEQ ID NO: 69693 - DNA, 360 bp, Oryza sativa
agctagccgttttcttattcctaactgtgctttctttcgacaagctggaccactctggtactataccccaacctacttggggcggtagaaatgagcttatatttggccgctttacatgatgctcttagccatagacaccagccgagtggcgaattctcttacatcataactagttttgaaaaattgattgcaatcatctctgcagccagccaaataggtctacaacacgcacaggcatccaccgagtgaaatggttccgaaggatgatgccgtatcatttatcacggccaatagtgacgttatgttttggatcagctcggatctatgaggctccgtttcagagatataagatgtcttgac

SEQ ID NO: 69694 - DNA, 424 bp, Oryza sativa
agctttcttatccctagccgaaagggaggaatgagaaggccgggaaggtacggaactgtggaggaatgggagtggcagttgagcttcgcgacgggacggcgatgggattaggtcgctgaggtggaagaagacgatgacgaacagtattccttttttttaattgaaaactaatactccctccgtcacaatataagggattttgagtttttgattgcaacgcttaaccacttgtcttattcaattttttttacaaatataaaaaatgaaaagttgtgcttaaattactgtagataatacagtaagtcacaaataaaataaataataattctaaatttttctaaataagacgagtggtcaaacgttgcaagttaaaatctaaaatcccttatattacgggacagagagagtattataattcgctctg

SEQ ID NO: 69695 - DNA, 414 bp, Oryza sativa
  unsure (1)..(414): unsure at all n locations
cactttctgcttcctgtcaaagcatattaaaaatattgtgtatatcaattcanaaaattgcacggaaagcattaataatttcaacaaactgtgcggaaatgaggatcagaaaaggaaccttcaactgaagtttagatttcaaatcatgaagctcatgttctgtgcattgttcaagggatgcctcagtatttgttgtcagctgttgctcccgcgtaaacttntcttgtactattgattccacattctgaagtagggtgattttgtgtaaaccgtattgaaatgcccattagcattcacattacaacatttaactgacaacatagaagaataagaaaggaagccctttgtgagctgtctgaagaccatatactgactactgacattaaaaagccaactgaaaagtatactgatgat

SEQ ID NO: 69696 - DNA, 365 bp, Oryza sativa
  unsure (1)..(365): unsure at all n locations
agcttgttcatgttctatgttaaagctagcaactgcatgccattgttgatgttggcggaggagactaagtatatgttcttctccattcgaacttgacgacattttgcgtagtgtcctgccggcgcttcattcatgatcgaacttaatacctttgaaacaaacatccaacggaaactctgtgtatccattatgttaagaacgacatggtggcttcagttccaggaccattcatcagaaactaaaggtattaccgccaacgacaaagagcatccaaaattttgacacatggagcttgtttataaaaaattatttcanaaataaaacgtattataattattttcagagatagatcatgaacctaacga

SEQ ID NO: 69697 - DNA, 346 bp, Oryza sativa
ctcagcatgaatacaatgcatggaatactttcacctcattcacgatactattatgtatcttaagctgaagtttctagtttgcacttaataacatctactgcttaccttccatcgagattttttatcccagtcaagaatattacatgcacccgcacagaggtgtcatatattataacaatgcacatactataataactctgatgaaatagaacttatatgatacggaccaacaccttagcttatactatgactggtcctcttaatttatggcaattggagtgttatcatgtgttaaagacacatatcgttttatcgagcatacgaggtaaactgagaaatttatggc

SEQ ID NO: 69698 - DNA, 419 bp, Oryza sativa
  unsure (1)..(419): unsure at all n locations
agcttggtttgatgatgacctcataggcctaaaaagccgaanagcaagtgtacatgtccggcagcccaaaaagcccatcaccattattcttatcacacggagtcacggacgcgtataaagaaaaggatgtgactaggtaatgcatggtagtgcgttagtcttaaccggagaccactctatcccatatataaatccctcttaagcccatagtgcatgtcttttttaaacctttttaatgacttatatcttttaaatcacatattattttaaagatctatttgcattattgtactctactcanaatatgtgacaaaatgagatccatgttaaatatattcaaatattttattaatttaaaagtaatttatttaaattgtagaagtaacttagatatacaatagatgtaactctctataaca

SEQ ID NO: 69699 - DNA, 174 bp, Oryza sativa
cattacggacactataaaactaagctaatgcgtaagtgtacactattggaaggtatgtgaagttcttgccaattataaccatcattcatttttctaatcctcagcagtacctagctgtgcaccttctattacgttcttaacttttggcggcttttaagtactccctccgtttcg

SEQ ID NO: 69700 - DNA, 387 bp, Oryza sativa
  unsure (1)..(387): unsure at all n locations
agcttgttatatcttatnggaaagatttaattacgatgaataagatgaatcagataaatagtgtaggaaaaaataattaaaaaggtgctaaaaagagctatctcatgggaagaggaatgggtagtcaatttgaattgggaacattgaaatttttgttacggattggacgtcccatactaatgttttccaaagttctagcatctctatagctatgcactttgcactaattgctatggtttgcacataaagtatgcggtgtgttccggtgcaaggcattgcgttagcactggcatttgtttaaggtttgtcttcaatgtattcgactagtggattaaggtgattaaaaagaagatgctctnatacctcttctgagaacttggctgatat

SEQ ID NO: 69701 - DNA, 326 bp, Oryza sativa
  unsure (1)..(326): unsure at all n locations
gatgggcccacatgtcccggaaaccgccatattgtcacaaccatcatagggacccacctgtcagtgacctgngaaagtttggaggcctgctgggccaccccaggaaccctggcagcgctggcttatgctggccttacacgtggacgtccaaggatcaactttgttgaaatgcaagtttgcgaggccatttcaatacacattagtcaccacttatgaccgtcatacctgcctatataaggaggagctcaattcattctcaacacacccaagcaagctcaacatttctccctatactntagtttagtattctagtgctaagtggagta

SEQ ID NO: 69702 - DNA, 348 bp, Oryza sativa
  unsure (1)..(348): unsure at all n locations
agcttctattatggggatagaggctccgtgacgattaattccccgcgtgaatgacggngacgggaaaaaattccagattgcatttggtaagggacgggaattataattttacccgtagagggtgacatatggatatatccgacgtggaattctctcttgccatctttacacttttgaagatgttaatatcactacatatatatgctaaaacatatatacaaatatacaatcagtctccaacagaacagctaacactactacaaaatatcaaatatgtgttgacactataagtgcccgtagtgctaaaaccggcatttatatgcctttttcaccttttcacgttgaaat

SEQ ID NO: 69703 - DNA, 95 bp, Oryza sativa
atgccattctcacgcataaccatgataatggtacccactattacaacataaatttttatagtacccattaaaaattataaattaattattggact

SEQ ID NO: 69704 - DNA, 186 bp, Oryza sativa
agcttgttctttatctgttcgggaatcaagggctacaagaaacaaaacgagcgtgttgactatgatcaagcaccacgctgcttcttctgatacgacgacgtgcgccgtcgacaacgtctccttgcacctatataatgacccgcgagctatccttacactgagcaccctagacattgccttccttgt

SEQ ID NO: 69705 - DNA, 417 bp, Oryza sativa
  unsure (1)..(417): unsure at all n locations
agcttagaagacatgtttggaaaacctttgaaatggctntgtctgtacctaacaatgttgtataggcagggatgctggtactgtaaagttgcattacccaaacatttgtcttcctaaaataaaatatgggagccatatccttaattttgaaggacccataacagagaaaatcatgcttagccttcataagactaacccaaaaatacgaatccttagctttccattgaacttgtgatagaggttgtgatcccaaatatttgttgcgtatcatttgttaccacataccaaccgttgtaagcaacttatgcaaccattttgtaagtaaggcaacaatttttacttccaaatcatgaattcctaatccctcttgatcttaggttgacacatgatgtccactntgcatgccgatacttcttt

SEQ ID NO: 69706 - DNA, 271 bp, Oryza sativa
gccagctcagctcaggacttcccaggggatcagtcaaaagcttcctttcacgatgggacatcatggtggaccttccagcatgattatctggcagcaccgtccttaccacccgggtagctatagcaagaactacaacagtggcagtcacagcaacagtgccaacacgcctcaccctactcagtcactaatattcagctcatcagtctgcagcttactagacagccaaaagttggaaaagccaacttgttaatgtacagccgaccatgactac

SEQ ID NO: 69707 - DNA, 237 bp, Oryza sativa
ctgcagctttttttttttgtagagtttctccccacaggggtttttcaaaatttctcggggtgcacaaacaaaaatttctttttttaatacccgagccaatggggctccgcagggtattaaattttttcaccccaatgatctgagcactcgttttggcccttccaggagtaaaagtgtgtctgaaagcaaattgaaaaaatcccttcttgaagttctgaaggccgcacacgtttgtta

SEQ ID NO: 69708 - DNA, 179 bp, Oryza sativa
  unsure (1)..(179): unsure at all n locations
agcttggttattctctctcanctccatgttactgacgtcaacagcgaccatcattcctcccgtcttatcacccctgtcagcatcgttgcccatgatgtaaactacatcatcattgatgcaacataaagccggtgaacacaaacacttgcgacctatggacaatgaagaagttgcccctg

SEQ ID NO: 69709 - DNA, 377 bp, Oryza sativa
  unsure (1)..(377): unsure at all n locations
cgatgaggcccaaacatgtgaacaaatgattattattctttattagnacatcttttgcttgtgcaattacttagtttacggtgagcatgttttctgaactacttgtattaaaatacgattagtttaaaagcttttttaataaaaaaaagtatatatataagaattcaaatgaatctaatttttaaattgcttgcttcgattagcccactcatactttatttgttgtggcacgttagcgaagtcggacgggctaaccttttctagctgatatagtgacgtgatgtggatggggatttttctttttctactactcctccggtcaaatataggtatctaacattatcacattaattgcatgtactgatctagacataata

SEQ ID NO: 69710 - DNA, 317 bp, Oryza sativa
tctagtcttttgtttctctgcccccaactgaattctcgatctgctttcaaccgctataagggtgttaaacgatccaacccttcatatatattagagaataacctcctaacaaaatttatctttgccatcatctcttgtagctcagtctttttttcgggggcctcatatgtcttgatgcattcatgctcctatgagttacctcaattcctcttcatgaacaacaattccaaaactggccagccgatcatcaaaacacatatgtttgattcttttaaaccataccttctgttttctcaaaacttttcttaaaccgctat

SEQ ID NO: 69711 - DNA, 194 bp, Oryza sativa
  unsure (1)..(194): unsure at all n locations
agcttgttgtataacanaaaggcngccacgataaggggagcttgtcggtgtggggaagcaaccatctacaccggaagtgcctcaagtgtcatgtcagagaaatccactgattggctaaaatcagccagccgttaacaatgcccgtttgacctgcgaaatgataagcttaatgttaggcgtggttaaactttgct

SEQ ID NO: 69712 - DNA, 188 bp, Oryza sativa
ctatgaatgagtatatggtcaagcttccaaagacaactggaggaacatcagaagtgagaaacatatcatccttttgctgaaccccccacctgctgacagaagaacaaggacgtgtaaattctgtatggtgacaatatatttcaaggcttctaggtgaacatttctctgaagtttgacatgataaatta

SEQ ID NO: 69713 - DNA, 157 bp, Oryza sativa
agcttgttattgtgtgtgaagcgagggaggtccttaaatacgacagttaatgacgggtagcgaatacgaaatgttcaaagtgccctccaaccgtcatcacggatgcatccgggacgttcacgccaaaccccagcttggacgactgtaattgtggttc

SEQ ID NO: 69714 - DNA, 331 bp, Oryza sativa
ttatatattcaataaaaaattgtgtgatggttacgttaaatctggaaacttaaagcagatttctgaaagtgtatctggattcctggatgtccctctgctacaagtattcaatatatggacggtacattgcatagtagtacattttatggcaattgcttcatgccgacatgctaccagccaaaatatacgaactgttacaggcggtgcacaaggcgcgcgcccagcatctagttatgatccaagacctgccctgcacatacaccttgattctcacaaataagtgcaggccatcagtcctatgtgacgctcatcttcatttctaccaccaatg

SEQ ID NO: 69715 - DNA, 424 bp, Oryza sativa
  unsure (1)..(424): unsure at all n locations
actcagcttgagagggctctaaaaagatgctcgtaagaatatgtttttctggcatcacattctgtgtatcttctttctactgtcacagattattttctagattcttcaccagagaagcgttctcatttgaaggtgtgtcacttaatatttctaattattatcagttgatgagcatgttagatgtcttcaaaccaattaagtctaaaaaaccccccttacatagtacggaggactacatattgaacattactgattttctattattggctttgagttgatgactatgccattaagtccactgatanatgaggttttggtccaacttgaaaagcttacgccgttgatcagccaatatgatgtgcagctggcctaccattaagaagatatttatagacatgtatttgtgggtgacttttacatatta

SEQ ID NO: 69716 - DNA, 410 bp, Oryza sativa
agcttggaattaagcatcgtcgtcgcgtccacgacgagatgatgttcgtacaaagtatgcatgaatcagccacagttaatttgcatggtttgcttaccttttccaatcattaaaacacaagctggattttccaataattgttttgcatcgagctgggatttataacttaagggtataattagatgtatattccactcttggttataatttttgtaaatacaattgttttgatcgatcgatctacattgttataactaatcagcagaccacaatcaaataatgtattctatttctcggtattttctaagtaattaacttgtaattttcacgactgtagatacgtggtgatacattatcgtcaaattctttaatagataattaaaatatactcttactatatactataatat

SEQ ID NO: 69717 - DNA, 397 bp, Oryza sativa
tagtaagttgttcaagagatttaccaagagatcatgttctgttgttttggcccaataacttgcctcagtaacaacgcaagccagtggtatttgatacatccttatgcatattgtctgttcttcagccagactgcaaagttgttagtaatggcatccaggcaccctcaacttttaaggaaacagaaaatggagtaatcggtgttgatgaatcctattcactggactcagtgacataacagagatgtaaaaatggaaaagaaggcaacactgggttcagctacaagggccacatttgcattatgatttctttttgagcaaatttactatatatactgcttgcctggagaacctatgctactttcatcctattagttgcataatgtcaagattctatgat

SEQ ID NO: 69718 - DNA, 407 bp, Oryza sativa
agcttaattgttatggtcatacatattttcgttaactacggatgaagatttacaaatagacttcaataattgtttactccttatgtgttggttttgtttcgatgttgtcggattgttatgctctcttgagagaattttgtattaagcggttgtagcttcttttgaagtaaatgccgaaatttttttatattatctgaaaaaaaaaattcctccagcgaaaagtctcacagacaattgtttcccacccaattggcgttgcgcgtactcaatcggattactcacattggttcccgagttggattggtagcgatccacctaggggctgtctttcgaatgaaacataaatacgagggctatttctgagaaaaggccgcacaaacttggaaatacacgttgaccaagttcac

SEQ ID NO: 69719 - DNA, 314 bp, Oryza sativa
  unsure (1)..(314): unsure at all n locations
tatattctctcgctagctaggtgctttggtgaatctgaatgcatgcatttggccatcatatgtttaagtgcttaaaaccgtgtgaatagaaatctgcttaaatatttaatttcccctgcagtactaaagtcaaactattggaactaatcagatacggcagaaatacgactgaactactccttcgttcaatgttaacacattgcttttacacatgttaaccgttggcttatcnaacttttggagaatctaaatttttgcctctaaatattttacatgatcaatgataaaaagaatatatacttatttttatagac

SEQ ID NO: 69720 - DNA, 351 bp, Oryza sativa
  unsure (1)..(351): unsure at all n locations
agcttgcgttgccatcgattacatacttgtcgaggaacagtttgcaccattcctggtctggtttcactctgaaattntcgtttgattctagtgccatttcgccagatgagttntgtaccacatttctaactagagaaaatttatagaccttgagaattcggtagctcanactatttagtacttacaagtactaaattttacattagaaaatgtggtaccttcttgtacgttatcaaggatatatagtaaattatccttctaacaaatgtcgtttctggtgtatgtgtcatatctctgaagatgaactgcttaaatctacactcaagaggttctttaccgaccagagtacat

SEQ ID NO: 69721 - DNA, 413 bp, Oryza sativa
  unsure (1)..(413): unsure at all n locations
ttttcactgctgcgcttatgttccacggtggtcgngtttttttctttttattcaccgaattaatcaaactgattatgtgctccatacttaacaaattacgctttcttttaaagaaaaatttcttctaccgcattaaccacttgttttaagttatttattaaatattcaatttatctcttaatcagatagataattcgcgatcaacccgatctaatcaacatgacaaactagtacatgtttaccggtcaacagaaacaactcaaacaaaggtgtggctccttttttatggccacctcttcacctgactgctatagccacatggtaacacaagacaatacacgtcatcagagagaatacttagctgtcatggccattggctgagcccttgataacacatatcttaggatagtcct

SEQ ID NO: 69722 - DNA, 329 bp, Oryza sativa
  unsure (1)..(329): unsure at all n locations
agctttgctaatatgaatgcttcgttgtggattggtagaaaatgatgatgctggtatggctagattcatgggtgagctgaaccgagaaattcacgacattctagcctacaaagaatataattcaattaatcgtttgtttcatcttgcttgntaagctgaaagggaagtacagggacgaagagctagcttcaggactaacatttctgcaggttgtgctagctcttggacatcttccaacgctgctgcaccgtcaacttgagcagcagcaccatcgtcctcaagcaacaagctgcgtccctctacaacanactctacaccatgcccgagtg

SEQ ID NO: 69723 - DNA, 352 bp, Oryza sativa
gtgtgatattctatatacttatacatttgatcccactaactataattttctgccctctcatgtcaaaaaaaaaaaattatctgccctcttagtgatccattgtacctgttttaatggcagccatcggataacagatcacttgcccgcccacgccctttatacaccgcaaggtaaataggtgctattataaacatgtcattcaccatgactaattatagaaacacttcatggatgttactgggattatactctctaatcatgctcgttttttatgatattcaaatataatagttgtctcttttttttaatcttcaagtgaaaatgtgactgattttgtagagctttaaacata

SEQ ID NO: 69724 - DNA, 257 bp, Oryza sativa
  unsure (1)..(257): unsure at all n locations
aattgagaaagtggtccctctcatgatttcagtctttcagagaaagtaggggcatgctaagtggctatagtcaccatccccgtacatgtatttgcacgagacggtttaattggttcattntatggggaaattgattttaattttcaccgcatatattnttcttccagatccaatactgtaaaaaaataaaaaaaaacaatgtatagtatagcgacatatattagtacacaacaatcaagctcaaatttgaccccaag

SEQ ID NO: 69725 - DNA, 445 bp, Oryza sativa
  unsure (1)..(445): unsure at all n locations
tgagagatagtatccactgttgataatatgcacggtatanaggtgaagccaccactatatgagaagaaagtggggaggcccaagaaaactatgagaaaacagccccaagaactagagggtgggactaaaatttcaaagcatggagtatagatgcattgtagctactgcaaaaatggtggtcacaacaaaactagtttgtaaaagaggaaggctgacttaaaacttcagaagcaacctatacagcaaatggcgacttcatcaattgttgatgaagaagagcttgtcatcacttgggtaatatttatacttattatgcttggttatttggttatctccactaactatgaatttaaactcatggatatttgttcaggaactgcatactcangactttgatgctatttgctgtgttatattagctgcctacaagaatttaacagacatt

SEQ ID NO: 69726 - DNA, 458 bp, Oryza sativa
  unsure (1)..(458): unsure at all n locations
agtgccacatcgacgagtattctgatgcttgtttgcggactctggcacttgcatatcgtgaacttactgaggacgagtatgttgcgtggaatatggagtactcagctgcgaagaattctgtacataatgatcatgatgtagctgttgagaaggcatcacaaaatatcgagaaagatttggttcttttaagtgctactgctgtggaggacagattgcaaaagggggtatgtcgatttcatttgagactttaaagatatcctcttctcttttttttttttcatttactatgcttgctcacggngtaacatggcctcctgttcagtctgaaaaaccccaaatgatttttctatttggttgctgtcacatagcttgcacttttcatattatgtgcggntgctctcatatctgttgatggtaatttctactggaatttttcgtacgtagacaaagcaccctac

SEQ ID NO: 69727 - DNA, 458 bp, Oryza sativa
  unsure (1)..(458): unsure at all n locations
agctagctctccatcgaagaaagaactttctggaacacggcagntacacgagactagtactccaagctgggccccaccataggtagggtcaccatggccaggaaagccggaagaggaaacaaaaaatatcttttatgaaaccctacaaaaaaaaaatcgtcactctcctcttttggctctttagtttcccattctgcccctcgagtcacttggagagtttggtggctntcttttgccttcgctgcgaaggaccaagggcaaatcaggtaccagaagggtcccagttaattacggctgattataagccagcttattaacgataaaaaaaatgtgagtaaaattttgtatacgtgtggttagcgacttaaatattagtgctgaaaaaaactatngtaaaaagattaaaattaatcctaaaatataattttaaaatataaatttaacattcatctttaata

SEQ ID NO: 69728 - DNA, 371 bp, Oryza sativa
  unsure (1)..(371): unsure at all n locations
tgtctggagaattttggcaaaggacctcctatatgacatctccacggagaagagcgacgatgagcaatgacaccgctgtccgtcaagatctcggggagaaccaagacagggtttacactcagtagccccaccaaaagaaaggggacgactcgataatgccccaaagaggaaaaacgcgcttgaaacgcaaatgttgctagtctggcaagactgagctaggtttacacccgccttccgcctcccgccccctagtcgatccacagctaatgctccattgctccaccttcggctatcctccgtcagtgcgtggacactgctgcaccgagacccccgaccagcctccgcatgcttncacgtggcctctcgcggac

SEQ ID NO: 69729 - DNA, 460 bp, Oryza sativa
tactcagcttattgagatcatggatcggacatggatgtacaacacgatttgagctcatccaacgttcttgaaggaagcagccaaatttgttgagctcacaaaggcacatgctgcgagggagaatttgaggagcattttttgcccatgtaaagtttgtaagaacgagatcttgctgcaagatccgaatgaagtattgtcgcacattgtagaacgaggatttaagaaaggatacgagatatggacttttcatggggaagccggtggtcgtaacgaagagttagatgatttatgttttgatgatgcataaaattttataatcgaagacatgtcttatggaaacatcccggaatacggcggctcaggtatagagaatgaaggtattgattttgaactggaagatatgttgcggcacgttgaaccacaggtcctaactggtacaagacgcgggttggacaattgg

SEQ ID NO: 69730 - DNA, 448 bp, Oryza sativa
  unsure (1)..(448): unsure at all n locations
tcttatttgccaagataccaatcaaattaccattgatatattggatgctgtaaggacgaatgatgtgagggcagcatatcgcattcttgtgttggctgatgtgagccctaacatgatatatgatgagttaaacaatgatgttcatcatgatccttcaataacagatgggaagttatttgatccagcatcttgtgatgtaaaggatgattctgggaaaccagaaggttgtctacaaggctgttccctgttgcacattgcttgccaatatggccattctataatggcagagcttctgcttctttttggtgcggatattaataagcaagacttccatggacggacaccgttgcaccattgtgtccgaaggaaaaatgatgcacttaccaagcatctgctaaagaggtaggatngaatntctagcagtatggaatatagataattacagcta

SEQ ID NO: 69731 - DNA, 257 bp, Oryza sativa
cggaattctcctgcaaagccatctcctataatggtatggtaatccacagacgaaagatttcccaaagtttcatctgtgtaatgcctctttgcttaccttactgttagcaattgaaacacaatctgacttaattatggatttaatagaatggtggtgatccagcatctagaagcatcgatataaagcctagaatttcagaagaaaggcccgataaagcaaaaccctgggagctgatggaagtcctaaatgctcagcaa

SEQ ID NO: 69732 - DNA, 442 bp, Oryza sativa
  unsure (1)..(442): unsure at all n locations
tcagcacataagatctggtgattcttatgtggatggctcanaggttgagcgccgtggctntggagggcatccaatgtgtgagttttgcaaaagcccattttatggtgataatgaattatacacccatatgacaagagaacatttttcctgccatatatgtcaaaggtattctgcaagactgcagtcattatcttatttggtgaggcaacagcataatgctgactttgtgattgttaacaggcaacattctggacaatatgactactttaggaactatgatgacttagaggtatgctatatatatatcaagctggcatacttgtatgaaatcaagtactgtcttaaattcaatccggacatggacacagaccctgtgaatttcanatccaacatcaacattacattanagaanaacatgatgagatgaaatgttgcatgaaaa

SEQ ID NO: 69733 - DNA, 143 bp, Oryza sativa
tatataaatctcctcctaaccaaatgattgagtatatatactagcagctgagtatttcttcttctccactccaagcagcagcaaagcaagcagcacacatggcatggcagcccgcactattgggtgaagcaggagccctaaca

SEQ ID NO: 69734 - DNA, 396 bp, Oryza sativa
tctttttcctggtgctaacatttttcatagctcgagaaaatttgttagataaccaaagccagtccttctcctcgaactgttcgagttgatcatcggacatggcattaatcaaagccagaacagtagaattccatgaagaagtaccaacatccaaagaagtcgacgaagaaaccaaagcactagatttagaatccactttacgagaaagaatattcatctcacgtgttttcagttttgtataaagtgaatccaaagtcaaagtagacatattaatagactcctgaatagatgtaactttcatttcccacatagacatggtaagaccattcaaaaagtggcgagaaatctcagaatgtgggatattagcctcataagaaaaatcaacagatctaagat

SEQ ID NO: 69735 - DNA, 449 bp, Oryza sativa
  unsure (1)..(449): unsure at all n locations
ttttgagagaaaagaagaatctacttcattctatatgcccttatgcacggccatacataacatagaaatcacacgtggaaggggtgggcaattagctagagcagcaggtgctgtatcgaaactgattgcaaaagaaggtaaatcggccactttaagattaccatctggggaggtccgtttggtatcccaaaactgcttagcaacagtcggacaagtgggtaatgttggggtgaaccaaaaaagtttgggtagagccgggtctaagtgttggctaggtcaacgccccgttgtaagaggggtagttatgaaccctgtggaccaccctcatggnggcggtgaagggaaagcccccattggtagaaaaaaacccacaaccccttngagttatcctgcgcttggaagaagaactanganaaggacaaaatatagtgatagttntattcttcgtc

SEQ ID NO: 69736 - DNA, 482 bp, Oryza sativa
tctcctttacttttatggatctctcaagctctggcgtttgtatcttgagtcggaaactacgcatcctcttctcagagtgtacttggtttggaatgagactcacttttgcatttctgctaatcaaagagtacaacgcaaatataccacctgtagagtcatggaatcactgaaagatgttaatggtctaacttagtcattatacaagactgaacatgacaaactaaattcacaacctcagatataccttcaccatcatcattagcccaaaggacgactaagacatacttcactagtggcatcgaaattagagtataaaggacaagtgacagtgctccaagaacatcctcctctccaagaatgggatacttgctgaacatgacatcaaatgtatacaatggacttaatccaatatctccaaacaccacagcaagagtctgaagggcaagaaacattgtcttgccaaatcagactcctgcacatgt

SEQ ID NO: 69737 - DNA, 393 bp, Oryza sativa
tctcgaatgtgtcataatcacctttgtaagcatgtagcttttgtccatgcagatgaagaatgtcggtgacgacctaagaatttattgctatcagcattaagtgatttacatgacaaagaaaaaaatgcacatgcaaatatactacatatgaattaaggacgctctgtcaaaattagcttcttcatgataatatgacatgatcataatcatcatactgcataccgtattaagaaactccctagcatgtgatacaacaatgaatgtctttggccatttcacgagatatgtttctaaccataacacagcatggagatcaagatgattcttgcaaataatatctttgtagcatacgccagaaagagatgaaacaaattcatgtgtttaacttactgg

SEQ ID NO: 69738 - DNA, 197 bp, Oryza sativa
gaaacccactcgacttcttggaaagataaacaaaaatcttatcgcacttggccacatcaaaactatatttaacctcactttgccaatctttgcgaggagtcggcattaggttggagcaaacaaaaggcttgtttttgttagtccatgaccattcagcaacatatatatcatgatcaccctcctcctcactatcgcta

SEQ ID NO: 69739 - DNA, 417 bp, Oryza sativa
  unsure (1)..(417): unsure at all n locations
ctgaagattctttctgatgctgagaagcagattatgctttcttgttatcgctctacatggntcactgcagcactactccagcttggctctggtcataattcagaaatgatccagtcaagaagcagcagttaacaaagtgctaaagcaaccactgagattgtgatggatgcagtgagagaattctctgctagcaggactacagctcatcctctattcactttgcgtggttcaaggaaaacactggacctcagaacagccagtgggcactccagtcctcagggtgttgtttcagtgtcttccagaatgagggccaacgacaacttatagcatggagaatgtacgtctgttgatagaagtttacaagattctgctcacagaagtaattcttctgagcttatgcctatgactaacgtaagc

SEQ ID NO: 69740 - DNA, 196 bp, Oryza sativa
tcgtcacactaaaaaagagaaaaacacgtagtatttaaatatcgatctgctgcatctgcactaacagatcaagtaatgcaacaagcaaaagttacttgtaccttgtagaatctggtttggtgcttttgaactcttggtgaagggacaaggaagtctgcggtagtctgaaaatgcaagtgcttaatggttgctgaaa

SEQ ID NO: 69741 - DNA, 357 bp, Oryza sativa
  unsure (1)..(357): unsure at all n locations
tggagcggcgcttgcgatcgcagaataggtctgacatctatttgttactanggataggaaccaatacatgctcaaatccaaattaaacaaagcaacaaatgactcaagtaactcgccgagcatgatgatttttgtgcatggaacatttttcatgaacccagacaaaagatactaatgtaactgactaaacgataaattaatgcacaaaaatacatgaatagctataatgatacgcataanatgtccccatcgaacctagacacggcttagtgcatatcacccaacaattcccgaccgactatcgaataaattccgaataaacttttactaaaaccctagactggtcctagtcgagaa

SEQ ID NO: 69742 - DNA, 252 bp, Oryza sativa
ctttacgactgcaacgatcatttggtgagagaaaatcaagtgcgaaagataagcataaattctttgagttgctgcgcagcaaatcattgaatggttcgtgcacttctactgtgtcttcatctacattgcttgatgagcaaaacaactcttgtcttgaattggttgattctggagtcaaatgtatggaacatggaagtagttctggtgaggaagcaaattcttgtgagggatctcagcagcacctttctgaca

SEQ ID NO: 69743 - DNA, 433 bp, Oryza sativa
  unsure (1)..(433): unsure at all n locations
cttatcccgatttaccgatgggcgatggccaaacccattttgtattacacgacgcggtgccgcctccgcgggttcgcctaacctcgttcaacagtcagcgtggcgccgagacccacccgagatcccacccaccgcatccgactatccgagacgagccggaggccggagccgccctacgcggcgcgtcacgtgagagcagcttccacggaatttttttccacgatccccacctcaccaaatcgaatcgaccgcgaacaccctngttttcacccgcgcccgcgcgccgcgcgccactggtacatgccccaccgcccggttccgatcaaacccaaaaaaaaaaaaaagaacgagaggagaacgcctcccccgttgaccccattcgccgcaggagccaaacgaacggaggcacgggcggacggacgggccacccttc

SEQ ID NO: 69744 - DNA, 426 bp, Oryza sativa
  unsure (1)..(426): unsure at all n locations
taagcaattgattggatacaatatcattgcttttcgccacgtaagtgtgtatctttattgaccaataatatggcttacgctgattatatattgtggacattttctacgcggatggcaaatactttatgagtttattcactccgattttacaccacatatgccatatatttccacgcgtggagaaaccatgtgtcttttacggactaaagcacatctgttaaagcagtgtgcgcatggcgtatgcccaatacttcggaaatntatttattcacaacatacaagcttctttatagcgtgtttgctatgtgaatcttcaatgatgtaaccaactttaggttacactcatcatattttacagagcggtcggtctatcactcggatcatgtcattcacggattcacaccgcatatgctacatattaatatc

SEQ ID NO: 69745 - DNA, 207 bp, Oryza sativa
atggtatcatacggtttttcacagttaccgcggtaactgtgcttaccgccagggcacggtaaccccggccgcggcggtttgtgaaaccctgctcaggacactagttccttgggatcatgccgttttcggagcactgatatccaaggcagcacatcaaggaaccaatcaagcaatatacatcaaaacatagttgtagctggctacatt

SEQ ID NO: 69746 - DNA, 314 bp, Oryza sativa
gcttacactatcgatattattggaacaaagccatcaaaacggctaggcacccatgtagctagctagtaacccatgcagctggttataataaagccagccattaaaacatagtggctacatgtaagaaaaaggccaaaaccatcattattagttccttcaagtttcgccatcatccgtacgtggtagtagtgcatcgccatcaggagcgcgaaccggatgaccaagacggcgaaccagaagaggacacgacgaactgcagtgccgtctttcttttcttcgtcaatcttcttcccgtctgccatcaaacgtgtctt

SEQ ID NO: 69747 - DNA, 254 bp, Oryza sativa
  unsure (1)..(254): unsure at all n locations
cgcccctcaaaagggatgagacgttaggggttagaaattcatttcaattgaattaatttacctttntatttggaaatatttaaatattcacctcgaatactccagtgaccgcttcgtgcaccataccgaccgcctcgacatctcgaacgatccagctcagctcaatctcccgagggaacgcatgggcgcctcgtctccccgaaattacgcctactcgtattagagcaaggtcaatagtgcagcccactactagc

SEQ ID NO: 69748 - DNA, 412 bp, Oryza sativa
  unsure (1)..(412): unsure at all n locations
cgtgcagaagatgagctgaaagtgcttgcccattttgccagtctcgcatcactgaagaatacatggggaatggtatcttcaccagatgctggccgacaatcagatgctgcaaaatttaaccttggtcttccctctaatctttcaaagctggatctctacttgcttccgtcgagacaatttgggacgattagttctgacagtttaaagaaacttgattttactggtgggaagttgcatagtctggaaattcagaatggggagtgcaaagtagaggtgctgcgcttgagatgcctcaaggatctgcagttntgttgggaggaattgcgtgaactgtatccaatgctggagtttgtcgaagctcagcactgctcangagtagctaattggccgctagacaacaataaagtatgga

SEQ ID NO: 69749 - DNA, 455 bp, Oryza sativa
  unsure (1)..(455): unsure at all n locations
cagctgccttgcttactaanggtcccgagcccgacatattctttctaatgttaatagacacattgaagacccttcctggttttgaggaggtccatacattattctactatgctcatttggatgccaaccctcatattgctagagcattctatggacttttatttgtaaacaagatgcagtggtccgctatgctcattagtgaaaagatccctggatcaacatangctncttggatgacttggatagttcttttggtgttatgcgttgatggccggcttatntacctattatatgtcagactttaaactgccgatatgtttgaagcacagaacttactagacttaaaattgctatcatgtgcaagaattaataagtgctattatgtgtaagaccttcggctgctgatatgtgtaagactaacatgcgctattattatgtgtggcttgtttatatgt

SEQ ID NO: 69750 - DNA, 402 bp, Oryza sativa
  unsure (1)..(402): unsure at all n locations
ctaagcttgagcttgctgtcaacaaatgcatgtcgagcctctttattgtatgcttggnatcggggtgagagagaaaaaaaagggaaggaagagagaattgttgttgatgctgtttgataggttattctcggctattttgagtggctaccttgaactatgctcacgtcttaagggtttgcctatgaccgcacaatccatcgttaatgatatgtactgtcttgattatgggtgatagcagtacttgatattactagcacccctattctctccaatttttctctattcacggacggcttgtgtctgctcggactactaccgtgtgctgtcttgtgttgcaaccctttactacaaagtggacatgtaaactcttgccatgttggttaatggaatggcacactactc

SEQ ID NO: 69751 - DNA, 379 bp, Oryza sativa
  unsure (1)..(379): unsure at all n locations
ttcttccctaagtgaccgagtacgctgaccattctttcggtatgagggtcttgatgacccagatgatacaaatgcagtgccagctgactttttctggtgacgaggaggtgcctgggcaccaactcccaatgtcgccacatgtgtggatgtcattgttgtcctgctgaccaaacagtagaattgcacgggttctcanatgtgtagtgccatacaaagagaagataaatccccagatgtgtgaaatctgacagatgaaaatatataagaatgattagttccagctcgttactcatcaaatactttatgcaaaagtctttaagacgtttgaggatccaaaaatgaaatgcaagcttgtacattngtgtgccacctttgtcat

SEQ ID NO: 69752 - DNA, 425 bp, Oryza sativa
  unsure (1)..(425): unsure at all n locations
ttgccgagtactctctccggccaagagaagagaaatatgattatatctgagaatgaatctggacaaatattntatctagatttatttctagaaaatagctctttatggaacgaagggtgtatagcggtcaacactaccccactgtgccaccggcctggtcggtcccacctagtattagttcacattctccctgagacccacccggtgacaggccggctgcctggtcaggagttgtatccgctggcctattattaatatgtactccatctattttatttttaaatcatttgattttctttataatcaataattntaagtttaactatatttataaaaatatagtaatatttttaatagaaaataaacatattatttatttaaggatatatttaatgaaactcatttgaggtccaagatgttattaa

SEQ ID NO: 69753 - DNA, 478 bp, Oryza sativa
  unsure (1)..(478): unsure at all n locations
taatgcttctctnttaaccattatgcatatcagagcatcaattagcatataccttggtaaagtgtcttaacatcagctgtgattctgtaccgacagatctccgtgtcttgaacaattatggacagatcgaatcattctctgctttcagcagtatttacaacaattctggcctttttggaatacatgcaaccactgtaagtctcttttggagcataaccaatgatatgttttcccttctatattcaagcaatgaacagaatcaaatctgcttgtgaattctttcccttttttttttgaatatcattctcaaactactgtaaatataataccctttctattctaagtaatgtctgtccctcttaccacaccattacatttgtcctacctgaattctggattaatgccttatacaaacaactgtaattntatcttactggttaaaataaggagttggtggcttatgctagtaagtagtagt

SEQ ID NO: 69754 - DNA, 413 bp, Oryza sativa
  unsure (1)..(413): unsure at all n locations
taacgtcgaaacctatttgatttgttgcatcaaccattatttgctcaacaacttcatatttctcatcaagagtaaagaactgctcaagggggtgcagcttccatgaaagtatctcttttccaagtccgcagagtgttgcagccataaccaatggattctgcangtaccgaccaagagccacagcccgcttcacaatacctatacatagttaatacaaaccaagagtgttgagttattcagaaggtacctaaccaggaaatgctaacagtaaatcaacatattgctgctgtacctgactggccaggcagttgatctgaagatatccgtgagttctcatacaagcgaggcacagactcatctgcataaacaatgctaaagttctccatttgtgggttcacatctcttggatgatc

SEQ ID NO: 69755 - DNA, 263 bp, Oryza sativa
acgtgcttattactaacacgacgatcgaatcggatttaaatcggatgaataatttaagagaaacttctctaagaagaaaaaaatacatagatattgagtgtactagtagcttttttttggaaagaatggtgtctctctttagcactatccagctagcactctcggtgtagttgtgtcctatttatatgtatgtataatgccctgaggctgaggcaaccaggggccaggggcaaagccgatcccccccttccggcctcccctct

SEQ ID NO: 69756 - DNA, 480 bp, Oryza sativa
  unsure (1)..(480): unsure at all n locations
tactcagctgactactggttattatacatatattgaagctgatttatttatctgaagcagaaattgtaattgtgcagtgatttgtattgagtgaatgggcttgttgtcagtgaaacatggcctctgtttcgtgttgaattgaatcatatttaaccctagcaaaagataaaatgcctgaactcctgcagttcactttcatctacttttgagtatttgacgtgtggaacaatggccatgaaaccggtaactgacatatcaaggccaaattaacatgctcatcatatcagttcgaacattgagagacggcatgccaaagaaataatgagcagcaaggaatattgtactattgtgttcattntatgctacaacgacctgatgtgtaattgagtgaatgggcttgatgctcaatgaaatatggcatatgtttcgtgttgaattgaatcatatttaaccctagcacacaaacaaaataagataata

SEQ ID NO: 69757 - DNA, 237 bp, Oryza sativa
  unsure (1)..(237): unsure at all n locations
ttcatccataaacatgctaaagcctaaactatagagtacttaatgcacgtgagtcggtgacataaagagagggagatgtttttacatcatggtggagaaatcttcgatgtaccctacatatgctntgtagccttgatctaatttttatcatgttggttaattgatccttacttttcttccctgaatttttggttctttatttacagcaatatcattnntttctctcctttaatctcg

SEQ ID NO: 69758 - DNA, 469 bp, Oryza sativa
tacgagtcatgtccatattagtactgaacatccttcttggtgtgtggctaatgtgtgggtgatcgcctactccccatcctccccccctaacacgctcctctcccccttcctcctccccttcttctttttctactacaccataaatttaaaaaaaataaataaattaagttagaaaaatttatgtatataaatactatatataaaaatatatttgaattcaaattcaaatttgagtcgggtatataagcttttgacttataaactttaggtctataaattttagatgtatagaaaatactatatataaaaaatatttcaattcaaattcaaatttgaatcggatatataaactcttgacttataaactttgtgtctctaaactttaggtggatagaaatactatatataaaaaatatttgaattcaaattcaaattagaatcgagtatataaactcttgacttataaaca

SEQ ID NO: 69759 - DNA, 303 bp, Oryza sativa
accatcatttggcaagactttcttctcatcacaagcttgatttcattcttgtcgacaccgcgatgcccttggcttggtgaccatcaacccatggtgtcatccattagcttcatcacaattagacctattcctttgcacatctcaaagaagaacattagtaccaacaaatcggttgtcatccttcacttggtgaccaacccggtgcatatgaaagatgtggatatgtttgttgagtattcattaacatcgcaagtgtcatatacttgtatgcaagctcaaatgcaaagatccaatataaataat

SEQ ID NO: 69760 - DNA, 499 bp, Oryza sativa
  unsure (1)..(499): unsure at all n locations
actcagcttctactcctctcaanaatataaaaggcacaactacttattttctctttattcaataaataattattatcacttactcatttatatcgtcctaataaatataatgtatacatctaataaaattaaaaatcttgagaatggaggatttaaaaataataattaagtgaatagaatgtgctagttaattacatgtatacatgcacgccttatattatgaaatacattanaaaaatagttactttatattccttccgtttgattaaaaaatcgtttgactttttcttagtcagagtttttttagctttgataaagcttatagaaaaaatagcaatatctacaacatcaaattagttttattaaatttaacattaaatctactttgataatacatttgttttgtattgaaaatgttatcatattntccacaaacttggtcaaacctaaagaanaaagacagatgacttatactataaaacggagtgagttattaatt

SEQ ID NO: 69761 - DNA, 215 bp, Oryza sativa
actaacctcgggacgattggtaagcaagtagtatcgccacacttcaggaggaatatttgtggattttgcatcattcccaaacactccaatgccctttgttctggagaactttcctgttcatgaaaaaaaacataatgtagtactcaaattcctgttcatgaaaaaaaagaatcctaacataaagaagacgtccacataggctcactgaaaataca

SEQ ID NO: 69762 - DNA, 467 bp, Oryza sativa
  unsure (1)..(467): unsure at all n locations
agtgtcaactgaattatccctatttttctataagctaannaattgcatcctaaacctgagtgcaaccaacctattgtgagttccccatttatcagtaacaatgtactctaaatttttaccatttgaaatttccatatgctcttaaattttcatgcatttcccaatctctttcctactgccgatcctatatatggtggttcagaaaaggaaaccaaactctaatatagttttatattatattgcttgataaatgtctcgcatattcgattggcacaaacaatttatatcacactgatttcttcccctaacaccttangtccagttccggttgtgaacttgcacaaaacatctagtgtctactgcattcacatcgattntgaataatatttaattnggcaccaacaatttatctcacatattgcttttccccttgacacctcangtcaagagttcgggttgtgcacttg

SEQ ID NO: 69763 - DNA, 465 bp, Oryza sativa
actcagcttgtgtgacaccatttccatttagttgttcatacaccattatttttcttactaacaaaatcttaccatgctatagatttcagcctcttattctcatattcttgttctaattatgcaccttgtgaatccataggttgttcttgttgttcgatacttggagcatcgtttggagtagaacacggagtagaagttggtgtcaatgcagccaaagactcctcggtggcagcagggttcggcattttgtcaaaaaaatgatgttcaaaacatggatcaatcaaacataaatatctctaagtactacctcaatatcccatgctacaaagtttatgttctgctcggaatctaaaatgtaccgaacaatgtaaaactacctcaagtgcagtaccaaatcatgttctatgtcatggcgatgttaccaactaatgaaagaacacattcagaaatataaattgacaaata

SEQ ID NO: 69764 - DNA, 299 bp, Oryza sativa
ggatcttgcacgattcatcggtgtaccatttactgaagaggaggtaaaaagtggggttgaccatgaggtggtgagattatgtaactttaaagctctcagtgaccttgatatcaatagaaatggtggcgtccagcgtgcacaatgtaagatatttatcgcgtattctgtgttgtttcgaccagggaagactggggattgggttaaccatatgagcaaagacattggagaaaaactggatcaactttgggaggacaagttcaaaggatcaggtctcaagttctgatgatagctatttggca

SEQ ID NO: 69765 - DNA, 155 bp, Oryza sativa
  unsure (1)..(155): unsure at all n locations
tgcagcgctgtgatgacgccatggtggagatgatacacaagcggcatgcgcgagtcatgaaacgggaggagactgagacagagggtgaggtttacctccgatgaagagcctgtangtgatgccccgggagtgcgtgaggaggaatgggcgcgcgt

SEQ ID NO: 69766 - DNA, 475 bp, Oryza sativa
  unsure (1)..(475): unsure at all n locations
gcttgcttaatagncactactcactagtcagcatgtgagctcctttttttttgtggtgccatangaacgtgaatttgaactgaacataataacttgctatgctcatgccatggatttagtctattaattgatcaacatgagcaatggctcctgtttgtaacacgtgtggatgtgtgtttgcaagcatgcttgaattgtagaaaaaaaaggaaattagcgttgcaacattttgttgattactgtgaacagttctgtcaaggtctggatccatttagttgatcgagttggnttttgcatatgcattataccttgatggatggcatccaaattcatttgatcattccatcttaatcctattgctgtgataagttaaattggactcactgtatctattgaaagagtattgagattacatgangaaacattgatttctttagctgaatcttctagacttccgactatttctgagatctta

SEQ ID NO: 69767 - DNA, 427 bp, Oryza sativa
  unsure (1)..(427): unsure at all n locations
gcttanctgacttcnncnccgagtggaccgagttccaagatgtttctcttgctgagaagatggagtattggactatgcattntgacgggtcaaagaggctctcaggcaccggagcaggggttgttctaatttccccgactggagagaggctgagctacgtattgtggatacatttttctgcgtcccataacgtggcggaatatgaggcgcttcttcgtggattaaagattgcgatttctttgggaattcggcgtctgattgttcgtggagattctcagttggtggttaatcaagtcatgaaagagtggtcctgtcttgatgataatatgactgcttatcggcatgaggtacgcaagttagaagataaatttgacggccttgagctaacccatgttcttcgacataacaatgaggcagccgacagact

SEQ ID NO: 69768 - DNA, 337 bp, Oryza sativa
tattgaagctgcaacctttggttcaccggcattgtgcttgcaatattaggacttttctggtgcttgcaagaaccgtgctcttgttaacaacgatcatgatgaccatgatgagcgcattagttggtgatgaatatactgctgtgttacatgtatatctgctaaagctgaactggatcatagagcctgagagcattgtttcacccttttttttcttgcactctcttttggtgagtgaatgatctttagttaaaaggtgatgtatccatacagatattcacaccattcattcgttataacatagtataggctcatagataatggatacggacaaatctgt

SEQ ID NO: 69769 - DNA, 276 bp, Oryza sativa
acgcaccgtacccgtcgttaactaaccaacaccacacgagccaatgctcgaaaagacagaccgaacgggaaattcttcccgggtgcacacgagtgaggacaaagtgtgcagaaaagacatgtgttggtctgtgagggcagtctatgaggcgcgtgtgtcgcagttgtgcaggcatggtacgcatgtctggtgtagaccggaagtggttacacagcatggcacatgcgctggcactggacacatggacgtggccaagagaggacgttcctggctatc

SEQ ID NO: 69770 - DNA, 413 bp, Oryza sativa
  unsure (1)..(413): unsure at all n locations
ggatccacagatggccttcacctgaaatcctgttaattaaaactctggagtaaatgatgcatgcagagaattagagactgaaggttgcaaaggcaaggtcttagtgtagcatctattaacttgtcacgaatgcttagaattttatgagcggatgattcgatggctgcttaccacctcaatttactggcagtgcagctttaaagcccatgaaagtggactgggataggagataattaacagaaacatgagacatatcagagatgatgtaaaaatctctatgtagaggaacacaacaactgctntgtttggtgcctacacattgcaatgtatatcaacatcaaccaatcagatatgggaacaaagtatcatcgaagaaggtcagctacatgggtatcatcaaagaacttaataac

SEQ ID NO: 69771 - DNA, 456 bp, Oryza sativa
  unsure (1)..(456): unsure at all n locations
tatagtgcctcgtaggcgccatgttagctaaaaccgtccccatattactaccttgggatattatttgcactgagtntaggagatgcgttggactctattttacgggtgaggggcatgattcgaactcaacccttacatgagaaacccaaattgaactttttacctgtcaaatatagcatgtccttatgcccttggccttcacttcaactatatagtgttttattattttactcaatatactatatgtgatgtgagaaacataaaataaatgataatgttattattttatcttggcatgtgtttgtagggagtataaatgctttttaaataaaaatagaagcataaaaagtttattagaaaactgacttaagcgaaattaagccaagcagcaattattgaagatgagcaccttaacctaacccaatgaaacaacttcatttttactccanaactatt

SEQ ID NO: 69772 - DNA, 393 bp, Oryza sativa
gaaacaggaatgtttaccgtccgctgggtcatcttcaattagtggagtagaaatttattgaagatgaacacatgtacgcaacctctgtatgtctcttgagaaccccaaccatcactcttggcaaacagaaagggaataaataaatatctgggacatttggaatttgatgacgaacataaatttattttttttcttggtgctttgaagaaaactgcgggtatatatttttttagggtgatttgcgttcctttttgtgtgcgtagaggagcaataaacagatttataataataatcttgatgatccatgcctgtggaacaacgggatagcaggaacatacacaaattatgactcatttccttgtaggttcttcgattcctagcttcccaaattgc

SEQ ID NO: 69773 - DNA, 340 bp, Oryza sativa
  unsure (1)..(340): unsure at all n locations
cacagcagatgaggtcaaaccattgtgggtntaaaatcttatttgctaaacatttggagtgacgatagcattacaaggattttctagcctctcttggaacctttctctcacgaaagccctctacaatcactctcttctagccaaccccttctccccctccatcttcggcagtttcgtcaatggcgaagggagggagaggggtcgagctcctctgctcccttagtatatagtagtagtagtcatcgggttctattgttttttccttcttttgattcccgaggtggtcactggcgtcgaccatccccctcctagagccatggtgggcattgacggtcttacc

SEQ ID NO: 69774 - DNA, 165 bp, Oryza sativa
aacctttaggacctacagaatacatcacgcctcctcctcctccctccacaagggcgccttcgcctcttcctcccgccgccgctggttgaacctctccaccctcctcagacaccggacccgcctacgcacgcagttcctcatctccagcgcagcgtacaggatgcc

SEQ ID NO: 69775 - DNA, 471 bp, Oryza sativa
  unsure (1)..(471): unsure at all n locations
catgattctattctcagtacaattagggagtgtttgttatatagtgatngaggagattgggaagatacgcaaaacgaggtaagccattagctcatgattaattgagtattaactattttaaatttcaaaaatggattaatatgattttttaaagcaactttcctattgaaattttttgcaaaaaacgcaccgtttagtagtttgaaaagcgtgcgcgcggaaaacgagagacaatctctcctatctccacctaacgaacactcccttagtagccggcaataaaaatgtttatctcagtaaaagatactccagcttgaatgtacaatagctattgctattgagtaggtacacacgggttccaataaatcactttataattttctagtctaatttctatctctaccaatcattctatcctttctactcagtgcattgngagtataacaatggctgttgcagccaacaccgatg

SEQ ID NO: 69776 - DNA, 235 bp, Oryza sativa
  unsure (1)..(235): unsure at all n locations
tgagattgatatggaaaaccacataatacaaagagtacatatgaatccgacgatgccggcgagatccttgtcaagatcgttcgacgagatctcctggcggcttcagcttcgtaagctatggtaggtgtgttggtgctgcgattcgatgatcctgaacacctccggnggtatgtcttttatatcatgagttggcttagtttccaagtagaactgatcggagacaatgtaccctgca

SEQ ID NO: 69777 - DNA, 465 bp, Oryza sativa
  unsure (1)..(465): unsure at all n locations
tttatttattntattttaacggctgagaaataactccatatcttttccagatcgacctccacttcctagaaggttcatacatgttcctgttatgagcttttcccttttacagttttcgctattacagaactgcttaaacataggacctcattagtgtaggttatggaaaacccaagactgataggagttcatttcccacccaagcaccccgcctgtgccctcatcagtgcactcaatcgacaccgataaggggatcatcagtgtcagtttataccacaaactaatgacactgatgatctccttatctgtattagggtttttaataaatcggagaaaaaagactgagttggaatgagctaaccaaatagtggaaaaaacgttttaagtcctatgtctctctggcccctcccttagtccataaatctctcatgttctttgtctctccctctccctctcttcctacac

SEQ ID NO: 69778 - DNA, 315 bp, Oryza sativa
  unsure (1)..(315): unsure at all n locations
cttctcctagaatcagaatctttccaaatagtctagcttttgtccagattctaaaaagttgtagtcgtaaaatctaaaaaatgaactagaaaccgaaaatttgaaaacctagtttctccagattctcagaggatagctacaaccagctttcttggaatcataaggtccttcaaataggctctcaatctctcaaatttttacctgattcctaatgcatcttagtgaaagcctccttctgctatagtgctataagcctagcacttgctctgcatangactcgttntgggtgtcagggcataacatttacagtctata

SEQ ID NO: 69779 - DNA, 218 bp, Oryza sativa
  unsure (1)..(218): unsure at all n locations
aaatatatatatatataaacctatcttaattctaaaatacgttcgtgacacatgaacatgaacatgacaaanatcgaccaaatcggtaaagacattaagacagttaacagctggaggtagcgtcaacttcatgacacactgacacacatcaggatgtatttccctctagaaataaatgaacatcaggatatacaaggaattactacctcagagtagat

SEQ ID NO: 69780 - DNA, 348 bp, Oryza sativa
  unsure (1)..(348): unsure at all n locations
tagttttttgtccagattctgagaaactatagttgtagaatttggaaaataaattagaagccagaagcagcttctctagattctcaccagctagcttttcagcagctgcttcttaaaaatttaagctcccctaaacaggctcgtagactcgtatgtagtgctggncttcctctttgcaaataattttgctcatatgcatgtgtaaaatagtgtgtgtgtttagctgagacgacgaggagaaaaatgggatgtactactagagagtagtatgttgcgtgcatgattgcaacgaccgacgattgcagcatgtgagcttcttcgctccgctggggtcatatgtgggcgtgg

SEQ ID NO: 69781 - DNA, 455 bp, Oryza sativa
  unsure (1)..(455): unsure at all n locations
gcatatgccaggactatacgtaaaatataatggttctactattattactactaactcattcccgctggtcattccaattaagaagatgcctaatgataataatttgtacaggaacggcaatgcagatctggatcaccggagatcttcacacagtgtgatcgatgatactgaacgaacggccctacctatgtgttcccgtttgaccagcggatcgatcggatttacccgtgtatgtacgtataactatgcacgcacgcgttcagctatcccgcgctgtatagcctgtgtacgtagctcggcgacgggagcacgcanaagcacgcggcgcgcgcagcagcgcgaggcgtgcgccggcaagcaaggcattcgcgcgccccgcggcgcggtacgcacagcgcgcgccacgggccgatccatacaccggtcgcacacgccaacgcccgggcatttggatg

SEQ ID NO: 69782 - DNA, 333 bp, Oryza sativa
  unsure (1)..(333): unsure at all n locations
ttgccgaaatggnccgngcggcggcgtgagtaccacttatttttaatgtatatccttcaacaattgtctcccctcttccaaaggcacgcagcgctgcagtattcctgatggacttttcttgtacaactcagcctcatgaataatgtaaagtctgctgcgtctggaaatccgctcggcttcatttttgtcttgagggagttcttgtttggtcaaaaattatatgaaaggttctctccagtcggtttcgatcatgcttacgccttgagtatccatggcttcaattgtttcttttctgggtacggttggttcgtaaagatgttctacgaacacatc

SEQ ID NO: 69783 - DNA, 410 bp, Oryza sativa
  unsure (1)..(410): unsure at all n locations
ttaatttaaaacaatttcagccaaatgtgcttcttctcctaaatgttggtacactctggaacacttggtggtgcttctttctttttttttccctggtgcctgaatgctaatttgattcaaatttattgccaactaatttatctataagatatatttcgagagtaacaatcaataaaagtcactacttttctccaacaaaagtttgatgaaggttaagatttctgtgacacgctatntaaattactaaacggagtgtttcgtgcgaaaactttatatatgaaagttgctctaaaatatcatattaatctaactttcaagtttgtaataattaaaattgaatcaatcatacgttaataccatctcgttttgcgtagaaaacttaatcttcatctttaggagaaaagaatacc

SEQ ID NO: 69784 - DNA, 487 bp, Oryza sativa
  unsure (1)..(487): unsure at all n locations
tactagtaccagtattaaacgggtgaatatttcagtgatatttattatttggtaagcaaatgactgcgtatgcaaatacatttgtctgatgaaaatgactctnttaaatggaatttttgttaaaatggtcaatttttttcgatctatgtacttagtgttaattaataattgttatattaagataaataagattgttatatcttaagatcaagattttgttgtgatatctatttctctcaattgtgatgttaacagaagataatttggttatgagaaattggagggagtattatttatatatctatatttcactggaaaagtccacatgcatgtgatatgtcattcggaagatgaaaatgaaatctatacatggcgcaatgtgcttcagtgtgttgtgcactgttgtaaatatattgtgacgttcgaggctactgatatgatggttgaaacttgtatttgtacattntgatgtgtgattgtcagtgag

SEQ ID NO: 69785 - DNA, 220 bp, Oryza sativa
acacaacaccaaacgaacgacacaagaaaaaccaagactccaaatcccagcccaagatgaagacccgcaacctcctaaaaaaacacaccaaggacaaaagcagaaaagcagggggaaaagaccaaccatcttttttcggacacttggaccctagacctgagccaaacaaacgagagtacaagagacagacgcaaacaacagactgacacaaaaaaatgag

SEQ ID NO: 69786 - DNA, 410 bp, Oryza sativa
  unsure (1)..(410): unsure at all n locations
aataaaggagaactagtgatgcttgcaatgcataaatatgttaaaacaataatattcaactagtattaagtctactaacctttttgcagagaatgaccataaagtgaatgagaatcgacatctactcagacgataaatcaatcggacgatgtcggtaaccagacttatgtgtgaataggccaagaactcagaattgacacgatgaattgggccaaaattcacaagtctgcggagtggagcaatagaggaggccaccagctgaaattgggctggattgggccagccccaggttcggccgaaccttccgtggcgccgatggatgcanggtttggatggaaggctgggattgatccccaacggcggttggagggtattaccaaccattccaaccgtcacaaccgtcattacct

SEQ ID NO: 69787 - DNA, 453 bp, Oryza sativa
  unsure (1)..(453): unsure at all n locations
tgtatcatttgtaagaaccagggacaatgcatagtttatgttttatccttattgcatggtatgattaagatttcctattccttatgatcaccagtttttctaagatatcaactactagaattacataaattcatccatcatccctgtactaggaatgtggaaaaggtcagatattgcaaattatgggctctaatgaatcatcacataccttagcaattttgcatgctcttcagaagctttggattcaaaaacatgctccttggtctcagcaaaaagtctgtgggcctgctcaatgagccgaacttgtggaccatggagaggagatcccttgcttgccattggattcctctccaattcccttgactctntcaataaaagaaaggcagcatcctgcaatntctctcgatagtttaggaagtaactcatgctacgggatataactaactgtagcat

SEQ ID NO: 69788 - DNA, 392 bp, Oryza sativa
aactgaactatagactacaaatatccctgtgtttgttatctatggaatgctcatcaccatttcgtgccaactggtgggtacacgtgtattgttaagcagtatcaaatcaagcgttggtcttgtgcagcctcacctgctacgcattttcaggcaaccgggttgacatgctcatgtgtgtctgtcaaatcaagcatgcttacggtgtcattaacaaactatcagtaccaacttgatttcccatgaatgagcctgcgggttgctgtcaaattttgattggtctacatttgacttctcgttgaaggtggcagcatggcagagttatactgttacaaatcatataatccctccgtttattaatagatgaaaagtgacccagatcttcccaccaatga

SEQ ID NO: 69789 - DNA, 184 bp, Oryza sativa
ccgaagacgcaagaacaaaaaaccattctaattctactccactagtactagaacaaagtaaataaactaaagagaattcttgattcttcttctcggctcgcgtagaagtggataaggtgaactccttatacaggctgccaatgatggctgtggcgcgcggaattggcagaaatgccccgcaacc

SEQ ID NO: 69790 - DNA, 412 bp, Oryza sativa
  unsure (1)..(412): unsure at all n locations
ataagcacaggcatctgtcttcaaaacaaagggaagactgaaattatgtaatgctagcaccggggtagaactcatggctagtttgagctgttgaaaagcttgttgagcagcatctgaccagaggaatgctttcttttttaataacactgtcaaaggtttggctataatgctgtaattcggaacaaatttgcgatagtaacctgtgaggcccagaaaacctctcaactcagttgcagtttgtggaacaggccaagctaacatcngctgcagtttggcaggatcagtactgacacctttagcagaaattatgtggcccanatactctaattgagcacaagcaaaagagcacttagacattttggcatataactgattctgtcgcaacaacatanacacttgtctcagatgatgt

SEQ ID NO: 69791 - DNA, 427 bp, Oryza sativa
ggatcaattgtacagatatataagatgtacgggcaaaaacagtttttatgtgcggaggtggcgcccgtctgcccggaagtgtcttcaaaaatcagggattctctgtgcgggtggcgcacccaaatgcggaaattggatttttgcgtgcgggtgcttatgtcgaccgtacgcgaaaataaaaatccgaaaaaaaattaaaatcacgaaaaaaaatagaaatcgcatattgccgttttccgatcgttactgcgctgctttaaataataaccgtcacctccaagaaacttcacaccgtcacttccgttttcaccgcctagaccatagctgtcttccacctctccggcgatcccctcggcgaagaaagcaatctcataagcaactcccgttccagcaaacttctgcctgcaacgatgtcgtcccccgctag

SEQ ID NO: 69792 - DNA, 403 bp, Oryza sativa
  unsure (1)..(403): unsure at all n locations
tcttccnctatcgacatccccgcccggaaggtcagctctgcttgtgcgaaaggcgcgagagcaccggcgggattcagcaaattcggccagaccctcgccggcgccggtggcggaagcttcttcgttggcagtcatgtcttcgtgccgccgcatgtcatcgttgatcaccggagggcccagagagagaaggcgatgatgatgctcgtcgtgccgaaagggagggcgaggaaaatggtgatgcgtgagtagtgctgaaaatttttgagggaaatgttcgtttcgctctgaacagtttttgagttcgttttgtttgaattgatgaattcacgtgggtgcaaccaagttagtgtaatggttgttctttccgtgatgcatgtatccattgtcaaatagtgactgaaca

SEQ ID NO: 69793 - DNA, 232 bp, Oryza sativa
acacaaactgagacgaatacacatcccatcaaaataaaccttcctggaatgaaagctgtctgggggggtgagatcacggagttggccacctctgtgaatctattagtaaccactttactaatgaatttaaaacagtcattcagcacacatatatgtctgaagtgtctaatgtcagaagggtcacttttcttgggaatcaaagatatcacaccaaagttcaatctctttagat

SEQ ID NO: 69794 - DNA, 318 bp, Oryza sativa
  unsure (1)..(318): unsure at all n locations
gttcctgctggaaataagaagctttggcggtttcagtatttgtttgctcagcgccaacttccaagaagtctgttaactaatcaattgcagtattctccagattgaagaaagtagtgaagcaagacagaagttttcaaatgcaaagtcaatttcatcttctcagttttttggagaccacgccagttntgaaaaggaggctcaagtttccctccaaaagttttcggtaagtatttttactgtgctatactgccattgctgtggtgtggtgttaccaaaattgatacttatcttgtaaaaaaaagaggatgccatagatgt

SEQ ID NO: 69795 - DNA, 341 bp, Oryza sativa
tgcaccaagataaggaaccttcaagaacaatgtagcatttatctcatactaactatgaaaacttcaatatggaaaaaaacagcaatacagcattgatcagttgcatacccatggcgtccatgctatgctatatatgaatgcctgcagcagcatgcacaagatgacatcaaattattcttgcagaaaattaacaaaaagcacttaacatgagtatgaaagcaagcaatgttagttcttacatgaacgcagccccccaaaagtgctataatcagtagcttctgctcacccaactttggtgctaggataggcatcataactagctgtaccataagtcataatct

SEQ ID NO: 69796 - DNA, 439 bp, Oryza sativa
  unsure (1)..(439): unsure at all n locations
tgtgacattggaaagagcanggataatattgcagtccacatcttatattttgaaagagagttcaaaaaagtaaaatgtggcccttttcactgatgacacgtccacgagctgaatatttctgtttggaatctcatctagatgcagggtaactaagtttggcatatctatcataagatgctcaaattctgggggggaaatgctctgtggtctctgtagagttaatgagcaaattcttcaatgtggtggaggaaaacatggtgacaatgatggcacagtttttcaactccagatcctctaagaccgggcaacaagaagagagcttcttgacaaaactgtcatctataatgaaatggcaaaggtgcaagatatacaagtagaccgaggtgaacggaaagggataaccatcaattgaaagaagattggtgcacaatgctccata

SEQ ID NO: 69797 - DNA, 239 bp, Oryza sativa
  unsure (1)..(239): unsure at all n locations
acgcatacggccttatctaaatattttgacttgcaatcataaacagtgaacatatccagcttcttctatttcgggttataaagatcatgctccattcagacatgagtggtctctcctaaattcaaatactatagcgaattcaaatatggcacanataggatacaagcataaccgcgcgaatttagacaatgttttgcttttatagatgacaatgagaagatgtggattctaattaacac

SEQ ID NO: 69798 - DNA, 477 bp, Oryza sativa
  unsure (1)..(477): unsure at all n locations
tatattgcttactattattacttggtactagtaagcatcaatagtttcatctgaattgctcggctccattccatatgtaatgcctatgttgatttagctttgggcttgttatactaagattggggattctggtatgtgttttttattctggnatgtgttattctggtatgtgttttttattcttatatttatactangactgagcacgcaaggcaatgaatgttagaaggtatattgcatgcttaatangtggatattggctcgctctcgtatgcatttggtaaacttgtctggttggcccttgttgattgattttaattgatttggaaatggactgcaatcttccgagttttacacgcggaagtttgtgcagagtactgaatagtgacgtgggtgctgccaataagtactataagcaaggcatacaagttccttaacaaatataatgatatattttagccattctgatcattttga

SEQ ID NO: 69799 - DNA, 164 bp, Oryza sativa
cataaatcggccgacagttccacacctacctaatttattgttagcatcggagggggttatacagggaacctgtaccgttaattttgtctctccaccacttgcaaatatacagatacggataagattagagaagagttagtagtagtacaccacctaaagctcgt

SEQ ID NO: 69800 - DNA, 464 bp, Oryza sativa
tgagctgaattataagaggctctattgtactatattgcatactaatatgaaggagagagtatagtacaggaagtcggaggaattccggagttatcgggaatcctcttcttgtttcttttactctgataagtattctgctttaattaaatatcattacgagtatttaaaatttattctatgagagttacctcttagttagttcctaatgaacgtacgggatcactgatcactataatccagtaatttatagtggttgctttagtgtttagctaacattaaagtagttattaaactgcgtagacgtagtgtctgggtagttaaatttccggtgttgctttgtatctcacagtaggtttgagggggtgtagaggtggtgacagccctcgaaacactaaagtcatccctgtccggtacgttgtagagtcatatctgggagccagactttacaggcaacgggtcgatgt

SEQ ID NO: 69801 - DNA, 460 bp, Oryza sativa
  unsure (1)..(460): unsure at all n locations
gctgcgatgcgaaacgaaaccctgtattggatggggggaacccaatcaaatcaattgaaggacgcggatgcgagatgctgtccttggcttgnggggtgggaatacgggattaattatgaggagtcggagagattgggaatggagagggggagctcgaggtggtgggtggtagccatggcgaaaaccctagcctaatttcctttcggattgccttcccctcttcctcttctttttttttcttttttctgttctcgcgaggcaagggataaagcgtctcgacgcagctgctgccagcgtctcttcttcttcttcccttatcttttttcttccttctttgccatttttgctttctttcctctagttaattttgtgtcgctccctcctcatgtttngcttctncttactccgactactagtactacacaattaaagaaaacacaatatattaattttttaacat

SEQ ID NO: 69802 - DNA, 263 bp, Oryza sativa
atgacacatcctaccttaaatcatcttgtaactactatatttgtgcaactagttgcgctatgcaagtagaattcattgcagcatggctgtagcaaaatattgccagaaagataatgcttcataacacacaaaatatatgaaggctatctatttatgaaaacacaggtaaagtgatgaacgtgagcgtgaaattgtgactggtgtcaacaacattcacgaggcggttgaatctcctgaagatgaacatgaagatagagaataag

SEQ ID NO: 69803 - DNA, 380 bp, Oryza sativa
gctgtcgaaaaccatcgaaagttgcaataaagtgattctctttcttgataaattggaggaattgaggatgctatgtgtcccagaattgaaattcaaattgcttgttaaggctcgtgttcaaaggttgctgaattggcaggaacaatattggaggcagagatttaaacaaaagctggttcttcttgggggagaaaataccaaattttttcatgctatggcaacagaaagtttcagaagaaatgctatttcttgtcttcaagattcacatggaaaccaaatttttgatcacgacgggaaagctgatattttctataatgtttctaatgaaagaatgggagtttctatgacaccttctatggtctttgatctcaatgagctga

SEQ ID NO: 69804 - DNA, 409 bp, Oryza sativa
  unsure (1)..(409): unsure at all n locations
acatggtgaaaaagttgtccgggaatgcaaactctgctacttgtatacacctccacgagaacctacttctcattcaacttcacatgttatggaggcttggaaaatacataccctgccagaagatgacaatccaaagctcctgttatgcgattatgctggaaatagttatgaatacaatgaagacaacaactcttataagcatgatagtgatgacaacggtgcaatctggaaagccactntagataaaccatgaaaatcgccaatccacgatgtagtaaaaaatttactaacatcaataatgacagctcataaacatgcatgttgaaggaggatagcaccagatggtccttttataaaatacataggtggcacaacttgtaatacaagcagtctatggaaagcactcgat

SEQ ID NO: 69805 - DNA, 482 bp, Oryza sativa
  unsure (1)..(482): unsure at all n locations
tctangggctccttggatgntttcacgcccgtcacgatgattactttctgcgaggtaagcaccgatttaactatggttgaacgccccgctaagttggaaaatcacatgaatgtttccttttagctctacattattatttttgtttaaatactttttgttcatttcgacatcccaatgcattattagtttaatagtttcgatactttcatctacagggatatgtgtgttgcataatgttaggatagaggtcgaaagttagatcaaatgcagtgttaaattgaaaggtgtatcagagagaacgtcatggtgccgaccctatacattgtgaatnttttaaagcatgtctcagcctaagagtagagagatagtacgcctgattctagcagagagaaaatgtgcttagtagagagagtatgtcacatacattgttgcacaatgttatagcatatatcacatacattgtcacatacattgtgtctact

SEQ ID NO: 69806 - DNA, 337 bp, Oryza sativa
  unsure (1)..(337): unsure at all n locations
cacggacacaaaaactcagcttgcacagtngcggcaggcgtcgtctcggccggcttgtttttgtcggggaacgccctgtgcgcctctgcgggcgccaccctcggcacgtgttctcgcccaccgtagctggacacctccccgcgccttgcgcggcttacggccgcctgtccgagaagatgactaccccttcctcccgtcaccctgagaggcctcacactgctcccgagtgagatggagcttcccgccgatggcgatgggccccgagagaggctgtggcttatcaccatcgacgaccttgaggcgacctaacgcctgctcgatcgacatcgtggagagg

SEQ ID NO: 69807 - DNA, 176 bp, Oryza sativa
tacatattaatcaaacccaacctacggggttgctccagaaaaaaaggcctattataacacagctagagacttaacagatatacttgctgaaaagtctaggacagacaagaacgcctagcaagcaggggacacactgcaccaggggaatgagatcaccttgaacagcccaactctct

SEQ ID NO: 69808 - DNA, 403 bp, Oryza sativa
  unsure (1)..(403): unsure at all n locations
atgtttcttagncttttcccggtcttgttgnttggtgtaaaccggatttgctagataggcaccgtactatcaagaggggtttatgaagcgagcttgtggatgatcttgtgccatattagttcatatgcatataggtgtatttggtgggcttgtctagccaagtgtggtgagttttcttaagtcctacacaaagagagatatgggcaaatcctataggtttgggtagcctcatgtggttatgtctggtagagtatcctttggagtgtgagccctttctccctaagacaagttgtgtttcttggatggattgttcatgggttggatagccctttgaagaatctttccataaagtccaagaacgctcaatttcgagagctgagtccagagatatcgtccgtttact

SEQ ID NO: 69809 - DNA, 190 bp, Oryza sativa
cccgggaggccaggggacaagctgtccttctcctcgcgaaacccttggctccactgcatcaacatacgcctcacagtcaccaacccatggctcggaacagaggacttgaaggaccaagcaagtcccatatgcctcgaggcaccgaaacggcagtggccacggcctaggatcatacaacaggtgttggtcg

SEQ ID NO: 69810 - DNA, 484 bp, Oryza sativa
tgtccacagaaaatctgacggtggcgaactttttgtttcatttacttactgctagaagagatggtcgccgatctttgtcaagcttctctctcccttcatcgcgtcaccggtgagcacagtgaaacctattttggatcttgtggaggaaaaatgaggaggctgggtgcacccttgcacacgcgggtgcaaccgggtgcacgcgcgcgtgggtgcagcacgttgcatctgtcgggcctggctgaggtgcgaagctcaaatagagcgtttccccgcagccagcctgaggaaccctttttgaacgagtggagccaggctgggaaggtcacccacgcaaccaaacaaagagagaatgcatccatatatgcgggccaagctgaatgcaagaaacgaaacacaccctaactgatcaggcgacgcaactgcctgcacgtggagctgcacacgcgtgggaccacaggattacatgcatgcagttcgtacagct

SEQ ID NO: 69811 - DNA, 438 bp, Oryza sativa
  unsure (1)..(438): unsure at all n locations
ntgagcaaagacattngatgcaattaaagcataccacanagtatgaatcctcctgagaatcaattgactctatgaacggtgccatctcccaccctgtgtaaataaaaatgccaaataacttacatgtgcatagcaaaacacatgaaaaatactatgcatatcatttgagtgatatatataatgaataaaagagcatcaaagaaatttacattgtaaaaaggataaggaaaatatggatttggagcaaaaagtgggtttgagtgtgtttgctcctcagctagacactacctgtttttctagctggtgtgtggtgctgccaagcaagtcccaaagaagctcangaaaggattcactcccttgttactctcgttgcatgggagctttggaagcacagatgtgattntgtgtttaacaggactactagtgttgatcttgttg

SEQ ID NO: 69812 - DNA, 262 bp, Oryza sativa
attttgcctcctgatctcggtctggatactcaatttggaccccctcaatccattggtatgaatgtttggcccatttggaggtgtttaattgggttcttgggtccaaaactccataagttcggatactagtttgaatctcatcctccttcatgtatatttcttctcaacttaggtagattgtcacctgcatacgaagatacaacagcactcgtggaaaatgtaagtacaaaccctaccactatgttggatggttcatatttat

SEQ ID NO: 69813 - DNA, 364 bp, Oryza sativa
  unsure (1)..(364): unsure at all n locations
tctagaatactagtactactttagtggaggctctggtgattggatatccgaggccgtcgatgacgtggagtgcgccacaagaagcagccgtggcatgggccccacctgtcggtgactgcgtgggtcccacctgtcggtgacgcgaaaagcccgcttataaatttacgacttcaccccccccgacctctctctccctccctttccctccatccgcaacggctaccanagccagagcccagaagccacgaacgaaatcccctttccgctcgaatccccccgccgcagcggcggatcggggaagccacggctccttctccggccggccgtcgcctcgcccggatcccctccgccggccggaagccac

SEQ ID NO: 69814 - DNA, 207 bp, Oryza sativa
  unsure (1)..(207): unsure at all n locations
tctaactccttaacaactatgacagacgcttagaaatgctactctagatttatgcatactcatatttatcaaatgctatgtgcttgggcaattacctttgggaaggtaattgagatgccgcatgtggagacatgagcgccacattgccataatattaatgacatgatntgtgaaaggaacaataaactaaacaaatgttttccactg

SEQ ID NO: 69815 - DNA, 283 bp, Oryza sativa
gtctcatgtactaactttagatgttatcaaggttattggaatagtacccggaataaatcggtagtgtaaaatcaagggcatgggggagccaaaaatgataaagaataccttttgaagaaatagaacacgtcaaaagtttcattggctctgctcagagcctcagacatcatagcaagcacagcatcaatcgtcaccgagaaaacaggtgaccaaatatttctaaagcacagccctctcatcatccacctccatctcatctccattgaactgcatggacttcacc

SEQ ID NO: 69816 - DNA, 239 bp, Oryza sativa
aaaacttacagcttgaagaacttcatatgcctcctgctctttcaacgctctcattaggaggacagctaagtgcaaatacattgcctcatcttgtcgtctagtcaaataagagtagctgtaacatcactaggttaagcctcgccttttccaaactcaaggaggactcatttagctgcttactgaacttggatagtttgtgcgaacttcatctcttgaaagctatgaggaaacaggctata

SEQ ID NO: 69817 - DNA, 389 bp, Oryza sativa
  unsure (1)..(389): unsure at all n locations
ctaagcttcccggtgtctcttacccgncgcaccctcgccttcgtcttttatcgtccgtagtgccctagcgccgtgtagcttcgcgccggcgtcttcgccggcgctacagccgtgcgccgncgacgttccagtcgtcgccgtcgctcgggaaggtcgtcatcgtggtcgccaagtcgccgccgtcctcgtacgccgcttcgccaccgtcgaagaccgtcggagcatcgtcgccgtcgtcaagccgaagaccgccgccgtttcaacctcgtcgccgtcgccgtccgttggtcttccgccgtcgctttggtcgccggtgagttcgccgtgccgtccgctacccgttggtgtcctccgttcgtgccggagcgccgccgttcgccggtgagctt

SEQ ID NO: 69818 - DNA, 214 bp, Oryza sativa
tcctcttctgaccatggaaggctcctgctgctgcttcgtctgcatgcatcagaattcagaaaaacgcaaacaaaaatcgatttcagtttcagatatgacacccaaagagcagcaacagcataatgtaaacccgatttgcagcaagtgaacgaccaactgcagacgcacaccatcatgagcaagaagcctctgtgccaacaccaacgcatggaga

SEQ ID NO: 69819 - DNA, 314 bp, Oryza sativa
ttgctacgaaagaatgctagttcgatgtactatctgagaaattgaactcgaaaaaagaaaaaagaaacaatgccgatagatgtgagatctctaattattgctgcagagatcattacgtctagacctctgtcctatcttatatagtttatgcccttaatgtcccacttaatgtaattaaatgtgactttgctaccatagtatacatcctccttccaactgctgtgtgagacgaagtgagaccgactctcccgtttagtttatgtagggggtgaactaacaagtatatgatatgagacacatggatttcagatttc

SEQ ID NO: 69820 - DNA, 460 bp, Oryza sativa
  unsure (1)..(460): unsure at all n locations
tattagcgtgcccaaactgttacgccattcatgctttttttctatcctgaatataagatggatgttggagtatttatttcagtatatctaatgatgcggcttgattttgaatattgtgcaggaaggacattggtcttgcagcacccatcatgtgcaggagcactgtgcaagggcggcacctgatatcagatgataatggtaggacaccctgcccatctcattntgctcacatatactgcctggtaagcagtgtatttgccttctagacttcccccgctgataattacttcctttttagggtatgtatgttcttccttatctatcgatccatggtctcggtgttgcccaagaacagggtcacgtttttcctgtcagtgagtttcttatcttttgttgctcacttcactttcagctctgcaccgcaataaatgggtacagttataaatntaacaatcttcat

SEQ ID NO: 69821 - DNA, 375 bp, Oryza sativa
  unsure (1)..(375): unsure at all n locations
tgagaagcgcgctgggaaactattttcttcacaaaaactatctnctgctgctgctcctctccccatcagctacgccgctcgccgccggccacccttcccccttccatggtacaccatgcttctggcggcggcaactgccacagcagcgccggtgtcgtctagctctagcttcttcgccgcgacgacaagagccaccaccaccacccgcttcactgcccagctccagctctcgctgccacgccggtgccgatcctggtggggcaatgggaaagcgcgccggagcagccgccgccgcagccaccattgctggtacgcgtcgacgatgctgccattgccggcgtttattgtagagttgagctcgagcatgagctagca

SEQ ID NO: 69822 - DNA, 182 bp, Oryza sativa
  unsure (1)..(182): unsure at all n locations
acaaaagagcagactcaataaaatagttgtctttaatagcggctactataataaacattaagaatccaaacgagcgggttgctttntgataaaaaaagtaaatgaaaaaaagaggggcatagaggagatgaacacgtgcgtcggagaaggcaagtaaacaccaaaccaccatgatgcttgac

SEQ ID NO: 69823 - DNA, 458 bp, Oryza sativa
  unsure (1)..(458): unsure at all n locations
tcacanactctgctactcactctcgggtgtgtgtgtgtctcttatcttggccatttccaacatttggtatcagagcgagtttagagaggggagatgatgacgccgccgaagactcttcgcatcgaggactcgagctctagcggcaccggttatggcagcacaccgcgtcaggccgtggtggagcgcgtcgtgcccaattccagcgtcgtggagctgccgatgctaaccagggctaactatcatcagtgggccttggttatgcgggtgagcttggaggcgctggtgttgtgagacgcggtggaggcggtcaccaacgaccgcgccaaggatcggcgggcgttggccgccatcttgcgtgcagtgccatcggagatgaaagccgggcttgccgtgaagacgtctgcgaaggaggcgtgggactcggtgaagaagatgtgagcctgcgacgatcgcgtgaa

SEQ ID NO: 69824 - DNA, 53 bp, Oryza sativa
catcaaccttctcaaaccttaaatattataaatactttaacattctttattat

SEQ ID NO: 69825 - DNA, 265 bp, Oryza sativa
ggttgacatagacttgctgctgtataaaaccatttagaaaagcacttttcacatccatttgatacaatttaaaaccttttgaagcagcaaaagccaacaaaagtctaattgcctcaattctagaaacaggagcaaaagtttcatcaaaatccaaaccctcaacttgagtaatacctctagcaacaagtctagctgtatgtctcacaatcaaaccatgctcattttgtttatttttgaaaacccaacttggtccaatgacattatg

SEQ ID NO: 69826 - DNA, 342 bp, Oryza sativa
  unsure (1)..(342): unsure at all n locations
tagcttatttgatttaacctcgatgaaagatgcgttggcaaggtacatattgtggtagagtcaatcaaacatatgcaaatatttaaataaatntggaatcgaacaccctatgaccaaatgaaaatactaaatttgaagcattttttatatgataggaaatggtataaacatagtgcactagctttcttttacctgcactgatcgattatcacatgatnctcgtccctcacacgaaagcatggggaaaataatgttcgcattgatattatggtgtctcttctcatacctatcgatggatatggaaatcatatttacaacatcatattatgtgactacgtaccc

SEQ ID NO: 69827 - DNA, 342 bp, Oryza sativa
  unsure (1)..(342): unsure at all n locations
actatagcttgcacatatactgaacccattcacgctggccatcggagatatatattctcatttctatgacagtgnctctatcattcgttcttgaagaaatcgcttccgaatgcgcaatcttgtgcgatctcaatccttggccacctgaagccatcttcaacctctcgatctcggcgaaatcgtcgagcaagctcatctcatatgctgctgctacctgcagcttcgcgagactgaactagatcatctccgagatcaacgcggatgcccacgactacgtctggccatgggcgtcgctcatctgcatgctctgctcggtcagctcgctgagctgccgctgcagca

SEQ ID NO: 69828 - DNA, 406 bp, Oryza sativa
  unsure (1)..(406): unsure at all n locations
agcttctatatcctgtttcaccagagaggtactccatgcagagtggctagccaacctagtcatggtacggaaagccaatgggaagtggagaatgtgagtcgattntaccgacctcaacaaggcgtgtcccaaggatcactttcctcttcctcgaatagaccaactggtggactcaacagccggttgcgagttgttgagctttctcgacgcttactccggttaccaccaaataagcatggcaaaagaggacgaggagaagacagcattcatcacgccgtttatggtattctgctacgttaagatgccattcggactaataaccgcaagaaacactctccagtgcacggtccaatgtgcacttatcgaccagcttcgaaacaatgtcatggctacatcgatgacattg

SEQ ID NO: 69829 - DNA, 349 bp, Oryza sativa
tgagctgaattataagaagctctattgtactatattgtatactataatatgaaaagagtagagtagaaggagtcggaagaattccggagttgtcggtaatcttctctcatttcctttattttgtttattactctgaattcaatatatattcttcctgagtaatttagatttacctcgtgagaattatctcttagttagttcctaaatagcatacgggatcattgttcactatagtccatccatttatagtgattgctttagtgtttgattggcactagagtagttattaattgcgtagacgccgagtctgggtaattaatctacagtggttgctgcgtatctcacaaca

SEQ ID NO: 69830 - DNA, 435 bp, Oryza sativa
  unsure (1)..(435): unsure at all n locations
atgctggttacatgatatggtctaaaatgaaaagatttgatatcacctagtccaatatacaaattaggtgataaatgtatgtccaaagtgcatatcgccactataacaaaaaccttatatagaggctctcttgaacagacaattttcaaaatgactctaagttttaaagctctatagtctagagatattttttagaggcactttcaaaatcgcctataaatattttactctagagacactttagagacattttcagcatatgttattaaatttatcttgtagagacatctnttcggcactctaaaatntgcctcatatgtaaagggattntcttaaggcattntaaacaatatatagatatttntccaaatattaatatatatcaagtaactagatataagtaacacanatcacatatctacatgtaattaaatg

SEQ ID NO: 69831 - DNA, 454 bp, Oryza sativa
  unsure (1)..(454): unsure at all n locations
tttacggaccttgatactcagcttctcntcttcgcctgagtgtgagctggatggtaatttggtccgggtatggctagagagaatgtgaatcggagcggggacgcggggagaaatttcgtgaagtttttgagggtgggttggagcagattgatgaaccctatcttcgtctgcgcggttctgtactgtatcacggagtggggaatgacgagagtctcggcggggaagacgaaacgacgtttggacttcggcgtttttatggtatcgggagtactaatgggcctgggcctgtatagtacttcagcccaattatgttttcagcgtggctcattgtgatccctatggacttatgcgctttttgtntggcaatatgtgctcacaatgattgcggccgatgctattaatatcctctttaacgcgatttaataattgctgtggaattattatgatgcacatg

SEQ ID NO: 69832 - DNA, 354 bp, Oryza sativa
  unsure (1)..(354): unsure at all n locations
cccgggatccgttgagtcacctgangcatgcaagcttgttctgtgtgatgttntccggcctnctcgcagttaggctgttctttcaacccttggtggtgttggcacacagatgtctgctcttattctgctaatgattntgctggcaatcatcggaatgctgtatattgggtatgcacatcatttatgatttaccctatatcactacaatttacaccgatttctataaaggcagcttctactaaatgccttatgcccctaagttttctccatcctgtcacttgtttactttgtcaagccatacagcatacaccacctccatgttaatatacacaactttgtaacgtagacaggact

SEQ ID NO: 69833 - DNA, 429 bp, Oryza sativa
  unsure (1)..(429): unsure at all n locations
actatggagcacaacatttctctgttgttcacagtatcgacaaaacattcaagtaatataatagattgcttctgacagacatttaagataatgtgtaattgcacattgtttgtaatgcacggctaaacagctaaaataacaaacagattgtttgctataggaaggagatatacacagtagcacagaatattcaacaaatattatatggagctgtttaaatgaccagatagtaccaatatgcatactgacacagtaccaaaatacatgttcatgcttactgacatggtgcatcagaaggatgttgggcttggcccacttggacaattgtgccatattctcatgtttgggccanaggggtattttgtcatttcagtatataaactgacaagtgattacatcctatcaacagtctactaccattcaacggac

SEQ ID NO: 69834 - DNA, 136 bp, Oryza sativa
catgtggaccccacatttcatcctatatgaccacggttgaccaagtacacagatactgtccacaggtcgactgaatctgaccccgtgtgtaaccgtagcgaggggccaacaaacggacttcactttacaccacact

SEQ ID NO: 69835 - DNA, 358 bp, Oryza sativa
  unsure (1)..(358): unsure at all n locations
tcaatggatggtgtctacggaggatacccgtanacctttatatagagtattggggtacgccggtgtaaggatctacgtatttcgacatccagcaatcaaaagacaataattatactggttcatgccccttgacaggtaatagccctaatccagttgatatgggattatatggtggaaaacacagattacaaaggaaaagacttaactcgggagattcgacgagatcgtagtcgagatgatccgactatctctcgtcgacttggctctttgtaggctctgacttcatatgctgtgttggttgtctatgctttgagattcgatgagctatggcctccgcggtgggtcccttttataccgt

SEQ ID NO: 69836 - DNA, 393 bp, Oryza sativa
  unsure (1)..(393): unsure at all n locations
agcttgtatttactatgcaactactattaaattggaacattctaatattattcaaaatatctggaagtttttttatcatcagtttggaaattaactttattccatttttcagacacatacacaagcagaaaagaagatcatggagtctaaaaaggagcttttgctgaaggatgttgctagggccaattcaatagaggtctcaattcttaaggacaggttgtataaacttgattctgaanagcctcgtccatatgggacaattcaagcggtgagtaattgagcacactcacattccttaagttgctatacattattttgtatatataatccatntcttaacaattatgcagcacatataataagatagtacgtgaatcccccacacccaaccct

SEQ ID NO: 69837 - DNA, 441 bp, Oryza sativa
  unsure (1)..(441): unsure at all n locations
gccgttgctctgatgggtatcgatcgagtagaccgtgtttgggagaagaattggttgtgccatctgtggntttgttgtttccttctccaatccagatctatgaagcctttggtgcaatggtattttggggctagaaatttacgggtgctgttggcttttgcccattgtgtcaatctaattcaaaataggttggttgactgttcatgccttgacattgcaagaactaacttcttttctctttgcaacttatgaagtaacttcatcttgctaaagggaaaacaacatctcccggagaacaattagtctgtacttgccatcgaattgctttgcctgttcagtccagaattgtaaagtgtagcatatgcgtcttttctaagtaattagctcatctgttcacaggtagtttccccaatttcatcatccgattggctgttaatattt

SEQ ID NO: 69838 - DNA, 340 bp, Oryza sativa
actgctctgctacagcacagacatggcagcctccccaaatattcatgtgagttcgagttccacatgtcggctccgggtgacaagtgggagcccgcggcatcaccaaccgatgagctcttctacaagggcaagctactggcgctccacctttcaccacgcatccagatggtcgagaagctcctcgagagtgcacctgagaatggcctcctctccgcgagcactgtcccatcaacgccataccagtcgtgcaatgcatcaccggcaaattcatgttatgtcagtggagagctcaatgctgagcattactttcacgagtgcacatcatctggtattggtgctg

SEQ ID NO: 69839 - DNA, 469 bp, Oryza sativa
  unsure (1)..(469): unsure at all n locations
agcttgtctttattcttgccaacatgacgatgtccttggcttggtgaccactaacccatggtgtcattcattatcctcatcgtagtgtgacctattccttttcacacctcaagggagaacattagtctcaacaaatcagttgtcatccttcacttgatgaccaaccggttgcatatgaaagatatggatatgtttgttgagtattcattaacatcacaagtgtcatatactcgtatgcaagctcaagtgcaaagatccgatataaataataggtgaacaatatggatctagaacatgcacaataaatgtataggatntgctccccctaaatatatgcatacatataaatatacaagagatgcaagtgtatgcacaattagagaatgaccaatgtgggtgtatcctatacatatagagaaggcatatgtagtaatgatgtagagcaacatataacatataccttcatgat

SEQ ID NO: 69840 - DNA, 432 bp, Oryza sativa
  unsure (1)..(432): unsure at all n locations
aaagtgggggtgaatcataacattgaatatgtcatgataaaattattacgtactggagttgaaaacagaagaatgtaatttactattactgttaagactaactctcattcacatacagccgaactgttgaagtagaccgtaaagtgcatcaattcttcatttgagtacgatttgagaattggcccaactttaaaacaacttaaatgaagatttgaggattaagtgaacttaaatgaagattgatgcacatgatatattgatgaactatccaatttgttttaaagttacttttgcgtgttgttaggtaaaaaaataaaagaactgttagagatattgtatntgtatccggttcggtttctctcaatcctatcccgattctgtttctatgagtcaggtatagagataaggatgtaaccgccctatatgtactcg

SEQ ID NO: 69841 - DNA, 184 bp, Oryza sativa
atttttctagcacttattgggttttgtgggggttccactggaacacatatttggtcgcatatacttagggtgagtgatgtgggtctgaattattaccgacgtgtttagactgcaaatttcgtagtgtttttttttaaatattggtttattgtttaaataatacacttttccgttattcaattat

SEQ ID NO: 69842 - DNA, 260 bp, Oryza sativa
ttcgaccaacatgtcgttcatgtggtctacttggtcgacccgtgtaactcgaatctacattgtgtgcctgaatggttaacgttaataggatgaccggacaatgtcgcgctacgtcgatgattacatccagctcgtccattggacatgcctagtaatacctctgtagtacgaggacgaccatgatgaaattcaatatgcgcgcgtataccatgacgattgactgtctttgaattcatgttcgtattatatgcatacatgtc

SEQ ID NO: 69843 - DNA, 161 bp, Oryza sativa
atcttgattattttgccttcacaccctcgagatgcacgagatgtggaatccttcttcgttggagcagcggagaatatgatgtccattacgatgcgattggccgatgaattgtctccgggcaaatagcacatattctctcatgagctacaggcctactcact

SEQ ID NO: 69844 - DNA, 309 bp, Oryza sativa
gtacattacacatgctacatgataagacagcattggttatctcttcaactgccgcacatttacaattccaagatatgatgcattacatgaactgatgtctgatggacactccacaattgtgaatgagaattgcaataccagtgtaccaccattgcatataacaagaatcacccttgcctgttcaggacttcgtaactttggagcataagataattgcgttacgtagttagttccccaagccaagttccctgtgctgttagttggcattctattgtcattgacaacagcgtgggaagaaatgactgtcat

SEQ ID NO: 69845 - DNA, 441 bp, Oryza sativa
  unsure (1)..(441): unsure at all n locations
caccactgtcaactnggctaacaacgcgtacaaggatgaaccattcgttctcgccaaacaagttgttcaagtgttctacatagttgacccgtgtaacaagaaactacatgttgttcgtgtaaggaaaaggagaattgttggattggacaatattgcagacgatgatgattacaaccagcacgtccatggcatatgtcaagaaatacctctagaagaggaggaggaagaagatgaagttcaatatgcacgtgtcgaccatgaggaaggattatttttgtaatttatgtacgtagtttatgtctacatgtctgttatctgtataataatgaagtgcaattactactgttagtgaaataaaataattaagtataaaaaaatatgtagtgtatggtgaaaatatgtaacgaaaataaaagaactaagtgaaataaaataaataaa

SEQ ID NO: 69846 - DNA, 443 bp, Oryza sativa
  unsure (1)..(443): unsure at all n locations
tcaatcttgaggtatgattacatgatgaagtagagcctgatcggaatcttgctaggatcgccgtctagtgatgttacgacttacgagcccgtacgttgatctagaaagtgtacacacggcacgcatggcctttcttgtccaggtggtgcacactactgtttgttcaccaacaagtcaacaacacgatgagtagagagagtttctcgcaccatcgcgatcactatctacgaagtactaccttcgttntagaaggtataaaatcattaacttttcaatcgttcgttttattaaaaactaatattatatttctttaataataaaataagtcgtaataaaataaataatatttatatagatgaatagttaaacgctatataanaataaatgatactatacatcttgaaatgganggaatatgtagcactatttgtttacagaattca

SEQ ID NO: 69847 - DNA, 375 bp, Oryza sativa
tcattgatgtacatacgatgacaaaattgcgatcatgaactgtatccttttgttcatcttaattgtacgctatgtgtttcgtcagcggatgaacttgcaacgaacgaagaagggtcgaagattgatggaggacagataccacctgtcccgacaaattttgcaaagtttgttggtcgatctgtgacgtctgggttggatgatgcatgcatggtttcagtgatagatcgtgcgttttctgcttggcaagacgagagtaaattcgggttggtggccaggcaagatccgccgcctcgatggcccatggctcttctccttcgtcggcgcggcgcgccctgtgatcgccaagtccatccgttccgactcatcgctggcgtc

SEQ ID NO: 69848 - DNA, 448 bp, Oryza sativa
  unsure (1)..(448): unsure at all n locations
agcttggagtcttttttttttattggaataagcttggacctttggtattatttgcaaatgaatgtggaacaaatacacatccatccatttaattcgccttctgtttgtcggaagagtcaatagagataaaagccatatgatttagtgcattttcatcttaaaagaaaatatgcatatgaagttaaattaagagttcttaacccattgatcattttctaagaaatgggatgctttttccccaaaaaggctatntgcagcataggtacgacaaatcaactataattttcacaaaantttagctggatacatgagaatttatatgtgtaagtgaagctggaaaacaaattcactgacaatttaattttttattcagattcttctcgaggaatcatactttcttaatatcaagttagacttggtattntagatagcatgatctaatatttct

SEQ ID NO: 69849 - DNA, 386 bp, Oryza sativa
caatagttgtcttaaatcttttcgtctcatatgattgagaacatgataattatccatgtacaacttgatcaagataatgatggcagatatccaaacactcaagtatcaaaaagtgattcaaccaaacaaaattatcattaccaccctcataatcccaaatagttccttatgtatttactccaaatgttttgaagtaaggcttgcttaacttctttgggttaaaaaattccatgcagctacttctataaatataaaatatttacaaaagaattacaaagaatacataatagagaagcaaaattacaatgattctacccaatcaagtactgtaattatttgggcaattgttctcgtgtactcttgtgcacaattatgaaattattctc

SEQ ID NO: 69850 - DNA, 296 bp, Oryza sativa
  unsure (1)..(296): unsure at all n locations
agcttncacattctttcccaactgcttgccaaagaccttgtacaccagcctggcgaaagttgctcctgcattccttaagccaaaaggcatcctgaggtgacaatatgtgccgaatggagtgatgaaagatgttttggggatgtcgagcgggttcatgtggatctggtggtaaccggaatatgcatctaggaaactcatgagctcgcatccagctgttgaatccacgagctggttgattcgcggcaaggggaagtcgtctttcggacacgctttgntcaagtctgtgaaatcgacac

SEQ ID NO: 69851 - DNA, 298 bp, Oryza sativa
  unsure (1)..(298): unsure at all n locations
agctntacagggcactacacaatatacttgtaaaaatcttttctaatatctcagtgatcctataatatctcatctcttattctaatttagaggcatacgtgcacactatgttacttttatactacctacaagatggcgccagggcatggcagcgtggtgatgcgcacagatgcccaatggtggcgggatgacttgtgcaagatggcggtggcagtgattgtgtgcccgttgtctatacaaacatgctggcggttcgtcagagcttggcgacgcgtgaagaacaggttctactcctctg

SEQ ID NO: 69852 - DNA, 359 bp, Oryza sativa
  unsure (1)..(359): unsure at all n locations
ctgtcgcgcggtacccctccccgatgtcgctggccaccttggctgttaatgtcaagaaaaaggattggaagttggtgaccgtcgctgtccacggaggggactaatgaagatggagtatgctgccggcggtggctgctgctgctacgtgatgtagcagctattaaaggagttggagcaagcaccactagtgccgccgtttgaggagatgatgacatanggggagctgcgccgaccgtggacgtcgatgtggtggtagtgctgctgctactgtcattgctcgagtcagtcttgctcggcctcatagcagtcgcctaccctcccctctccctaccaaagcatgccactaaatttggtcgtgc

SEQ ID NO: 69853 - DNA, 265 bp, Oryza sativa
cctaaaacttgttgtaaggaaaacacacatgcttcattgctcaacactggtcgcgactgtgacataaaacactaacgaacttattttacattctatacagtggaatgaaactcactctcataaaaacacccaatataactccacttttaagctggatagaacacaacttaatgatctgaaacccatttttatctgctgacttgctggactaagataataatgtttttttttgaccccaacctttatagattatctcacatagctg

SEQ ID NO: 69854 - DNA, 437 bp, Oryza sativa
ctaagtaagagtaaattaacaacaaatacttagtataatacgttaattgcctgctatgcttattaagactttatatacttgtcttacgtactgggttggtaacgttacgttcatcagtcacccatggccaacatcatcaggaacatggttttatctacaagtagtaatacaaattaataattccagatgcagggtcctatttgagtttgatttcttgctaccagctcgacggtaatgtcatccgtgatctcatcaaaacataaacatggagatgtacgacgtgatcaatagttacaatataatactccaccgtcttttgaaagatgacaagctgatgacaatgtcgtatattaaaaactatgaagataacccgcgcattcgcgcgggcatatattatagtttgtgtgtatacactgtcaacattccgaatataatca

SEQ ID NO: 69855 - DNA, 396 bp, Oryza sativa
  unsure (1)..(396): unsure at all n locations
agcttgatctgattcccnctctgaaacaagaagttctggaccgggaggtataagatcaatcacttggcgtccatccgatgcatcgactatggatatttcatatccccccttttctttacgcagtatttttcttactacacctgttgacgttgcattatagaccgtattgttactcttgctaccatcaggatagatctgtccccttcctcggtttccccccacatatatgggatattntaagaaatgaacgtctttcttcatagcagggtcggnggaaagaatgggaaagacgatttcactatatntcttaccgggaacagggcctatcacaagaantatttttttattgggacgataactctgaaaagagagatttcctatcttttctttcaactc

SEQ ID NO: 69856 - DNA, 398 bp, Oryza sativa
  unsure (1)..(398): unsure at all n locations
tgatcaaccattaacaagtaatcctaatgtgggagggtttggtcatggggatgcataaatagtgcttcatgatccattacgcgttcaaggccttttgttcttcttcgcatccgttattttggcacaagtttttttggttctcaaaaagaaacagtttgaaaaggttcaattgtacgaaatgaatttctatgtcccgggatttcttaccatcaagttggtaaaaagccgcgatttattggcgattgctagaattctctatgatcacatttggaaatcttttttttgtttagaactatttttgtttgcgagatgtcttgtctgcaattccttatttctatcatctcatgcanaacgaggagaatgcaatgcattggcgagaacaataaaaggaacaaatc

SEQ ID NO: 69857 - DNA, 407 bp, Oryza sativa
  unsure (1)..(407): unsure at all n locations
agctttaattatttgtctcgcaaattaatcgcaatttgtgtaattagttatatttttagcctatatttaatactttatgtaagtgttcacacgttcaatgtgacatggtgaaaaattttaaggtgggatctaaacaaggccatatagatgatataactggccgctgtgtatttctgcgaagtattaaagtataaatgtcacaactttatataactatgtaggagtaatatttagtcgtaaatttgattgattgaaattaataaggtacataatccaattagtgataaaatgattccggcagtctangaatattangtgatcataattaatctgaagtatcaaagcatgcaccatccaattagctaggttgaagaattcgtgatgatgatgtagccactagtgtgtgt

SEQ ID NO: 69858 - DNA, 334 bp, Oryza sativa
gcttaatgaccggccctgtccatgctactatcatacaaagctccagttaattaatttagtagtgccagttggccactatatgaacatatcatgaaatatgcactgagcgataatttaatgggcatggcaagattcatctttaagcccaccaaactgaaaatccgtaaatcattataaccaagataaaatggaataaacaaacatagtctactcaactgctgtagaacatttcacttgtgagactatattggacacagtcggatgtcagcctttgaattgatattgttgtacactgaagctaatgatgtgaagctcaacaccatcaacggaaagt

SEQ ID NO: 69859 - DNA, 417 bp, Oryza sativa
  unsure (1)..(417): unsure at all n locations
agctttccttgcacatttncaacaaaatgagaagaanaaaaacagacgctaagttcagcactcaatcatcgcgccggagaaaagcaatccgcgtggaaaatgtactgcgcgagagatcatttacatccatcttcgcgctgctcgaccgtctccctcaggaacttatcgcgcgggatgttgctgtcgctgaagtagaactccacctgcgacaaccaaaccaaatcaaaagctcaaacctcccccccaaaaataaatgctcaaacaaaatcgccaaaaggtggagaaatccgccgtgaacaaacaacaagaatgcgggatcggacacctggcggagaacgctcttcgccttggcctcgtcgatcgacagcgccgcggtggcggcggccatgaccccgatcgcgatcgagctggtgtgga

SEQ ID NO: 69860 - DNA, 389 bp, Oryza sativa
agctttcttatgcctcctgcacaccgaatggtacttgtagtatatacaccacctgcacgacgatcggattctgcatcacccttgaccccgactgagaacgtgtcggatatggacctaggaaagcccaaaccggccgtcctcctttcaccaccatcgccagccgagacagctgtcggcgccgaacgctccatccaccaccggacgccgtgccaccaccggatccgggtgcgccgccgccggatccgttcactccaccgccgccgtcgccaaccccgccgcccggcgcaatacaccactgccgccgtcgcccattgccgccccaccagatctggccggagcgatgcggatctggcggtttaccgccaccgcttcctatggagactcccctg

SEQ ID NO: 69861 - DNA, 397 bp, Oryza sativa
  unsure (1)..(397): unsure at all n locations
tatatgcacgggttgcagcatctgaacagcctagctgttcatatcaagtggttatgtgaataactcatagtggctgaatatcgccatttaattgcaagaagacattgcagaatgcttcaaataactggcatggcgttgacattgagattattttttacttcttttttaccgattatgccggaagactccaccttctgtttatagcccatatcaagaacatgtgtttcattaactgatatagttcagtttctagctagaggaattctcanaagtttgtgattccacatgtaccaaaatcttctttgacacacaaaanaatgtagagaaattagacaatatactgtcaacatagacttcgttctaaaaacgccatcgacaacttccttcttacataata

SEQ ID NO: 69862 - DNA, 317 bp, Oryza sativa
  unsure (1)..(317): unsure at all n locations
agcttgtatatgaagactcggctggcagtaaatggaactncaatccaaccacacgcctgcgctgtgcttctcttcccggcgctgtccatttctactaccaagctttgtaatgaagactcggcaacaaacggagcggcaggctcgccggagcagggtgaaatccgatctgcagatcaagcaacccaagggttgttccttttttggttttcaatctttccgagtacacatgagtggctcgggattgtgctgggcactggacatgtagcaaatgtgcatgaaccgcccgaagcggcggagccctggccgctagctgctct

SEQ ID NO: 69863 - DNA, 486 bp, Oryza sativa
  unsure (1)..(486): unsure at all n locations
ctgagctngcatataattctgcctgctcgttgatagataattataagtattcagaagctaaagagcagctggacttggcaaaaaggtgattcctcgctgatgaactgatatcttaaatgaataaattctttcagttgcttgaactgattccatttaatcctacttcccttctaatcttaagagcacggtagctgacagttcatatgtttttagtagcacgtcttttccattattctagaatcctgaatccttgtttatggataagttgcttggctatcaaaattatgcaagatcagtatattctctcgcaatactttaagagcatgcaactttgtgggttttagctcacttctgtgttcttcagaattgggaaagaagagcttatggtggacgaatatggagatgatgatatngaatatgaactagctcctgtgtctgctcagcttgcttatgtgcatcangtaattaaatctgggaatttctccc

SEQ ID NO: 69864 - DNA, 419 bp, Oryza sativa
  unsure (1)..(419): unsure at all n locations
gctcggtaccgagatcctcagagtcacctgctgcatgcattcttctgtttcattctgaaaaatattgcattgcactgtttccaagtatgccaaccacccaatatactatatcaaagagccttttctaccaaatttgagccctggcagctattatctgatggaagtccaaagattntttccacggaattggtccactttgctcataacttgtaagtttgcagcatttggcggcaatcaatgctcgtgatccaactttgctcactatnntgtcanggttgaatacaattgtaattgagccattagtgacttgatgtctcattnntgtaaaattatgaccggccatccctttcgtgtatgtgcctgtatggggctagatcatgattggatattctacatcttgttacagctatgtgatacac

SEQ ID NO: 69865 - DNA, 458 bp, Oryza sativa
  unsure (1)..(458): unsure at all n locations
tcctgacaacatggttgctnttcttcgcttcctctgttgtatcttcatcatcctgcccctgtaaattcaacaatgaaggatcaaatgatatgacagctcatagacaacctacggagtcaatctgttaacaggaataacaagtctgaacacagtttgataaatctaaaagagttgctcccagagttacaacaactaggaatgcaaaattggtgatgctaattcctattatcatgaataaaggattaccggcaagcaatgcattgcaaggttatagacaagatacttttccgtcaagcaaaatatataccttatgcataacatataatcctataaataagcaccggantttaccaagtgcatgctgcatgtagcatatttatgcatgacatgtaaaatgctactaaagagtagatacattctggtgttatacatgtgaacagaatacaatatatactact

SEQ ID NO: 69866 - DNA, 449 bp, Oryza sativa
  unsure (1)..(449): unsure at all n locations
tcacatatcttcgagatatccgcttgaagaataatatccgatatcctcatctatgcgcatacaatctattacctatgctaagaccaaattaaatgtccgatttatgctaattaatagtgccattagatagatcacaattcaatggaattactggaagtggaatggaggcaatcggatgaacggatcgagggatatgaattntggaagtttaaatgaatttttctggacaaagagatgaattgtcggaattttctggaatacgagaaatggtttatggaatttatagaaataatattctcaagaatattattgacatccactgacatacgggctcgaggggacgaattattggaatctccggattaagaggatgggtttatggaatttggaatataggaaatgatntattgaatttctagaaaagagaaatatgtgtggagtattgaaaa

SEQ ID NO: 69867 - DNA, 387 bp, Oryza sativa
  unsure (1)..(387): unsure at all n locations
agcttcatcatttgctcgaagttaagacccttaccctggaaggatgaataaagttgacatttaacaatcctgactgaaacttacacattggttcgaagtaagccatattttcctttatcaagaaaatattaagcaagtatatacaccgaaagatgaaagtaatgtcatatgaaaaatagcttatatttattcaacttgctttcaaaacagcggtattatcaaaatgcacaactatatctacatttcagcagacagaatagaactagtaatgagtttaacaatgcagcacagagcataagtaggcaagtttttacaaaagaaatatatatttagttaccttatgctagtttatatgaatntgaatatttccgggcattcattgtatga

SEQ ID NO: 69868 - DNA, 492 bp, Oryza sativa
  unsure (1)..(492): unsure at all n locations
tgcaatattctacccatatctccttgtacttctctgagcaccttgtttcttcccttcgttccctccatatcagcaaaatgaacaggtatgttgggtacaagtatgggatcaccgaactgcactaaaagggtttaagatttatggtttatgagaatcaaattgaataagagagttgtttccaaagatcatcatcacctggttccacatggtaagctaaatgaaagagctagcagtatatccccaagataattacagtgccttgcaattcccctgtattgcgtgaaaaggggatttcattatttcacattgtaaagagtatttaagaagcatgactattataaaggaagaaagggacatgcaaagctcatatagccaaacataactattcatgctttttntagaactacaaaattgctgataataccgattatgtacaccgtacactacccaaacttgtcgcactgtgataacatcatttacactatatctgac

SEQ ID NO: 69869 - DNA, 470 bp, Oryza sativa
  unsure (1)..(470): unsure at all n locations
agcttcctgattttcttttgctatggaacttgggttctctccaattgtgtttgcaattgcaagtatatatttggnttggttaatataactgttctataatcctaagcctactgctatgccatgaagcttggtttctctccaattgtgtttgcaattgcaagtatatatttgagttgtttaatataactgttctacaatcctaagcctactgctttgccatgaagcttagtttctccccaattgtgtttgcaatttcatgtgtataaatttnggttggttagtttaactgttctgcaaatcaatgatgaccaccagttttacctgattntgctgtgagcacccatttcagattcccagttatgcgagatgtactttctttgtgttgttatgcaatatcgctaatcatgataacanantaaaggactaaaccattctaattcggcattagattacgaactcacttctcatgt

SEQ ID NO: 69870 - DNA, 465 bp, Oryza sativa
  unsure (1)..(465): unsure at all n locations
tgttcctggtgctagctggtgatgctggctacagcctctttcgttgtctcgtgtctctcgtccacccgcttctccactatccctnttggatntagaaatcgccgtttcttgaccagctgaccgatgtctattgtttatatgcacgtgaattgttgccagaaataaccttagtaaagtttggcattatgttgttaccaaattttagtgattatggatgtatttgtttgtaggcttatcaaattttgatagagtttaaagtggatgtantttgaaaactactaaagtttaatatggtagcaacggtagtggaagccactcataagaacacatagacggagactatactcctctccaataacacgtagtggctntaatttacaagttgcccatatcaatttctattttagttcacgatattatctcaatttatatacactatgtccataatgttacattaaacactct

SEQ ID NO: 69871 - DNA, 273 bp, Oryza sativa
  unsure (1)..(273): unsure at all n locations
agcttatacaatatgtggtcaaagccgcgaccggtctgaccacgttccttcgncggtgatcgagtcgacgtggcttttctgacgccgtcgacgatcgatcgagcatgccatcgatctggtcgtccgtaattcatctactaaccgcttgcggctgcaggttcgcgcgcacgcacgcacgcgttgcatttgcctagtccttcgggttggtgtggcttctgaaaccgactcctcccccactcttctcccacgcaaatctgaaattgtgaagtgagc

SEQ ID NO: 69872 - DNA, 251 bp, Oryza sativa
  unsure (1)..(251): unsure at all n locations
gtcattcattatccatcatcacatctgtttcagagagaagtgtacaacaagattattntctgtgaagaaaatagttaccattcgtggaagcctagaatgcaatgttcataatatgattataccagaaggctaaaaaggaatattaagtgagaacttgttgactcatatttgacagactaaaaagaaaatgcatactttcagagcagacacctatgcatgaccaactattttatatataaaaaagaacatgc

SEQ ID NO: 69873 - DNA, 222 bp, Oryza sativa
agcttgccatttgtttgttgaattttattgcggatgaatgtaaaatatcggtaacttgtccaactatgttatgtcatcagatatcttctgacaactggtatcatcatcctgaaggttatccccacgaaggggaaggatgggcaatctacagtgattgggacaatgggtggtgcaatgacccttggatgcggaataaaagcaccctttatgatgagaaattct

SEQ ID NO: 69874 - DNA, 435 bp, Oryza sativa
attctgcccatctatggagagaatgaaactaaacgctctaccttcctgtctaatagatctggagaatgaagaactgcatagacaatatgctaactaaccactaccacttcaattgaatgacagacttcatctctccttaaagtcagatcacttaatgactttctgctcctgttttgaccctgtgaataatcagctgtgatgttctgagggaatatgtattcaatattatatctctgtcaattgaagaagttcgatttatccttaacatgattgcaaatattggtatatggatataattgtttcttgtttaacatgcacatcacattttgtttgtgctgctaaactcaacaagactggcttatgctaaatatagtgttggatatgaataaccatttcagaaatatctgagaagtcagcatgggcagtgatgggaac

SEQ ID NO: 69875 - DNA, 351 bp, Oryza sativa
  unsure (1)..(351): unsure at all n locations
agcttgatttatttgccttcaagccggcgagaggcacgagaggaggaatccttctcctttggagtantggagattttgatgtccaggaggttcgaatcggccgcttctcgatctccgcgcaaataacagatattcgctcatgagttacgttcctcctcactggtgtctacgggccaacaaggcaccacctcaaagattcgttcctccggcacattaggagattaaggcccagccctggggaaggatggctcatccttggagacttcaacatgatctaccgtgctatggacaaaaacaatagcaacctcaacctcgcacgcatgagacgttntcgcgcagtcattgatcgat

SEQ ID NO: 69876 - DNA, 487 bp, Oryza sativa
  unsure (1)..(487): unsure at all n locations
tagcttgtacctggagagacgtccagcgcttctcttggcgattgttctgtgtataaacgagaagcgtaggccaccatggtcaatgggaccaccggaccaattcctcctcagtgaaaccatgtgaagatctgacatctctgcatgaacaaaacggccgggttcaatatgcctacattacatgggcatgccccatatgggcacggcctttgtgtcctgagacattggcacgttacgctgcgtacctttgtgatcccagtagtccacatagctgtgccagaatgaatagtgtcctgggaacagtaaaattgcaacatgaagaataagagcagctcgcatattccttagcatacagatgtgccaatgttgtacatcaaatgatttactgctgggataatggatatggtgggaagcggctttccacataaagggcaaanggacgatttggagctcataaatacacagatagcttctgcagtcctgctggtac

SEQ ID NO: 69877 - DNA, 386 bp, Oryza sativa
  unsure (1)..(386): unsure at all n locations
agcttgctgggtttttcttgacgtacaagccgaaatccgtgcctgcagagagcacggaattcaccgtacttctccaacccatgatgtctattgtcctatccacaagacgaggaatcacgatctttcaagctgcaaggttcttcgcagcgccatgcggatgccacctcctaatgtccagcagtcacaaatctctcctatagatgcggacaaggaacgaggagcggcaaccatctcagatcgattcgttggggtaatcgatgtcgatccccacgaaccatctgttctacatttgctcgaagaccangcctcgtcgtcgacaagtacaccacatgacgtgtatgctatcgatgggactagcacgtctaggggtggcaacacggaaacgg

SEQ ID NO: 69878 - DNA, 296 bp, Oryza sativa
  unsure (1)..(296): unsure at all n locations
ctcggaattggaccgttctagtctctnaattttccttaagaagccaagaacccatttttgtgctttgtttctgcttgttatatggagtttagtagagtaaaagccgtttcttttccgttggtcgtgtatacgctgcagcttcggaagatccgcttttcgtggaagttgaagccggcgtttgggaaagcgagaaaggcaagtcacatcatctttgaacatattgaatcccagtttgtaaaattatgttgatttaacttattgcattatcgctntatttaaattcccgcgttatcact

SEQ ID NO: 69879 - DNA, 471 bp, Oryza sativa
  unsure (1)..(471): unsure at all n locations
agcttatgttgatattacctcgttaaaaactttggatgagaaaacctaaagggtaaaactcatacaaaggaaaaagagtataatatgacaaaaataggttattttctagagaaagatactccccctgaatcctgcaaatttttaagtcatctcataccaattccttcgacacatttaaagaatgtggagtatggtagagattntgtgaataaatcagcaagattatcacatgacttattttgcaagatgtttatctctccatgttgctgaagctcatgaggataaaataatttaggagcaatatgcttagtgatgttgctcttaatataaccagtttccatctgaataacacaagcggcattatcttcatagataatggtaggtgattccaatgaaccaataccacaagatgttagtatgtggttaaccattctgcgaagcatacacattcacgtgatgcctcatataatg

SEQ ID NO: 69880 - DNA, 258 bp, Oryza sativa
gctggtgtctttccacttaactggttggtggacaattttctgtttctaacctgcttagattgccaatgctatctggtatggagccagagattctgttcctttcaagaaatatgcgttgtatactccaaagcgtgccaatctgtgttggcaaatggcctaaaatgtgattgttagagacatcattcaacccgtgatttcccatcgtatccattgattctggaattgccccaatgagttggttgtaaccaagaactatca

SEQ ID NO: 69881 - DNA, 361 bp, Oryza sativa
  unsure (1)..(361): unsure at all n locations
tcagcttgtttttcttaccatcctgaagcagatcatagagcaactggatgcaccatcatcaccaaacagctcataaatcacgatgntgggggacgacctggagctgttggctcgcaacatatcagaacgcctcaaggataagagggtaacaacatttactgcttgcttaattcagctgctataattatatagcactacttatttacgacttctcttacagtacagcatcagagctcgaattctgttaatattttctcttcgtattctccctccagatacttcgctgtgatcgataatatattcaacgaatcagatttggaattgatcaatggtgcatctcctaataataactgtggtagca

SEQ ID NO: 69882 - DNA, 361 bp, Oryza sativa
  unsure (1)..(361): unsure at all n locations
ttagcatggcaatctgatactatcaaaatataggatatgatttctatgatgtagatgatagcgcacaatatggagttccatgacaacaagcagaggctcaaactgaagcctatatgcatcagatccacttagatttggtgagaatgtataagaaagcagaggagtttcctcagctgcttgatgatgaaatggatcaagatgacttgctgctgctgacacatgctgctgcaagtctgcaactagctcaatggctgctgcttcttaatgatttgctgcttgaagacgaccaaagcanggctgctgctgttggtttgcttgacgaatactgcgagtggtgatgaaaggacgataccattgattg

SEQ ID NO: 69883 - DNA, 257 bp, Oryza sativa
  unsure (1)..(257): unsure at all n locations
agctttattttattcgtccggcatacgctggcccgacgagatgcaattaatatttggtcaatctatcaagtangcgacatatgactactgctcctacctaaagtcggaagctaacagcttcctttgtaaggaataaggaagacaaatattgtagctaactagtaaacaacggtttgggaaggactggattttgcctaattagagagaaatcctacctaatcaaacaagcttgtctgcaattatgggtgatttgcata

SEQ ID NO: 69884 - DNA, 168 bp, Oryza sativa
ctcctatctctcacccaaaaatattttattcactgcaagagtagtacttgagcatggtaagcgatgggaacagcagttgatcaactacaagcagcgccatggatctgcggcgagatctgacagctgaatcgagagagtggagggggcagtactagtcttacctcggca

SEQ ID NO: 69885 - DNA, 470 bp, Oryza sativa
  unsure (1)..(470): unsure at all n locations
agcttgccctcatcgcatcacgccatcgtccacttgtatttgattttcatttctattccccaccaagatttgaggtgtttgttttgtgtgatgccctgcctacaaggtgttcgttgtttttcctacaagcatggtgatgtggcgatcttaaagctatcagttacgcctgcatgacctgtaatgtaagcccgaatgatttgttaggatctagatttggatcctactttccacttaatttctctaaacatttgaaactaccttaatattagcagttagatcgatattcataatacaagggaagagttaaaattgctaatgaaatgcatcattgaaaatattcatttgtagntagntctatagatgtatgcatttcatatataatgantgctgacaactgctttnttggctagaatatttatgtgactatctacnnctcatagctaagaacttctcgaattgcatcagtcgtc

SEQ ID NO: 69886 - DNA, 473 bp, Oryza sativa
accgcaccgggcagagctccccgtatggcgcaccgtcttttcttcttcctcggcggcaggcatggatcggtgggcggcgcggccagcgcatatccgggaggacgacggcatcgccatcggcatcggcgcttctcccctccctcccccttcttcacctcttctcttgtgggcctagaagctgcgattctaacgaagaacgagccaatacctcccctttctccacctcttctcttgtgggcccaaaagcccccgttcttgcgaggctccgagctatgcctatgtgaaggggaatgacacctatgtgcagtgtgaatggccttagcctatgttctttgctcggtgttcccaaccctctctcttgtattctgcgcgcacgctttcaaactggctaacggtgtgtttattctgtaaaagttctatacaaagtggttaaaaacatattgaccttgttaaaaaactatattaataatcca

SEQ ID NO: 69887 - DNA, 454 bp, Oryza sativa
  unsure (1)..(454): unsure at all n locations
actgcttgtatgattcttgcaacatgaatagcatgatgatatgtgatcagcctctnttcagttctcctgtagtcctgttgagctcgacattgttgtcatcagtcccaacttctctgtacttnttttttttgctttactgctggcattaagctaccatagtcctgctctgtcatatctgtgtacaataaacttatctgcgggccaacattgctatcttcttaatgtgctgtcattttctggatgctgttctacattggaagctttctgttgttgtgatcacctgtgaaacttatcagatgcttgttactgtacttgctaagctggaaggttctggtaacagctgttctttggctgctgtgtctatctgtcattntttgctggaccaaatgttgcattgttactggcattttgcaagattgggtttgggtgtgatatgagtgggaaatggaacgtg

SEQ ID NO: 69888 - DNA, 457 bp, Oryza sativa
  unsure (1)..(457): unsure at all n locations
agcttgttttattatacaaccctcaccgagaactagactctaaaataaataacttttgatatggttcctattggcacctttgttagggaggccaaattccttctttgctgtaactttatcgagtttgctgtaactaactgttcttatgggtgtaacttaagccttntgttgttcagcttaagattattgaaatctagattattaaatcagatntctctaaactagattatattaagctgacataaaataagctacgagttgtttgtttctctggattattagaggcatctaatggtagtgggtctttagacactcaataatctggaaaaagactctctagaggagattatntgattatagtaatctggcttatagattggtataatctagcataataatctactttgttgtttcagcttacttctaataatctagattataaataatctaagctgat

SEQ ID NO: 69889 - DNA, 404 bp, Oryza sativa
atttaccgactgcgcgatcattgtgactcacaatcgctaactattgaagcgaactggctattacagacgatacatcccacatacctgggtggccatggtcgcacacatggagtccagattcaactttcgcgttgtatagctcaattaatcagaaaaaagaaaaaaaactatgattcaaaagcatcgtgcatgggagaaaggggccagagaaatttcgtatcaccacgcactcacagcgatgggggtaccatggataatcaccctcgacagctctactgtggtgactaacatagccgagaagccaatcaggaagatttggaatttaaagcaaaataaggcccatgtgatacacacacgtactacatatttgacaattgaatactaagtgtgttgtaggcgttgtc

SEQ ID NO: 69890 - DNA, 317 bp, Oryza sativa
agcttggttgttatttctcttatcctcttggcctcttggcgagcaaaatatatctaatcttagccggttagtgataaaatcctttcaaaagtagtagatgtgaatcctcaatcaagaaaaagtaacgaaaattaacccaaaatcaaggcaaatcgatcgatttgtatgcaacgcaaaaacagatactccgctctaagtagtaggagaatcttctagtatagggcgtggagctagcatggaacaattcgaagaaattaatcaagaaaccggaaactaaccaattatgtaattaacaacaaaatccatcacaagaagag

SEQ ID NO: 69891 - DNA, 398 bp, Oryza sativa
tactaagcttctcgggttttggtctctgcccgatgcatcgatgccaaccccgtttatattctatctatatatcggatgcgcccgcccatcatacttatggatgtgcaatgcgtcaccggttgcatggccgccctaagtcggttcatatcgagactgggagagaaggcgctacccttgtttaatctcctcatacgctccgggccgtttacttggacggaggaagctgaacgtgctctcactcagttgaaggcgtatctcatctctcccccagttctggtcgccccggatccaaatgaacccttgctactctacttatcggcgaccccgcaagtggttattgcggcgttggttgtggagcgcgatgatgacaatcctcattccgcgcacccccaccctgt

SEQ ID NO: 69892 - DNA, 359 bp, Oryza sativa
  unsure (1)..(359): unsure at all n locations
agctttagaaataggaaattctttcggtcagattgcgtgagcttctgttcacaaaataaattcagaacagagactataatttcatagtaaaatcattctgttaaaataaagggacttctctaccctgtcccagtctttnttttgcgaaagaaaggtgcaagagatcttctacttcgataaataaaatatacaagagcaggctatacaatggattccctaacaaaatttcttattgagtactaactctatttattcgaaaatcctattttatcacaacctagttcattagcctctagttaaaaacgacagaatacagttgttgatagtgtaaatatgtttcttttttttttttaccttct

SEQ ID NO: 69893 - DNA, 369 bp, Oryza sativa
cttatcaaatgagtgattgtactgtggtttatttgttattaagttaggcattcgtagcattaaggtcttggttatatagaatgtgcaagtctgaagttgttatggaacatatctgaacatgtagaatcagtgttgttttataacattgcagatcatttgagagcattcacgttaatatggcagacaatttctgcctgctttcattccttctctttctgaatatgcagatcatttcaatccaaaccatttatatgcatatactagagccaaccttcttcatttccatgtatttggataggcatatggaaacgtatttgtactggagcatataattaccttcctgcaaaccatgtgactatcacataattt

SEQ ID NO: 69894 - DNA, 431 bp, Oryza sativa
  unsure (1)..(431): unsure at all n locations
agcttatggtgactacgttcagatggttttggtcccatgtcaaaattcctactgagctgccgggaatctacaacacaagccacatatctcagccagtccgaatctgattttgaagttagggctttgtaattgtgtcgtgggcttatcccaagggggtgtgcgacctatggcaaccctatgacgtccctaatcatattaattcagtagccgtcatcgtttagagttgggttttgcttagattaatctgtcaagaacagtttcgccgctagatcggtttgtggaaccccaaattcgtgtgcttaatcattcatatgtaatttggttgcaatctatcttgttcttgcttgtgttcttcgattcgcatgcanggattagccttcgcggcgaggtcaaccaggtttcggcatagttgataaccagaggagacgtag

SEQ ID NO: 69895 - DNA, 406 bp, Oryza sativa
  unsure (1)..(406): unsure at all n locations
ttatccgactttgtcgccaagtggaccgagtgccaagaagacatgcccgaggagaagatggagtattggaccatgcattntgatgggtcgaagatgctttcatgcactggagctggggttgttttgatctccctgactggagaaagattgagctacgtattgtggatacatttttctgcgtcccataatgtggcagagtatgaggcgctgcttcatggattaaggatcgcgatctctttgggcattcggcgtctgatcgtccgtggaattctcagttggttgttaatcaagtcatgaaagagtggtcctgccttgatgataatatgactgcttatcggcagaaggtacgcatattggaagacaaattcgatggacttgagctcactcatgttcttcagcacaacaa

SEQ ID NO: 69896 - DNA, 378 bp, Oryza sativa
  unsure (1)..(378): unsure at all n locations
agcttgcctctttgtacaccgaacacgcacttaggggggttcaggtttatgcgggcggagcggacgatctcaaaagtttccgctagatctgaaagtaacgtttcctggttgcgcgtctntacaaccaagtcatcgacataagcctctgcattacgtcctaattggctacccaaagaaattcgagtaatacgttgaatagtatgacctgcattccttaacccgaagggcattgtcgtataacaatatattcctatggtggtaatgaacgtagtgttttcctcatgctccctagccatgcgaatctgatggtaaccagagtatgcgtctagaatacacagaatgtcgcaccctgctgtggagtcgacgatctgatctatg

SEQ ID NO: 69897 - DNA, 363 bp, Oryza sativa
tgccgcacacctctcttctgggatctttttgcgaacgtcaactgttcggaacagaagtattatcggaagcagaagataaagtcagaatcatcatggaaaggttgaggattgctcattctctacagaagagttacgctgattaccgtctaatggagctcatttttgagacaagagattacgtgtatcttcgtgtcactccgctccggggagtacaccgttttcagactaaatgcatgttggcaccacgcttcgtgggaccatacaaaatcttggaacgaatgggataagttgcttatcagctagaacttccatccaatatgatcggcatacatgacgtgtttcatgtgtaccaatttaagaagt

SEQ ID NO: 69898 - DNA, 333 bp, Oryza sativa
agcttgcttgtccctgaggtaaactccatgccatctgtctatccttttctacttcaaaacattcagcccttcatatctggcaccataagtcaacagcaacgcttgcaatctggatcatcatcccatgttgaatcttttggcccaccatatgtcccaagggaacaacctgaaccaataagtggtacaaaaagtgtgcaagttccagctggtcgctctggggtcgttaatgaaagggtttacacatgcaggcactgtcctaatgccacatttagtacaccacaagcatatggtggtcacatgagtgcccatagcataaaggacaagaaaaacatg

SEQ ID NO: 69899 - DNA, 380 bp, Oryza sativa
tctgatggtcggcacatcataacggaagtggaagaagatggacgtcctattgccccggccgaagccaccaagaactatgtacgtcacatcggttgggttgtgcgggataacgtgcctgtcagtactgtgtactggcgaagaacatgggcacgcggagatcatgatagctttgtcccagattcggagaaagagatgctgtggaccacaatgctcgagacattcacccttcctgcgggtacagatgacaaagtgaaaaggtggactctgaagaaaatggcagaacagtttcagagcttcaagggagatctgtaccagaagtatatactgaatgggcagacaccgtacttcgacacattcccaaagcttatggatcactggga

SEQ ID NO: 69900 - DNA, 406 bp, Oryza sativa
  unsure (1)..(406): unsure at all n locations
tttacattnttcaaattntaaactcatggnggtcatcaagcagtatcaagccaatatgcaaaaaggcccctatgatttcatgaaatcaacccgcagtcctatgtccatatgtcattgattgggaacattacgtaatgaaccttatagttatttaaattctcaaaatgaagtccctgacacctttttcacacgcacagaggcagagcagccatggctgagctcgatccatggttcaccggcggcgattggtggctcggttggagttggggttaaaagataaaatgaagagcatgttcttgcgattccattcctctagttttcttggttatgggacattggagtagcgccgatggcgagtgtgatcggcggtggttctttgggtgatagcgcatgtgtggatggaagt

SEQ ID NO: 69901 - DNA, 315 bp, Oryza sativa
ccgctcccggaggagttcggatccgcaccacgcctcgcaagtcaacgaatgctcccgtgcgcattcatcttgcgcccatgaacccaccttcttccagagatgcttcatcaccttccgcagtttccgcatcgcccgtagcttcagcttcagccccaactcctgttccaagcgtagctcccacgttcgctctatccttgcgctccgcgtcattcgtcaatggtgcagccagtggcaaccgagttcgtgtgttaaggtttgtcgcttgtgggtcagtcgacgggtgacatcatgtgcctatgatgtggctggcttaat

SEQ ID NO: 69902 - DNA, 481 bp, Oryza sativa
  unsure (1)..(481): unsure at all n locations
tcataagtcaaatntcgtatagatgaaacggcgtctgcggagtatatcggcgatgtgggcagcggcgacggtcggcagcagctacagaggagatcggcaaggcgggtgttgctggcttctgtggtcctcgaggtggatcggtggtcttcggcttcagcggttgtcgttaggggcgatgcggcgactgcgtcatcgtccctgattgacacaatttattttcttatcccaaacatctatgcattatgtaccaagcaaaaaagaaagatagtatgtcagcagatcagagaaccatagttgttacccactgaattcctgaaacaaataagtaaaatgtacagaaattaaatcatcaagttttctcacaatctaattccaactgatgatatatcatcatgcaactaccatctgatcatgattagcagcaacatatgtatgtgcacatgataagagtacaaaaccacatatggtcaaatgatccgcg

SEQ ID NO: 69903 - DNA, 468 bp, Oryza sativa
  unsure (1)..(468): unsure at all n locations
agcttctattattcatatctaattcattagaactccaaattgggccattcaacttgcacaattcatctaaaattgagctctacatgtttgtttactttttatatactattttcttggtttttattagagtttttcctcgttttgcatgccagcgtgtagtttccatcgtttcggaagctcgcggtcgtgaggaaaagtgttcaaaatatccaagtgaagaaggaaggcaagtcacacattccccttgagcatgttgatcctaatttagaaatgttttctcgtttgcaaataaatatgcatgttttgcanattacatgggatccggatattacctatctgctcgcttgtgccatgtttacttgatatctgttctttgtcaaccttgggtaataaatcgactagctggtgtgactatgttaaccttgctagaactatntgcttagccatgcttaattaccactagttcag

SEQ ID NO: 69904 - DNA, 436 bp, Oryza sativa
  unsure (1)..(436): unsure at all n locations
tgttcgacatggcatgtggctgcgcccaagatgaagtggtctgttcagaagatcgaattctcagatgcagaccaccccaatgctgctgtcactccatggcgatacccaatcgtggtagaacccactattcggaacatcaatgtcgcacgggtcctcatcgatggcggtagctccattaacctactcttcgccatcaccttggacgcgatggggatcccacgaagcgagttgacacctactgatcaacctttccatggaattactcctcatccatcgtccaagccattgggcaagattacgctacctgtgactntcggccaatcaaacaactttcgaacagagtagatcacacttgatgtcgctgagttngacacagcatataatgccatcatcgggagaattgcactcgcgaagtcatggctgcatctactatgcg

SEQ ID NO: 69905 - DNA, 385 bp, Oryza sativa
agcttcttttattcatatctaattcattagaactccaaattgggccattcaacttgcacaattcatctaaaattgagctctacatgtgtggttactttttatatactattttcttggcttttattagagattttcctcgctttgcatgccaccgtgtagtttccatcgattcggaaactcgcggtcgtgaggaaaagtgttcaaaatatccaagtgaagaaggaatgcaagtcacacattccccttgagcatgttgatcctaatttagaaatggtttctcgcttgcaaataaatatgcatgttttgcaaattacatgggatccggatattacctatctgctcgctcgtccatgtttacttgatatcttgtctttgcaaccttggg

SEQ ID NO: 69906 - DNA, 452 bp, Oryza sativa
  unsure (1)..(452): unsure at all n locations
agcttactttaagcaacagcaacattttgttacgtgctatttggcatatctaaaggttgatcatgttatgaaaactaaaatgatgcgggatagaactgcagtgatgcgaaagcatgattaggatatacctgagaattttggatcggacagatagcattttgcaagaactatgtgagctcgagcgcgcagctcaagtccaccatgaccaatgatcattggaaggctntggcaaacaagactcaaggccctctttgcatgggttgatccaagagccagccataattcagtaagagttagtgtagccgaggcttcaagcagatctaagttaaatgatttgcagaatgattgactagctaatgcgtaaggaagcccaatgactgcattgtcagaattctgtgcaaaaataagaaaagtattagtttgcttgtgggcgttgcaacataattagatgc

SEQ ID NO: 69907 - DNA, 460 bp, Oryza sativa
gtcactaatgccgctgctccacttattcaggccatgttcttcaatatcgccggttcgagtacacttgatgctgtcgaaatctttgacaaactgagagtcgctctagatacttacttcaagaacatcaaagaagctggaagtatgggagcaagtctggcgttggcgatgaccaaatccctttatccaagagttgacattgatgccattgatggctttgcagacgggacgagcgaagaagttgctcttgacctcatcagtgatgcgcataaagcggctgacaagatcgctgctgatgtatttgagagattccaagatgtcgaccttcggccgactgggtctgataagtctgatgatgaaaaaactgatacttgatgatataacaactgatttgatgatcaatgaccgtggatgctcaatttgacaatactgatgaatttatgctatgcttggtggtccatac

SEQ ID NO: 69908 - DNA, 334 bp, Oryza sativa
tctactgatataaacaactgtgggtatatctgatcaccaagtgggctaaatcctcatctattcaagaataataatagcgggttcttaaaatctcttgctaagcagacatcaccaccttcttatctcatccacatgaagtcattttagcttctctattgttccaaattaatccatgtctagaatcattatttcgaatgtaatattactacattacttattacatgagaatgattagtgtaaacatgacttcagattagtgaatatcgtgtttcgtctacaatacgtaactcatacgtcatctcctgagataacataatacgtctccatatcccac

SEQ ID NO: 69909 - DNA, 394 bp, Oryza sativa
  unsure (1)..(394): unsure at all n locations
agcttggtgtggtttttgaagccactgcgaagaagaaagctccggtcgtctttgctgcctctcctcctccatcccattgggaagttaaaaccctcgctctcacctcatctgcagtgcagtgtgcaggacagtactacctccgtcccaaaataagtgcagccgtggatatctgagcccaacgtttgaccgtccgtcttatttaaaanaattgtgaaaaatttaaaaataattagtcacacataaagtactattcatgttttatcatctaatagcaataaaaatactaatcataaaaatttttcaaataaaataaacggtcaaacgttaaacgtaaataatataaaactacacttantttgagacgganggatgtatagcgtacagattcttccgg

SEQ ID NO: 69910 - DNA, 391 bp, Oryza sativa
  unsure (1)..(391): unsure at all n locations
caacaatctaagtgcgtgctttccacaaccagagcgagacatgtcttatctcggtcggagtgagaagtaacaaatttatgtatcataatctttcaaatctggtttttccaaaccaaaccatcttttccaaacttcccgataatagtggtccccaaatgaccaatcacttacatggactccctgtcccgctgtctcccggacagctaattgtcttccaagcattatgtttccctaaccttaacaccttttcataatacatggtaaaacaaatactacgctaatgaatcacctcacatccagccatgaccgtgggcacgactgttcgaacatgttgttaacctctgcagaaggggtacactntacccacacgacattactaacccgaatcact

SEQ ID NO: 69911 - DNA, 404 bp, Oryza sativa
  unsure (1)..(404): unsure at all n locations
agcttcaacttgctccaatagtacaactgcacccacagatagttaggctgtcattcatagctaattaaattaactaggtaaccttgatgttgttctacgagaattaccgcggatgctatactttgatttctgcaaatctttttcgattgttatacttctattattcactggatttgatcctttaactangccacgcatatataaactgatgtactctacttttggctttcattgcgttcagtagtccatttggtctatacttcaatttagacattgcttatttacatgggtcagcactatctttntaaaaaaaatgtatcgaatatataatgtaatcgaagtacatttcagttngattccatgatagattcatctntacatcccatcttgtattaactgtcact

SEQ ID NO: 69912 - DNA, 219 bp, Oryza sativa
tcgtcgctgtcggttagctactccccaatctccgcacgtggtcaccgtgttcctcaccccatcatcgagatcctcggccctatccatcgacgatgatgatgagaccgcggctctccgatgcgtggtatgatatggcccgccgtgttctcacttgagacatcgagggaggcgcgccaaagtggtgcatatggatatgagcggcaccactggggacatgga

SEQ ID NO: 69913 - DNA, 394 bp, Oryza sativa
  unsure (1)..(394): unsure at all n locations
agcttttgtgtttatgtagtcgccaaagattttggtctggtttccagantttattttctagttttacgaatatcgaattaaggtgtgtttggtaaatggattatgagaggtggaatttggaaaaagaaataaatgaattgctagaattaaatgaaatgtgaaggatggatggctaggatgtaatattacttttcctatcccatttaccaaattaacccttagagtttatgggtatagtatgaaaaatattataaaccccaaactatatatactctctcgacgtcaagaagcaactactatcttatcactccgtctggccttaataatatagattctcggaatctgacaaatatatggattgtccgagagcttctgcagtggattttatactctc

SEQ ID NO: 69914 - DNA, 466 bp, Oryza sativa
  unsure (1)..(466): unsure at all n locations
agcttactcttctagaacaagaattgcaacgagctcgtcagcaggtttgcttctattgtgtctcgctgttttgagctctggctgcaagagttcatttcaagtaggcttacgggaatttctcacagggcatttttatatccagctcagtggaccagactcattccatgagtggaaatggtatatatcaaatccttcaatgtttaatatataatcactcttttttgcagcagcaactgtttggttgatcattacaatgggatatatgaaagcaatacataaacattctgccttggtgacagagcaattatactgtattttcttgcangggcattggcttttgatatggagtatgcacgttggttggaagaacacaatangcanattaatgagctaaggtctgcagtcaatgctcatgcangtgataatgagctccgtggtggttgtgacaagatcatgtcacactatg

SEQ ID NO: 69915 - DNA, 343 bp, Oryza sativa
tatggatgtgcagtgcgtcaccggctgcatggccgccctaagtctgttcatatcgaggctgggaaagaaggcactacccctatttaagctcctcatacgctccatgccgtttacctggactgaggatgctgagcgggccttcactcaattgaatgcgtacctcagttctcccccagtcctggtcaccccggagccagatgagccgttgctactctacctggcggcaaccccgcatgtggtcatcgcggcgttggtcgtggagcgcgacgatgacaaccctcactccgcgcaaccccaccctgtgtctactcgacccgggagagagcatggatgagaggccccc

SEQ ID NO: 69916 - DNA, 459 bp, Oryza sativa
  unsure (1)..(459): unsure at all n locations
agcttgttatgtccttgccctcactggtgagaacttcctcgcaaggcgtcttcagactcttgtcttcaaagctggcatggccaagtccatccaccatgctcgtgtcctgatcaggcaacgccacatcaggtatgatgatttaactactacagatctcctgtcttgtaaatgggtaaatatgaagctctaacctttatattacaatntccatgtctcagtatgttctctctttagtttcaattcccaagtatgcttctatatgaattttctacagcagcatggaagctgtatcattctctcatnagtaatcgtcattgtatattcatcatttctcttgatctagcattgtgtaggcagagctaaaatgtcattttaggcacaacacatgctctattagctganagctgatgccataatatattagtattggtcctgactcctgtaacttccatcattgag

SEQ ID NO: 69917 - DNA, 458 bp, Oryza sativa
gaagagttggatacattagaatcatcttgtctgttcttgtgtaagagctctgtggttaaccccctcaagttgctttccttaagttacatatgacaagcatgatgaaagtgcatgttgaatggggccatttctgttaccttgagattggccccttcaagattatctccactcaagttggcgcccataagattagcaccctgtaaatccagttggactgacaatatgacactgatgaaatgagtaataagaacccaaatatcaacgtattttaagttactgaataccatttggaatatggagcacttatgccttatattcaaatgttcatgaagagacgatacaagcctgtacggacaaaatatatgtctatgtgttgatattatactttggcaatgcaaaatttgcagccaactttggagttggatgatcaaatattgaggtggaactaatattgatca

SEQ ID NO: 69918 - DNA, 466 bp, Oryza sativa
  unsure (1)..(466): unsure at all n locations
agcttggattaattggaagtcgaagctcttcaccgagtatgtcaacccgcccggcaatcatacgccgttcgatgaataccctcaaataaccgaagcggtgtgggaggaattctgctctctcaagaccacccaagagtttatggaatccagcgaggcacatcgcgtactgcaacagcggaatgagcacccgcatcggctgggcaccgcagggtacatcggcaaggaggcaatatgggcccaagaagatgcagccgctgcagcagcgaatgtacctgccccgttttcagacatccctgaacatagagctcgcaactgggcgcgggctatgtgtaaggtcaacccggacggctctgtcacatttgagaacanaagtgatgccgtcgtctatcaggaactggtgagttcactacttaacctaactaatntccgttcgtataaaagtacaagtcgtataaacgactatctt

SEQ ID NO: 69919 - DNA, 459 bp, Oryza sativa
  unsure (1)..(459): unsure at all n locations
ccgacttatgataaactaattaactatcatactagaaacctttgcgtggtgcttatccccacacatgacaaacatgagtgtgttcgaaggaatcataatcttaattgcatcactcgagctacttgcttaacatctctgatccttatctccatctggacaaatattaattatttccagctaattaattgatctgctattctttttctaattaagcacagagatgaagcctccacgatatctgcgttttgctcttggattntgcagcgtggttaagccgacgagaggagtacaatctaagcgattactccctccatcctataatataaaagattctgagttnttacttgtattggttgaccattcgtcttataaaaatatttaaaaatattatntatttgttttacttactttattatccacaatactctatatacaacttttcgttgttatatttgcaca

SEQ ID NO: 69920 - DNA, 411 bp, Oryza sativa
  unsure (1)..(411): unsure at all n locations
agcttctgtttatcgtcctggacgcaggggaggagattaaaggatgttgcgccgcttgtctacgcagcctccaaaaaaaagaacagaacgcttcaacaggcttcgcaagcgaaccaatggcttcttgacttggacctgccagggactgctggctggacgacaaacctgattgatcaacttgtcggggtttggagcgctgttcangctatacacctggtagcgcacgaggaggacaatataacatggaagcttactaaccacggcgagtacacggcatcatcggcatataatgcgcaacttcttggaaccaccgctaccaacttcaacaggctaatctggaaagcctgtgcgccgtgtaagtgcaagaccttcgcctggctaatcatccaaaacagagtctggacctctgac

SEQ ID NO: 69921 - DNA, 121 bp, Oryza sativa
tcgtgatcatttcatttctaaactttacatttatgcttggcttgcagttcctctttgcatctatgtgttgacactacctctgccatacattcctggtgggacaaatataagcactccattt

SEQ ID NO: 69922 - DNA, 301 bp, Oryza sativa
atcttgatgttgtcagtcaagacagggagatacagaagccaacttaagcattaaaacgacgaagatgttcgatattccaagagttgtcgataggtgtaccgtcctcacgcttgagtcgattagaacctggccgagtgacttcagagattattaatggcccttcccataaaggggataacttgtgccgatctcgtgtagtttgaattttcctcaaaaccaagtcgccgactaagaaagctcgcgatcggacattacgattgtgataacgacgcaacccttgcaagtatcgggccaactgaat

SEQ ID NO: 69923 - DNA, 443 bp, Oryza sativa
tggtcattgtttcccctcttgccgatatgtggaaccatcacatgttaaggtttgtctccaaaactctggctgggagacctgccaactgttgatcccattgtgttgctgcatccgtgccgcttgctccgatcccttccttgctttcaaatattgtagattcattcgccgccgtcttctcaacatctcccctctatcatcaggcggaaatcggcaatgaatcacccccactatcctcacgaagaccgtgcttctatcatgtctgcaataggggtgtaagtgggtcacccgcgaacagacttatatgtcaaaataagcgagctcgcgggttagtttatcctataagtgagctttcgcgggtagccgcttgcacacttatttgcacagccccactttgtcgcttgctcatctcctccaagttaatagaaagcttcttcgtgcctctc

SEQ ID NO: 69924 - DNA, 429 bp, Oryza sativa
atctttgatttatctcttctgcaattacttctccgaagggaccaagataagaaaacaatatgtactacctccgtttctaaatgtttgacgctgttgacttttttaaacatgtttgaccattcgtcttattcaaaaaaaatataagtaattattaattcttgtcctatcatttgatttattattaaatatacttttatatatgttgtcgaatggacaactgcgtcacgtcgaaagacgtggatttctcaacagtggatgggaaataataaaacaattgtattacattgttcaaaatttttgggatccccctattacatggccataaagagctatttatagccccattacaggtgtctactactagggtttagattatataagggaatcttcatgtgtacccttatgataaggacattatggatggcacac

SEQ ID NO: 69925 - DNA, 317 bp, Oryza sativa
ctgaacgtaaacccagatacaaatctttcactcactgaaaagttaatacatcatgtactgggttttttctggattggaattgtatcaagataggactaatttgatcaaagtatcaccccagtctcactcctacaagtagtgatgtccttgagccaacttatgggcctgcgatgcaccatgatactgggatctgacgtgcaatcctttgctcatacccattcattgtctgttgccttggtccactggtcttcatcttctctgatcctggcatggttgccagtatctccaagacctactgttgccatggaaatatgggc

SEQ ID NO: 69926 - DNA, 319 bp, Oryza sativa
  unsure (1)..(319): unsure at all n locations
agcttatctccttctctgataagtnngatataggagggtgataccaacgaggctcacattcaccacatctacagtgcacatgataggggtatttaaaggatgccatggtttttgcgtaagcaagtttgtaatctttaaaagctaaaactaacttgctgatcaatttaatccatgtttttttaaacaacatgttttgcaccatcatttatcccaaggttctcccaccttatatcatgtttctagaccttccttctactctagaaggttcacactaaaaacatatcattctatcccacagtagatcttacttccaatgtat

SEQ ID NO: 69927 - DNA, 389 bp, Oryza sativa
  unsure (1)..(389): unsure at all n locations
agcttgcttgatattttgaaacagttggaaacaaggtcacaaaatttgtacttttgaataacaggtttcaaaagaaataaaagaaagttataaaatcaacatgctaactttattttattgcagcaagattaaatgaaacaatattgtaaaacttttgctgataaaatgagccattagtacagtaatagatgtacagtactaataacactggaataaattttgaacgagaaccaataaaatagattatgaagtgcaagtgccattagtttggtttaattaaaagagaaagggaggagaacagttctacttttccaatatttttagagggcttctatgnggtaaccattggcataacctatggtcaaggaagctctgataccaacttgtca

SEQ ID NO: 69928 - DNA, 455 bp, Oryza sativa
tgcataaccggtacacttattattagtagccttaatcattggagcattagataaatcatactcatctaactgtggttctactgctagctcccaattaacatatgcagtggaatcatactctccatcaaaagatggcaaaacagactctactattgcaagattatgatcatgtaccttatttgtgtcatgttggtcacttgccatgtgttgtcgaacgtgaagatgtccacattgagcacgaacagctccatactctttatgtaaccctgccatagttagttgctaacaagaaacatatacgagaatatgtacgttcctatcaactactagattgtggaagctcacatatcacacacactcaagctttatatcgagctcttacaagttcttactgatgcacactataatatggtgtccacaccgactcaaccatacacccgatggagttggatgta

SEQ ID NO: 69929 - DNA, 408 bp, Oryza sativa
  unsure (1)..(408): unsure at all n locations
agcatttctatcttcttctcaaggggacaaagntaaggagcagtgggaagaagaatggagctctactactgtcttggtagcaatctatctatcaacaaactatgccaagcatctgtcctctagcgagctcagtacagtgcaaaacttaattaagcagaaatttcacccgaaatttcttgcgaatcatcatttttttttccttgcagtgtcattactgaaaatgacttgaccacataccatgtggctaaccgactaataacatagtcagacttgttntccaacttatgcatatggttagtacattgcattacatagcttccccgagttagcacctggctgtctgatatgatgtagtgtaacctgcacgtgagttcatgtgacttgaaatcacaacactatatatgacta

SEQ ID NO: 69930 - DNA, 345 bp, Oryza sativa
  unsure (1)..(345): unsure at all n locations
aatgctgtgggctgtctcagtggccgttactaccaccggattaacgatcacctgaatcccgacaataagaangctctgaaagtctcatcttcctaaggctagaatacaatccaccatctgaacctgttggctgggctacaaaaagattcctctgttccacatggcacaagggttttcatgctcctcgctttccatcggatcaacctctctgaacaacagaactcttggccttgttgggtggttctttgctgcctgttcccaatcttgtcttgtttgtacagtcactgcatagtcgatggtgacgttcttaagattgttcaggtgtctgatctcaatgcccgaaag

SEQ ID NO: 69931 - DNA, 405 bp, Oryza sativa
  unsure (1)..(405): unsure at all n locations
agcttctcatgtgtatttcatggtgatagtgaatcaattatgagacctgagagaagcagtaccccatttgtaccagtgtttctaaaaagtgttagagtttgcgtcgaatatttgtacacagtcggttacagtttaggacttggagttgtactaggtgtaggaatagagtaaaaatcggactctttcctagaatctcccttaaatagagggatggacctattgtaaccacatatgacgagttagcatatcgagagaaagcggctgctggtggtgtccagttgtgagttggtataactctgatacgttgaatatggtggattgtgaaggagcgtccctaattagtgtcccagagatgtaggcctcanntgaactctgttatcanatatcatgctttggtgtcgtatc

SEQ ID NO: 69932 - DNA, 437 bp, Oryza sativa
gctaattggtaaatctttggttcatggttatactttaatgcatgtttgttatgttctagatgggttcatcttctttttattgcaacacatgacatgaaatgctatatgtatactaagctcttgaacattaatgaacataattcctatgcttgatgaaatcattgtcaaaagggggagaagtaaggtgaaaatgtttggattgagagttgttgagaagagcatgatttttggttcaattgagaatttctttcttttaaaaagggggagaagttttcttttggatttttgagcacgatgtgtacatttgtacgaagtgtgctttttaccacttttgttgtttattttccaaacaccaaaacattgttatgaatttgccaatgtgttcatcaaggggaagataatagaatcaaaggtgtttgtgattatcattctgtgat

SEQ ID NO: 69933 - DNA, 462 bp, Oryza sativa
  unsure (1)..(462): unsure at all n locations
agctntaagaactgttgacctcccggtgcctctcaagcctacgaatgtaacccaattgtccttacagccctccatctctgatcttttcaagctcgtagcaaagtgcctttacaactcatcttttatatggaaaaaatggtggtacaatcttttatagggaaaaaaattgtgcacctgaactgcataattaatcaagttttcagcaattcagctcttgaatagaatgcaattacttgaaccggaggcttgattgttgaagtagtattgatggaatgaattgttattcatctctccttttggcaagtgaatgaacagaataaaagaaaattagtttgacaagcacgtgccaggctaccacttttgttgagttagtccattccagaccaggaagtagctagatggctatgcaaattcagcatttttcaagacgatcacaatagacacagaaaactgagatcagtc

SEQ ID NO: 69934 - DNA, 386 bp, Oryza sativa
  unsure (1)..(386): unsure at all n locations
gtgcttcgaacactctctgtaaacatgtgatggacacatacttcttatagcactatgtatgggatcattagccctaagaccacatgcttatcggttattaacgcatgttctgtgagtaaatacacctaccatgggtatttaggaaaccaacaaacactccttgcgatgtaaacgctgataactatattccgtacatatcttttatccatacggaatactgataccagagcatctctgtgacaatgccgcatcgatctgttggcgatgatgtggtattggagttaccgcgatagcactntatggatctatagtgaacgtgttgttgcaaatcactgtatcccaatgcgcaatatatagactagagaacgccgaatgggaatatgtgt

SEQ ID NO: 69935 - DNA, 465 bp, Oryza sativa
  unsure (1)..(465): unsure at all n locations
agcttatattttaacctaaagcatcataggcgaaatagacattntcaaccaaacgtaacagttaaatgatggaaaatgttacggtaggggcatggaagggatcaaattgaaatttcaggggtacagaaaggatcaggtaaattttatgggtatgaaagagattgagtgagttttcangggtacacagggaatttactcaatatttaactaactatacnttgtgttaatgaatgaataacgatatatatgtatgagaggaatatccacgaaagcatatgcatgtagtatatatattttctactangaacacatttgatgtctattttatataaattaaatcaagtgaataatgtagtactatatagcaatatcactatgctagtatatatataccgtattanagtagtgcaggtccatttatatcacagtanngtatatacatgtagccatttaaagtaacatatt

SEQ ID NO: 69936 - DNA, 383 bp, Oryza sativa
tatactgctccaccctggcaggcctgataagaacaacagctaactaacaattcagaacatgatagggaaataaaagctccagaattgcataatgttatcaatatcacacattccaatcaatgaggccttcctgaatgagataaaacagctgtgcacagatcggttcaacatacatgtggcacttgtctatctcaagagataataacaaagaacgaactgaaagtatgtaccaaacttaccgaatgcactaaatgcaagacccatgattgttccatcaaagattggaaaacagactgttcgcttacaagaattgtgggaaccagttgtgttatatatttcacgataagaaaatgaatgcatagctggaatgcattccttccttt

SEQ ID NO: 69937 - DNA, 258 bp, Oryza sativa
atcatttattatttatatatcgcgtaccgccaatatcgtgagactcaccgcgtatcgatcttcgaatctatttaatcttatatacagcttgatatggcgattagcaaacgaggagatcgaccgaacttcgcacgccacctgtgatatgtatcgagcatacaatctatagcgcgtgctgccaacaacggtcaagacatctgaaaaatatcatacattttgaccaactaacttgatggcaatggaatactaactcttgat

SEQ ID NO: 69938 - DNA, 456 bp, Oryza sativa
  unsure (1)..(456): unsure at all n locations
agcttgtctttcagtcaatcgatgttgtcctcatcatccttttccaatattgttgtcccttttcataatcaatctgcaaggtatacaaacatcatgcatgctgtggttaaaacgaataaaggaagacattaactaaaattgcagagttttgattcaatcagctaacttaactgatgtcaaaggaaccagtctgtaaaatggtaaaattgatacaacaacacacgatgaaattgagcttaccattggaacaataatatcatctttcctggtctctctcangaatgtgtaagatagcatgccaatactctgtgtgcgccttttatgccaaccaggtcatgagggataaggatcagcatcttgtccatgtggaacaaaatatacgagacataatttggcaagattaaatgtgttacacaatggacatgaactactgttacacttatcangaatattact

SEQ ID NO: 69939 - DNA, 365 bp, Oryza sativa
  unsure (1)..(365): unsure at all n locations
ctcagcttattacaaactgggtttaagatcttatgccaatgtnngtacttgttaagcatatgctatctcatttttgtcttaagtgctgcagtggagtattatatcgtgtggaacgctttggtgcattacatgaaatcctttctaaacttggtatgttgtgccaacaaattgagcataattggtggcttttaatggctgacgcctgaagagaataactacacttgttctgttttaacgccatattggctgctcgattttatttacaaaacatcttctgatattataagcaactttttgttaaccaatttatgttttttcacctctagatcatactgctatttgaggtcatttgaactaataaacat

SEQ ID NO: 69940 - DNA, 442 bp, Oryza sativa
  unsure (1)..(442): unsure at all n locations
agctttntatcattctggcatcgagctattntgccgcaggacctcccctacagtatcgtcaccgcagtagagtttaaccaccaaattcgggatggattggtgtggttcctctacgcctaggacaccagaatatcgaaccatgaacgaggaaaggcatgagagaaatattggctagtaattgtgaagccccaattcttgactggaagggacaccaaaggcctctgccctccctctctatctatccaagagatggaagggcagagctttnttttggttntttcatcttttcatcaaagagttgaacaatgaagatagatggcaagtgcctgatncgattgatcaggtcgtgtaggaacaatgttcanatcgttcgttcgttaggatgcctcagctgcatacatcacntgcacttcacttgacacctatntaaacggctcgtctc

SEQ ID NO: 69941 - DNA, 376 bp, Oryza sativa
  unsure (1)..(376): unsure at all n locations
tgaatcttcactcgtcccgagtgaaggacgaaaggaaacatatactttgtntgtgattangtgttgctactatgctgtatatctcataggtacaggtgcaaggtatatgtactctctctcagttaaataatctttggcacggtggcttacccttacccctgattcccacgagacactgcttctccttgtcttgggcggttgaaagacagaatagcaattatagtaccaatcacccaatctttattcaactctcgtgccggaagttttcaaaatgattttgcaaaagaaagccaagttcctcaaatgaatcactcattctctctaagtgtatcanaatgaattcctcgctatttttgccttcttgattcctactcta

SEQ ID NO: 69942 - DNA, 468 bp, Oryza sativa
agctttaatttttgatgtggtttatgatcatttaaatagtatatagaatgatgattcaaatgtcaaagtaaagtgatgtggctttatgagagaagaaaagaagggcttaaaacaattggggaaatatatgtttatgagagaagaaaggatgaagatatttgaactatagattagtcatccaatggctaaaaacaaatgatgtaatatggattaatgatagaagagagaaataatattaactaagtgaggataaaatatacaggtatatatgatattataaaaatgatggagagatatattgaaatattatgtgaattatgtgggttatgatttaacatgcttgtattttaaagctctaaaagttaataaattatagaatagaattatagataatatagcatgcttgcaagatacttaagatgtgataattggtagtgaacgatgatgtgcatctttcacgttgagttt

SEQ ID NO: 69943 - DNA, 400 bp, Oryza sativa
  unsure (1)..(400): unsure at all n locations
ctaagcttgtacacgcatccactatcatgctttcttgttatttcttattacgtacaatctactatgcgtgtaataccattatattgcatgtccttaacaacccaaatgaatggaagtaacgatgacatccatgaacacaacacactgcacatgcgaatgttactgacaagaatatatattgttggaggcatgtcatgaagcccttcggtcggacctgccgaaactatatttccagcaatgattcaagccaaatacgtcaaggccattcangcgataccctatggcgaaagccataatcgaagatggcgaatgctggaaagccgcgtctgtattccgaaagtaaaagcatctcgggcgaatgtatctcgggtgaactacaaagacttctgcatgacaagtt

SEQ ID NO: 69944 - DNA, 151 bp, Oryza sativa
agcttaattttctcatttctataacctagctcatttcgaacttgttggcttaatgtgagtaacacattaccacaataccttataatatgatacctcaataggccaaacttgcattttatcctggtgggatcctaagggggtattcccctaa

SEQ ID NO: 69945 - DNA, 479 bp, Oryza sativa
  unsure (1)..(479): unsure at all n locations
tcaactctaccttctgagttaagtactccactaaagtagttatattgttaacacattacaaaagttatttctaaaggtagcccatgagtccgaggcaaaatgctcatcacatatgaggctgcacatttgatgaacatgagaacaatattctcgcggaaatcatttgtttagaatgtgatgaacataattgtatattcaattaaaaacgttagaaaagtggcttaaagttgtcatttcacattgattggttatgaaaataatggtatatataaatctttgtgccgatatcattgtttgccaacaatcaacgaacttgatagttacttttggtgttccttttggtatgtagcaaattggctacatattttacaacttactgtatcctttgctgagatgcactngactttttttctctgtatactctgatgtctcattgtttattaatggatgccttcngtccacgtgacacaatatatatt

SEQ ID NO: 69946 - DNA, 467 bp, Oryza sativa
  unsure (1)..(467): unsure at all n locations
agctntcgatgatcctgaacaatgggaagttcacataacacanagtcagatcttactcaaatgagctaacaaagctgagtacattactaagagaagtacacatattagtccttaccattgtataatgatgaatcaattcttactgtcagcaatactactaaaagtcacaatgtgcagcacatgtggcatttcactgttaggtcctattttttataagttgtctaacatagagcaagatgttataatcattcaatgacaggtgcagattacaagcatncggattaaatggcatttttcctggcgtgaaacaagaaaccattgtgcactaacttatatgagtacctgatgaagacaattatccctggaagccctggtggctatccattcctctaacaatgcctgaacataacaacaaagccaatctgaatgtgaatagtgaatatatacaaatgaaacanatgacaagt

SEQ ID NO: 69947 - DNA, 454 bp, Oryza sativa
  unsure (1)..(454): unsure at all n locations
gaattcacacatgcaacatctattagaaatcctaccattgtttctatatntaaggtaagcctactaatagctatcgctaatagacatcttatcagctgtactatttttctgtccacggtatctgatggtaagtaaataatgtgacaggaagtggacgatgcatggcggcttgagacatgcctaattaagcgaacgattctgcagtagatctctaactcatttgtgaaggttcctactatttctataaacattatcgataatactaatatcctcttgcgtgatttgtagagttttccgaactcattcgcatgttgcgtgccctcggtgatggaaagcaagcccaaaataattcccattcttaaccaagttgaatgttgaattgtaccgcttaagactgtacccgcatcatcttataantaaaacttgtatgcttatgatattngcacataaacta

SEQ ID NO: 69948 - DNA, 409 bp, Oryza sativa
ctggcatcgagctattttgccgcatgacctcccctacagtatcgtcaccgcagtagagtttaaccaccaaattcgggatggattggtgtggttcctctacgcctaggacaccataatatcgtaccatgaacgatgaaaggcatgagagaaatattggctagtaattgtgaagccccaattcttgactggaatggacaccaaatgcctctgccctccctctctatctatccaagagatggaatggcagagcttttttttggttttttcatcttttcatcaaagagttgaacaatgaagatagatggcaagtgcctgatcgatttgatcatgtcgtgtacgaacaacggtcaaatcgttcgttcgttatgatgcctcatctgcatacatcacttgcacttcacttgacacc

SEQ ID NO: 69949 - DNA, 333 bp, Oryza sativa
actcagctccgggatgctgtcagttgagctgacgcgtgcgcatcgcattgttgttctgcttatggcatcgaacccaagtgaatgacgacgcgtgttgcccatccaaatcctgcctggagtgctgcaccgatgtgtggactgatcccaagccgagcattccagaaaagcttggcgaacatccggatcgacctaggcagcgcatgatatctgcatgaaagcaagctcaaatttagcagaatctcaatctctcttgtatcagctacccaggctaaccgacccaaaaaagaatatttcatatgttcgatacagctatagtatattagatagctcttc

SEQ ID NO: 69950 - DNA, 402 bp, Oryza sativa
agcttacctctatttgaagatcgtgatcgatgtagttcaacccgaaagcaaaaactcgtcgaaataaaacgaaagtgaaaagggtggcgatgcgccgaaagtgttattaaacgattgttgttaattatatgggttcgggtgatatttatacctgagatacatgatatgtccttgccggacacgactcttatctctaacaaactctaagatacacattagtctttgcggcagactcttgcccaaacatatctctaaggaaactattcaaaatatcctaattaataaatacaattgcctatctgagagcttatctccatcgtggcaatccttgtatagcacgttgatcaagtctagaagcagttttacaactgacttcaacaaaatcggtcgtatcggctgtat

SEQ ID NO: 69951 - DNA, 369 bp, Oryza sativa
tcactactatcgctcgtgttggtgacgacaagacgaatggtttatctccctatataggaggaggtcagggaggggaagatgctatagtgctgcacatatgtggtgatcagtactcgatcgacagtgagtgagatgagaccagttagttaattaatatctttgtaaaaaaattagaagtggttaggggtatcaaaaagtgactaatatatatttttttagaaaaatcagttgagtgatgaatagcaagcccaatatagatcgatggattcattttcttatgctgggcctgaaatgttgatggtttaccaattgccacggcaaaactcggttgaaattaaaaagcaaaataagccataaattatgcattca

SEQ ID NO: 69952 - DNA, 416 bp, Oryza sativa
  unsure (1)..(416): unsure at all n locations
agcttatcttaattatatatgtggagaaatgaaaatggaaatgaccccttgatcatgagtgcatgaaagatatcaaacacgagtcacacaaatttgacaaagctcaatataatgtccaacaatcatatgcataataagtttgatcaaagatatacttgcatatggccttggtaggtataaaatgaagtcaattggaggattgagcttttaaaacaattttattttgaaaacaaattcccaagagtcataacaagagctgcaagaattcctttcatcttgaatcatctcccatgaagcaattacttagatgcataaggttccctatacatggatgggtgttcacaagcacaagtttagctgagaataatgaatatacaagattaatcatatgaagaatntcattnagtggaaattta

SEQ ID NO: 69953 - DNA, 457 bp, Oryza sativa
cttgcaacagcatcggacaaaggcaaagttgttggctcatcaaataggcagaacaagccagtctgagttacagaacaaatgaacaagcttacctatgctatctctctatggaacgttccatctcggcacaataatgatagcaaacagttgcagaaccgctggatagctaacctaagctatctctctatggaacattccatctcggcacaaaaatgatagcaaacagttgcagaaccgctggatacttatagctagttggaaaatccatcttcttgatcattagttgagacttgatcctcacatctcgtgatatttggcaagcaagaatccctttaaagcatccaagtaccctgccagtttcgaaaggatgaaaggtctccatctgtgcaaaagggaaacaactctataatgcaaatgcaatatctgaaagcaatttgtgtttaacacccaatcattt

SEQ ID NO: 69954 - DNA, 342 bp, Oryza sativa
tagacccgggatcctcttattcacctgctgcatcaagcttcctttcttggcatccaactctttttgccgggaacctctcgtgacgacggccgccgcgccgggctggagcgctccctgccgcgtcaagacgcgcagccagccgccggagtggtggccgattgggccgtggccggcgaagacggtgtgttgcgacgaatgaacgccggcagcttctgccggcgtggctactgtggtgtagagcgtcatggtctggtctgagccatgggatgggagcgttgtgttgttgctcgccggccggcggccggctgtcgtgtgtaccgtggtcagcatgagcgcgagtgc

SEQ ID NO: 69955 - DNA, 459 bp, Oryza sativa
  unsure (1)..(459): unsure at all n locations
agcttggctccatttcaatcaagtgtatttgtttagataatggaatgaaatattcaagcaagtgtataccctgtggtcaacaactattctctatttacatgtactattcacatatatggctgacactatgggtctcatacttgccaaacctactgcctgcattgtgctaagtattgcatgagaaagaattgctggttccttagtaatatactttgataaagattctgtttttcttttttaggaaaatgatgaagaagaaagcactgactatggcttcattcagacaaagggcaaaaagaagcgttctacctgataacttcttcaatcaagacagactacttttgctatctatagtccaagatggacacttnntgtatcctctcatctactagccaaaattactttggtgtatctagctctgactagaacctagactgatctactaccagtactctatac

SEQ ID NO: 69956 - DNA, 388 bp, Oryza sativa
  unsure (1)..(388): unsure at all n locations
cgtatgaataggtatattttaatataaaacaacagtgtcttcttcagcacatgcccttgataagaatgttgctttatgactttaagaatattctctgttaaaactaaaattagacgaatgcgaaatatttcaatggaagggtaaaatatcagtgtaaattacttttatagtagctaattgggctgtgtgttataaattatgaagtacgagcagtatgtatccaaggaacaactctggaatttaagaacgagtcttactgattaaagtgaatattcaataataattgcaatatactccctccaatcacaaaatcattaacattttccaactttntgtgcctctgaataaagacaagtatttataacaaacatatctctaaaagctattt

SEQ ID NO: 69957 - DNA, 428 bp, Oryza sativa
  unsure (1)..(428): unsure at all n locations
atcttttttattcttagagaagacacatctaccagaagctgccctgtgctgtgtggagttcctaaaattaggaagaagattgggaaaagttggttgttttgaaaaaaagttaaaagtttatatgtgtagaaaagttgtagatgtgatgaatgtgatagaaaggtagaagttaacggaagnttggtgtgaactaaccatgaccttgtatatggccattgtaactacagcccactggcctccacccaaaggctttaaccgggccgtgaatcgtggggttntagccctatatattttcacctggctagcttggattacctgctactctcacgcactactgtctgtctttctttatacccacaaacgatagttggtgtcctactctgtctctcacgcttatatttatacccgaccacccctgtcatcaccac

SEQ ID NO: 69958 - DNA, 384 bp, Oryza sativa
  unsure (1)..(384): unsure at all n locations
gtagagaagtgccctcggacgatggcaacccataattgaccttgtcttattctccangtctactctaagtctgattctccaaagaagaatgaacccataactgtgactagaaaatcacattccgcgatcgagactactcgtcatatattactgccttaactacattatacacgtggttcacgcggtaattctgaaaaaaaaatcattactaatgcacggctgcagagagaagacaacatactagtgcttctttttgagctacgaagacatattactccctccgtattttaacgtatatggcatgtaccgtacgggattccgttgcatcgtatcatccacgggataagatctccattaccttatctccttcctttgccactcaca

SEQ ID NO: 69959 - DNA, 365 bp, Oryza sativa
  unsure (1)..(365): unsure at all n locations
attatagaatctctagggaatacagcatggctatggtgcaacataaaaagtcaagtaatcaatatagaaaattacatgtcaaaagttcatcttgagcatcgacactacaaaatataacactacaataaaagaagaaattaacatgtaaagtaaaagacctctagattcatactacattctgngtgtgcaagtttcaagaaaactttaagatttccttagctccattatttaactgcttatttagccactgacccacccattgcaaaacttaaacatctatttgtgactaaggtggtgtttgattctcctgaagatgaagatgaagatgaagattatagtgttcacgtaaaacgaggtgataataa

SEQ ID NO: 69960 - DNA, 346 bp, Oryza sativa
tcgctactgatcggcggcggcggcggcacacgggaaggcgatgcgagacgcagttcaagatcaagatcaatcttccacgctattgtctcacccatcaccgaagagagctaggcaccacctcgtgtcaccgcaatgccgtcgtctcttcccctaccaccgccatcaatagcttcttggatgggaggacgtcgacaggctaaaagcaaagttaggtttagaagaagtttttctcatgagagatgattactagaatgcatctccagttttgcagttggagcgtgctcactaaattatgtgaaaacttatatgtgaggttaaccgaagcctatggatatatttttcaaat

SEQ ID NO: 69961 - DNA, 394 bp, Oryza sativa
  unsure (1)..(394): unsure at all n locations
agctntgtgtcttatctggtctganaaccatgtggtgatggtggacctcaagttagtgagtggaaaagccagttctttagatatttcataattgggtacacaatcatgtcaattacatttattttgtacagngataaagttccttcatcagttcattgttaaaaatcaccccatcttctatcattccactttctacctaaaaagaattctggccaaagaagtctattttatctatctctcgatcaacttgtcaaccctgaaacctngtcattggcacaagtgggccagatctctactagcatcatgacatagtgtgtcataaacctttgtctttgctgttgccaactacacacatttacagagcacgtcatgaggaatattcattgatggctgg

SEQ ID NO: 69962 - DNA, 437 bp, Oryza sativa
  unsure (1)..(437): unsure at all n locations
tgtgcaacttatattggatggaagtggaaaatgtataanaatttgttatnggatggtgattcanttttgtatggccctcctcattatactttattntagaatgactacattactatctctcttttttttcatcatgctcaataatactgtgtttcattctcttttgggcattgttttcatttttttaagctcgtgtctcatttggcatggatcatangaggagagaccattagtatcaagagtttttatttattggatgaagatggtggatgctgatttctagtatagaagtttagcgtatgataggtggatggaataccttgcaaatcctctattgtacagggagagcaatatantttagtgaataagttcacaagactttgatcatgagaatatgaanagaatctaacaagggttacaaccatttgataacactc

SEQ ID NO: 69963 - DNA, 345 bp, Oryza sativa
  unsure (1)..(345): unsure at all n locations
ttcttgtcttctacaaccatgtcctcttctcgctaagcatgtcctcctccacggccgcgccaaatgtccgcggcggcggccgtcttctcctcgttgctcagctctggctccttcctgcgattntcttggatagagaggggacgcacgaaatgacccggatcccgtcgtataacatttccgggaatttaactcgcaagcacaatctttttcccacagcaccagcccacgtcgcggtcgtctcgtcggaaacctgaaaccaccacgagccaagagcccaagatcgaacccacccacccacccacgcggtttgtctcctataccccggcgcttctatataactgatgc

SEQ ID NO: 69964 - DNA, 320 bp, Oryza sativa
tatgatccaatttgatgaatgtggagctccatgcgatatctttctctatgagaggaaagatgcttgttttattgttgaggagttaatgttgctagcaaatatgtcagctgcagaagttatatccaatgcattcccaaattgtgcgttacttcgtatgcaccctgaaccgaatttacggaagtccacagaatttgaggcattttgtgctatgaataggtttgaattggatggttcatcatctggtcaacttcacacttcactttctagaatgaaggataagttaaaagatgatcctcgtttgtttgatattctcaatgttt

SEQ ID NO: 69965 - DNA, 380 bp, Oryza sativa
  unsure (1)..(380): unsure at all n locations
ttgttttctctttttcactgcgcaacaatcataatccttggacactnatatcctagtagacctcaacgtgccattgcttgttcttcttgagctgggatagcttctgctcccagctctcccctctctgctccgccactttcttganggtgtcttgaatcccatgcatcatccccttcaaaccacaaaagtagatgtgcgcgccgccatccaagagcttgaagatctcgtcgcttgactcctcgatctttgtcttgacatacatcttgccagcgttcttngtgttctgctcnctgcttaacagctttgcatacctacaaattcaacacaattcaattatagcaatatgcacgaatatacttaacataaacagctcatttatg

SEQ ID NO: 69966 - DNA, 396 bp, Oryza sativa
  unsure (1)..(396): unsure at all n locations
acttatgtggatatttacatgagttcattgaatgccattttttttntagaccctgtgacctgtaaggtagttaatatatgaagtagatatggtgcccttaaaactttatggcctggaccctgaactacactctaatatacaaccttaccttctgacaaggctaagtgaatacacccacaaaaagattgggaacagttgttctgttgggttggataaacttaatactatcacccactgtgccattcataggacccgtctattaaaggataggaacaaaggctgaccattcactcactgcgccaagtggggagaatgctattcactcaatgccacagaagctcacatggtcatgaactcgtgaggcaacgaatctcctctcccctgatattagtatca

SEQ ID NO: 69967 - DNA, 352 bp, Oryza sativa
  unsure (1)..(352): unsure at all n locations
acatctccaaatgtacaaatgctactcaagttgacacctgttattctcacttttttaacaaatcccttggtgaaagtaggatgagcataattagtgcaccgtacgtcatgtcgntatggtgtgatgataatcttcagtttatggtgacaatagtatgactcattctttaaattatggtaaaaagaaaatgataactttgacctttacactaactaacaatagtacatataaccatatctaattatcactacgatttatgcctcgatggatggatcgagttatacactgtatactccactgctacactaatagtagtactaatgtttttttttcttgaactgctgttatggac

SEQ ID NO: 69968 - DNA, 432 bp, Oryza sativa
  unsure (1)..(432): unsure at all n locations
agcttatgtacttgtcgatattgtaggggatgagatgctggacgagcactgcgatactgttccaatgtggttcccagaaatgttaaaggattggtagtggccaaattcctggtaaattatttccaaccttaatttcgggtttattgcattttaatggaaatactccataatgatcaatcattcaggttaagatcgatctaaaccaatccatttttctatatacatacgacatgccaacggttaaacaacttattagatacgcaagacagccaatacgatatgctagaaaatcngccgcgcttaagggatgtcctcagcgtcgaggacatgtgctanggtgtatgtgcgactcgttcngatcatgngttcannacaataaagacaattttgaagtatccatgatcggtaccaatgaatatgatagagcttctc

SEQ ID NO: 69969 - DNA, 350 bp, Oryza sativa
tcagcttcgactatatgtatgggtgagagcggagttttctttgaagtcaatccccttgttctcgtactcatggtatacggtcgctgttactgactgtcgtagttcaatccactggggagattgattattctttaatgtagaataagaatgaataaaggcttgtttgaccttagatatgtacccgtcgctatctgttcattgatttattcatcgatacattctgtctcattccttcacaaagataagctcccagttatacttactcgttccgatcatggtttcaccctaggggaagtagccttccttgagcggggcagaggtcaacccacacgtgtctacccgtcttatct

SEQ ID NO: 69970 - DNA, 427 bp, Oryza sativa
  unsure (1)..(427): unsure at all n locations
agcttgtttgttgaactacgtttaaaaaaggtctgatgatattagttcaactaaaatgtcgtatatcangaacacggttggaaatggtaaaaaaaaaaacagcctcattcattttcgtaaccatgttttttctttttttaaacgaaatcgagaatagtagagccagaaacaaaaaacgtataaaaaatccaaaccaaaactatacatatgaaaaataccagtatcaatcgaataccggtactgaatataagaaatatggaattgtaactctcttattttacttaacatgacatatataaccacataaactcaagcttgcacagttgcactgtgtaagtacaaactcttctctaccatgtactcaatttnggatttcagttgaggagttattggccactaaactatgagctaatattaacattatcac

SEQ ID NO: 69971 - DNA, 276 bp, Oryza sativa
tgacaacggtactcctttttgttttctttctttcacatacctatccgaggggtaataatatagtcaattcatatcacgcggtaccaacttgaaactctttaagactgaactaagaaagtgattcgcaccgatgacacatgtcgaatacccccatggatattccaattggctgtcatgccaccataatgcgcgacatatcaaggacctgatccggttagttatagtttatcaagtaaaaatcatgttagtgcacatggcattgtattcaaattgact

SEQ ID NO: 69972 - DNA, 307 bp, Oryza sativa
  unsure (1)..(307): unsure at all n locations
tattntcagctgtaattaactaaccacatcattgttctgttgcttataacaacaaaggtgagtggtttatgattattcactttaatacaccatgtgaattccttctgccatgcatgcagggttggacagaatacacgcgtatgaattaaaatgcctggaacgggaaaaatgaaacatgtcaatttgactctgcaggttgagaacgacctgatacatcagcttattattggcgcatttaaaactggcgcacgcctgattactaaaaatctggcggagcaattaggtatgagtattacacctgtgcgtg

SEQ ID NO: 69973 - DNA, 374 bp, Oryza sativa
  unsure (1)..(374): unsure at all n locations
gctgatctcagatatagtggcatagtcaagcatcttatttgtgttgcacatgaacggtcacttatcatcatcgaatntattgatgatggcgatgtatatgatgaaaactggagaagattgtactcttcaagaagctgcataccacatgggagtaaaattattattacaagtagatctgatatgttcaggaatgttggaacaactcaaactcttgagctatagttgttgcctcatgatgcccattggtacttcttcaatgtgcgttgccttggaagcacaaaccctgtggagcacccatttctagaatcagcagctatggaaatgtgcacagagtacagatgtgttgtagctgcctatttcgttgcttcattatt

SEQ ID NO: 69974 - DNA, 215 bp, Oryza sativa
  unsure (1)..(215): unsure at all n locations
aagcttcagttaattaagttaattgtctcaagaaaataagttatggcctcggtcagaattatggtttcggccagcattaagatagatgaaggattgggaagaatgagctatggttagggttctcaccctccccgtcggcgactntttcggcgtggagcgaatcagagccgtccattagatcggacggttcagaccgaccccgcgttatgccatct

SEQ ID NO: 69975 - DNA, 451 bp, Oryza sativa
  unsure (1)..(451): unsure at all n locations
agtctctcatgagaagtctntagctcctcatacaagacctccaaagaagcatgatccttctttagggccttgaacttgacaatctccttctcattataagcatggagctcctcaaacatactcacaagctcatcataggaaacattatcacaatcatcatcactctcactatcattaaaagatgttaccttagatgagtcctttgccatgagacaaagtggaccgaagagtgatggagccttcttgatggcaacaacgaccatcttcttcttcttggagcttgcatcatcaccaccttcttcctcggacccggatgatgcgaagctctcctcatttgagtcccattccccgatgaaagcctcaatcttcttgccttccttcttgagcttcttcatgagcttgtagcctncactcttcttcttagatgacttgtctncatcatcatccttgg

SEQ ID NO: 69976 - DNA, 262 bp, Oryza sativa
  unsure (1)..(262): unsure at all n locations
ttgtatgatatgttcaaagacatcaactctaaagcccacttcgcaatccgtccatttgcttcgtgaatgtgaagtatatcttcgagtggaaacgatgtgactaccgcgaccgagtgactttgaaaatagtgagataattntctgacggtaattaagacaccatataataacttttgaacctgaggataccttgtcttggagtcggctaatacctcactgacaaaatataatgggccgtggactttttgaatatgggctttct

SEQ ID NO: 69977 - DNA, 390 bp, Oryza sativa
  unsure (1)..(390): unsure at all n locations
ctcagcttccaagtgagctaagcaccttgcatcttatggatagaacagtgtttttcttcaaatagtgtatactttcaacttcgcactatctagtgcaggtccatttggaaaaatgttggctgatgggtagtgttcctggtgggggacctaaccangtagtgtacacgattacatgtgcaaacctgaccattggtaagtattaaaacatcatactcaaatcttaaccaatactagtagtattgtttagaaaatcctagacagctgaccttctaatttgctagccaattaattaggagcatgttntgattcagtgtatgcatggacaccttcttgctgggcatctagattaanggaatactctatttagtagaagtactagtagtacatttt

SEQ ID NO: 69978 - DNA, 300 bp, Oryza sativa
agcttgagctgaattataagacgctctattgtactttattggatactatattagggagagagtagagtataagaactccgaggagttctggagttgtcggtaatcctctccttatttcttttgctctggtaattactctaattataatataaatatcttttgagtaatttagctttgcttggcgagaattatttcttgggtaagtcctaatcagcatacgggatcatcgttcactataatcaactaaaatattaggatttactttagtgtgtagctagcattaaaataagtaattaatca

SEQ ID NO: 69979 - DNA, 263 bp, Oryza sativa
  unsure (1)..(263): unsure at all n locations
acaattgctcttggaaatacggacaagaatacaattggccccaatggaatacatacaccacggaagcaaatttgaccttcaggacgtctaacaacaccaaataatggttggttttgggactacttgggatgggatgataccatccctgattttatagatggaacgatcccatttacttggcttggttatttgatggaatgatcccagtttctttgttggtanaaaggatgggtatggatgggatgaatggacattggagttga

SEQ ID NO: 69980 - DNA, 367 bp, Oryza sativa
  unsure (1)..(367): unsure at all n locations
ctttcgctcanggttcttaataaggattgaatccctagaagcggaagtacgcttaaaggccatcatgctgttgctgcatgaggctgttcatgttggtgaactgagcatcagcattnntgtgccattcttgcatttgcgctatgtgttcctcgaggttgtgttgggtctctcccgtctgcatatcaagggtatccattctcctggtgatttcacccaagtcccaacgagaggaactcgtgcgccattcaccgggagatggaggcataccacttgatcntggggactgattgttccagccttcccactgtatgtcatgaggcgcccgccaccggctctcacttggactttcccagctcgagatcccaat

SEQ ID NO: 69981 - DNA, 454 bp, Oryza sativa
  unsure (1)..(454): unsure at all n locations
tggaagtgtgtgaagaagtgaatgagtgaagcttcttaaataagcagttaatgactgttgtggaacgggaattgtccaaagtgcccttcaaccgccattaagatcaaatcaagagcatcccttccaaaccccaggatcaacggtggagatcanggttctgggctggcccatctggccctcaattntggcctgtggactcctcctgttctgccttatccattactgcgagttttgggctgattctctggtattttagtgaagtctaaagcccctcccttgtatggatatgttccttcttcactttagtctgattntcctcccaacttcngtggtttaggacctgcatcaattaaacacgaacactcgtggaaatatgttagaataacacctaccactatattggatgtntattatctgagtttatgcnatgctggcggtataaaatgtgattaat

SEQ ID NO: 69982 - DNA, 426 bp, Oryza sativa
  unsure (1)..(426): unsure at all n locations
tcatcaagtctcttgtttcaagaagaaaattcaccgatgcttgaagacactttctagttaagaacattgaatcatcaagtagaaacaaattatagtatatgtagactagagcaagagtctgcagccaaggaagacgtagcanaaaacgttcatagctcaaataatgctgcagtataatcaagaaccttaagaataatagaagggtaaagagtcaaacctgcgggcagcctggcaccaaatactggtagatttccttcanatattatattggcgacatgtaaccttaataatacttaagtaatattaattctgttagatgtaaccatatattatacacataaaaaagatatgcacattacaaggagtattgatatcgcatatgggacccttctaatgacaaatactttaaatctgaatcagtatatg

SEQ ID NO: 69983 - DNA, 445 bp, Oryza sativa
  unsure (1)..(445): unsure at all n locations
tagacatntagtgttctagccatagntattgctggaacttttctttggttctgtcactaccatgaattctgctcgcccttgcaattcattttctagagtcacttcaggttagatagcacctttgttaggcattgactgctgtagcatccagcagagagaagcagccaatcaacagaagggtaaatttgggatggactaggaaagtagcaaatggggtgtgttgagttggggtgtttcgtaactatcccaatctgcactggttaactgtgtttgatcagtatttgttacagtgtttgagaacacgttntgacantttgcttttatgggtaaaaactggctagaaactgaatataccaacaatactgaataacatgaaacctggcctttggtgtctagtgtgctgcgacatgtttctgtctccgcaagcccagaatgatagtcttct

SEQ ID NO: 69984 - DNA, 415 bp, Oryza sativa
  unsure (1)..(415): unsure at all n locations
cagcatttcaaggcttgtagcttacaacgccaagcatgaagctgctgcattggttcagaacatcaatcggatgacacattcagttcaccaactcaccaagctcagagaatgaaggggatttgtgctgttgtaacaaacatgtacgtactactaatcacttgaacaaacatctattccttcattngatttgatttcctattccttgagcgaataaaacaaacactgttcacagaaacacacttttacacaaacaatatgagaatagttgattgaagagcctatcacctgtgtttgcccgttcttcttgtgtcatgtgttgtgcggcactgtgttacaagctctaactaatgacgattngattaacctaaacaattgtctgacgatgtggcgtcatgttgtctttgngttttatgta

SEQ ID NO: 69985 - DNA, 486 bp, Oryza sativa
cgcataaataatcttaaaattaatttggggtctaattctttgaatattataaatacatgcagaaaagagtagtaaaacactgcacaatggctagttggcagtacacaaaaggaagtttacgacaagaggtcgcgaccatagatacaaaatcaggacgggaacatcagagaaacgcatttagtatttctgatatcatgtctttgcctttatgtactgccatttctgttcattaaacttcatgagaagacataggtttcagacgactctattcatccgtcattacctctgaactcaagtctaaaggctaaaacagtgcatggcctgcaggcactagtaaagatgatatcatatcactatatatatcagttgagttgatcaccattatctaattacaaacatcagttgagttcatcagctagtttattttgtgcaaaccatttgcttatggagatcaagaaactaaagcattcaattaattaattgact

SEQ ID NO: 69986 - DNA, 345 bp, Oryza sativa
gcaagcattcatgcttacggatgttctaagcgtcaccggttgcatggccaggctgagtgggatcatatcgatgctgggagagaatgcgctacccttatttaagctcctgaaacgctccgggccgtttatttggacggaggaagctgaacgtgccctcactcagttgaaggcatattttagctctaccccagatctggtcgccccggagccaaatgaacccttgctactctacttagcggcgactccgctagtggtagtgcggcgttggttgtggagcgcgatgaggaccatcctcatttcgcgcacccccaccctgtgctggcttggccccggagagagcatgga

SEQ ID NO: 69987 - DNA, 350 bp, Oryza sativa
ttggtctccatttttctggcgtttctgtttggccggaacccagcttcccagtgtctcactcggatcgtgacggtccggttgccgaacctgcgaagtcaccggttcatctggagtcgtcaaccccattcaaaggactctttgaagtcggttggctgatgatcccgaccgctacaacggtgggctgacttcgggaaaatcctccctcgggagagactacttgggaagtatcctaccctactgtgacaacagatgtacctgctataacgaagcggacagtgaatatacacttcacttcaaagttgtaagacaaaatattcttgcctttacgcacaatcttgttcccattttct

SEQ ID NO: 69988 - DNA, 294 bp, Oryza sativa
  unsure (1)..(294): unsure at all n locations
agcttcattgaccatctctataccaatgaattntagcaacaaccatctcataatattctcaatgtaaactagaggcggtggagatatggaggaggaggaggagcgacgatgccgctccagtaggtgttggatgttgggggagggggatgcancanctgttgggattgtgaagacatcgagcgacgtctcgatctttctggaggtgacggagaggcggaggtcgcgtaaccaacaaagaacatgtcacagactcttggtgcatcatttcacatcggacaagatggatgtacgggc

SEQ ID NO: 69989 - DNA, 314 bp, Oryza sativa
  unsure (1)..(314): unsure at all n locations
caaatttgcgccgccttcgagccactaagtgatgtagatggtgaaagtagagatgatgattagggaaaaaacatctctgatgtttgcttcatggcgtgtggtgaatctgacacagagtatgaagataatgaggctntggtggcaaagaaagagaacgtgtggatcgtggattccggttgttcgcggcacatgaccggtgataaaaattggttctccttcctcaagaaggcatctaagactgaatctattatcttcggtgatgcttctacaagtgtcgttctcgctacagagttggttaagaataaataaaaatt

SEQ ID NO: 69990 - DNA, 259 bp, Oryza sativa
ttccccggcaatattatcaaataaaggaaactagtatgctgcgatgctatttcatgtcaacttaatattttcactacactacgttttaacttttgcagaaatgatcataatgaatgagaaggaccgcaaacatacgatcaatcttcagaactgtcaagaaacaacttatggataaatggctgaaacaccaattcacagatccaacagcccatattcacaagttgggagaggagcaaccgggatgcccctgccagaactg

SEQ ID NO: 69991 - DNA, 493 bp, Oryza sativa
  unsure (1)..(493): unsure at all n locations
taagatacaccgatttctctttctttctttatttctttctttttttttatggagcggcttntaagcagccttttagtttttacttgttattttcaataaaaaccaacgtaaggaccttaatataaaattactagggcttaaatataaatatgaaaattacagggactcaactgaaaaatgccaaccctaaaattaagactacacaaaaatggattgcttccatttcatcggttctgtccttgcaacaatatcttgaatccgacattgannttttttttgccaaagtatagactcaaatgttaccgtgacatgggaacgaaaccgactcaagataagagtgtcacagcctgattttncgttcaggaattataattatttaataattattaatagaattatattaaatgtcattaatttacaagtgaagtaaatgtgtgaaataaatttctaaattaaagcatgatggattaatttgataaattctcatgataaa

SEQ ID NO: 69992 - DNA, 367 bp, Oryza sativa
  unsure (1)..(367): unsure at all n locations
ttaacagaaggttatagntatgtgaaagagatatgaatctctgcatatgcactatcctatcagtccaacgtgcttcatgatttgtgcacgacatgataatgaacagaagaattgaatttaaacgtgcatcattacgttggtgatagtgcatgtatccacatatgcacgtgtaaaaaaacaaacaaaatgagcatttccttccttnttttttaaaatttcatgtccatgtagtaaaaacttgaccattaatactctccatntttaaatatacgaagctattgatttttggacatacattngaccatttgtcttattaaaaatttatgcaaaatgtagcatgctaaagatcttaatgataaaacaagca

SEQ ID NO: 69993 - DNA, 390 bp, Oryza sativa
  unsure (1)..(390): unsure at all n locations
agaaattataattggccaccactctcttccggttataaacgatcccacaagcttcaatttatttgaggagctaaaaaaaacctataaaagagataatctgtaccgttttcagttgttattggtttttttgatgtactagctaaatgtcagtgtgttgcaaccgaatattgttaaatgtcatgtgaagaacttaagagtgcatagaagatactccctccgttntaagttataagatgtttttgactttagtcaaaatcaaaatattctaagtttgactaattttatagaanaaaataagtatacttttaacctaagactaatatattatgataatttatttcattatagaattaatgaaactatactggtggttgaaatattaaccttttt

SEQ ID NO: 69994 - DNA, 237 bp, Oryza sativa
  unsure (1)..(237): unsure at all n locations
ccaccgcagcgctctgtttggttatggaaaaacaaagtccaattgaaggctaaagatcttggttggctcttactcatggatagattgaatacaaagnttatgtcggatcataaacaatcctatgtcattaacaatgcattgaaactcttttgcatctattgtttcaatgtccttttttggtgaactgctagaatgcttttggcactatctaagatagctcctatggataatatgatg

SEQ ID NO: 69995 - DNA, 430 bp, Oryza sativa
  unsure (1)..(430): unsure at all n locations
tgataatagactagcaaaattattcccctgaattttgcatgttctttaaatttcaaccgttcgaactcagttgcttgcatcttttcaaaagataatgcaagtgatgatccaatagtcaaatattgcaacatttttccctgacttatagggttcgtacagtctattaaagttggtgtgacgcacatattcttcttgatattggtttcgagggttggacgaagttcgaaccatattactttgctagaatggtgaactatgtccgagtgtcacatcctgaaaatcgcttaatttaataatatattctttaatgcattatttagaatctnttgccaactncttccttccgcgcgcgcacttgcgtggccagccgtgccactcctctctatctctctaatctcaatctccctccaccgatatgtgagcccacacg

SEQ ID NO: 69996 - DNA, 303 bp, Oryza sativa
agcctgagctcatacttctggtgatgtaatccttgatgctgccactacttctagcaactattctggatgtacttggagagccagagttcacaaagatactgttaaggtctagcttacgtactacattccatagatatctcattgatcgaatgggttgtcaatgttgtttccattgagtgaatgctcatttgatgaattactgtgccttgccagtctgtgtttgaggttactatgaaagacatgaaattgcttgagatgtatgatggtgactgagatcagctgatgaatatagctcacttgctc

SEQ ID NO: 69997 - DNA, 281 bp, Oryza sativa
  unsure (1)..(281): unsure at all n locations
tggagttgaccaactcaatttggcatggtacggaagcttttcattgaaaagctgtgcctggcaaccgtcttgttctaaaataataattatgtttgcatcatccaacctttaataagaattcccgataaaaactggaagttgcacaaantctattaatngagttttggagttctgatctggtgcangtggaatccanaagcactaagaaggaaaaaaagaatttgaccataaaaaagtcaatcaaagcattggttggattccagcaagtatcataggaaaaa

SEQ ID NO: 69998 - DNA, 426 bp, Oryza sativa
  unsure (1)..(426): unsure at all n locations
tattcatcagttcagtatctatgacaggaacctctttacaactggtgccacctctgcagccttcttggcagcctctctctccttgactagcatttcctgtgtttctttgtattggtgttgcacctcttgcaaggtagcttgcaactttgcattctcttgtgatttagcttcctcaagatcagcctacaacaaagacccatgcataagtaataataaggtatcacaagttaactatacattntttttttcattttactaccagggaagaacaagatctcccttgccatttcccagatgtctattangtcatatggtgaatataccgcatangtcactcatatcatggacagaaagatatatatattgatattcatggacagtcagctgtgtgcttgagtgcttaaaccaatatagtgaattagttat

SEQ ID NO: 69999 - DNA, 460 bp, Oryza sativa
  unsure (1)..(460): unsure at all n locations
gcttcactggtttctgtagtaaacggaaggtgtgatagtgtgaaacacactcttcagataatcaaacattcagaataagattcagattaacagaanaaggacatggcaataccttgccacgtagataacgaaagacatgccacgtacgttgtaggcctcctcacagattacttccttgcaaaccataacaatatgtatgatcaatggataactaatattcgcatgtttaagacgtttaaaattctgcgagcaaggtgaaaagctgagatggtgagacaaccggagatccgtacaatatttatccacggtataccaactaatataacttctaaaaacatataaaatagtaaatccttcttaaatatgtactgtntatcangcaaatctcacattntattacatgtatataanaaaatggatacataacttcaaattaaactgcagatgtacatatccacac

SEQ ID NO: 70000 - DNA, 488 bp, Oryza sativa
  unsure (1)..(488): unsure at all n locations
tctcagcttttttctagcgtggaaactcttttaaaagaatttcaagcggatcaagaagatggtntgagaatgaaaagatcgaatgctaattttaaataagacctctcatgttctttttatagagcatgcatgtgtcatacgttcaaaacacgtcaattataaaaaaaaaaaaagaggtggtacactttaactgtatgatttagtgcaagcgcaacaataatgttcagatgatgatgtaatgctgtccgttcttaaactgcaagatttgcagacacttctttgccgactaatctcaaagacaatataagtatttattgatcaccgcttttcatcgaatcaatcactagctagtaacacaccgacacangtggggcctggcccacgtggggagagccggagagagaccagcaccgcgtctagcttccacgtgcttattnntttaaagacaaaatacaaatccatgtactcgcacactcgttagtataaat

SEQ ID NO: 70001 - DNA, 443 bp, Oryza sativa
  unsure (1)..(443): unsure at all n locations
tcaagcttgtcgccagtctagtcgacagatcctttgaggcgaaagaagaaggaatgagaaagtacctggaggccgttcggtctatggtcaaatgtttcgccggcataacggtcgaacacttgccccgaggccagaacaaggaagctgacacgttagcaaaaacaacagcctgcggaggaccgcattctccaggagtctttntcgaagtcttctatacaccatgtatgccaaaagacagcacatgcatcatggtaattgaccaagctgaactgggcgaagacccggacgactggcgaacgctcttcgtcaagcacctcaaagagggatggcttgctgatgacgaagcaacggcgaggcagctgcagcttatagccgcgaaatacaagttaatctctgggcagttgtaccgaacctgaatacagcagtccatgaagtgaggacat

SEQ ID NO: 70002 - DNA, 512 bp, Oryza sativa
  unsure (1)..(512): unsure at all n locations
tctcatgagaaatggtgagtctctcatgagaagtctttatcttctcatacaagacctccaaagaagcatgatccttctttaaggccttgaacttgacaatctacttctcactataagcatggagctcctcaaacatactcacaagctcatcataggaaacatcatcacaatcatcatcactctcactatcactaagagatgttaccttgatggcaacaacggccatcttcttcttcttggagcttgcatcatcaccaccttcttcctcggacccggatgaggcggagctctcctcattngagtcccattccccgatgaaggcctcaatcttcttgccttccttcttgagcttcttcatgagcttgtagcctccactcttcttcttggatgacttgtccccatcatcatccttggaagggcacttggaagcaaagtgtcccttctcaccacactcaaagcancctcaagtggagagagtcttgtagggtcttctatttcttctcctattggag

SEQ ID NO: 70003 - DNA, 401 bp, Oryza sativa
  unsure (1)..(401): unsure at all n locations
gcttctccagcccccaccgnncttcccatcgagccgtgcaggcgttctcagcgtagaataaagtgggcggttagggcaccatcgacagcccaacaagctcccttcacctatccccaacctccatccctcaccaagaaaatctgcattcaccacctccactcccctgctggcacccatcntccttcaccactcgatggcgacagcgagatccacaagacggtgaccacgagctgtggatgggctgagggtntgagaatgccaccattgggctactgcggcggacgggtcgaggccaccgccaccttctcgagctcatactcatcgtccacggccgtgatgttgccgacgcaacccaagtgctccacgaccatgaagatgacgcccggtcacctctcctccct

SEQ ID NO: 70004 - DNA, 442 bp, Oryza sativa
  unsure (1)..(442): unsure at all n locations
tcatgaatactcctcagaagacatcacgcactttcgccttctgaacatgtttatattcaactaatccatcacaagcgaacaaacttaanaatttctcanatnatttgcttacttctactatcccccacgcaaaattcaatccgtnactaccagagcggtatcccagaaacaatcagcgctgcgccaaataaacacccagaaaaagagaagacaccagagcagaatntctcagatcgcgccaaacngatacccgaccgtcggaggaccagaccaaaggcacatgaacagacaggacgcacgcaccacgatgaagaagaagaagaaacccctccggatcgggccaaggccaatgccgagctgagccaagcactcgccctctcgcgggcggcggcagaagatccgagtcgcggatctgaggtttacgccgcggaggggggggggg

SEQ ID NO: 70005 - DNA, 445 bp, Oryza sativa
  unsure (1)..(445): unsure at all n locations
agcttacgatgttgttttaaataattggattattcatgtgacaacatacatataatctaaaatattattttaatcttattattgcaaccaatgaaatacatataatctaaaatattcttttaatctcattattgcaaccaatcaaatcctacactgactcgtatgatcaagtccacacaaaatagagtcactgtgcacttttctctaaataacaattaaaatatgtttattttctaagattatttccatataatatgttatcaagaataatagctatacttcacaaaaataatatgataattgtctacaaagatgtgcacggtctccaacatatgagaatagatgatgaaacanaagtcgtgtaggagatggaaaataattgatggagtctatccgaccaaatgttcatcaacttaaccttntttctaaacagtttttctcatat

SEQ ID NO: 70006 - DNA, 445 bp, Oryza sativa
  unsure (1)..(445): unsure at all n locations
ngcagctactatcagagcaagtatagtaatgtacaggcagccagcgtaatcaacagctacgtcatcgaatccaatgtggaggagcgagaaaccaagaaagagaaggaaatgggtgagtcgcgagtcgccggctcggagcgttatatccgaggcgaaacgcccgctcccagcccgttgctggcgtcagcgcttgctccacaacggatgttttgtacatgcatatattaattgcttagatgttttaattaagtaatgtatcagtcaacttatagccaacccattatacaggtgagtttttagagcatggctaagtgacatggaagtgacttttagccggctgctggctaagttattatccttgctctcatggactataatcagaattctagctgccgcagctagctactatcagattctttntcacactattgatgggaccggctat

SEQ ID NO: 70007 - DNA, 298 bp, Oryza sativa
gagcacatacaattatggccaacccagtaggcctgcatactatgacatatgcatgacacattcatggccagcgacatagtgggatgggggcagtaccttataaattgccaaactcatttatacggcaagcaacagaagaaatgtaaccccgcacaaggggttatgatatgacttgctttcccaaaagaaagcagaatgtttttctaatataaattgtccatcggaacatgagtgtcctgggcgtccttagacaaaatagccttaagccactgacaagacaaactggttgtaccacttt

SEQ ID NO: 70008 - DNA, 247 bp, Oryza sativa
  unsure (1)..(247): unsure at all n locations
agcttattcagaatataccgagttcaaagagaatgcggcatgggaagttatctattaattaggaatagtttgctagtttccttttatctttaagaaagtgtggttagtgtcctataaggactntatcttttccttttatctttaagaaagtttctttcttgtccgactaggacttgtatcaaccaatgggtataaatatgtacacccggggtatattggatctatcttcacagatcaataccattcc

SEQ ID NO: 70009 - DNA, 401 bp, Oryza sativa
  unsure (1)..(401): unsure at all n locations
cctaaatactattgaacaatntttggctgaaaaccaatatcttaagtgcttgctgactttgaaatttctctgcacacaatcaaattttaaaatgtggtttttagaaagaaaaggtatagccacttttaaggaaataataatggtatacatgaaccagattacaaaagaaccaaagcaaatagtgtgcaatcattaggttacggtgacaattctgaattccactaagcgatcagtatcacaaaccctataaccaggatgttacaactgggattggggatccagaaagcaagcagaanataaatctagctgacaaaaattacatagatgaccaattgnggtcttggngaacaactatcctgacannattcgtacactagtaccattcatcatcagttataatc

SEQ ID NO: 70010 - DNA, 389 bp, Oryza sativa
  unsure (1)..(389): unsure at all n locations
agctngaacttcaatttatttggccatttgattcagtgcccacttttcttattggcattcggcaaggaaatctctagttttccagttttcagaacaactntgcttatacgagggaatgaaacactcaaagcattgatcaatttcagttgcttggcaaatggccgaaggaaagtagaccatatagcgtttcacttgtatcataatctattctcatttgaaacttaggaatttgtcaaagtggaacactactttcctttataaagctatcctgaaacaacggaattatgaaactttagcagccttgaagatgcagttcttggtggttgagcacaaaaagactatatacgcagtagtatttttatcgtacacttatcgtacgggcatgttca

SEQ ID NO: 70011 - DNA, 426 bp, Oryza sativa
  unsure (1)..(426): unsure at all n locations
aatcactttcagtgtataaatataatatgggctttgtgcatactatttcagttaacatgtttggagagtgatatatntcgtattaatatatgttggcaattttttttataactatttaaatgacatgcaaacaatgaggggatatcctctcaaggaatgaaaatccacatcctagaaaatgtcccattcggttggtcttatattttggaacggacatggtactatttttttctataannattaccaaatctaaagaaatttgattaagataaatataaaaaaccgagtataaaatctattatataattaaaggaatagaaaaaggagcctccacgttcgctctcattggcctagaaatctcacattaatcggagaaaaagaanaaacagagtccatatatgaatacaatttacaaatagctgaaat

SEQ ID NO: 70012 - DNA, 271 bp, Oryza sativa
  unsure (1)..(271): unsure at all n locations
atattatttaactaagattttacttcagcgcctattctttccctgttcccaccatgaggaggangaagagggagagaccttggaaaaggatangtgactggttatatgtatgggtatatgtaaaggcttttaatgcangtgataaaactcacaagaaagatgatcccatatgcatgctcccacatcattttctctttttctttttgcattatatatnagttctccttattattggttatgaatgctctcttgtagactcttaacatgtata

SEQ ID NO: 70013 - DNA, 488 bp, Oryza sativa
  unsure (1)..(488): unsure at all n locations
gcgtcatttctggcaggtagaaatccagctccgaatatgggtccactaactacagttgatgacaagtttattagtggttacgagaaggaaaaattgaagcttgaagagaaaataatagctacacctggcggaggtttcctgtcagtgaataaatggtactctgggagttatgaaacaggaatttgttgtttaacagtgcactttattgatgaagagtggaagaataatagaaaaacaataagatgttgtctttcagaatcggatgggttagacttgaacttgttcccacactggcaatccgaaattgtaattatganngatgatgacagatggtgtttgaagaaagtagttcgagaatggtgtctttgagccgagcttntangagtgacattggagggatcagtggataagaaagcacaatatccttggaagatgaccttacgactgtgaagaactaccttgttgctcaatgcagctattaactatcc

SEQ ID NO: 70014 - DNA, 369 bp, Oryza sativa
  unsure (1)..(369): unsure at all n locations
agcttgcataaattataattaatcgagtntctctgctattgtgcanatctcacgagtgaatcaaactatactaatcaatctgtcttggactcttggtggtctcgtagaggatggcggcagctaaaaccaaagtcaaggcagactggtggtttccctttccccggatcccgggtggacaatcgaacggcagcgcgtgcagcctctgggcatcgagacagactcacagacgtcgtcctcgcgtcccgggcatgttggtgaacagacgacagcccaggtgaggtggatggcggcgatgtcttccgatcgagcgtcgtctgcgccttgatcgtttcgcagtttcagtatatttggaacggccatgcagtaact

SEQ ID NO: 70015 - DNA, 311 bp, Oryza sativa
  unsure (1)..(311): unsure at all n locations
tgccaatagatgtacttatatgccctaatttcagtactgcacattntaataaattacttgcggccaaagccacatatgtgcagcatatttcacagtacttagtggtcaaaaccaacaaaatttttgtggcaaaaacacatttaccttgaaattttgtatttccttcttagaaaggtggttgctaaccacagtgctttctttgctggggcttacactgtgaacaaggacgtgttaagagttaaccaataatcaaaactagcacaaggaaataattatctacatcgacaacagaagttgaacaccttccatat

SEQ ID NO: 70016 - DNA, 446 bp, Oryza sativa
gtgaggtacatgtatgactcaactactaaacttaggacattaaatccaccggcttataaatcatttaagccaataagctgacttaaaagtctagcccaataagcctaagcctaaacaaagagggcctaagccacaaactaggttggagaagctcttttagcttatatgagatagatgtatgactccaccactaaacttaggacattaaattcactggcttataaatcatataagccaataagctgacttaatagtctaggccaataagcctaagcctaaacaaagagggccttaagctatcattaagcttattagctagcgctcgttacgagctctagtttattcggtggcagatctagaaattttacaagcctggcaacctaatatagaaactacattaatccatcaaccacgtcatgtttagtatgatcgagtctaatttataa

SEQ ID NO: 70017 - DNA, 453 bp, Oryza sativa
  unsure (1)..(453): unsure at all n locations
agctgaagtaaagcagttgatggaagctgtatggcaccaattctatactgttacagtatttttctgaaccatgggttattgaccttttatgctgaccttctctgatccattccaagctgatgtagacggcaatggatccatcgactatgttgaatttatcactgccacaatgcatagacacaagctcgaaagagatgagcatttgtttaacgcattccagtattttgacaaagacaacagtgggtgagtattctgaactgtcacattgaaaaaaactcacaagtcgcagtattttcacaatggcagtccgccaaatatgaatatgatcataattcacaggttcacnatttataatatctagtgctcactagtctagaaccatcattggaaaaggcagtagacaatgccatctgcgcatcaaaactcccatggttgatctgactagagaaatta

SEQ ID NO: 70018 - DNA, 495 bp, Oryza sativa
  unsure (1)..(495): unsure at all n locations
ntntcttggaaatccattagcatcgtacaggcttgcacccatatgcatgctcgatgacttcctaagtaccattagacataattgagtccatctcattgcgtaccgcttccttccaatagttagcgtcaggagatgaatatgcctcttcattggttcttggagtatcatccacaagatatacaatgtagtcatcttcaaaagactntgcagtcctttgtctcttacttttttgagtttctacaatgttatcctcctcaggattttcctcaagcgtttgatcaatgtgttctatcgacgcanagtgctcangggataaaataggttcttgactagaagtgctaggtgcatttttttataggaaattcattctcaaagaatgtggcatctctggactcagtaatagtaccaacacgcatgtcgggtactccatactntactattaagaacctatatctcacactgtggatagcataaccaagaaacacacaatctacg

SEQ ID NO: 70019 - DNA, 405 bp, Oryza sativa
  unsure (1)..(405): unsure at all n locations
gcttggcgggttttcatcacaacagtctatttgatcacttgccaaaccaggatcagcacaagttcatgcaagtgtgtgtaacgagctggaaacgtttcagtttgcaactgtcagagacgtacacccgttcaccaagaactgcactagagcacaataaagttaattatatcattccgtctcgaacctgatcatgctcgcaagtcgcaaatgatgtttgtaagtgtaaccatccatgtttcgccggccggccggtcgcgagtatgtttcccgactgagaatgatgatgaganacctgactcgagcactctgcactactcatcaatctgaagatcgagaggatggcgatacttggacagcaactcaagactgaccatatcgcagtttaatactgctgctcgtcttgat

SEQ ID NO: 70020 - DNA, 498 bp, Oryza sativa
  unsure (1)..(498): unsure at all n locations
tcggctccgttacatctgctgtgctcggntgaagaagcgacgaccaattctgaacttgattttggtggaggcggtggagcctacgtctcactcgccttctcgcctcttcatacccactcaagaggatactgcatgaactggttccctaatattcctatgaaatgtttaatgttggtgtggacagtgataggagctctagaacacatacaaaatgaacattntatcttacatgtatttgtcaaagtagggtaaaaaagacaatggataaatattgatcacaacgtcaaactcgttgagagtttgagaggggaaaagaatgctatacgatgattcattatatcaacaaagatgcgatactctaacaaatataaaaaaaaaattccctagagatgatcttaccacagagttcgcggcataatagcatantaatattgtttgtataagctgaaattctggctcatctatatatacgccgagacaaattttagcgcanaaatg

SEQ ID NO: 70021 - DNA, 349 bp, Oryza sativa
  unsure (1)..(349): unsure at all n locations
agcttgncaactgctctagtgtgtactttgacttgcctatgtgccacttaaacgttctcataataattcaagattcatctgctactccagatcttttgaagtttgacaatacattctggacttcttaattggtattagaatttgcgatattaccaaataactaggaagacaacaaataataagcaacgtacgagagatgagcaacaaattgacttcatcatgcaaagtagtcgagatattttctttggcaatggaattacatctcaagttaccgcccctctatatttgttagggtaaaagtattcattgagttctgaataatttctcttgatcgcttcgantcatcact

SEQ ID NO: 70022 - DNA, 301 bp, Oryza sativa
tcatagaaagaatgttaggttttgcatacgattttgtttaaaactttttcaaatgtttctaagagagtgcttctcaacaacgcggacacgacagtgcaccatgcccggtcggactagtacaatgtatcaatctttaacagatcaagagttggcccccagccaaacgatttggatggcctccctggcccagctgatcacatcagccacagtcaaaagcaacgtgttccagcacaccatagcaatttcacaagcagtaatcgaatcaaaactacgctaaagaatcacctcacatccacccatg

SEQ ID NO: 70023 - DNA, 257 bp, Oryza sativa
gctcaccgcactctgcgcggaagcaccgagtcacgtcgcattacttggtgacctcgtcgactagctggatcggcgtccgatgggtcgatctctaacggggagcgatgaatttatggcgaattcacggaagggggatttgggtttaaagtgtttggctgcttggtggagaagtgggttgtcattgtcgccgtcaacctcatgttcacacgcttcttcttcatgtatggcgggttcaggccatcacaaacgtgtggctg

SEQ ID NO: 70024 - DNA, 361 bp, Oryza sativa
  unsure (1)..(361): unsure at all n locations
tgcaagctggagatgatggatcgacnggcgtgcgctgttgtccgggaggtcctggccatgactgtggagaagagaacactggtggatcatctcacacatttcaggcgtgatttcgggctaccgaaccggctgcgcgcaatgctagttcggcacccagagttgttctatgttagtgtcaaggggttgcggcactcggtgttccttgtcgaggcgttcgacgatgacggtaggctacttgtggaggatgatatgcttgttgcgagggatcggcttgaggagctcgtccgcgaggggaagcggatgaagcgggctaagaagaaaggccttcttgctcttgcggatgacagtgatgaagatgatg

SEQ ID NO: 70025 - DNA, 354 bp, Oryza sativa
  unsure (1)..(354): unsure at all n locations
gggttaagggtacttagcatcngttctgcctgtagttttttttagtacttgatggacaatgatattttccatcttttcaccacaagaatacgctgcaatcttcatgtaatgtatattgctgatcccttacacacaccttttggtttccagttagaggatgcacagaggcaactagaaacttcatacaaggaacaagaagcattgattgacatcttctcagaagaaagaggtcgacgagacctataagaggaaaatctgcgagggaagctaaaggtgagtgcgagagaccgagcaagtatatctttgtactaaatcgcagtatcactgctacttcacttttgatagcaattcgac

SEQ ID NO: 70026 - DNA, 274 bp, Oryza sativa
tattggaattaatgatctgagctatacaaacctgacagttagcctcagagccaacttatcacaacaattacatctgttggcaacataagagatacacccttttcttttggctttgcaaggagagatgttgctagctcgagtttgtcatcttccaccaaagaagcttctactggaaatccttgtgctttgtaaatgtgaatatcatacacgcacccaatagaaggatgtcacacttctctcagagtgattcaattactccaatcttagatgacac

SEQ ID NO: 70027 - DNA, 513 bp, Oryza sativa
  unsure (1)..(513): unsure at all n locations
ctctatatgtgcagatatcttcagatatcttaatgaagaagcatcttatatacctgtgtcaatggtaatgcagatatagtactgggtgcagataccctaatgagtaccaagtgcttgatcgatgcatgataatctctgtccaaggctccaaaggcattccggtttacgctggcagtgatctctgcaaagacagcaataataaggattctntgatttcctcgtaaaagaagcacatatggaattggtagctttactaaagtttacaaccgaattcgattctgtagcatgaaaataggagatcagagcgcatctaggattttgttagaatttggaggctggtatgcggaaggggaaagaggtggataggaccggtgtttataaattattagagtgtcacgtggtggtttaggagtgtgtgtacgaagccatgtgacagcttangagtgttatagggtgttcatggactctagtgtatatagatagattgaagatatggtagagtctaggattaat

SEQ ID NO: 70028 - DNA, 460 bp, Oryza sativa
  unsure (1)..(460): unsure at all n locations
agctttgtggctctgtctgcacattggttattgatccatatgagagagnattaactcaaactgtacaggtaaaaacaattgaaataattacaataaattagaagaatgaaggaatggtgtaaaactgcatagttaatggaaatgcaaaataatggactggcagttggaagttgaaaccatactaagtgaaacaccatcaaaggtgaggagaccaaaacaggcaagacgggtgtcgatggatattactaattcataacatatccagttgtttccttaagtaatctctctaacagtacgttatggagttaattaacaggtcttcctgttatctggaaagtagctggtatgggcaaatgagacaacanagctagccagctatgtgccacataanaacatactaatatgtaagtggcataactataacttttactaggttctttagatctttgacatgggataa

SEQ ID NO: 70029 - DNA, 508 bp, Oryza sativa
  unsure (1)..(508): unsure at all n locations
tattcaggttatccacaggaatatcatctggttggtaaccatagtgtctctaaaacatttactgaactactanggtgcaaacctgtgagaacaatgccactctgatcctcaccattcatgctgctctctttgggtgccaacaaatgtgaatgaggcaaattgctaccacataacctaatgctgtgatcctgactaaagaaagcatcctcacttccacgctggtccatatcttgtgcaatatcatgatcctgactcactgaagtagcatcatccatactctggtctaaacctagcctacccttactaacagtaaaaccattattcagaaattgcccagacatctccatgctgttgatngatggaggtaaactcagccaattttgaatacctgtactgatgaagcccgcaccattcangacttctattntgccagagctattcaagttgcttagtgtctcaacagttaatcctttgctgaccttcactactagctcatgtcttttctcag

SEQ ID NO: 70030 - DNA, 476 bp, Oryza sativa
  unsure (1)..(476): unsure at all n locations
agctngctcagcaccaccatttgcgggtggtcgtgcagcggcagcgtcgcgccggccgggaagcagaacacgccgatctgcacgtacgtacgcagccgcgcaacaccgncaccagatcgagcgtcaaattggtaccatctcacccttttgcgaaagtgcaaaanaatactaagaagaagtgcatcgtctgcgcgattgcgcgcgcgtgcatgcgtaccgagaaatcgtcgcactcgtggatgtgcacgtaggtgatccgggtgaacgcccgcgccgagagaaaccgccgccccggcgggctcctctcngtcgtcgtctccgaggacgacgacctctctgccgcgctgccgncgccttcgatcccgacgtcctgcgcttcatgccatctgcaaatcagcaatatgaccaacacattaattatattgcacacgtatgaaccaagatgcaatgaaagataggagtataacgtaccgagc

SEQ ID NO: 70031 - DNA, 405 bp, Oryza sativa
tggaagtctcccgacgtggctgatccccacgggctgggtgacccgggttagtaatgtcgagtgggtaaagtgtaccccctctgcagaggttaacaaactgttcgaacagccgtgcccacggacatgggcggatgtgaggtgattcctagcgtagttttgtttgtctactgcttgtcgaaatgctgttgtgaaaaggggttcgatgtttgaaaaatctgcagctgatgggatcagctaggcccgggtggccgtttggaaagttgttggcccgggtggccgtttgaaaagttgttggcccgggtggccgtttaaaaagctagtggccgggtgccaaccttagtgcaatcctaaagaatgacacattgcacatactccgaccggacgagacgcactgtctcattcgtg

SEQ ID NO: 70032 - DNA, 454 bp, Oryza sativa
  unsure (1)..(454): unsure at all n locations
agcttatgtggatgagagnataaaaaataatgagtattggctcttatgtaagaactaactctagacatgtcctaaaataaatgcattaaggctgtgttcccaaccttcctctctcgcttaccactcgcacgctnttcaaactggtaaactgtgcatgttnttgtaaaaatttctatacaaaagttgctttaaaaaaattatattaatctannttttaaagttttttaagctaataattaattaatcacgtattaatctattggcttcgttttcgtgtaggaggcacctagctaagaacacagcctaaatacataagtgaataaaagatagagggaaaaaaataaacacaaccttatagccactcaattgtacttgttagttctaatataagcttatagtcagtagttcgtgacttcgtctactattanacttgatatatatcctgtagtatggt

SEQ ID NO: 70033 - DNA, 496 bp, Oryza sativa
tattaacagcattcttaggtacccgctattgttttgtttctcttatattatccatattgagcatctgtgactcagagaagataagatacattatgttgtcctgttcttctttcttggagaatactcgaccccttgctgcatatatacatcatgatgacgtccaattatgtgttgctcaaccctgaagagaaaaccgacaagataattgtgcaggtctacatgcttcagctaactgcgtgtttgataattagtcatgtcatggtataagtcatacttttggcacatataccagcataaatgcaggtgttgctgctaattaacatcacgggtgctagatcttggtcaatatgcctggtggcggagctgatgattcggaggctaggagcatacatatagtgtgctgacgatgactctgtatgcatgatccctatcagtcaatttctcttcgacaactcttcatatcgacgttcgctttgaccactcattatcaatgttc

SEQ ID NO: 70034 - DNA, 400 bp, Oryza sativa
  unsure (1)..(400): unsure at all n locations
tctaccgaaagaagtggttggagttcctctcattgacccgttcgatggtaacatcgtctacttctgtatcaatgaatgcaaagatggcgacggccgcgaggtctgcgttcatctatggaccaagcagatcaaggcctacagcagcagctacaagggcttgaacaacagagccttggagcctgtaagttcactggtcgcccccgtttcaacatgttgctgtcatcaatgtactatattaattattttgctattttctcttgcagtgttcacagcgagtctgaatagcacccgcaactatgattagcacccgcaactatgatgtctgcttnacgactgactgggatttgcaaaccctgctctcttcacgcctttaacatcttcaacctatgcttcaacatct

SEQ ID NO: 70035 - DNA, 485 bp, Oryza sativa
  unsure (1)..(485): unsure at all n locations
tattgccatcccaagctaagcaatatcatggtatagacttatagagggagtagatcgtctggggtcacgctctcaacgtcataaggaagtcgcgcgtcactccttcgtatgtttcgtattgcatggagctgctacttcttttgttccacgtcgtaacgaggatagcccatttacaatagagtgtagcgggagacgaacagagatgctggtcgtcaagtcaatccgtccaccaaagaataaaagaaaagaanaaccaatgtgacatccgctggccaaccagcacgagtgtgggaggagcatatcgccgatgaagactcctttgacacagccctcctcttcattcctcgtncatgcaagaatantaatagtatctctccttaagatataaaaggangagtctgatgacttanngatagacattntgaagaaatgatctggagcagaactctagtttctctcgttgtaagaaactctgtacacataca

SEQ ID NO: 70036 - DNA, 456 bp, Oryza sativa
  unsure (1)..(456): unsure at all n locations
agcttctgctcttttgtcagnacctctacttcctgttaatacagtgcactaattgaaacataatgtctctaattgaaagttaatgtaactataataagaaacaaagaatttaccttgacgagaacaacaaaatgtcatggtttttataatcttagtatttcccatgtaatgatagctgcttcttctaatgctgaaacctttcttaagataatcattgtagaagtcgataagctttttgttcagagctaaatttcatgccaatctttggcaccaagtcttccagatattntattgtatgagaagcttcatttgttccttcatcctagttttatctgtggtaatagtttccatcaaaaaattgcaaataaaacaaaaggaacgatgaatatagttgctcatatgcacgtgcacatgtccggatcctacagtttagatgcaactatttaacaaaatgta

SEQ ID NO: 70037 - DNA, 489 bp, Oryza sativa
  unsure (1)..(489): unsure at all n locations
agcttaaatccactaaattacataatattttcatgtgaactaaaacattttcatattccatgtaaattaaaacacttcagaatttccatgtgatatacaaccacttcaaatttgcttcttttttttcaacttgtaaaatttgaattttaatttgtggagtgatatatcatatactaatatattttctcaatttcgtttttttaattctttgtaactattcgagtgacatagaagatgttcactcgagagtttaaaatttactctccatttaatttattatagttcgtacaaatttcgaaataaggcactagtatntgttagtaatactttctccgtttctaaaatattacaaacctggaaatacatgacaaatctcatcttatcctagctagaatacaatggccgtgtttagttcaccctcagctaccccaaacttccaacttttcatcacatcacatcacatctaaaacttntctacacacataaaca

SEQ ID NO: 70038 - DNA, 221 bp, Oryza sativa
gcttcatgcctcttctcacctcgcctgagtcccagccatcaattgcaccgacgcccggttcccactagatcaacagggccgcgctacgggagggaggcaagagcaccgtctcaagaagccaatcaagaaactagacacatggacatgccatcgccactaccaccagctgttcgacacggtgaggcagctatagcttgggtgctcacaagggcggaactaca

SEQ ID NO: 70039 - DNA, 444 bp, Oryza sativa
  unsure (1)..(444): unsure at all n locations
agcatcatttatnaagaagcaacttgtgaatccgaccactttatataaatgacagtcttcccttgttttctagtataagttgtcagcccaaacacttactcgcacacacacctctctctttctcacttgatgaaacacacacacacagagatgatgaactgacggaggaagaagatgaacggtacgcaaggaatttccacgctgcacaccagcgcgcacagcacanacacttgtttttcacttcacttttggcacactntaacaaatgctgattacattggttaaatagaccacacacacgcacaggttaagccacgtcttgccgcacaaaccaggcaagcacctccgtggatatcctctaccaccttctacatgcaaagacaactcgctgatgcagacaccactaaatactaaccacacatgcatgagccattgatcagcttc

SEQ ID NO: 70040 - DNA, 294 bp, Oryza sativa
  unsure (1)..(294): unsure at all n locations
ttctgatcatttttaattttcatgagaaatgctttccgataagcactatatattggagttaataaggaaaattcattttattcattcaggactcttcatcatcggctgctggaaatgattcaagtggcttcaaatggttaggtcctgaatcgcattccaaaaaaagggaagagctacaaatccttctggcgaangggatttacattcatggtacgcttatcaatcatcagncgcattttaaaaaaaatcttagaggactgaatcttangcttacaccaattgtgttcatgacac

SEQ ID NO: 70041 - DNA, 401 bp, Oryza sativa
  unsure (1)..(401): unsure at all n locations
agcctgtaaatgatgtctctgctcggcagaattggaacttcaatccaaccacacgcctgcgctgtgcttctcttcccggcgctgtccatttctactaccaagcttgtaaatgaagactctgctacaaacggagcggcatgctcgccggagcaaggtgaaatccgatctggcaatcaagcaacccaagggttgttccttttttggttttcaatctttccgagtacacatgagtggctcgggattgtgctgggcactggacatgtagcatatgtgcatgaaccgcccgaagcggcggagccctggccgctagctgctatgctgctgccgcgctggctggctgcggagagccgaatgcngtggcggagctgccttgctcggcagctgcacctgtgcttgccgcc

SEQ ID NO: 70042 - DNA, 483 bp, Oryza sativa
  unsure (1)..(483): unsure at all n locations
ctgctcgtgatagaaaataaatgtattctaactatttatcactggactgggaaaaaggtgattcctcgctgaggaactgatatcttaaatgaataaattctttcagttgcttgaactgattccatttaatcctacttcccttctaatcttaagagcacggtagctgacagttcataagtttttagtagcacgtcttttccattattctagaatcctgaatccttgtttatggataagttgcttggctatcacaaatatgcaagatcagtatattctctcgcaatactttaagagcatgcaacttgttggngtttagctcacttctgtgttcttcagaatggggaaagaagagctatggtggacgaatatggagatgatgatattgaatatgaactagcttctgtgtctgctcagcttgcttatgtgcatcaggtaattaaatctgggaaaattctccgtgcaatagtcaatctatcttttctg

SEQ ID NO: 70043 - DNA, 371 bp, Oryza sativa
  unsure (1)..(371): unsure at all n locations
gtgtggcgctggacataatagaacacatgcatgtagctttcaaatttaccggttcatactaaaagaaaattgtaaactatttttcatggcttctcttcgagtggttgattgggttttattttccttgnttatattaacatgttcttgattattttaagtgcctgttgatatcactcctatattcggcacagcaaataagctgcttgcaaacgatcagtanggtgctcggtttatcaagctacgtgcttcagtggaactctgcaagaaaacgtattttgttcgatcctaagatactccatgacaagaaaagcgaaacgggaagtaggaataaatggacangttatccataaacaaataatgtcatgtcttat

SEQ ID NO: 70044 - DNA, 400 bp, Oryza sativa
gtaatgccaatcctttttctaataatctaatactatatagctatgatggctatggacttaatgaccatagtatgcatgtatactatggtggcccaagcaagtacatctaaatgatgtgatgtgctttgcaaattgtaataacataagtttatgtgttagaaataatggaattaaagggaacatacaacaacataacaccatgtatgcatgcatgcatgcaccctctatttcctttctaataatcagattcgggctcctatgatagttagactgatgagatattcattgtcccaaaaagaagcaacataatgtttgtgtgtggaaggggctggagttttgagcggatgcttcttagaccagccagtcagtagctagcttccatatccaaagactaacaagt

SEQ ID NO: 70045 - DNA, 431 bp, Oryza sativa
  unsure (1)..(431): unsure at all n locations
agccttataanatgttctatacaacatctcacatgggtgtgtgtgtgtgtgtgatatcactcatccctgtctgtcaagagacaaagtgcaaatatccacctgcatattgtgttcttgcacctctctctgcaagctagctagctgctgtttgaccaggcaatgcaaagggagatatgcatgcaaagagagagcccttttgtgccatgcanatgcaatgcaaagcaagcaaatcatgagcagtacatttcaccaggcattggcatcatggcaggcatgaccaagctctctcctgctgttcttagtgctctaggccctagacatgctacagcctcagtgtcacagcctcactcattcactcactcaaaccatatcgtatctctttgctcttctgttccttctgatgttactaacaaccaanacataacatgaca

SEQ ID NO: 70046 - DNA, 189 bp, Oryza sativa
  unsure (1)..(189): unsure at all n locations
tgcgagcatgcgtgaacagcgagctacaggatcctactctgttttacacctatatattaatatcgctatataggagtatccttcgtatagatacactgacaccacgttgacgatgtcttgccgagttagctnacatacttacaactttcctagttacatgaccgtgcactcacccacatcacacaacca

SEQ ID NO: 70047 - DNA, 476 bp, Oryza sativa
  unsure (1)..(476): unsure at all n locations
actcagctgtaccggtgattggattacctggacaagtggcaaaagaaacatatactatatactgttgttgcacagatccaaatgaaccagtcacccctgaaatgataagacttacaggagacctgtgctcgatctggtgcatcaagatcatcatccttgtcgaagacccgtgtaattcggttcacaagtgcgctcttgccagcatctctagggcccaccaatagaaacgttgttatatcaggcaacacatagtcttcagattttgtgccacacactccttcaaccaagtccccaggtttatacctgattatagaatgactaacattaaaaaaaaaactcgtttgacaaaagatcagatcttgacttatagtttatggccgaacttcttgctagttactgattcatcacagtgtagtcagcaatcagcatataangttgctcntactaataaatattggtctggtggatggagaaaa

SEQ ID NO: 70048 - DNA, 345 bp, Oryza sativa
  unsure (1)..(345): unsure at all n locations
cgtcaggtttgccgagaacagcacattccaggacaatttcatgctcatcaagaaatccaaccagaagtaacaagatgagtaaccttcaactaaaccattgggctgtcttcaattagataggtttacanagtgactattggaaactattcaagtaaaatggagaaatttaagttttacctttattattggctacctttattcttaccacaaggaaagtactacgtatcagcaagttctttcaaggcagtacgtntgctaataatgtctagtgtggggatatttacctgtaacagcactgactcaatttctaatgcagacagcttataaccaccaactttcatgatg

SEQ ID NO: 70049 - DNA, 332 bp, Oryza sativa
  unsure (1)..(332): unsure at all n locations
acttcactactactgtcttatccgacagctcccctggttcgactggagcaataagctggaaattcttcacagatgcaaccataacccggccgtgaaaattcaagcaccaacactgaagatgctcatgccaacttggtactttactagtcagaaccaatgaactagggatgctattgctaagtcgttntccgtcttgtggatctactgcagtacccttgangacgagacactgaacactgcagctcattcttcttggacctcttggtctgagtaaactgtatttataggatacctctccaacttctacatcacccgtggaaaccagtgggcat

SEQ ID NO: 70050 - DNA, 453 bp, Oryza sativa
  unsure (1)..(453): unsure at all n locations
tattatgggagtacaaatttagacagagtactactacctgttttgtttattctgatatgataaggaaagagttagctacattggcggagagcagactgcctgaattgagaaagaggagcacagggagcttacatgatattaaccagcagatgagagtaatcgtcgatgccgtcatcgctcaccgacgcccgtggccggtcatagcaatgctcgtgctttagctgttcgaatcgacctcaagctggcctgacgtcgtctctggacgggatgggagcagaatgagcacaacgactaacaaagctgaccacatgctagtgtgctgcccgcatataccactgtggaattgagattngagaccgtaccttagtccaattatttattccgagcgatcacattgcttgctaagctattgatgaattctcccacggattgattaaataacagcttggctgt

SEQ ID NO: 70051 - DNA, 473 bp, Oryza sativa
  unsure (1)..(473): unsure at all n locations
agctnttgtcttgctccacgaattntactaatcatctttcgcttcgccttcattaatctgccgtctgcttgttttaccagcagtaattaaagaatacagtgatgttcaaaatggagacataaaatgactctgcaacacagtcaacaacacggaaacaaatactccttccgttccaaatataagcatatctggctatgtacctggatgaagggatgtccagatacatacaaaaaatgcttatactttagaacggaggaagtaatctatagcataacttctttgcacaaatttgcaggctatcaaagatctacatgagaatatgatatttcaatctttagctgctacacgcttttgcctttatgcttgtcgcaagcggtgcactgcagcagatgtaacactggaactgcagcctcaaggtggctggtggcagaataaatacagccgcacaatatctgtagtacatttcttagctt

SEQ ID NO: 70052 - DNA, 518 bp, Oryza sativa
  unsure (1)..(518): unsure at all n locations
cctataaaactcaagctttgttctagtggagcttatcactgtcacaatgtgcgtagagcagtaatctatcataataataaatatgtaaatgactaatccccgaatctatttataagttaaaataatctggctcacatattagccacttgaaccgatagctgtgaaagaatcttataatacgaattcaatgccaaaaaacggaaggagaatggtgccacgtggcaacaccggtnttgcaagctcgacgacnaaacgtgcgttcgcgcgtgcanggatcgatgaaatgctcttgcctgcgtgcgtgcgccgtccagaaattctttccaatccgtcgcctttacgtggaagagacgagatggtatgcatacatgtngtagtgcanacacgttgatttctcacattcccaccgaacagctggcaacaaagcttagtcaggcaggccgctatttcttgtggatcanagtaataatactggatatcaggatatagttaaatcattcactataatttctatgttc

SEQ ID NO: 70053 - DNA, 332 bp, Oryza sativa
  unsure (1)..(332): unsure at all n locations
agcttaagacttgtgtcataaggcgttggagctattttacagtccatcaacccgaaacgagttatgactntctccacataatgggcttgcgaaagcataatcccatcctcgcctttgatcaatttaatgtttgaaataacatcagcttctcccaaatccttcatgtcaaaattttgggacaaaaatgattttaattcagacaccacattaatattggtcccaaatatgagtatgtcatcaacatataaacacaaaatcacaccctctcccccaccaaaccgatagtacacacacttatcagcttcatttacaatgaaaccagcggatgttaa

SEQ ID NO: 70054 - DNA, 442 bp, Oryza sativa
  unsure (1)..(442): unsure at all n locations
tgtgtccgatcatccatgtctggccttcaatctgagaagttcaagctcagagcgcaacaccgtatagtccttgtcgcatcctttcgcttcgtcgtaaagaagatccttcgctgttttttcaacgcttcccaattgtccaaccctcgtcttctaccagttaggacctctggttcaacatgccgcaacatatcttccagatcaaaatcaatatctgcatcgtctatactagagtcaccgcattccgggatggttccctgtgacatgtcttcgattataatattttacgcatcaccaaagcagaaatcatcagcctcttcgttacgaccaccgacttccccgtgaaaagtctatatctcgtagagagaatcccttatatgccactangaattgaccagttcccttatatgccactcaaannatagcttctccttatatgccacta

SEQ ID NO: 70055 - DNA, 370 bp, Oryza sativa
  unsure (1)..(370): unsure at all n locations
gtatatggcaccatattttcttcgtatcgacgccttgtgagtctgggtacttgggtgggtccgcatattctgctgcgaggacttccatttgagctttccttttcccactcttgcaactcttcttcttgcttgactcaagtgtgtccttggctgagtttttctctccccccgtctttggcttgtcgntattgcgtctcagtgcgtcgtccgcgtgagcgcatcgatcgacaatctcgaatagctttcgagcagttgtgatctgtcttgtcaccaactcctgggtggtgtagcgatctctgacaccagtcttaaaagcgcggatcatggaagcgttggtgatctcggggatcgtatctctgcactcattaaa

SEQ ID NO: 70056 - DNA, 370 bp, Oryza sativa
  unsure (1)..(370): unsure at all n locations
aaaatgttggtgctgagcatgtgtaagagaataaaattaccacaagatattatgaatggtataaaagtaccttatgctccttggcacaatcaatgcagatgggtacgtcgaacatagtgagtaggtggaatntactttacttacccttcaccattcattacgcaagtctttttctaactcggatccactatgcgggaaccatttcctaaaaaggcgatggtattccttcaagagccgcatctttggatcagatttctgataaacagtggagggatcacaagataatgcatatagatcccacagatgagtatgtttgtatatcttctcaaacatcaaacacttcgttttctgaaagataagtacagaaatg

SEQ ID NO: 70057 - DNA, 476 bp, Oryza sativa
  unsure (1)..(476): unsure at all n locations
tcttaaccagcttcttgttcttggtcattttcttaagagcctcaacattcatgtagtcaagcccaatcttctcagcctgcacacgagccaatccgcagcaagttggcagataaataaattctcattagacagaataaattgatccacaaacaacgtgtgaacattcttaatttcagactccagccaattatacatagcatacaacacttgagatgcaatggagaaggacccagacaatatatcaggcaaggcacaaataataattcaaccaaacaaattaaaaatatgaaatatgtttcagttaagatactacaagaatggtaaacaaagacttaaataatctaaggtcacttacatgagtgagaaaggaaaatcctcaatttcaatctanacggagggtgtacaaatttacaaaatcaaaatgggtatggcatcataatcttaccttctcgacatgctgggcatcaccaagcatg

SEQ ID NO: 70058 - DNA, 404 bp, Oryza sativa
  unsure (1)..(404): unsure at all n locations
tgtaaagatactgaaagtacaccagttaaactncatgattgccatatctatatattgcgatctgattagcattggactatatttatgatgctacagttgctataaaaatgctctacatgcagccgacaatgtgaagctacaacttaaagtttatcataaaacagctttaccttaataacgcagctaaattttaataaagcatgggtagattcaataaaccatatttgattattgataacagctattagtgattacacatcatcacagtagtgtgctgacggacaaaaaaacatgatgtgtgggcagaggtaaatactagctaatgagacttatcaagaacaatactaaggattattcttctagtcaaactatgctatgtccactactgctaatccatgttactt

SEQ ID NO: 70059 - DNA, 311 bp, Oryza sativa
  unsure (1)..(311): unsure at all n locations
attaacatatatgagcatatatatatatagattaaaataaaagtctacgctagctaattcgtctacggtctaccagtggcgggatgataccaaaatgagtatgcagttgagtatgtatataaaggagtagtatatatgcacttactgactgtggccgtccaaagcatcatgtcngtcttggtcttaatattntctatggngcaagagcggcttccagtaatcacgggtttgccgatgcccttctcccaaagcacaacatttggtctggtaatatttaccgttttctcgtanacccctgctttcacaaagat

SEQ ID NO: 70060 - DNA, 325 bp, Oryza sativa
  unsure (1)..(325): unsure at all n locations
ctcagcattcatagcatcatgaactgacccgattcttnctgcttccgtcagcactccacttncttcatgagcccgaatcacgaaaccccaagcacttgttttatcagtttcaaaaaaggcaccatcaacgcttcagctcacccaaaagaagaggttcccangacttttgcacttcggggatctccggtttgtttcatcagggaaatttctgcaaccatcctttatactctgaaaattacttcctccggcgctcttcttttcttctcagcattcaccttatttcaagcatcccaccagttccagagtaagaacactntaatctgtc

SEQ ID NO: 70061 - DNA, 326 bp, Oryza sativa
  unsure (1)..(326): unsure at all n locations
agcttttcgtaagggttggcgtcgaccttgcgatcgccgcttgtaatcagcgtgacctcaacgccgttatgtttgagcgcagcgccatagttactgtgcgccatcatgaccccaatggagccggttctggccgtttgtgtgaccagccgtcgcgatgccgaactggcaataagctgacctgcactgcaattcatgtcattggccagcgcccagatgggtttgatatcgcgcatacgggcaataatgtcggcgcagtcaaacgccccggacaccattccacccggcgtatccatattcagaagaatgccgcaacgccggngtcactg

SEQ ID NO: 70062 - DNA, 251 bp, Oryza sativa
cgcctttatccgtgcgcgcgacgccgatttgccatgcatcatctgcggcgagaccaatccgcctgatctgcatggtggccagtgggattgcggccatttcaagacagtaggtgcttacccctgacagatcccctcataacttcccccccacttgaccatgtgtgaatagaatttcagtactcacgggtgcacccaccaatgagtcatcccttggcattgagtagacaaaatgccggaaaactttcatgcct

SEQ ID NO: 70063 - DNA, 351 bp, Oryza sativa
atacgctcttcagatcgaaccttaagattattttctcgattttattacaagcacagggaaaactgcgggcggaggtgagtctaacactcacaggcgttggacaattagacaatacagcacaacgacattaatgtgccgatcccagttagggcgctgcaaaactatgactatagcatgacaacagttcaatggcagtccgacatcaaggtggacggtggcacttacttcataaattgcccataactagtttaatcggtgcaagccgacagaggaatattctagccccggcacaaggggttatgataatgaatcgcctttccaaataaagcagaatgtttcgctgattaaact

SEQ ID NO: 70064 - DNA, 266 bp, Oryza sativa
cttgactatttggtggaacttctggttctggcagaagctgcagcaactagaagtttcccgaacaagcccaatatgctcattcaaaaggtgtgataaggatataagtgacgcatggcacaactcctctttatcacttggagcaataagcaaattggtctgtgaccaagggatttcatcaattatggtataactaccggacatatttaacacaatcaaattggtcataccttgaattagtatagcacatttgtcaatacctttggtct

SEQ ID NO: 70065 - DNA, 465 bp, Oryza sativa
  unsure (1)..(465): unsure at all n locations
tcatatcaatagggtttttcttaattatcagattttattgctntgttagcacctgagagggcagaattcatgtaagtttaccatcttctcctgaaatcggtctccgataatcagttacgggttagctaaaggtcactaaacttgttgatagtttcgttttcagaaggaacagaagggagaaagctcacctgtgtgcaaagaatatcgatagccattggtgttgccaaaggaattcagttcttgcatggagggatcatacctggcctcattgcgaataatctgaagatcaccaacattcttgtagaccaaaatcatgatgcttccatttagctgtatgtgcataacgtcatttgcaagttatttggcacacttcaagaagtggaaagaacaaaagatgtgcggaaaaatcctctagctattaggtacctctacaactggcaagtagtataaagattatctctaact

SEQ ID NO: 70066 - DNA, 315 bp, Oryza sativa
acgtctgcagagcttgcttgttttcttgacaatattgcggacgaagggtgataagaatcatattgtgcaagtagagcgaatttgagggactaataaattacgggtttactatatttttagacgcagctttatggctccataacagtcaagtttatggcaattggatatgctgcccgctgcttttctgagttcacacttgcatgtatgtgtatgcagcgggtagttatttatatatttacaaatttacacagtagctacatcccacttacacaccacttaatatgtaactagtatgttacactggcggaggaacca

SEQ ID NO: 70067 - DNA, 472 bp, Oryza sativa
  unsure (1)..(472): unsure at all n locations
tgngcctctntgaatcgcagcaatgaaaaaacatatgaatagcaataacatatgattctaaaaggaatacaattgttaaacagaggattgcataatacaggaaaaatatatgaatgaccgtctgattgagccgcaagaaaaacacagaaatttgaggagagataaagactcaaaggattcttaacatgaggtataacctcatgctaaatttcctccaaaacttgcatgggaagaggcattccatagaaatntcatacgattacatangattcattcctttgattcaaagggctatataggaaaaattcctataggaataaaatcctttaaaatttctatgaatttcctttgaatcaaaggaggcctaaataagttgtaatggaaaacaaagatatctttaaaaaaagaagtatattgtagtgcgtacgtgatatggtgttttctgtgtgtataagaacaaatgtnttaaata

SEQ ID NO: 70068 - DNA, 304 bp, Oryza sativa
  unsure (1)..(304): unsure at all n locations
tcaagcttganatcttcagttaacaaaactcctattcctttacatttacaacacgtatgcacaacaacatttcccatagaaaggggtataccaatatacaatataacactacaacattgtcagctatgtgacttcaaggcatccctataaccgctaaaattatgaccgcctttctttccgaacccttgtgttggtttctgcatcatcgcgacaaactcgttgtaatctatacgcccatcctgcaggaaaaagaatagcacaaaacacatcagatttactgatggaagataatctttcatggtta

SEQ ID NO: 70069 - DNA, 441 bp, Oryza sativa
tatatcatgatttgctattttctctacatacaaattatcctttctagtcaatacaatgtacatgttgcatttgggcatatggtgttgtagttaagataatgttaaattaaataagtgtttatgttgaactcaaataagttagggaacatgatgataagagggacatgcatatatggaaacattagttgaatacccaagaataacacacttgattgcacatgaagtccgagaacaatccttcggaatatttttaatttatttcagttcagcatttttcaaacactagagcacactaaaccagaaagttgcatatgtatatgtagtaaactgaagtgagcgctatgattgcactggtaattaatttctttggaagaagctttagtagttagtgctgatcaaggagctccattatttcttagagttttaacaagttctaccaat

SEQ ID NO: 70070 - DNA, 291 bp, Oryza sativa
  unsure (1)..(291): unsure at all n locations
atgtgatcgagctgtaatctaaaatcgtaatcttttaatcttttgagcgccgcactataatcaagatgatgatgttgccctcgatcaggtcactgggcccaccatcttgctcagaccgctagcggcgcacacagtctttgccttgagatgataacccctcaagcggagatctctgtgaagagcatgacgcnaccaataccagcgggcttctcggtagaactatcagaatgtttgctttaccctgtgatagcgtcaatcccccgggcttgtgtctaccccggggcacgtact

SEQ ID NO: 70071 - DNA, 503 bp, Oryza sativa
  unsure (1)..(503): unsure at all n locations
ntcagattatacatggttgcctgttatacttcttagatagtactccctccgtttctaaatatttgacgctgacttttttaaatatgtttaaccgttcatcttattcaaaaaaatttaaataattattaattatttttctatcatttgattcattgttaaatatacttagttntacatatttcacagaagtttttntgaataagacgaacagtcaaacatgtgctaaaaagttaacggtatcaaatatttagaaacggcgggagtagaatgccttctagataagtcaaaaacaaaaataactaatcacttactacacatgcttcttcttcgtcggctgcggaagaatgggttggtaatgttgcctgagctcgtgccggccgacgcagtatcattagccgagttttatagaaataatttttttttgggttaccttatatattcttcttcagagctattcttcattgctgatgttagaaatcctgcgtgcgtgccatgtactatgt

SEQ ID NO: 70072 - DNA, 377 bp, Oryza sativa
  unsure (1)..(377): unsure at all n locations
agcttctagaagcgctttgctcgccgcgttcttctgtgggcgaagtactcggtttccaaaaacgcanggaagctttgcggccgggagcggctgacacatgggccccacatgccagtcttgcgttttgttcgcttgctagttcagatcctactctaaagctatcgntctgatgaaatgcctagatcatgcggngaaggctacatttggaacgcagtgattttacaaaannaattgctgtaattntacgaaacaatttcagctacggcttgtaggatctgtaaatcgctcgtctcctctggttggtttggattntggtgtagaaatttgtttgtatgcttgtagtggtggtaacttgctcatgggctgatctgaagcat

SEQ ID NO: 70073 - DNA, 469 bp, Oryza sativa
  unsure (1)..(469): unsure at all n locations
tgacatgagtggttctcggctcggtgtgggtggtggcattcagtcctttcttgaggatccatggtcgctactggtggccatgcgacagagcaatcaagtttaactgaaacgagtatcaggtaatacagcattagttagtcctgaataaacatggaatatcttatagcataattgataagagaaaaaaactggtatctctacacaaaacacgaagaanagcttatcagaatcacagaagcacaagaagttagcaagagaccagaccacaaagccatcaatcctacatgaccagtaaccagacaaacatcagaagttcagaaccaagatcagagtaggtttgaacacaataatgaagaataccaatgtgaggagctcaagaaatgaatggcaaacgttggaagagtccattacagaagcaagtganactttcatttttttctagataccatggatatctctcatatatgcc

SEQ ID NO: 70074 - DNA, 251 bp, Oryza sativa
  unsure (1)..(251): unsure at all n locations
ctcctttatctttcgctgcattgtaacttttatttccgtttcgttgatctgnaggtcaacaatcgccgttagtgtaccctggctggtcctggacagggatttaatgcacattccgcttataaattctggctcgagaatttttgggcgtgacaaggtggtatcatagccgaccttgaccgtaggacaagccaactggaaaccctttgaaccctctgacaccctattgctctgcatatgcctttatgcacctg

SEQ ID NO: 70075 - DNA, 308 bp, Oryza sativa
  unsure (1)..(308): unsure at all n locations
agcttgtctttatccatggtgcacacgatgatactacagcattcgagagatacctgatngaagatcaaagtgtcgatggttctttggtagctagcgccacaggttttagatcgttccttganggcatccgaagcacgatagctgagtacagcagatangcgcccgtttcagcccgtgcttgagctgcccagcattcaaagattgatntntcttgctatcatggatccgctgctccctttgccttgaagccatgttgttcctcatctgctctgtatccatggaagtgatctaccaattctcgcgggact

SEQ ID NO: 70076 - DNA, 379 bp, Oryza sativa
  unsure (1)..(379): unsure at all n locations
gcactcttctaactcttcacctgtactttctattcaatgaaaagacactctagtgctgttttcagcttttttttaaaaaaactcttcacctgtactgaatcagaattatagtataattcagtactgcacaacgtgcaaatagaggatcgatgaaagcggcttgaccgctgaagacacggcgacatgcaaaggagaagcttgcgagcgcgcatgagacaacatggggaatcttaacttggatgtcaaatgtggcatttggtccagatgaagttcctacattcattttctttacctaatcgaagctttccacgattccacttctagacttgtcctagntcaatgactaattgntcacanagaatatgcgcgagtcataaac

SEQ ID NO: 70077 - DNA, 365 bp, Oryza sativa
  unsure (1)..(365): unsure at all n locations
agcttgcatctgaatcaacacagtgtctcagataggattgccggaaagactggcctgaagatgctcctgctagatntacctctgaatcagcacagtgtctcaggtaggattgccggaaagactggcctgaggatgctcctgctagatttaagtccgattcgccggcatgacgtaactgggactgttgccgcgactgangggccatggtagacaagctaggccctgattccccacagcgccttatgtatgaccgatgctggctggatgaaccgagatagtagccttgagatccatacccagaggtggagacataggatgagcctacatgtggactaggtgatgcatagccagagtgggacatatgc

SEQ ID NO: 70078 - DNA, 452 bp, Oryza sativa
  unsure (1)..(452): unsure at all n locations
agttatgatgcataacattgaaaaggttagtgttccctttactgtcaccaattggacactggtccatacagcctacaatggtggttttgaagccttggaaatgtgttcttctcatctgttgcatcaagttttagatcgtggtgagaaaattgagctgcttgtcgacaagacagaagatctccgctcacaggtttcatcatttgctctcacattgaatcataatcttattttctcttaattgcacaatatgtggtctattggacatgatgatattcattctttcatttataggcacaagactntagaaaagcgggaacaaagatcggcgaaagatgtggtgggagaatatgaagaatgaagctcattgtttcggcattgtagttgcattgatcctcgtcatcatccngacaggttgccgtgacttgaacttgctggtacacacaacacatata

SEQ ID NO: 70079 - DNA, 431 bp, Oryza sativa
  unsure (1)..(431): unsure at all n locations
agcttncttcagagcataccaacatgtcaaatttccaatattcattatgaaagatccaaacaaacaaaacaagactactccttcaagtcataagtatttgacgtttaggacaagattcagtcaaactgttaaatattgaacatcaattntatattagaataattttataaaatataataagtttatgatattattatagtacttttagaggcaaatctatgcataccattttcttaaaactaagcatttgaggaattactgatggtcagagttccaaaagtttgaccaaatttgtcctaaacatcaaatatttctggcatgagggttactatgatcttgacaannaattagatacatgtgcacattcaatgtcacanaatagtctgaaacctatctgagttccatagctgtgaattgtcacatcatcacat

SEQ ID NO: 70080 - DNA, 258 bp, Oryza sativa
  unsure (1)..(258): unsure at all n locations
atctattaattaagaattgtttgttagtttccttttatctttaagaaagagagtttaatgtcctataaagactttatcttttactttaactttaagaaagtttctttcttgtccgacaaagacttgtatcaacccatgggtataaatatgtacgcccggagtctatgtaatctatcttcacgatcaatacaattcggcgcatcaccaccttttaccttttttactttattntatcgtccggagggacttggcacctga

SEQ ID NO: 70081 - DNA, 401 bp, Oryza sativa
  unsure (1)..(401): unsure at all n locations
tattctagctntaactgactttctcgccgagtggaacgagtgtcaagaaaacatgccagaggaaaagatggaatattggactatgcattttgatgggtcgaagaggcttacaggcactggagctggggttgttntaatttccctgactggagaaagaatgagctacgtattgtggatacatntttcttgcgcccataacgtggtggaatacgaggcgttgctccatggattaaggattgccgtctctttaggcattcgccgactaatcgtccgatgagattctcagttggtctgtaatcaagtcatganagaatggtcctgtctagatgacaatatgaccgcttatcgacaagaggtacgcaagttggaagaataattcgacggactcaagctcacccatg

SEQ ID NO: 70082 - DNA, 400 bp, Oryza sativa
  unsure (1)..(400): unsure at all n locations
tgctgacatgttgaccccactcntttctcatggtccaggcgcatttactattgtgccggccctggtgggctagcaaacagaggtagactaccggattgggcccaaattacgaagcggattcttaaaaaaaaacaaaggctttaatgccatttctaaccttaccacttttggtatcaaaattgtgtaaaaacgccaaaattttggctacattggcaaaatttggcaacaaagtgaattttggtagcatatatgttgccaacaaagtgaacacatccaacatagctatattgccaaaatttagcaacattgccaatcttaccaaaaatttagcaataccacaaattggtaaggtttattnttacatcatagtgaaaaggctccaaatttctttcgtcgattt

SEQ ID NO: 70083 - DNA, 394 bp, Oryza sativa
  unsure (1)..(394): unsure at all n locations
tgcttgacanattccatcattgactcttgactaaagaaagatgcaaaatcttactgttaacaaatagtcagtactccatcatgggaactcgaaatgacgagccaattgttggaggtgaaagtagacttcattatttttgcaaccatgtatagtatgcgtggggaaacttgactgcctgngtcacacatctcttgggatttgaagcatctacgcctaaccaatcagctcataagtgtaatccatttcagtttgagcgacccatcccatccttgacgtagtaattcgtagttgtagcattgaccatgtcctaatgtntaaaactataaaaaaataataaatgtacaccatttagatagtacaaagntctcatcaatattaaagttaaatttaccaa

SEQ ID NO: 70084 - DNA, 464 bp, Oryza sativa
  unsure (1)..(464): unsure at all n locations
actcagcttcatatcaatatttttgcatctcacacatgattcattgcttgagactaatttggaacaagacggctcactagggagagagacactattctttaaggtttcgaacttttcttcaagagagaggtatgctttgtccaagccatccactctctcttgaagttgagcgttcgccacctcaagattagcatgagactctttggtttgcttgtagagccgtaccaaagcctcattnttctctctctccttagcaagctcactcttgagttcatgagatcgctttttctcacgaatgagcaaagcctcttgcctctcaagagttgcatattggtcctcaagtctcccaagcaactcactcaagtgtggtatagattccttggttatgggattgaacaactcgtcatccataacctcatcctcaacatcttcctcctcatcactaacangatcaacattaaatg

SEQ ID NO: 70085 - DNA, 339 bp, Oryza sativa
  unsure (1)..(339): unsure at all n locations
agcttcatgaaggctatatgcagatactaccttgagagcagcaattctctccgcatgcaacttctcaagctctgggtcctatagtgtagttccacagcatgatagataaaaaggtattcaatgcttcatacttaagaanaaataaccagagaaatattanagatactatagttcaactcacatccaataattcgtcaagatcaacttcatcatggcttgcacttgctgcttgggctttctctttagctacaatttcctaacatgattactatgtcagtatgcagaaaccaaatcacaagggggcagagagaatagtattaccctgttctgtaagcaaat

SEQ ID NO: 70086 - DNA, 446 bp, Oryza sativa
gtgttgcgctcctctgcacacaaggctcaccgcatcaacgaccaccaatgtcgaaggccttggcaatagtgaccggagaagttgagctgtctgaggtggtcgtgaagccaagttacatcaccgagtggcagcttaaggatgtaaatagaagctatgccactagcagctactcaggctctaccaaccctgagtttagcacacagaaagagatagagcctcttacccaatcatgatctctagagctagtcaagtcggaatgcgaatgaagaattgaactactgcagatgatcttgcaatgcgtattgaaccaagatatatacaaactaatgcacaaatcttaagtttttcttggagccagtgaattcagttttcatgggatacctatatctaaacaaataacatataacttgaacgaagtggaagtggctcatttcactagagcgatc

SEQ ID NO: 70087 - DNA, 313 bp, Oryza sativa
ttctctactttctccttgattggatggaacgaatgacttttttcttcaggggattcatgggacccatcttattttctaccaaagacttaaccattgtaggcattgccataactattgccccttatgtggtctactcttgtgccatgaaccataggatcttactgtaatttaaatgcatctcgtatcatttggatgcatatttcctttcagatactactccgctttagtcgggtagattacatatactggtgacagttgtgctacgatatagacttgtgtattatagcgagttagtgtcttttacctgcttgag

SEQ ID NO: 70088 - DNA, 326 bp, Oryza sativa
  unsure (1)..(326): unsure at all n locations
agcttctttgacattaatttattatactggaaattataatatccaatgaatggtttgtgcttgacataatgaaaggtcagaatccgagcaaatatttttccttatctactgacccgttgtgataagaaaagaatntgaggatatctaatggccggaatttgttctttgtcaataaaagaagcacgttcagaaatgagcttctttcagtcagaaaaatggtactactaactgctagctagtactaacgtgcgtgtcacatatgaattcacgctccgatcttccaatcctaatcagtaatttgtcacgcaatcttgcttcacaacaac

SEQ ID NO: 70089 - DNA, 467 bp, Oryza sativa
tcagctaaacaagttaacacgcatattctattcctatattgccatctctacagtggaagatctgccgcggggaaagcatggtctctaactcccaataatgatgcaatcatgggagccccaattaaactcacactacaattttctactatcatatatccattagaaaaaggagttatggttctgtataatttgttcaaattctcctattagttttttctagattcacccctacattcaaactatgtcaattgatcaatacaattggcaagatcaaaaagttgtgttctcgctacaaacgctgcatcagaagccaacttttttgtaacatcttgtgtgtgagttgacgtattgaagcccgttctttcaagccatgtggccgatgtgttgccttgacagctttgtgagccaatcgcagagtacccgcatttttatatataataattaacaacctcataattaaatatcta

SEQ ID NO: 70090 - DNA, 462 bp, Oryza sativa
  unsure (1)..(462): unsure at all n locations
ttacttttctagttagagatcatcgtcttggatctaatgtgggatctgcccaaagacccacaggtttaagtaaatatctaatgcgttccccaacgggagaggttatttttggaggggaaactatgcgtttttgggaccttcgtgctccatggttagaacctctaaggggccccaacggtttggacttgagtaggttgaaaaaagacatacaaccttggcaagaacgacgttcggcagaatatatgacccatgctcctttaagcttcttaaattctgtgggtggcgtagctaccgagatcaatgcagttaattatgtttctcctagaagttggttagcgacttcccattttgttctaagattcttcttntttgtgggccatttgtggcatgcacgaagagccctggctgctgcagcangatttgaaaagggaatcgatcgtgaattgagcctgttcttacatg

SEQ ID NO: 70091 - DNA, 231 bp, Oryza sativa
ggatcttaagcactgagctgaactgactgattataaacttatgacatatgatactaaaagaaaaataagagaaaagtggagacttcgagtgcgaatctgtccttacttttgcttgctatattggttaataaaatattttagaatatagttgtcgggaaatatttttggttttctaatagagacggatatattcttatataattaaaataggattgtttatggtactgcgta

SEQ ID NO: 70092 - DNA, 485 bp, Oryza sativa
ttgtcgccgacgacagcagtcgtaactgctcggcgactgcgctccttctcggatgaacggcgtcggcttgacttactacaagaactgccatgcatgcatgtctcccatgttaaagaggtcctatgaaatctatgtgttcacggaatcgacttggggctcaccggtgaaagaggaattaaagatggagctcggcggccggagttggagaagaatagctcgatctctctcctctaagctcggatcttgtggattcctgagggcatttggagaggacctctaggggaagatgttggcgcgacagctcggccggattcgctccacagaagccgggacagcgacgaggtcgtggcggcagcgctccaggcgcgctctgcagctcccgtgggcacgatggcgttcccaatgatccgctgcacgagagaaggtaaagtcaaaatgtataaccttctgtatgatgagatatataatgaacattgaggatatga

SEQ ID NO: 70093 - DNA, 395 bp, Oryza sativa
agcttctaccagattgtaacaacgggcaaaatcagcccaaatatctgatcaatgtccgtttattccagtggaatgacgcttcgcaaccgtccctctgacctggtgaatgccatgttgaaatggtgatcaccaagtcggaggatgtatgttgccaccggtatagtcaagacacctcgtcctactcaccaaagagcctgtggctttccgtatccatggtgcacaaacacccacaagatacgggacggttctaatactcaccatcattcccactaaaaagatgaagatggcggcctatcaggactccccacctatcagacgccacatatctccacctctgatcaagagggtgacaggagagttcgagagtgatggagataaatatccacatgagccta

SEQ ID NO: 70094 - DNA, 485 bp, Oryza sativa
  unsure (1)..(485): unsure at all n locations
gtgataaaggaaaacccgcgcagtcacatataanaagaactaanaatatattttcttctctctggcttttaattntaattttctatgtaactgacacgtgggttccactaatatatagatgccaccatggcatgccacgacatgttaaaaaactaaatatgtgttttgagagcttaaggaaatagatgacatatctacacaagcctatagaccacccgtgcacttccctctgaaatttatatgtagtacgcttagtgtgtaattatattgtaatttctataagataaaactatagtactaactttcaaaacccagtaataacgcattatttccgtcaagtgaaggtcgtggggccaaacccattcatcccgatggcgtgcgctgtaatttttcatttcccttctgattaatcttgaacaanataacgattcanaattatgaaaagtcgcatacaagttanatagcaatggtgtataaattacaat

SEQ ID NO: 70095 - DNA, 220 bp, Oryza sativa
ctattaaagactgtgaacagatcattcactcagaattttcacagtatcacactcagatgaagcaacggtgtgaagactatttaaacttcattggcagtctttcaagggaacctgaggtaattcgttcctagagctcatttagtgatttatataagcaactcattaagttcccatttctgatagtaattctgaatatattcccatttaatgggatttatat

SEQ ID NO: 70096 - DNA, 404 bp, Oryza sativa
  unsure (1)..(404): unsure at all n locations
aactgaagttgaccatggaaattacaaatgccatgcttgggggagtttactttcttacaaagagtttgttcttttttttgtcactttggtaacgatagctttatggatttgtttggtggtgagttggattatgaaaactttgtttggtgcaactacttattatacgggtgtctggntgaataatggtttttttccttttctttttaacctaagaaacatatggttgagagagcaactacacttgcatancaaattgtgtctaaccttaattagactgagcatttatacctatnactaatggtcactctaaagatactcacaagctacagaaagaaccgggctgtaattngatggngtggattatcatgacccctagatatgtngagtagtccatgcttatatat

SEQ ID NO: 70097 - DNA, 288 bp, Oryza sativa
  unsure (1)..(288): unsure at all n locations
ctgggagggagtatatattagccaaaaattgaatttattacttaatgtatataaattattaccataattctctcttataaatcttcccttgggattaaataaatataataccttggaatacttctgggtaaaatgctacaatggtatatccatgcgcttgcggattatttttgccaaccataaatatatcaggactatttctacgccattgctgggaatttatatttctaataatatcgntaagaaataccaacagtggctatacttattattgctcaatcttttcct

SEQ ID NO: 70098 - DNA, 328 bp, Oryza sativa
gcgggttttgtgcatatgctgatatttctctctgcattcagtttgcttttgtccgtctaaatatttcaaggtgagaaaacctttattgacaggaccacaacaactgcatatatgtttgtttagtttttggaactgttcgtatctgacacagaactcgctcaaacatgtcagtaatctgagaagtgtgtagtgctagtgcagtgatgcacttgtccagaccattgtcattctgcaagtgcacatgtccgagcccagctctgcacagatgcactcatctttctgccagattaaatgctaagcagaaataacacttgcttcttctaatata

SEQ ID NO: 70099 - DNA, 382 bp, Oryza sativa
  unsure (1)..(382): unsure at all n locations
tggaaattgaagacaatgatttgtactggcagctggctgagtcattccagcacacacatatattaattaaaatttatctggcataattttctaatattttttaagtagcatgtctgaagattaagcacgtacggcaagtgatcgatggcatatgggtaacagtgcaagttccctagaatttcctgtccacaaatgcttaactgcacatattcccgaatcttctcatatactccctccgtattntaatgtatgagacacacgtgatttttaataaacgtttgacctttcgtcttattcaaaaaaattatgtaattattatttattttattgngatttgatntatcatcaaatggtctttaagcatgacataagcatttttata

SEQ ID NO: 70100 - DNA, 334 bp, Oryza sativa
aatttgagtaatcctagatccgttgattcttcttgtgatgctaattatccacaatctgagatttctcgccactttttgaatggtcttgacatgtctatttgggagatgaaagttacatctattcaggagtctgttaacatgtctactttgactttgaattcactttatacaaaattgaaaacacatgagatggatgttctttctcgaaaagttgattctaaatcgagtgctttagttttttcttcttcctctttggatgttgatgcttcttcatctaagccttcttttcttgctagttttaatgccacatccgatgatcaactcgaacagatcg

SEQ ID NO: 70101 - DNA, 283 bp, Oryza sativa
  unsure (1)..(283): unsure at all n locations
agcttttggagtctatatttcttatttccaaaagaanacaattctttngaaggctcaatagaatctattgcaatcttcgttttgctaaaagtgagattttacctcaaatcaaaatctattgagttttttgaaaaatttgccgttttttaaaacttttatggttggtcatttcaaacatatctttagttcaaatcttttgcaaaagaccaaccactcaaatgttgcagtcttacgaagttcatcaaaaatcttgatttgaccatattttgcccaaacttgcata

SEQ ID NO: 70102 - DNA, 379 bp, Oryza sativa
  unsure (1)..(379): unsure at all n locations
tctgagatttctcgnntgaagaaagataagccaacccttgtatgttttagtgaatgtgaagatggagatgaagatttcgatgacacattggaagagtactgcagcgaggaagatggagatgctctacttgaagttgacagcgatgatgagtagctgctttttctttcttggtttatctgttgctcttggtgcattcaaacaatatatttttttgtgatcttgtgagccgtggtatgtggaaactatgtatttcaacacatatatttgcaaaagtgttgttgaaagaccacatatctatggaaaaagtgcgaattacacttccgaactatctcggtcaactgaattattcctcttaactctgaaaccacacatagcttac

SEQ ID NO: 70103 - DNA, 254 bp, Oryza sativa
  unsure (1)..(254): unsure at all n locations
caattccgctttggttagattctttgtgtttctcggntggctagctaggagttccatttctgtaacggtagcccggtctcttttatgcacgcctcaaattntgtcctgcaagacagtgcggcactgcttcaaaatttgatctcctctaaaaaaatgtactgtatgctttgaatatgtagtgcaatcccagcatggcatggcangactgtatttgatgctctccntgcttatatatacagcttcatgtgtttctc

SEQ ID NO: 70104 - DNA, 494 bp, Oryza sativa
  unsure (1)..(494): unsure at all n locations
tagtgatcaaacgatnacattacgatgaagtatcataaaaatatttatgctgtacatgcaaatcttgtcatgcatcacttttaccaaactcaacagatgctaatctacatacatatcatatggaactattgacttaattttcctgtagaatagtacatatatgttcaacgaaaatcatgttaaactcttacaatgattgcattgatatcaaaaggaaagactggttaatgaaaaatgacaaatggtctgtgcaaagactgctaaagtaaacaaattgtctgtcaagcaacctgtaagtgacaaacacgatgaagaaaatatatagtgcatttagggaatttactattgctcacacataatttcataaatatatctcggaacagatttgttcaacctcaaagagtgcttnngtgtgaatacagtgatatacccattgaaacggagaggtntactgctataaaattcctcgtaaagaatgataacttattgaatat

SEQ ID NO: 70105 - DNA, 365 bp, Oryza sativa
  unsure (1)..(365): unsure at all n locations
tcaagcttggtgaggatgaaccaaatgaacataatacgtattataagtactacgaatttggtcgtagttaatggagctcgttggctgcaatttacagcataactacacagtccgcagctatctacttgctgcaacaatcaaattggctagagagtgcgaaatagcatggtaaatagcaactgaatagtcccaatatattttggaatggaggagcctttttcaataataagaggtctttattgctgccaaaacatgccctgccaatgtttntttggtttgaaagtacttgtgcatatctagattgaagccactttattggtaatggccatactagatttggcatcagtctagaacattnttcacta

SEQ ID NO: 70106 - DNA, 112 bp, Oryza sativa
  unsure (1)..(112): unsure at all n locations
tncatgatcgtaagcatgtgcatacttatggcttacctagtcagatgagtggtgctcganttttagctaaacttacaagcgcgtctgatatgtagttgcgaatacttatata

SEQ ID NO: 70107 - DNA, 315 bp, Oryza sativa
  unsure (1)..(315): unsure at all n locations
gcacaccgtcatcgcatagcacgaacttcaatgtgctggccacacagancatctcatcggtgaaccatcgtcaccatgtcgtgtagcacccatattttatgtgcttttattgaaagaattggcatttaaaaattggaggtaatttggttcttagatgtatatgtgccaatttggatctcaaatcgtctcttataatttccttcaaaattccatgataccctatggcaaattcaaattcaaatacctctccaatattctctcaaaattcaattccaaaatccttgagaaaatgtgaaacagcactggtcgaattgg

SEQ ID NO: 70108 - DNA, 489 bp, Oryza sativa
  unsure (1)..(489): unsure at all n locations
tcggccgcgtgtgagtactccctggcggagccagtgcgtcgagggatgcagtgggcggccgccggccggcgaagcggataggcggcggcgcggcggaatggtttgctcgccggcgtcgccgccggagtgggggtatccacaaagccgaaagatataaaagcccattgaggcccatttactagtactcaagaatttgggccacggcccactaacttatcagcctagtgattntccttccagaagtatactgacttcctcttaaactctttacctttcattntatgttcttacaaaagtataaaaaaacaactctggtccttccattttcatcggaaaanaagaattaattactcanacataaatatagaanaaaaaatcatttatgcaatatattataaagggctccttcgaaatgaagataatttaccctctcgttttaacaagaattagttcaattcatgtgaaaaatcctaaaaattaaaccattct

SEQ ID NO: 70109 - DNA, 361 bp, Oryza sativa
  unsure (1)..(361): unsure at all n locations
tcactcgacccgggatctcttagtcacctgcagctgctgcttgaatatatggattgtcngcttgngtcgatatacgtggctncacttgtgttgaggaagaggccccttgttgtggctccctatgacgtacgtctncaagagccaaccttntgattgcttcgctagggtcctcctcttcaccggtaagaagctcataggcagtcttcttaagaaggccgtgaagatagaggcagttgatggcgtgacatgcggtgttgacggcttcggcccaaaagcggtccgatgtcttgtattcgtcccacattgttctcgccatctcgatgagagttcaattctttctctcggctactccattttggtg

SEQ ID NO: 70110 - DNA, 469 bp, Oryza sativa
  unsure (1)..(469): unsure at all n locations
tatccagactctcggnngtaccaatcattttgatcacatgtaagcttattggattaccttctgcaagcctacacgcaaacaaagactntaaagtattaaacctttcagctcttgcttggtcctcaaacatgttacgtagtcccgtgattatcgtatgagcatccaatgcctcatattgcctttgaaactcaagggacatagtagcaagcatgagacagcttatatcaagataatcattgcatcgcttttcatgcctcgctacgtgtgcaacaagagcattgttgggcaagtcagctggaaaaggctgtgtaagcacaaactctttgtgctcttgtctgagaacaattcccaagttgcaataccaatccatgaaggttgttccagtcaactcctctgtctcaagaatagaccgcaagttaaaactggatagtgcaggagctgccatgatctacaatagaaatatatgtat

SEQ ID NO: 70111 - DNA, 379 bp, Oryza sativa
  unsure (1)..(379): unsure at all n locations
taagatcattcacttggtattctgaaatcattgatgatctctctgttctggcataatttcttttagttgaaagattcttcatttgcttcatttcagctttcctagactatcatgatataccctacaaggttgtggaagttaatccattgagcaagaaggaaatcaagtggtctgagtacaagaaggtcccaatactgatggtagatggtgaacagctggttgattcatcangttacattcatttcatattggtttattccggtctgggtcctttacattggtgtgggttcaacttttaagtaaaataactctttatgtgtaaacttcagaattaaccgtattgtacatctggtggtggtagatataatccatatattac

SEQ ID NO: 70112 - DNA, 486 bp, Oryza sativa
  unsure (1)..(486): unsure at all n locations
tcaatgacttcatcaataattggatcatgcaactccttcatatactttcaatcaacccactgcataagaatagccctcttcttaggtgcaatcactgtctcatagtaatcctgctgaaaaaggttccaaaaccgaagatcggtggacaactgttgaaatttgtagggatctttcttacgctctttctccaattcagtccacttgcggttccaccttatgactctccgatgataattaggatctctagagggagcagtgataaagaaaggcccttcttcctgagcggcttgctgagcggcaatgtcctcttctaactgaatctcnttctcaaaggatggtgcatgagaaccactaccttgaccaggctcagaagaatccgtangattgcctctccttactttgctagcaggtgcacttgatccttctccactaactcngctgcggcgaggaggaagaggagcaccacgctccacattagccacttga

SEQ ID NO: 70113 - DNA, 443 bp, Oryza sativa
  unsure (1)..(443): unsure at all n locations
tacttaaataaatgaagtggaggtagtaattaatttaatgggccattatatatggacaaaaagaagagggcgagatctcatcaaaataaacccatacagctcatctggaaaggcatgtactatccacagaagacttggttttcatcatatattatacctgtatatacaaaggcatctctctttatgtactcattctgattgtttaacacaaggctgagaaaanttgatacacttggaccttgcatttcaatctcatcaatcccatgcacatcctctcagaatttgagcaagaccgtcgcgttgctcgtcagtaagctgcttcnggaacgcgatctcaaacttcacccttagatcaccccgtgctcctttctgatcggcaattggcatcccttcccctttgatgatcttctcatatcctgngcagatgatctcatnctgaaatg

SEQ ID NO: 70114 - DNA, 162 bp, Oryza sativa
  unsure (1)..(162): unsure at all n locations
agctngaatttgatggaacgaaaatgtgttgaaatgcgatggaattccctctctaggccggttggcttaaatagtgcacccacaacggtcaaaacttgacttgtggggccaattacccgttgcttcaaaatggaaggcagccgaccgttgcttgtttggttc

SEQ ID NO: 70115 - DNA, 418 bp, Oryza sativa
agctattaatctatttcactcaccacgcgtatcccgcggagcctaagcgatgatggaaattgttcttcttggccaactctgcatacttttggctcctttgaatttcttctggggagttctttaaggtcagaaagtccgcccactgattgggggttatgtcggcatacgtcgaatatggtgtgcgtccagacttcacaaatttcttgttcaaggtggttttccaaccacgccaagacttggccattgtttgcagagcacaatttcttactgctgcctttgatccatccgggaactggaagatattcttcaactcgttccataggacttccttatccccattcgatacataatcccagtacttgaccgtgatggtgatctttttccttactattatgcccactgtgaactgaatttccac

SEQ ID NO: 70116 - DNA, 104 bp, Oryza sativa
gagggcgccagaccaatttgagctatgcatgcctatggtggatgacaatgtgttagctgtgattggtattgccttgctggagctacataatcaatacatggagc

SEQ ID NO: 70117 - DNA, 327 bp, Oryza sativa
agcttgtcatgtatttacctaagaaggttaaacatgacatgcccacagtattttctgtgcatgtgttcacctcattagattatttcaacataccattagattactatgcactgcattccactatgacataatccctctgctcacaaacatacatcagcgcaatcaaactttggaatatttaattttgcaaattctattagatgactctctctctttcttttctcttagcatacacagtcaaaaaatacctttaataattataccgagtgctaaaatggttgagcaaatgatccaaaccaatatttacactttaccaaatgttacatg

SEQ ID NO: 70118 - DNA, 364 bp, Oryza sativa
agcttacacacatactacagccatatttgggagagaatgcatgaactgcaattatttgtacactgagccctgccactagccacattgagcaatcaagaaatactctgctatttgggagttgagcaaaggaagtaggtacaaatgctcatgttaatgtggccatgtctgataaagcactgattaagcactcgcaaaaggaacttgctagattggagagcgagttgaggcattcaattcagaggttcagtctcgaaacattattgaatgaaaaggacaaccaaatcagaaaggtgaagttacctggcacttttcttacctccctgttttcttctacacggctcatactggaatttgcagaaaacta

SEQ ID NO: 70119 - DNA, 440 bp, Oryza sativa
  unsure (1)..(440): unsure at all n locations
tctaaaataaaaaataaaccccaataataatcatgtntgattttaaaatctctatgacaataaagaagggcggcagcgggcgagccgtataggagtacagtgacaaagttgctgtagtttcggcggaacttctataaaataaaaaaatgatcctaaacaataattatgatatattnttaaataataatgataataaaaagaagatgtaatggacggtcgtagaggaatataatggcagcgtctgacgggacttctagaaattataagaaagaagtccaacaggacaataaagtctaaaaaagttttagatctaaattttaaaggttataacgagaatgaaatagaaacagtggtagatcgagtatataataacgaataatatgatagaagataagggtgctgatgtgattntaacaactataaatttgaacacgagatat

SEQ ID NO: 70120 - DNA, 400 bp, Oryza sativa
  unsure (1)..(400): unsure at all n locations
tcgtgaagaccttgagcaaggcaagtcaccctttgtctcattgtccctataatngaaaaatcattattattttgtntgcaacttgcatcggtagaatcacacttaacttgcttggcctcggttngcgtgccaaaccgacggacctacccagtagtcgcactaatttccgtaggtcgtactaccctgaatccttgtcgctccacccttgtggtacctcggtattcgtgctctctgagcgcgtataccatatatcccacatacaccgttgtttgtctaaaacttgggaaatgggtttgcgaagccttcaaaacccgacatgtggtgtctgtgtgtttgaaaataaatgaattgtgaaaactccgatgcgatggtgtcctatgtggactgtccgtttcgatat

SEQ ID NO: 70121 - DNA, 212 bp, Oryza sativa
agctttagtatgataagaaaacattgacagcacattaggtggtgttcttttcttgtgaagatgaagataaaatatgttttttttacataaatgaggtgatttaacgcatattgattgagtttaattattaaaacttgaaaaatagataatatgatattttagagcaacttcatataaaaagtttcacacaaacgcaccgttagcagttgaaa

SEQ ID NO: 70122 - DNA, 399 bp, Oryza sativa
  unsure (1)..(399): unsure at all n locations
actcatacttgcaatagagcacanccttctacgacgctattcgtgaactgtaataatgtccaagaaaagctcatatatcacgggcaaactcttgaacagagaatgctttctttccatatcctgatagcaacgaaatctgtattacagctctattctaatgagctgtctgcaattatgcatgtatctgcaattattctaacgagctacctgaatctgcagtttgccgctggcaatcatcatgaaaataagaaccacaggtctcttttaacagggtaaccatttatacatttgatatgaacagaaataacatggttcttgttcatatgacattttggaacatggaaagcagagcatgtgatcatacagacaaccaagcctgactaacatacctctaataac

SEQ ID NO: 70123 - DNA, 335 bp, Oryza sativa
agcttcttcttcagctgtcgcttgccctccgagatcctctgcatctcctggagacccacagaaggcaggacttgctttcgagcgccgaggacgctcgcctcgagctcaccagcatctgcgtaccactgcccggacagagccgttgccttcatcagcgggtaattggtggtgacagcacctgatactgatttggttgtggcattggtgccatggatatcaagaggatgtggcttcttggtggtggtggtggtgggtttacggtttgggggggcgtccgtggtttgcgcgaattatgacgttttgagaggaattatggtgccggacttgcggaaatc

SEQ ID NO: 70124 - DNA, 397 bp, Oryza sativa
  unsure (1)..(397): unsure at all n locations
tcattcttctcctgctgtattggtattatgctttacggtcaacagatcattctgtctaaggcacagctcatagcatgtgccacggctaggttatgcaaacaacatccagccaggaaaaccaaataacattatgatttatgtccagaattatagttttaggaaatgtctcatccgtccaaaattccttatattttgaaacggaggtagtatgatctatgaaggcatcaatgaaaaatccacattagtacttgaatagattctgcatacatcaaccatcatgtctctgtctgcatacaccatcatgcaaattaattggcatgcaaccatgcataacctatagtctctacattgcatcaatacttncactgttactgctgtgtacaatacanaacttatg

SEQ ID NO: 70125 - DNA, 399 bp, Oryza sativa
  unsure (1)..(399): unsure at all n locations
agcttctgtttcatacaactgcaggtacatccaccatccgccttcaagacacattcctgcacggcttgcttgcgatagataccacgcctgctcctatcaacacacattatttcataccgatgcacttgtgtgccttgagcaacaactcgatgtctccgtgcctttttgattttatcttccatgtactttgtcactacgttgccaaacactatgttgttatcggccatggacggaccaattttcttgtatcgatccctaaagtacgcttgcgtgccgtgaaggatgaattcaacaatagcaaccaatggaagtacccgaactcctcgcattacccagttgtacacctctgccaaatngtgtgtcattatgccataccgagatccatcggtgtcgaacaat

SEQ ID NO: 70126 - DNA, 403 bp, Oryza sativa
  unsure (1)..(403): unsure at all n locations
tctcatagctggcttcatcagagaggttctccatccagagtggctagccaatccagtcatggtgcgcaaggccaacgggaagtggaggatgngtgttgacttcaccgacctcatcaaggcgagcccaaaggatcacttccctcttcctcgaatagatcagcatggcgaaagaggacgaggagaagacaacattcatcacaccgttcggtgtattctgttactttaagatgccgtttggactgataaccgtacgaaatactttccaatgcacggtccagggagcacttaacgatcagcttgggaacaatgtcaagacctacgtcgatgacattgttgtcaagaccaagacaagcgactcattgatggacgaatctccggaaacgttcgacaacttccgacgata

SEQ ID NO: 70127 - DNA, 413 bp, Oryza sativa
atctttaattccagatgagttagccgacatccttactccagctgtttatcttgagcagcaccaattcaatctggaaaaagccaaattaagattagccaaaagacgagaacgcaaggacattgaggccactatccaagccaaccgtcaacttgtgcatgaagaaaaatccaagcttgatcaattatctgaaggtccaatcaaatctaacattgatcggcttgaagctcgcaagattgatctcttagcacaacttgaagaatgcaacgccgagctggatatagaacgcaagaagctagccgatctccccaagtccattgaagagcggaaagccaggcttaaatcggctattaagcatgttgctgaactgaccaagtccttaaaagttattcctggaaccgatgctcaagatgctc

SEQ ID NO: 70128 - DNA, 401 bp, Oryza sativa
  unsure (1)..(401): unsure at all n locations
cgctatgagatatgctatgtttatcatcaaataaaatagatatgttntaaatatatgataatgtagcattatatatagcctctgttattatgatgcactgggtcaccaggccatatctggattgtgccgtcccagttatgttgcggcatgggccaagcctgggcgacacggtgctggccagcgacttggttgttcgcatgctgggatgcctggttgccaccaccttggtttgcctgagagccgcgccataacccgtggcgtgcattgtgttcatgccgccagtgctgccacggtttccgccgctggtggcaacaagcaatgctgtgtgggagttggtggagcaattggatccctctgtgaactcaacgaggatgagctgactacgggcttcactgacatgt

SEQ ID NO: 70129 - DNA, 421 bp, Oryza sativa
  unsure (1)..(421): unsure at all n locations
agcttgtcctgctgcagacctgtagttacagcggttgtaataacagcagttgcagcgcagatgcatggctgcaacagctagttctgtcgaacaagccctatgttacttaaattgagagtccaaaactaatgcattaactaattctaaaaattggatttaataaatctttgaaaatcaatctaaaagaaactctggacctgagatatgatgaaatatttagggaataatgcctattgactaanaataattattagatgaatttagtgaaataatttgtcgacaataaagaggatgcgtgaggatctagtcccaataatgcgagcaacatcttatgatcattacttttatcatttcaacggaagaacctgtgctaaaactctaatcatgaattgctgtatntacacacttagttttcataaat

SEQ ID NO: 70130 - DNA, 463 bp, Oryza sativa
  unsure (1)..(463): unsure at all n locations
tgacaccaccttcaaagaagttgaagatacatcgtgcttataagggctgataagtcagaactgtattggccagagttgggtgttcaggcgagtctcttccaatctgtctaaacatgtttgggacactggtcgcgagctctccacctgtggccatgagtactgtgatagaagccaaactgttttcacgggttccctataaccagatttgttggcgagacggctgaaatcatgagacacgaccagccaaccaggtctgctgaaatctgtctgtatgcattgtataaatgtcnggtggtgggaacaaggaaagaaaagcgtaaggaattgtggtttgttccaacggcatgcttgattangacgaacactgcctggaaatcttactgtaaagaccattggttattccttcctttcattggtggttaaagaaaaaatatgganggcattcatttnnnctcccctggaa

SEQ ID NO: 70131 - DNA, 364 bp, Oryza sativa
  unsure (1)..(364): unsure at all n locations
agcctgtgaacgtagatcatgctacctttcttagacactatctgccttcattgttcaattcacagtataactatgaattgattcatgtatcgatcaagagatcacggtgccctatatcaacactaaatctagactttcagtgcttctgatttgatattgttaacataccttangatactccgatgactcatcctcatccttgagtgccatgaggcacgtattggtgaagtcgccatcattggtgtgatggcagaagtcgaggaagaccttgtcctttttggtcatcgcacaatcatcctggcccttggagtcgatgtcacctaggtccacctccaaagcggcatagcttgaccacattcttcat

SEQ ID NO: 70132 - DNA, 255 bp, Oryza sativa
agtggatcactcaagcagtgcttatataccatgtatacaacaaatgcggaggaaagtgccatgttaaccgaatactgcaagtacacaattctgatggatacaaggatagtgataatagatgtatattgaacacaatgtatatggccactttcaagctgcaagagcttgtatcgcatactgaaatgctgctgtaccatatgatcaaatgctcatagtcatggtcatcactttatacgcgagggctactggctacac

SEQ ID NO: 70133 - DNA, 405 bp, Oryza sativa
agttaaattcttacaactgtacttggcaggttgtctgcatgaccttcatgagaagaaggtcctgaagctgcaacaggagtaactggaagagagtgggttcgcttcgctgataaggagttgatgacctttgtgaaagaaaatgatcttgatgtagttgccttcacctgctgtcctgatgatgatggtgtgtcaagaattagaagaattgtctggtcaccatcctgtaatgaactctttgctttgaagctcctttgtggaatgatgcccctgatggatgattttgttctagttgaattcggccttggtggtaaaccacttcttgcagaatttgggctgggtgatattttgattctagttgacgttggcagagtgtcatcaaatgccctgtttggtatttgtaatgaa

SEQ ID NO: 70134 - DNA, 414 bp, Oryza sativa
  unsure (1)..(414): unsure at all n locations
tattcgttgtttaccaacaccaccatctaagcatcctctgccaacggcatccgcaatcccttaaatgttttcgcatctaaaatcaccctgatggtctcttatgtacgttagcctaccttcctcaacacaaggaaagcagtcaacctggccttgagaggacaaccgaccacaatataaatatgtattgaactgatcacgacggtaatgacaataataacaatggaattcctgcattgatgcttttgtacgtatagcggttcgagtaagatcaaccccccttaaatttatacctacctgaaaactgtgttcaccgtaggggaaaataaagcagtgggtgctgtaaagccatgtaagcacggtgtaggctagacacatggtgcaatgngccatgtatattcagaataatgatatcac

SEQ ID NO: 70135 - DNA, 425 bp, Oryza sativa
  unsure (1)..(425): unsure at all n locations
agcttcaagtcccgtctctgattaagtttatatttgcaagggtgagtaccaaccgtactcagcaagccaccacatcaacaatgcatatgataagggtatttcaaaggatggctatggttcttttgcgcaaagcaaattttgtaattcttttcacaagcctaagacctagcattgactgatcaaattttagtaccagtgtttgtatttaaacaacgacggttctgtccaccatccattgtgatcccaaggatagcttcccgccattgagtcgtcatggttttctgaggacgtccaccataaaaattcatcatgcaataacccatcccacacaagttaagaatttaaagtctagccaagtgtaatacatgtcccgatgctcaataaccgcaagcacggctattcgaatagatntggtttactcacac

SEQ ID NO: 70136 - DNA, 469 bp, Oryza sativa
  unsure (1)..(469): unsure at all n locations
nggcctaattaatgttactataanatcaaaacaaatagcaatttttttaagacccaattattcaccttcattgctctcctctccctaacaaagtatggtgccaccttatccttcaggtagtctatcttctgttggaagtaccactctggagcacgtggttcaatactgtactttttgcagaaaggaacccatttctttgcaaattcagatgtttcggataatgcttcaaatgtcagcattgcagcaccatcatcagagacatagcatgaaaccttatcaactggataatctaccgcgaggatagatagaacagtgtttgctgtgaccaaaggaggttccttcaagggatcaacagtactgacaaagaaatcgattgggtgcaagtgagatgnttggccttcttgtcaacctatatagcaaacaattagtcttggtattcagaatgatgataacaagatacctagctagt

SEQ ID NO: 70137 - DNA, 389 bp, Oryza sativa
agcttagacacaaactcctaacaagtccccaaaagcggcaacgctagctagagaccatagatggccctccgagtggatggactccagaaccactgacgctgaggagagcgcagagcgacttataaattaggattatatatatataatcattagacataatgtgatcgattttctttgtttatgtgtgaacttctgttatgtgttcaattagtacatgtataattaattaagcatgttaatgatcaatccatgtagctaattaactacaattaatgttctaacaggtataaaatagccaaggacattgggtcaggcctggtgtacctacatcacgagtgctacccatatatcatacacagagatatcaaaccaggcaacgtactcttgga

SEQ ID NO: 70138 - DNA, 301 bp, Oryza sativa
  unsure (1)..(301): unsure at all n locations
agcttttcacttcttgtggtggatgagaagaggccaagctaggtagccgggtatttgtaggcctcaatggctgggagctttacaagctgtggtgtactttgctttccatggacaccttgagattagcttccaaagcatatgacacctcacctttacttccaatcttgtgtcttgtctggctcttgtgctngntgcaatgccatggttgcctacctgacattcacagcagagctcaagactagccangtgacactggaatatcatggctgtgagtcagtccatgtacatggaaaaaaaaagt

SEQ ID NO: 70139 - DNA, 403 bp, Oryza sativa
  unsure (1)..(403): unsure at all n locations
gacgatgtcacgcttaatggcattggacgcagtctccattntcttatgcaacgcggagttccccattatggaagctgcattcctgaactccctgcaagtttcatccaaccgcacgattgttcttacaatgagaccttcagatacatctgtcagctcacagatgtctgcaaatggggtcccctgcattgaaagatcaaataagaacacactgattctgcataactctcgcagaagagttcccgtgacgtgaggatgtatacctttgcccattcgtagacgacttcaacaagaccgaacttgagattatcacgggcatattcctcgggatctacaggcaccttgaactctctctggagctntcctaatctgattgctgtatcataaatcctagaatagaaaataa

SEQ ID NO: 70140 - DNA, 423 bp, Oryza sativa
  unsure (1)..(423): unsure at all n locations
agcttgtcacgccatagaaaatggcatggcagaacacaattgcaacaccaattacagtggcgtggtaacactgatgacgtgttatgtataacacaatgtggcagtactgccacgccaatatacatgtggcgtggcaaagttaataggcaacgccagctagcttggtgtggccaaaaggttcacatttgaaaataaaantttagatggtttagtattaaaatattatattaaaaaggtataaaatataaaaaaattcctcagggtcacagacacactgacttttacataacatcttttggcgttctccctccttttcatattataagatgttttgactnntttttcctagtcaatctttaagttttaccaagtttctntactattataaaaattgaagatngttacaccannaatttggtacat

SEQ ID NO: 70141 - DNA, 410 bp, Oryza sativa
  unsure (1)..(410): unsure at all n locations
agcttgcatcttttaaataatcatgaaactcatgctccatttatgaccatgtagaaattgaattangagcaagcaaactataccatgtagatgcaaagtttgacaaagaaaggggaaacaacttcaacttaagcaaatcatcgctaccggccttaccacattgatcaataaatcggccgatatgctccattgttgttctagcatcctcacctgtgaatttcgtgaagttgggcacctcaaatccttgcgggtatgggaccgaatctatgtgttcaggatacggcctttgatatatatgcataaactatttagattctatctcactactatcccgcaagacattatcattatcttnttcaacatccatatgaaccgattgtgattcggtcttatgtgacaatgctatttca

SEQ ID NO: 70142 - DNA, 465 bp, Oryza sativa
  unsure (1)..(465): unsure at all n locations
acacggaactataaaactcagcttataagtnttcacataaagatggaagaaatatcgatatagttatagtatagatgacctctggtagtactccctccgtttcataatgtaagactttctagcattggccacattcatattgatgttaatgaatctagatacacatatatgtttagattcattaacatctatatgaatgtgatcaatgttagaaagtcttacattgtgaaacggaggaagtaatagtgatcttaccagtgcttgatcccttcctccatgtgctgaagaaccgtttgagaacacactatctccagctggatgtatcatctgcatggtagatgcttgatgacaacgtggcacccttggtactcttggggagctgttcaattgtgatgtaatacaatgcatgctacagatatcaagaaccatgaaagaaaatataatgtatcagatacatataattat

SEQ ID NO: 70143 - DNA, 344 bp, Oryza sativa
  unsure (1)..(344): unsure at all n locations
agctttntatcctttntttcatctcggcgtgttgctggattacatgatgtggtgttgtgataacaacatcgaagtcgagtaagacttggaggggaaaaaaagagagagagaattttcgcatgctgatggctggatggagaggagactgcctggggttttgatctacagaaagctatgtacacatcactgttggtttgatcatcttctctgctatgtttgctctgatccgatctagtacaggtttgatccgtcctcgcggcgaattgaaattctgatcgtggcatgcatgatctgtggcgatcgatggatcatccatgagtagcctagtagtaacagtgtggatg

SEQ ID NO: 70144 - DNA, 445 bp, Oryza sativa
  unsure (1)..(445): unsure at all n locations
tctctaactatggcccanaagaattgtgccatatatacatgtatgatcaatattattaaaagaaattnttgttataactctgactataactagatagttgtctaagttaatcaaacttgactactattaaagctctaagaatgtagcctttggctaaatcttattaacaaatattgtatgtttctatacctgtctgagttgatcaatggtcaaagtgatcgagaaggttagtagtcaagtgatcgagaaagttagttgccgctttactatatcggctactccctctgtttcgtattataaaatacttttgactgtgtcttaaaggattggtatgcntcgtgaaaatattggtatatttggttataaacttaattaaataccgagtataaagtagtttgatgttaataaacctatatcatactaacaaaggggagttatcaaacat

SEQ ID NO: 70145 - DNA, 451 bp, Oryza sativa
  unsure (1)..(451): unsure at all n locations
gcgaatttagctcgngcccgggatcctcttagtcacctgcagcggggggactgccgtgttgggtatatcatatggttaaaattttataatgncggacggtcgatggaatgccttacgccgctacctgagngaagaaaaaatttacatatctatatagctctatttatttataaatttgtcaagcttagagaagtttgactaagataaaaattcaaccgacttgtagtatgaaacatagggagtatatacacacacgtcttaaataaaccctaagtgtctaagtattcacctcctctcactctcattggtcaccccgtctgtgagagttcatagactacagtactaatacctaaactcacacatgattgtcatatgtctctatctgatcaagcatatatcggtccggagatcaatgcattggcataacatcttcttatcttaagacagatat

SEQ ID NO: 70146 - DNA, 362 bp, Oryza sativa
agcttgctctgtgaggtggaaagatggcgacggtggatgggaaggtggtgaatggtggtgcggggcggatttcatggccgacggtaataagccagatgtggggaggaggtcgcccacgccttcggcttccgcttctgggtcggtgccggcctcccctcctacgttggcagccaccatcgccgccgcctctccgccaccgcgcttgcccgccgacgccgcctcaccctgccgccgccctacccttctcccgtgtctccgccgccgcgtcacctccgccgcatcgtcggccggccatcggacctcctcgtcctggcaacgtcctccacaccgagagaagagtgagagagagagaaaggaggaaa

SEQ ID NO: 70147 - DNA, 444 bp, Oryza sativa
  unsure (1)..(444): unsure at all n locations
actccaccttcgttctcttggctgngatatatttttactaacttagcatgaatcttagggcaaatcgatggttataaatttgaaagttttgattgaagaaaaatgtcgcactttatgtagcaattccattctggtaaaggatgcgcttggacatctctacgcaaaaattaaatgtcgttcagtcctacagccttaccattaccattgagttctgcaaactatgtggcttagaacttagggtgtgtttagttccacgtcaaaattggaagtttgactaanattgaaagtttgaagaanaaagttggaagtttatgtgtgtagaaaaagtttggtgtgatagaacagttggaagtttatagaataagtacgaactanacaaaggctntgtatagtcatgagacatttanataacttttacaatcagcttatanccacgacatgctg

SEQ ID NO: 70148 - DNA, 371 bp, Oryza sativa
  unsure (1)..(371): unsure at all n locations
agcttaattaagtatatagtatttgtggctagcatatggttaaaattttgtaataatggatggttgagggaatgccttatgccgagaccagaataaaaaaaaaattcacatatctaaagaaaacaggggatgaggagtgacctgttggaagaagggtatcatgatggccatgacgagctggggacggtactgccgctgggtgacgatcatctgcaggccgcggctgctgttcgccttgtcgctattggcggccacaatgtcctccagctcgtcctccacgtcgctgacacctcggatcctggtgagaagcaccctaactctgcgcttgtctctgccttgctgcagtangctgttgggcgtctcccggagga

SEQ ID NO: 70149 - DNA, 475 bp, Oryza sativa
  unsure (1)..(475): unsure at all n locations
gaggggaggtcatgccaaaatttatagtgaatntatcttggtgattatatacaaatcggaggtgcctaaaaggttagcaacttcatcctccaatgtttttttttgtcatattacatttggagctatgttttgcacacttttttgtctccaaaattttgttgtaagttgatgagagagaaaatgtatatggggaagaaagaatatatataaatttagtttatttgctaaagaaggttttataaaatagttgagaaggaaaatatagtgaaagttaatcttaaataatagaaaacaaactaaaatgaaaattaaaagaagtacaacatattaatattagtttaaaactttagaaatagtaaataagaattatttggtggaatattntataacttttgtatgaataatgatatgtcattattggatgactctctgaagagtctgnnattatctatcattattgatgactgtcattttg

SEQ ID NO: 70150 - DNA, 409 bp, Oryza sativa
  unsure (1)..(409): unsure at all n locations
agcttaataggaaatgaggaaatgaggataagcggatcaccattttttttacccttcttatagttgtcattttctgttgcttcattttgctagcaattaccattgcctctgttcataactctttgctcaaagaaggttagatcatctctccctttcgttaccatgccatggtttttataccacttaatgacattgttgctgttatttataaccaaaatctggaaaagcaagtctgtgttgaaaaggtctgccctctaccattnttgcttgttctggtgattatgatctactggtgccaattatatgttaaattntggcacaaatttatgtctactgggaggcctgataggatcaatgttattgcatgactcatgactgataaattaacttagattgtaacatcgttgca

SEQ ID NO: 70151 - DNA, 388 bp, Oryza sativa
tgtgccttcactcaagtgcaatgtattgactcctcactagtctgtgtgttcacttctttatgcagaattcttcgcaactatatttaatatttaagcttggcatcagcctctgtttcatatttctgtacaaatttcctccaaaatcactaacagtgaatcatatagttcatatagttattaatgtactggtttgagtggtatattttcctgagcgacttcatattgcattcatagtgcacaaggacagactctattttcttccatgtatttgttgtaaaaaaacgaggtgtaaattgtagaaataatgcatattgatgtgctttacattcatttattgaatgggttgcagatacggaatgagaaagctcgacgatacctgagcaacatg

SEQ ID NO: 70152 - DNA, 301 bp, Oryza sativa
agtgtgccttgaggcactccctctcgtcgcacccaactgagaacgagggacttttatatcacacgctcccactatcaacgacctccatgagccattccggggcataataaaaggagacgctgctgacccaactctgtccgatgtgacacctacaaaaaatgaaggtctgataacttgatctgtcgaacggattgagaccaaggcccctctccctagactggcgataggaacatgctactatcttgtgccctccgaaccttactctcatgagattgagtgagatctgttgaatgagaaacca

SEQ ID NO: 70153 - DNA, 480 bp, Oryza sativa
  unsure (1)..(480): unsure at all n locations
actcagctttacaacacaccctacgtccctacacatatgagcacctccgtaattctatgtctgtatatatggagaatgacgaagtcatcacgggtgtttcgctgtcaacgttcaagtctaggaagctactctcacttctcggagtaacatatttttcttagacgtatacatagtatatgtgcactcctatttgtccatatntatttntcatatttggtttcactcttcagataggactctngggctcgtttagaacgaaatggcccacgcaaatactggcccatcacgaggcccaaatctgcgtgtccaaggaggaggagagaagcatgcaagcccaacttcatctgcctcgtctcgtgctcaccccgccttcgccgctcaaaccctcttcgcacctgcatcccctcttctcacggtgtggcggacacaccgacaataggagctccctgcggcagtggcacacgccgtcgacatgacagc

SEQ ID NO: 70154 - DNA, 300 bp, Oryza sativa
acacatctgtacacttgaaaatatcaataaagcgtgtatcttttcccttaaaccacagatgtttagcggtccattttctgtgcctgtctacatggtaaccccaaacttctttctgtacatcacaccggtactgattctgtgtactggacctaattgaactaaaaggcagaatgatcatgctaatacggtacgtatgaccatgaagaaaaatgcagtgcagccagcgtcagaaatgaagtgtgctcagcatcattggcgtgatatggtggctgagatgatcatggtacaaaaccctttttg

SEQ ID NO: 70155 - DNA, 489 bp, Oryza sativa
  unsure (1)..(489): unsure at all n locations
gacctatgatactaagcttctaagtattccaaacagaaagaaaaggcaccagtgatactctctactaatgcaaccgttcttcatatacaattcctaaaaggttcatccgtgttgacgtctaaagaatagcagcctaacttgttctcctcgaggaacagccaatccagggctcaatggcaaaaggttgcagccatcacttgggcaagttaatgaagcccgtatatttgctcactgaacagatgaataactacaaataccaacttagtaccggtacttgatatcatctgcaagggctttggccaggagtataatctcatgaggagaatatttgcaacttgcagctgaataaacaccacaatgtgcaatatntagttagttttagactgactctgggcaatgaatcagtaataagctccatctctatatccttgctgtttttgagatattcttgagctgtngatgtgacgaatctaatgaagaaggtcacaa

SEQ ID NO: 70156 - DNA, 343 bp, Oryza sativa
  unsure (1)..(343): unsure at all n locations
ctgagctgcagctaacagttgtttttgtgtcgagtcaatcttggacagtgattttgcctaagagttgctgtggaccccgaaacaatgaccggcgtcaccgattggaagcgaccccagacaggcactcagattcgcatgttcttgggtttggcaggatactaccggaggttcatcgagaacttctccaaaatcgctcgacccatgacacagttgttgaagaaagaagagaagtttgtgtggagcccgcaatgcgagaatgcgttcctactctcaagaaaagctggttcctcgcagtgttaatctgcccggatctncaagggattcatggtgtattgtgatgctt

SEQ ID NO: 70157 - DNA, 419 bp, Oryza sativa
  unsure (1)..(419): unsure at all n locations
tactaagcttgcagcaagggaactctgactaagagcatgagcatatctggtttgctgctctgagagggaagggaatgaggtttcatcaggagcagagtccatccttgcatcatgaatatcctggtcttgaagaggaggaaaggacaagtgttcaaacacacgtccattgcctgagctttggccagattctcctcgcccagaactagaactgacactcacagaccctgtaacattatcaactcgacttggaaaaccgttgcctataattgcacttgccatttgcatagagggggtatcccggtcagatccatcacggtgagaattccgtccnctacctctaccacgcctttcatcttgctcgtttcttcgatatataaagctggttggtatctgacaaagccaaacagaaaaattagctc

SEQ ID NO: 70158 - DNA, 406 bp, Oryza sativa
tacttgtcttcaatatgagcttcacagccccatctagattccatcatcatgtggtgactttctgtattttccggattcatcattaactctctttacactctcctgtctgtacccttcccttgaacaataataccgctcgaataatatgtactcattttgcttctagtgctgaccaacacgaacagagaaaccagctttatgtgcatatgatttgtaaaatttctccacatctgtgagtgtatcaaagatcattccaaccatatgcttcaaatgttctttccaatgtgtgttgcatgtgtcacttgtacacgagacctatagacgtgttaaagtgtatgatctacaaattatgcagaactagctctacatgtttactatggaaaatgaaatgtatctgcacatttca

SEQ ID NO: 70159 - DNA, 417 bp, Oryza sativa
agcttcgaggcttgttcacaaatggagccttgtgcatacattcaagtcagtatgatcctccagatgggctttgtgaataatccgggtgctatttagtagaactagaaagaaagcccgcgcaaatgcgcgggcatcttattgattgttttataaaaataatgcttaaagaagttacatctcactatttctatttaaatgttataaaataataagaatatatctcagattaaaaatacactttgatcgagtgacatataaattctcctattgtcaccattacttactatgctttaaaacctaataagtaattaatacactaaattatcctctatttaggtttcatatctcattttttttctagatccatttataaatattatacagataccaccacttctattcattaatggagtagca

SEQ ID NO: 70160 - DNA, 387 bp, Oryza sativa
  unsure (1)..(387): unsure at all n locations
agcttcattgtaatagtgtcagattactgaaaccttccgtataaaaatgaatcaacttttaaagaaaaatatgaaaacacttgtttagattcatcatcataagttgattttttccgaggatgaaaaaaagtagatgtttgtgtgcgtgctcggattcagagattgaaagaaacaaccctttcttttctcacgataacattcacaaattcaaaagtctctgtttgtttttcttttagaaaatggataaatcagcactacatccaaatagatgtacacagccaaattantacctactactacaattcacttggattcagactactccctcgtccaaaaaaaaaaaagataacctgttttcggccacgttgatgtcatctattgaaaata

SEQ ID NO: 70161 - DNA, 447 bp, Oryza sativa
tctcgtattccaccaagaaactattcctgcgagcaaattctgtgccatgtcaatatgaaagcagcctacattggcacgtgccttccggacaatattaataccgcactgatgctaccttattgagtacacctgatgacttacaaccagagatgaaaaactgttatttctgtcaaaagaagtacaaaaaattctacccctcttcagtttgtataagcattgggcgtagctgaaaaaagaaccccaaagtcttcaagtttttgccaacaattagtcaaattatattcctggttagtctatagaatttatattaataaaatcgtatctgagagtggtttacacgatattgggttgtggcattgaaatatattgaagagaattaatgctaaagttaattcgaagacacaccaaataaaaaaaacgtctatatactggacgggtgagtagcaa

SEQ ID NO: 70162 - DNA, 417 bp, Oryza sativa
  unsure (1)..(417): unsure at all n locations
agcttgttctatataagatctgacagcaatacatgaaatcctagaatagacgggctacaaggatgatgagggaacagcaaatgaggttttagttttttttcccctcttctttactttctttagggtttgacatcattgccagtatgatatgtgtggtcttttcgtgagaatctttgtttgtatgtcaatcttgatggagcattctcagaatttacaagcaagcgaatcttttctataaaatcatttgtactgttagtcctcatgggctcattgcatcttttatgtcctacctcaaaaaatattgttatccgatggcatgctgattgcatttgctttnttagatgtctgttggaatacattttagtgtaagaattctcttcatgttcatttcactttgatcctagaagcaactatagt

SEQ ID NO: 70163 - DNA, 374 bp, Oryza sativa
  unsure (1)..(374): unsure at all n locations
tatagaggcagaggcaagcagccatgtatgggtcttcctatttctccatttaatcaacacgattgcttgagatttaaaggtgtcttgctggttaggaagtcaacatgcttgcaagttacctcctttttgcattaaatgcagtcctgtaaatactctcaagtcagcattacaagacttgaagaaatgaatatgccatccctatccttttcctttacagaattgaacttcttgtatgtaaggctcattgtcntaatccgacaaattgtcacaatcagagaaaggtctagagctgcaggataagataggagattctgaattcgacaggagattgctgcacattggggagaaaattgatccggatcttctggggatct

SEQ ID NO: 70164 - DNA, 313 bp, Oryza sativa
tgtacgcaggcaatctcgttttattttgtacatcacaaatgtacatatgcgaatagtatcgaccaaccactattcgttccagctgaccttgatcctcgcatcgctcgggataacatggatgacctcgacgcttgtgccgatgcacgagcgaaactcgcgttaaggatggctgggaacagagccctgttactagagaacccgcttgactgataccctctacctataatttgtggacaaatgtcacatgactccgagaacataggtgctggatcgcataacatctaatttaacagcgggtttgattgctctacac

SEQ ID NO: 70165 - DNA, 418 bp, Oryza sativa
  unsure (1)..(418): unsure at all n locations
cgctcaaggtccttgataaggattgaacccctgtaagcggaagtacgctngaaggtcatcgtgctgttgctgcatcatgttgttgaagttggcgaactgcgcatcagcagatcgttgtcattcttgcgtttgagctatgtgttccgtgaggttgtactggatctctcccgtctgcatatcaagggtgtccattctcttagtgatgtcacctaagttccaatgagaggaacttgagtgccgctcacttggagatggaggcacaccacttgatctggatggttggttgtccccccattggatgtcatgaggcgcacgccaccaatcctcactggcgcttgtccaggttgagactccgatactatgacgtggagcttgggtcatccgggtgcgttctcattggctcccacactgctataca

SEQ ID NO: 70166 - DNA, 413 bp, Oryza sativa
  unsure (1)..(413): unsure at all n locations
tatctttctattgtttacaatcgagactccagctgctgagcaagtgtcctgagtcacatctgcctcaccttctatgcagtccgcatggcagcaccatcgtcgtatgcccaagtcatcgtgtcacccccaatctagctaacactccatagacggagtgccactaacccactgttgtctcgtctcacggctatatatgctctcgcaatcacggggtcagtggtggcttgccgcacttggccactcccatccattgtcgtcgctcaacacaacanacactcgacgccaacgcgtccttgtttgccatggaggagaaagacgaggtgcgagatcaacaccgtacnctctgcaatcagcatacgtggaatcctggagaaaacacgtgatgttctacctcttgttgactgttgctatat

SEQ ID NO: 70167 - DNA, 383 bp, Oryza sativa
agcttggttatcgccgccagccactgtcgtacctcccctctcagatccgtgccgttaaatggattccccctgacctcctctagctgccggcggtagccgctcgctccggttagccaccgctcgccggaacgcctcacgcgttgtcggccgtctgatcccgggcgcctcctccttctcctcctcccctttcacccctgcccgcgtggtcgaccacgtggcagccacctcaaccctgggcccgcttgactgggtcaagtcgcgcccagtcagcctcctccctccgtctttccttccgtgcgcgcggtccactgcaagccgtgcggctgcacgtgggcccgccgtcattcattcacccagtgcgccgcgcccgaaccgcgcgcatt

SEQ ID NO: 70168 - DNA, 464 bp, Oryza sativa
  unsure (1)..(464): unsure at all n locations
ttatgttcggcgcagtactaatactggaacttatgagcatttattgctctatcaatcaccatctactttagacatatcttctgaaactttnttcaaatccaaaagtccagtatcttcctacaaattagtgaattaggaggagctctttgtgccgaaaaagaaagagcagggcaatatttcaaacttgcattcgaactgcgaaatatttatacaaaggaggagagatcaagataatgcagcagggttggttatctaattggctagtcaaacatgaggtggttcatagatctttgggcttcgatcatcgaggaatagagactttgcaaataatagcagaggattgggattccattgctgtcactttatatgtatatnggtacaattatntacgttcccatgtgcttatgacgttgcacccggtggatctttagctagcgtgtatcatcttacgagaatacagtatg

SEQ ID NO: 70169 - DNA, 292 bp, Oryza sativa
agcttatctcttacgctccatgaatggatcagtcagaacatcacccccggctcgcctcgaccgccgccgactggtgtttccgcctgcacggctggcctttatgccgccgttgttgggcgtctacgtattcaccgaccggtttgccttcgccgatggcgactggtgtttccgcctgcacggctggccttcatgccgctgtagttgggcgtctacttcttaaccgaccgcgtctctactttgccgcccacaggtgaattcgcctcgccggatggcctatatcatgacgtctgtg

SEQ ID NO: 70170 - DNA, 320 bp, Oryza sativa
cggaggtctaccgacgtggctgatccacacgggctgagtgattcgggttagtaatgtcgcgcgggtaaagtgtacccccctctgcatacgtaacaaactgctcgaacagccgtgcccacggtcatgcgcggacgtgaagtgattcctagcgtagttttgtttgactactgcttgtgaaattgctgttgtggaatagggatcgatgcttggaaattctgcagctgaaggtatcagatacgcccatggggccgtcaaaataatctggtccaattgtcggtgaaaatatctgtgcagcgaattagatcatttagacgactata

SEQ ID NO: 70171 - DNA, 329 bp, Oryza sativa
agcttgggagaggctaaagagaagacaaagatggtgagaagaccaacgacaacaagtcgaagggtacatataaaggaaggaagatcaaggagaatctcaagaaggcttttgatcaagtctgcgccgcgttcgagccactaagcgacgtagatggtgatagtggagatgaagctcacggaaagaacatctccggtgcttgcttcatggcatgtggcgaatctgattcagagtgtgagaacgatgacgtaagtgcttttgaggaagctattcatatcttgagagcaaaaaattccaagttgagaatatgtttgtaaacacgacttatcatt

SEQ ID NO: 70172 - DNA, 104 bp, Oryza sativa
gtgtggaccatatatgacctctgtccatatactaccttgtagcagattagtcatgaattgattccttgtaatccaaacggaatggcaccatatcatcactatat

SEQ ID NO: 70173 - DNA, 427 bp, Oryza sativa
  unsure (1)..(427): unsure at all n locations
agcttctgcttcagcggttgtagcctcaattccaaaacttttctgctgctcaccacttccatgcacatcagaatcctgatctgtaccagtattctgcacataaaaaggattttagttaagagcactaagtagctaagccagtaatgtgtaaaggtcaagtattacttacaccagcaggtgtctcctccaacttctttccattgccttcctcatcacaagtcggcaaaagagtgggaccagcatcttgttgagccttttctttctcttcagaatcttctaatgcagccttcttaacagatgcagccagctctggaaggaaattcaatctatcctctgaaatatccccacattcctgcagtgctgtagcccctccttcatgcactntacttgtgacagtttcatattcgacagggcttctctgtttggg

SEQ ID NO: 70174 - DNA, 496 bp, Oryza sativa
  unsure (1)..(496): unsure at all n locations
cgcaccagcccagtcaccacaagaatcaagaacattcccaatgttcactttngctaatgcttgaccctacaaatgcacatatccaaggtgagagagattcaaaaactggaagctccaagtaaatgagtgcaaggaggaaagtagtcttattactaggtagcaactagcaagcatgccacatggcagcatgtccatgaatttaatgacatgtaagctcaccttcaagtttccgattgatcgatacatattctcagctttcatgcaccatttacgagctttgctgaagtttctaagcttttggtaagattctcctataaccaaaagagagtcgcttctgttttccttgtcatggagttcatttgctaccctctnttgtcctttcgaaaattccttgagctgtgggaacaaatagatacatgagaatgnacatgtgttcttctttatcacacctcatgccttgctacgtatcggggtatgatatcatattcgactgatc

SEQ ID NO: 70175 - DNA, 341 bp, Oryza sativa
tcggttgaaggtgcgaaccaaagacaaaatgaagatcatgctattgcgaatccattcctctacttttctcgggcagaggacatcggagtaacgccggcggcgagtccgaacggcggctgtgcttatgctgctactgcatggtgagttggtgctcgattctatgtgaatgaaatgcatgaatgccatcctatgggctcaagggtgctcaccgaaccttgaacgatgcgcgggaaagtctggacagcggcagcggtgaagaagatggtccggcgaccgtgtatagctcccggaagaccgcacggctcgatccactcatcgaattgacatgcatgtgttttcat

SEQ ID NO: 70176 - DNA, 500 bp, Oryza sativa
  unsure (1)..(500): unsure at all n locations
gaagtacttgcacacacanatctgagttcgcatgaagtcttggcggccgtcaaaagttggcgctgccctgcaatccgaatccaccccgcgcgaatcctcttccctttggatcctctccatcgttcctgagtaaaacacgagtgcacgcgtctctggggtataaagacgaggaatatgaactcaagatagaactcacctgataatttagttgacgttcacgagcgcgggtaatangaccatcatgctgtacatgggaggacatggatgtatcgatggtgttgatgtcctcatcatcctccccttcttgcatttgagtcgtcctcgactcaaactcatcttcttcttccaaatacggcttcaaatctgcaacgttaaatgtgagactaacccctaaatctgcaggcaaatcaatcttatatgcattctcattaatccttgtaacactttaatggccatcagctctaggatcaattagacttctaaataagaatcgtctttcc

SEQ ID NO: 70177 - DNA, 417 bp, Oryza sativa
agcttttaaatgctgcatttttttaaaaaaaactatatataagttttttagaattaattttgaaacaacttttaaatttctaatttcattcgtttgtaccctcatatattatcataaaaccagttaatataatccattatccattcatccatccagctcaaaagaactgagcgtgacaaatatatgtatcgctaacagccgctaagttgtgtctctaaatacaaaacaatcatacttaatatgcactgaatggtagctatttatcttgctgcaggatcggttagtgcttccggaagtgggtcgtccaactctggtgcaggttcaggttccagctcttcttcatggtccgggtctaattctggctctggcacaatgtctggaattgacgctccgtcaagtacaagaacatcgtctact

SEQ ID NO: 70178 - DNA, 369 bp, Oryza sativa
tagactggaggaacaatccattatggttacctaaatggtccttagtgtcaaagagtgggtgcagagatcgctggcaggtggctacatcctttgctgaacaaacatttcgaaagagatattttgtctgccccaatgtacacaacgatttcagtgtatgtctaaccatctacaaaatccgctatgatttgcacacaattactacccaaactgaataacattacttattttacagggcaatccaatgatgggtggatctactcgatggatcgacaatgtcactccatcatatcatggccagaagataacagagtcataaacacaatctgagtatcaacgatcgaatgaccacgagaatgcaatgcattctga

SEQ ID NO: 70179 - DNA, 134 bp, Oryza sativa
aattaaccagaagtgggcctggataacatgaaaatttcctactttacaggtggcctgtgccagtaatgaactcttttcccttgcattaggagcatgaatagcaatcctcttctctcatttacaactcaaaaagc

SEQ ID NO: 70180 - DNA, 481 bp, Oryza sativa
  unsure (1)..(481): unsure at all n locations
tagaacggaggagtcggatanggatggataaagagggaagaacacttcactacacctcgctctcttcattcagtagcctaaaaatcaagcaagcagggaagaaaaaaggcatcactgtgcttttgtatgcagcacaagtgaactggatatgttctaaatttttagtggtacgtaccacgtacgtcgtctgttcttgcgttacaaagatcagaacctgttntgtgttgtttcaacctgcagaaacaaagaaacagaacagatgcgaccactcctcttgacaccgaagccgtgatctatcatacctttgccaagcttcagttatttatatatctttatcactagagctgatctaaccctccagactgataataacttcacagtatcaccacttgtcacaaggaagaacacataatgatgaacctgtggcacagcatatcttgtcacatgggcttataagagcatacattccatctttattaac

SEQ ID NO: 70181 - DNA, 410 bp, Oryza sativa
  unsure (1)..(410): unsure at all n locations
agcttgtatgttgtgaataaagaaatttccaaagtattgggcatacgccatgcgcacactgctttaacagatgtgcttaagtccctagaagacacatggttccaccacacctggaaatatatggcatatgtggtataaaatccgagtaaataaactcataaaggatttaccaaccgcctggaaaaatgaccataatatataatcagcctaagccataatattggtcaataaaaatgcacacttacgtggcaaaaagcaatgatattgtatccaatcaattgcttgataaacccaaacagcacattgactatataaaanaagtcagcggggcagctatataaagctttactggttgacaccttttaagatgcattgtaccaactcctaaaaagtcgagtaactgcggtata

SEQ ID NO: 70182 - DNA, 411 bp, Oryza sativa
  unsure (1)..(411): unsure at all n locations
agcttgttcttgcttgcatgagatattaaagccgcccttcggtcggaagcaaccttctcttatgccaaacgggtagggaatggtgacgttgccgcacttcgctggagctggacaatcgggctggggctgccagatactttcagacccagccctaaccccgtcagatgcaccactatgctgtagtatcagcagcatcaggctggttgccacaagtactaaggctcccatcggatggcctaatcagtaaaagaaaaagccaaaatttaaatttttgattttgtgatattttcaatatagtttctttttcaacattgattnttaagccaccaagaacatctatataaaaagtttacctataaatttattnttattccataanaaaccaaacgatggggacctaacttcttaccc

SEQ ID NO: 70183 - DNA, 449 bp, Oryza sativa
actcagcttgattggtcaaacagtgttttaccaggtggtgatttggttaattaattaattataattaatcactcaagaggaggggattaattgccttgatttggtacctaattactagtatgattagcagtagtagtagtagcagcaaatctggtttggattaattcagtttgattccatgatatgaacaaaggaacaaagcaacaaaaaaatggccgtctgctttttcttggacggcattcttatatgtaccaattcaccaaatctgctggttggtggattaacagcttgataattggtatattgattgtactactaccactaattgattgaattatgagagaaagtaatgaaatcttttctaattctttagcaacaagaagattatctggagccatgtccattgtgatcaccacatcatcaatcatttgtctatctatgctcccctt

SEQ ID NO: 70184 - DNA, 396 bp, Oryza sativa
  unsure (1)..(396): unsure at all n locations
agctttaatctatatggattgggtgattaaggtaaggaagcaaaaattgtcatattggtttctgaactatttcaatgtcctgttggtttcttccttttatcctaagtcaatgttagttcctgtggaaccttctcatgtatttgcacacttttaatttttttagccaaagtacctttagttcttggttaatacatattctgaaggaactgcctagttatactcaatcaataaatatatgttaagactatacctgatagtgatatttaatcactagaagtttgtgtccatgttattgatgcatctaatttttcacaccatcagcccgtnccgatatgcctgttattgcttttggagtcagtacaagtgtacaacctctgtcatcagaacctctgctga

SEQ ID NO: 70185 - DNA, 453 bp, Oryza sativa
  unsure (1)..(453): unsure at all n locations
ggcatctgaagttctacctcgacagcggcatattccaactctctcctctcagcaacaatatgactactcgacttttccaaatgtcagattatgcgatgcttatgcctttcgtctccgatcacattatttgactggaaagtgaaaattaaagatggaaggagagacgttgttttctgctagaggatgttttatctgacaggtcacctgcgtgtanttttcaatatatatatatatatatatatatatatagngctatttgcttactacacactgtagtagtacatgcaaacatattcacacgcatcaaaactgatgcgtgagatggcagattatgcgaaatnnnnnnnagacactgaacatattttcttcaaatatagtatgcacactataattgaaatattttcaattgagaataggtatgcaatcccttgcttatttgggaccgaggactgt

SEQ ID NO: 70186 - DNA, 423 bp, Oryza sativa
  unsure (1)..(423): unsure at all n locations
agcttattgtcatgattcccttttatgcatatctggatttggatcctgcagaacaaacatataggatgagtagtatctgatgtaaatataatactcgagaaaaattcaagcagtttataaatacgtatttcttctcttgttaattttgatttccccgagcagatgactcattacgtttaaacattctgcccgactagtcatagccaccaagcactgggagtcggcctaagcacttcccaaacatgcatatgagtgacatgagttcgtcattaatggaacaaagttntacggatcggagtttactactcgggtacttttgcaattattaagagcagaaaaataaatatcttatctctatgctgttgatttattccgaataatacttagcaccttgcgttactcggtccatccaacgagcccccg

SEQ ID NO: 70187 - DNA, 436 bp, Oryza sativa
cacgatcaaatgatgaatgccctgtcgaacacgatcatatcagaattgttaccttaatcaagaccaagcactatgcatgttttggttttgaactgcttacgttggagatacttctcagataggaatccaaatatcagaggttgtccttgtacaaattgtcaatccagaaagaaacacagtggaagtcaagaggaatcaatgaaagtagattacaagcctcgttcttattgaccatcatatattgttctaatgacaatactgcattctattatgtatctgattgttattgtatatgttgcgagggatgttatgaatgtgataccctataaaatatgatgagttggataatgccgcatgagtgacacaaactgccatcacagcgcactattatgtatgagttcccgtctttagtggtctttcaggtaattcttgagtg

SEQ ID NO: 70188 - DNA, 413 bp, Oryza sativa
  unsure (1)..(413): unsure at all n locations
agcttgcattactcttctggtctcatcaccatgaacaaagaggatgcaatgccaacccttgaagcagttagtctccctgaacactgaggctcggatgtctaattcactcactgttgatggcccttcctctatatcttcttcagctgcttggtttccactagtcttcagaagaacattgaacccaaagcatgttcctctctcccctggttccttttctttgatacttatctctcctcccatcagacgaacctgtctataaaagaatattatcaatctatagtagtgaaaaaactaatctttctcanaacaataacgtgccatgtcatctaaatgcggacaatccaatttttgctctggattttgtagaccgttggatccttcgactggcaaagtatcttttcgacccttcacaa

SEQ ID NO: 70189 - DNA, 367 bp, Oryza sativa
  unsure (1)..(367): unsure at all n locations
tgagctggtgcagcagggttttcagctgcgccttgcgcggttcgtccagcggcgaggcgggcggcagcacgtgcgtggagacaggacgaccgcagagcacgatcgcctctttaatcacgttcacaaacggcgtatccagctgatacatctgcggaatttgcagcaaggtctgatgatacccggccgctttcgccacgtccccgtcgcgccaggctttcagaagattcaccgacacctgcggngcaaaagtgccgctcgccgatatcgccccgtcgccgccgagcagcagggtattgaacagatgatcgtcgtagccgcagagcaccgtgaaatgcggatgggcaccttngacggtatggatcatgct

SEQ ID NO: 70190 - DNA, 416 bp, Oryza sativa
agctgggttttttttctccaacgatcgagatatcatgtgggatgaagaacaatgcacatgggtggtgaagattccatgcggcatatgatagggagactgtgtgcatatgggatgaggagtcgaattcggaaagagaccaaatttagtatgattggagtttgtaaagttcgtgtcttgggaaggtctcataggggattataacttcttttacaagttggatttgtggttttaggttgcctatctatgggtacaaatagagaggggtgtttgaagcctcctggtaacgattgtgtgagagttgagtctacaaaaaagttggggtttcgaatctactcgatattttcgagagaagtgctgttgttgcactctgtaaacacgaatagaagtaataagggtcaagctacttttgagatatc

SEQ ID NO: 70191 - DNA, 221 bp, Oryza sativa
gtacagcttaatagtcacacacttgcgaaggtatcataagctgaactagtatgacccgaacaatcgccagggctcaatggataacccctcacctgattacctcattgactcgtagcgccggatgaaagaacactttatgattctagacgatgaggacgaacaagactcttaagttcgcatgtcttaagttattactatcataatgttatgtctcttctagt

SEQ ID NO: 70192 - DNA, 414 bp, Oryza sativa
agcttaaagttattctgacttccattgcatcatatggcacaaaaacagcactattacgctagcaatcgaacagacttgcacaaacaatttcaaagtttgttttgcagtcacctaagaccgaataattcaatgcaacactctatcctgttttgatagcacaaaaactaaatgacatgaaagttgcttccaggaaaaaaacaacaacattaaggaatatgaattataccaatgaatctacaagctaaaaatttgcacacatacctccaaacaacggtccacaagctgccgacttcttgggtagtcaccatttctgtagtgtccaaccgccagcagatatagcttctccctagtctgcagtgggctgttggattgacctaatgatgctgtgaaaacaaaacgaaattgatcaaaaca

SEQ ID NO: 70193 - DNA, 503 bp, Oryza sativa
  unsure (1)..(503): unsure at all n locations
ttcanatacaaacatgttatattatcatccaacataattcacatattgtttcaatgtatatctttattatattctatgatatcctatatacttatatagttcatcctcacttagttagagcttaaatgattaatctatggtccagattatttttctcattttttcctctaattaagtcatatcacatcaatcgtttttagcctctagatgattaatctacagtctaaactatctccctacttttcttcttccataaagtcataccagcttactttatacgtttgaatcaccattctacatactatttaaatttaaattatcatagaccatattaatttacttaatctgatggtatctagctatcttatacattaatctttcttggtatcatactaaattcccgcagcattgcgcggtgtttacctaggtaaattataattgagtatattctcatactatatataagagtggtaactcaaataactatttgtatagtcttatga

SEQ ID NO: 70194 - DNA, 347 bp, Oryza sativa
cagctttgtttttattataaatctaggtactggcacactcacaatggaacggcgaccggtggccgcagcactgtgtgccgctgcaccggccgaacctgtggcacaggcaccgtcactgacaccgtcggccgcggtagctgtacatgcaccacgtggtgcgaccgtattaccggcaggcccctgagatgcagctgctgcggcacccccaccggcatgtgcgccctatgttgctgcggctgcgggaaccccaccgggaccgacctctgctgcaacgccctgtacacggcggtcgcggccgccgccatcgtggtgttacccgccaacgccgtcgatgtgaagtcgagctg

SEQ ID NO: 70195 - DNA, 394 bp, Oryza sativa
atgtgatcatctttctacagttcactcatctatcaattgaatttctgtgctcctatatcaactttgatcttaatctaatcttcctaagaaacaatatataccgtctttctgcgctctctctctagagaagggttatcactatctgcatgtctactgcataattgccaaactattgtggaagtccttatgtattctagttgagttctctagcatgcatatcatatagtataaaatgtctatgacccttgggaagctgctcgacccataatttcttatatgtatgtataacgtgagcgaggatggacaacttgtatgaggccaacagtggacgctcttttggaacatcttggaaaattctatgaaattggtgagaactctgacaccatgaatatgg

SEQ ID NO: 70196 - DNA, 419 bp, Oryza sativa
  unsure (1)..(419): unsure at all n locations
agctttcaaaagttcccttcctatatcattctacccctttcaattcattaccacaggagacatgcagtactgagtaaatttgcaggaatcatggtaatacatctcgcatgctttattagtgtcttttcttcatacagtttcatgacttgttgtcaatcgctatgcactaatgcttttcgttgaaccatgcacttagtgcattactgcattgcaaatattaacaacagctgctcttcacattactatcgatatttgattagatttatatcctcaggttaatttatgccttacaaaccaatcagacaagacagttggcccttttgaagtatttntagcaccaagcgtacttgatgaagagaaatatgttctggtcaatggattacagaagttggttagttggttcacttgctcatttatgg

SEQ ID NO: 70197 - DNA, 422 bp, Oryza sativa
agcttgggtctatgtttcgaccaggccaccctatttggcccatattactattaccttgagggaaaattaatttcagcccattaatccttgggccctggtgtcccaatccatgcagcaattgaagcaaaaagtacaccgaaggtccctcaacttgtcatcgagttacaaaatcgtcccccaaccgcaaaaccagataaccggcgtcccttaactaatcaaaaccggttacaatagatccttcggtggttttgaccccggttttgtcctacgtggtggctgaatcagtgtgggacccacgtgggccccacatgtcaggatgccacgtcatctctctcctccctcttctcttcctcagttccacctatctctctccgatgccgataccagccgatagcaatagaagttaagcaatcggctatata

SEQ ID NO: 70198 - DNA, 488 bp, Oryza sativa
  unsure (1)..(488): unsure at all n locations
gcttgcctatgcggaattctcgtcaacaacagctaccatgccagtctatagatggcaccgcttgaagctttatacggccggaagtgccgcacacctctcttctgggatcagacaggcgagcgtcaactgttcggaacagaggtattagcggaagcagaagagaaagtcatgatcatcagggaaaggttgagaattgcccagtctcgacagaagagctacgcggataaccgtcgaagggagctcacttttgaggcaggagattacgtgtatcttcgtgtcactccgctccggggagtacaccgtgtttagacgaaaggcaagttggcaccacgctttgtgggaccatacaatatcttggaacgaatgggagaagttgcttatcagctagaacttccatccaacatgatccgcattcatgacgtgttccacgtgtgccaacttaagaagngcttaagggtacctgaagacacgctgagtctgacacattg

SEQ ID NO: 70199 - DNA, 460 bp, Oryza sativa
  unsure (1)..(460): unsure at all n locations
tctatcatntatgttagctgatccaatcaatgtgatgcggtcatcaattatcatcaacttactgtggacataaatctgcaatgccaaatattttacatgctaattctttgaatcacaactcttaaatggcaaagtgccatgaccctgtcagaaaacaaaacatgctccagatatggacaagactcatactttacctgattagtgaccaagggacctccttcgcatagtctaccatgtgctctaagaccataaaatgagatataatcatgtgctctnggaccaataacatcatatagattctgaagtatagaattagggcctctacagatagtccggtattgccaatgcataattgctctcacagatgcagcttcgacatcatcaatgcctccctggcacgatattatgtgagtaaccatgaacaganacatctctaatcactgcagtataaaattacctg

SEQ ID NO: 70200 - DNA, 411 bp, Oryza sativa
  unsure (1)..(411): unsure at all n locations
agcttgattgttaagatcccatacggaggcagcccataagtcatcaataataattaaatacctggcaatattttatgcatattagatacattttttcagctaatatagtaacattcatgagaaatatataaatcgaataagtaaataaatgaggaagcaagttttacaggaagagatgtaatggaaaagatgttcaaattttgacccttcctataaatgttgggttcactatagagtccaaactgttatgcaatagtgtctgtctacgtattgcttgacggtatatgcaatagaattcaaatgggccagctaaagtggccaaattggcttattatcaaaaaccacatccncattaacatagctgtaggtatggcccttgagaatatgtatccncaataatcaatggtcaac

SEQ ID NO: 70201 - DNA, 396 bp, Oryza sativa
agcttcgtgcataaaggagcgagaagatcagttcagagtcgtcgttccgcgaaggtcaagtgaagttttcccggaatttaccctaaacccaatccttcccggaagagtagtttcattagcttctagatcgtgtgttgtttgcttgtgtgtaggggcatggtttgcatcattggtggggatgcgaccatactaagttgtttgcttaagcaacttgaacaataaaagtctactcacaacagatcagtatgcaagtggtctagtacctcatctctagtaacccctctcatctccccctctctctcttgtgcccgcagcaattggtcagcatgagggacaatttcatcggatcaggatctcaacagtttcatggatcaactcagcacaactctatgagct

SEQ ID NO: 70202 - DNA, 401 bp, Oryza sativa
  unsure (1)..(401): unsure at all n locations
tgggttcttaagcaactgattgcatgacaatatcatatgactaatagctcacgctaagtgtgcaatttctatgtgaccaatcttatggctcatgactgattatatattgtggacatttgttaagcggctggtaaatcctttatgaggatatttactaggatgttataacacatatgccatatactacacacgtgcgatgaaaccatgtgcnctctaaggacttatgcacatctgtgaagcatgggagcatggcgtatgcaccatactcttaatttatttattacaaaaacaagctcattatactattgcttgtgaatctaatgaataccacctttagtactctcgtatattacaaacaacggcgtttaccgcacattcctcaggaataaccggtatctcta

SEQ ID NO: 70203 - DNA, 419 bp, Oryza sativa
  unsure (1)..(419): unsure at all n locations
agcttcagattttggtcatgtctggggttggggctatggtggggaaggacaactaggtttatgctctaagatccggacagtttcctccccacatcccataccttgtgttcaatcggcgttctacagcaaggaccgtacaggaattgtgatgggtagcagaactntggaaggaacaaatgatagagcagcaacttgcgtgaaagcaattgcctgtggaggccgtcatagtgctgtggtgacaggtcagactctactgtactcaacctctttgaatcaagntcctcttattttctttatttctcttttattcatactaaagtaatgtcaatcgtcattcatatattatgccgatgtattgggccctgaacattttcagttgtgttaaaaaattagaaatccattttttcgttcctggcata

SEQ ID NO: 70204 - DNA, 351 bp, Oryza sativa
  unsure (1)..(351): unsure at all n locations
agcttgctcggtgatgtggaaagatggcgaccggggatgggaaggtggtgaatggtggtgcggggcggatttcatggccgacggtaataggccaaatgtggggaggaggtcgcccacgccttcggcttacgcttctgggtcggtgccggcctcccctcctaccgtggcaggcaccatcgncgancgctcttcgacaccgagctttgccggcgacgccgtcttaccctgtcgacgtcctacccttatcccgtgtcttcgccgccgcgtcacctccgccgcatcgtcggccggccatctgacctcctcgtcctggcaacgtcctccacaccgagagaagagtgagagagagag

SEQ ID NO: 70205 - DNA, 404 bp, Oryza sativa
  unsure (1)..(404): unsure at all n locations
agctcttaactgcatcaaaccaatggcattcgatttactcaccgcgttcggattaccacccgattcgatagcgataatcgccgtgatcaattgtggatcgacgccccatgctgcaccggctttctggcttattggcatccactgcatcgcacgttgcaccggaactttcgcgttccacggcgggttcgtatagtcatgctntgatgaacaacccgcttataacacaatcaaaaaggcaaaccatctcaatttcacttcttctatccttatagcctggaatcgccgttgaggtgacaacggcacacctaagcggcatgatatacatttcgtttctgttgtcagcaacgaaatgccatgtctttgtntcacttaatggcccccatcggttactgcattaaacagca

SEQ ID NO: 70206 - DNA, 422 bp, Oryza sativa
agcttttggtttcttttatataggatatatagatatagatgagaagtaatttataagagaggacctaacaaatcgtctaatatttcttaatatattcctaaatatcaaccaaatcaactgacaaataaaaatgcctattgtagcataaaataaataatatggtactggctgaactccggccataaccagacaactgctgacctgtgtggaatgccagcggcaatagtgctgggctgctggcccagagagcgcattccatacatacaaagagtgtattcgtcgaataattggaaattcaatggctcaatgacttgaatgtactccgtacaacttaataacggatgcacaaggaacatgacataagagcagaatgtccaaagcattattaagtaatcctgatgaatatttctcatatcattcac

SEQ ID NO: 70207 - DNA, 337 bp, Oryza sativa
ctcacaggcgtggacgaagttagaatgtggactatggaatcggtgttgagatgatgtaactaatcccataaaactcatggatccccctgaagaattttcaagtcgggagagagaaaccaccatagaagaaattggaaaataccacgatctcgtgcatgtccggtgttgggaatgcttcttcgcatgccggacgccagccgatgattatctttgccggaagaacaccgtgcgccaccatctccttcaagttctcttctgaacatcggaaggagcccattgaccttcgaagctttctctctcctccgccatggatgcgaaacggatgatgggatctaaa

SEQ ID NO: 70208 - DNA, 423 bp, Oryza sativa
  unsure (1)..(423): unsure at all n locations
agcttacctctatttttcttatttcagcttcgattcttgctctctgatgatcttcccatgcttggatcttaatctcttctcgtttaaatctggaatgcaatagagtgactcaccgatcaatgggacaatttagcaaaaacatacaaagacaatcctttttttttgcaacaagagaaatagagtttagtgaagaaccttgctaaatatttagccttctctgcctcctgccacgctgctgcacgaatatctgttaccttctgtgtagattggtccatgggcactcctttaagcgaaagtgatgcatctttttcctcttccttgttgcttgcccatgcagcaatggttgttttaccaagctgagtgccgangagcattatctcacctctagtcttcatttgcaattcttgttcacttaatttcacg

SEQ ID NO: 70209 - DNA, 384 bp, Oryza sativa
  unsure (1)..(384): unsure at all n locations
ttctattactatgaaantacctcatgcctatagctgaaatgtntatccacactcttcagcatctgctgcatgtcagctatgaattcattcacaccgccatactcaaatccatcaactcgttggtcaattttctgtagatcaagggtgctgctagccaaacctttgaatgaggaattctcggtcctacgccaccaagaatatatatttcggatgatttgatgaccctctntgtcaatcctccttcatagcttgtttatcacgttcttgcactgcacgtattgaatgataaacgcttagctattaagagcttgttaaaaggcaaacaatacgatccataccatttgcgaaaggaattacaacataattgagacaacctcaacatta

SEQ ID NO: 70210 - DNA, 415 bp, Oryza sativa
  unsure (1)..(415): unsure at all n locations
agcttatttgacattnttaaattgttcgggaggagtttgtttacacacatttgtataaatattgtacttgcaggtggtactggttgccgacaaggtgctttgtgagggtgaatggttgtcactgaatggttcgactggagaggtcattttgggcaagctgcctctatccccaccaacacttaatggtgatttgggagaattcatgtcttgggtggatgaaagtaagaaactcaaggtaaaaatgtcccaacgaattattagaaaacaagttacatgagccaagattttcatgcttcctaagcagttcaaatctgactaaacgcatgtagttattcatcaattatattgttcttattttcatgtatgcctgatgttccangtcaaggctaatgctgatactcctgcggatgcactg

SEQ ID NO: 70211 - DNA, 449 bp, Oryza sativa
tcaattgactgattgctatcttgctaatagcacgacgagcataatgatgatggtgctgataaatcggataatcaagatgtggattctcttaatgaacccaacagaagtaatacagggaagaagcggggaagaccaaagaaagtgaaagcagagcatgaggacagtaaccaactctccaacgggaaacaccttggcgaaaacaatggggtaattactcagccttcagtgtgttctttgagtggttttgagcatgtactggatcatgcctgactacaaattttagtcctgtattagctattgacaataaatatgagataccttgtcaccagttaaagtcatgatgctagcagagtcaaaactacacaacatttagtaatgatgattcagtttttgtaaatctattttcatcggtactagtgaaggtgtgtgtagcaatggtttcacttagt

SEQ ID NO: 70212 - DNA, 386 bp, Oryza sativa
  unsure (1)..(386): unsure at all n locations
agcttgacttgttgcgaggaggctggcttagcgatgtctgccctgctaaaccaaaggaaggggcttctttagcatatacccatggacaattcagggcatagtgtccttgttctctacaatcatgacaaaaggggacatgctcttctggcatgggaagctcattggcctgcatggcaaatgctcgatcaaacacatacttattttggtcttgacttccaaccaatggtagctgtgaactaagccgcatgcttggaatggaccaagggtgtgccctggttaactctcttgaggccagtggtggatngagttgaaaactggagttacttgaggcatacccgctgacattctttcctttttctctgttaaacatctgttacagggattga

SEQ ID NO: 70213 - DNA, 334 bp, Oryza sativa
  unsure (1)..(334): unsure at all n locations
atcggcatcatcaatctgtatcttgattaccttgtcatgatgggcgggctttggcgcgtgcttcgcccgatcatgccgttcggcctcaacattatgcactgctctgttgattatggccaaatcaccctttgaagcggccgaaggctaaagccccttgaccacgatcactcctgccgggccaggcatcttgagcttgagataattgtggtgggaaatggcttcaaacttgttcaaggtcgcacggccgaagatggcattgtagttgtacgggatgtcgacaatgtcgaacaatatttgctcttcgcgtctgttnttgcctatgccgaaagctact

SEQ ID NO: 70214 - DNA, 372 bp, Oryza sativa
agctttggttctagaaccacgcaaatatggttacagaaactgaacccaagaaccatgcaatctgaccgtcccggtcgatcaccgtcgtatccggcacacggatctcggctgtgaagaagccacccccatcccattccagatccacgagacaaaagcttatgcgggagaggaggagtagtggcctccacggatccaagacacagcaggaactctcaagtgctccagatctaggaggggtttaacgccaaagagaaaagaaaaaaaatcttccacaggtccgggccggttgagagacgagagagagagagaccgatagagagagggatgtgcggcgacaggttcctcaccggcgaggcgatgcgatgatgcggc

SEQ ID NO: 70215 - DNA, 458 bp, Oryza sativa
tacatgttacacacagctagtgataaagctgcaattgaattgatataatcttccatgatcaagaaattataagtaactcataatgacctccatcacaaaattaatgcgcacatgaacaaaattctgtttgtgaagcaacactattaaacaagctgagcacaaaaaacaatggctgccatttattttgaaagcctgcaacatacaaagttgcaacacggcaatattaacttgtcgcagaaggtccacttgaatcaatctcttgacatcatcaagaagcaacaaattcgaggataactatggttcataatcacggtccgaggtgaatgatcattttccagcttcaattaactaaatagctcaaaatcagacttaccagtagcatgttagttcctttatccttcctcttaatacgagttgaagaaaaatatgctgcctgtacagtacattcaaatcattca

SEQ ID NO: 70216 - DNA, 387 bp, Oryza sativa
  unsure (1)..(387): unsure at all n locations
agcttaacatcgactcctagtggactntcagagaagatctatactactttaaaagaaaaaaaagagtggtggatatggtgagtctgccactcccaccaccaagtcccctaaactgacacatggaacctacgtgaaagtcgtttttgcatttaaatattttgtaaaatcaaaggtgttttttattattattttgtgatgaacaattgggcattggagatatattggtttgttatttggaatttattcacgaagtggttctggatatgattggatttcacacgtgatcgcaggattcgtcattntatgtgaccggtcagaccgagctctggtangccggtagaccggcgtgtaatgcgcggtcagaccggcgcagcccgcggtctgtgt

SEQ ID NO: 70217 - DNA, 463 bp, Oryza sativa
  unsure (1)..(463): unsure at all n locations
tcggcgagatcgatattggaaaanagaaagttccttttatttttggtttctctaatggccttggcgggacggcggctnttctaggtcagcaatcgtgtgaaccatatattattatgctctaaagccagtagcttaagaatgatcccattaatgaatcttccactaacaagataatcattataatcatcattataatcaaagagttaggcggaacacggtaacgagaatttggcctcatcagggtgacgccagacatgcgtatgagtacaatacaactcaactgtacacaagtctctgtcaaggtcctgcagagaattgttgtttgactataatacggacgcccgtggccaattgggaagaaagaacaggcaaaggantttggtctcatctgaacatataaaatgatctggtcatcctgtgtcaagtcatttcgtcacgcgctaacatatgatatgaatccacg

SEQ ID NO: 70218 - DNA, 187 bp, Oryza sativa
gctgccaagaaaactatgctgtttcctgacggcatagaaaacccaagaaaggttaagtctggcaccaccagctttggatctgtaaagtttgtgttacgtaaactgacagcaaaaataaaggaggaccccttccaaggttgcctgaatgacaattttctttggataagaacaaagtctgtgaattggg

SEQ ID NO: 70219 - DNA, 388 bp, Oryza sativa
  unsure (1)..(388): unsure at all n locations
tcatggtctgcctcaatctatgatttcagatcgttactgtatcttcaccagnaatntatggtctgaattggtcanattgactgatactcagttgcgcatgagttctgcatatcatcctcaaactgatggacaaacggagcgcgtgaatcagtgcttggaaacctttcttcggtgctttgccatgcttgcccgcgtaaatggtttcggtggttggcgttggcagaattttggtacaatacaactcctcactctgctctctggaccactccttttgaagctttatatggtcatccttctcgccacttccgtgtacgttatattgctgactgtgcggtacctgacttgactggatgggtgcaagagcgttatatcattacttagtctcttg

SEQ ID NO: 70220 - DNA, 415 bp, Oryza sativa
tatcttctgtcgacggctattccttcctggagaagcatcgatggccgccgatcaaaaactccggtgaattagagtgtaaagtttaagtgattgatgagggagtttgagtcaagatcatgttcgtactgccagtgctaggatcccagacaagagaccagctttcactgccgtcttcatgtgcctggactggaacgctagctgcgcaatggacaggggattgatccctttattcaggttaccgacctgtcccaagttaagcagcgttttagcgcatgttgtcaggaaaacagataaaaatatattgatgcttctctgaagctcgaatcgtcttggcatggacgactgacttactatcggaattccatgctcgtcacccttgacaaggaaagcgaagatgccttcgatgacgacaacc

SEQ ID NO: 70221 - DNA, 466 bp, Oryza sativa
  unsure (1)..(466): unsure at all n locations
taatagaaggcgcaagtcagagacccttcgtgctcaatatatctacattaaggaactcaggcatgcatttgttctcccttcagattatctggacttgcctagttgtttgttcacagtattttccgtaagaatttgcttcagataagctaaatgacttggtttgttcctcaatatatttatctttcctagcacaagaataaccccttaagatcaagcctaattgcagctgaaacctataaaatctactgccgctctgtcactattccttaaaatggtggtttgatatgcanggtctgcgtangaacatggaatgttgangaagacttccacctgatgacttggatattcaagaatggttggatatggaggagccagctgatnattatgttctcgggtaaatggtgcatcccatcttggtactttatcatattacactatgactgatatttctcctttctatttttca

SEQ ID NO: 70222 - DNA, 180 bp, Oryza sativa
agcttggattaccgagatttggttgtgttaagactgttagccagtatcacgaatgatatgacaggccaacatgaagttcatcttttcacactgacggtgtgtttagttcacataaaaatcgaaagtttgattgaaattggaacgatgtgacagaaaagttgaaagtttgtgtgtagaaaa

SEQ ID NO: 70223 - DNA, 301 bp, Oryza sativa
acgtcatgtgaagaataatagccttatgatgaaatgatgaataaaattggaccgttggatccaattagtgtataccaatcacacatcacgaaagattcagatgaatagctcctgtgcatccatcggtgcacaccggtgcatatacaaatagtttcagatggagaacaccagcagctcgtctcattcacccgcagcgacagtatataaaatgtatactactatacatattccttcatctcaaataactacaaccaatatgtttttaatttcttcatatacttctttatttcaatcaaccata

SEQ ID NO: 70224 - DNA, 295 bp, Oryza sativa
agcttatgttctgcgcgacatatggctgaggagttgtgacacctgtagtgcgcaacgagataatatttaaatgttcgacgaaacgtcggcgacctcggctagacgccgggcacgggcacgcggagtatggggcgaatgatgaggtcagccttccggcgaacaccgatgccgaacgcctcagtcatgtcgagcttggtcgggtcggccattccgggcacctcccagtcaaagtggaagagcaagctggcgagagggagctccacgttggcgagcccgaacgccaacccggggcaca

SEQ ID NO: 70225 - DNA, 372 bp, Oryza sativa
gacctataaatactcaacttctaaagaagcaagaacccagtgctcaatcagctgagttatatattactgaataatgatgtgaaccatgcatcaggtctctgatctctactgccccggtatataaatatcagatgacgtagacatggatggaagataatttaggccaacattttatggatgaagtgctctacagatttcagaatctacaacattgtgtaccaggtaccgttgagtgtcttgggacatcaaccaagcatgcaggacctggccagtaccatcataaatagattatacaacgttataggaaaattaactgtgaatcaatacaccggcgtgcacctggttacatatttaatatatgcgacaaaaact

SEQ ID NO: 70226 - DNA, 245 bp, Oryza sativa
agcttagcttcatctttcttatgcaaggagcactaactgcagctgttggtgatcgaattaaagatactgacactacgatcaagatagtgcaggcgcatggtgcggacatggctaacttccaccaccaggagtactaccagatggcggtggcggcagcggtgtcgtggccgatggagccggacagaccgcaactgagcattatgagcggttgcagctgcctattattcatcgtcaccctgagggac

SEQ ID NO: 70227 - DNA, 462 bp, Oryza sativa
  unsure (1)..(462): unsure at all n locations
acaccttntaagatgcattgaccaactcctataatgttgagtaactgccgtataaaaagattctaaggtattgcgcactatattacgcgcacttttgtctaagcataaagatgcctaagtccctaaaagaacgtgacaggcctcacctgataatatgggctgcagacatattacgcctatgccaaaaaatatgccttctacaccctctaaaggatgacgcatgtaacatgctctcgagtaataaatcttttcaggtgatatagaccaagtgtatctcatatgaataacttctgatctcagtgattatcctttatgcgatactcacaaatagatataacaattgaattccgactggcgcaagtattctggtgattacccttaccgtgaataatatataagtcagtccttaagcatagacaatagacccangatcatcatatttattgttgatgtattcggaac

SEQ ID NO: 70228 - DNA, 418 bp, Oryza sativa
  unsure (1)..(418): unsure at all n locations
agcttggtacatgcggcaccggcggttcctacgcacaaatcacatgtatcgcaagatgaaggcggagttcgatggcactgaagagactgatcctgcaccaaaaccaacatcgggagaaaatgtgtgtgcaatgacagagaaaattgtttgcgaagttggaaaagtgactaagaaaccatcaaaggggacaaagcgcaagatacccgagaagaatacgaaacaaggggatagtaaggagcaagatgatagttcaaagccagatgataaactccctcccccattcaagaagcattccatatnttttaagtacctcccgtactggaaagatctggaggttcggcatgccatagacgtcatgcatctagagaagaatgtgtttggcaacatagttggaacattgttggacatgccaaacaag

SEQ ID NO: 70229 - DNA, 475 bp, Oryza sativa
  unsure (1)..(475): unsure at all n locations
tgatcagtaccaaatcctcaagtacgcgcttacgacctaatctgccatgaagaagatngaagacaacaacacccttgtcttcatcgtcgacctcatggcagacaagaagaagatcaaagcagctgtcaagaagatgtatgacatccatgcgaagaaagctaacactctgatcaagttattaactcaccttcctttgttcatggctgaatacgcgtcattctgtatgtgacaacttggtgtatcgattttctgtaatacatgcctgacggcaagaagaatgcttacgtgaagctcactccatactatgatgctcttgatgtggccaacaaaactggcatcatttaagttagggcggctcttttcatcatgttgaacgtaagattttggttgctagttctaatggtgacagaccttatacctgctaagaacatctgagtttgttggcgaatatatctgtggagccacatttctgatc

SEQ ID NO: 70230 - DNA, 414 bp, Oryza sativa
  unsure (1)..(414): unsure at all n locations
agctttctactcattgatcgnctttactatgttatcaggattatcccttctgaataggcgtggactttaaagcagtagtgacaatgacttgttcagtatgtcttatgtaaaatcacatttaatttaatcaagaactgatttgatcttttagccccaactttactgtataagttgttgggaacttgggatgcctttctggtttctacctttttaggcgttctagtttccacccaaacgaagctggttgctctcgtacggctgtgtaatttatctctacgtgctaaattgattaccttgcattggagggaacaatatgacgcttaacatgtgttacagcggacttgttcaaactggttaatatgagtacataccattntntgcataccctgctgatgtaatctcagatcgtctgag

SEQ ID NO: 70231 - DNA, 387 bp, Oryza sativa
agcttttctctctagagtagggggctcttggttagttagatcgttgtgttaacttgcttgcttaagttttgtttgtgtgcgtgtgggttttaacgtatggaatatattgagggttgtgatataaccatactaagttcagtggtcagttctaaggtaaaaaacaacctacctcacatcaataaaagtttaagtttatgtaaaaaaaaagtctattctattctgagacttctatctactttcttaacccttcctttctctctcttaccttctacctaaaagaatggatttaatgataggaaagtttgtgctcattaatgccagtggttttaacacgtttacagcttatgaacaatgtgtctggatctccaattaaattcatcctgaact

SEQ ID NO: 70232 - DNA, 288 bp, Oryza sativa
  unsure (1)..(288): unsure at all n locations
tgaagctngacttgacttgacttccgaacagacatgaagttgacggctggtcctctaggtgtgacaactaataaaattggagagactgggaggagatatttgaataaccgtttgacaaagaaatgccgaagggcgagaggagacaatctgcaaatagggttttcagaaaacttgtccttacggtttgaccatttggctcaacctacagtcaagtttgctctgattccacttttgtacgcccagaaatttaacccaaatttccagactattttgcgtattaaatccctg

SEQ ID NO: 70233 - DNA, 257 bp, Oryza sativa
agtgtatgtcgtcagtgtatcactaatattgagaccaaaaccaaattctgtaaagctgatggttatagcccgtcacagatgaccggatctggcctattggttgaaagaacaaatgcatgccattttaacaaagaaagatgcacttgatctgacggctattggttattgatgacattggttaacctaaaggcttttttatagtgataatgcttgtagtgggtaccaactatattggaataatggatacacgggcgtga

SEQ ID NO: 70234 - DNA, 480 bp, Oryza sativa
  unsure (1)..(480): unsure at all n locations
ntgacgatanatattcaagctgtctgcacatgtgcgcgggctaccttcctagttatatactanaagtccattaaacttcctataaacgctcttaaactgccacgtggtgctttacaaacgctcctaagtcgtcacgtggcactctaataaattataaaaaattcctagaanagagaaaaacatctcaccattgattttcacttaaatcagtggacccattatttctaaccattagatcgattgtaaaggaatagatactcaatccaacgtatgggcctattngatttatcttgcagaatttgtaccctctccttcccctgcagtgcatgccaccttacgacgtacgtacatatgtgcaacgtattccatatgccctccccttttctctatttctaacaacttatacaaaatagtttaaaatttaatggctaataatcatgattcttaatgatatacagcactaaattcatttgactattt

SEQ ID NO: 70235 - DNA, 392 bp, Oryza sativa
  unsure (1)..(392): unsure at all n locations
agcttgcatgttttgtcctccaagaatgaattgtactagcagggagtacaagtacctgctctgtttcaattaatcaaatgatgtttcttccttgatttgtgagttgaactaggattaattaggagcagtagctagcatcaatgaaactaagcatatatgcccaccgtattagtatgtatgggtntgcattaatctgcgtactcaaactgttaatacagttcaaacacacctacacgctgatagctagctagtaccagtacctattgcatatgccctccatttttcagtgtgggtttcaagtttctagtacatatatgattttcactacatatttttcatatttttcttgtttgtgagtactcaataatggttttttgtctgtncctagagat

SEQ ID NO: 70236 - DNA, 435 bp, Oryza sativa
  unsure (1)..(435): unsure at all n locations
cactatgaaactcagctttggttgtttagatatagcctgacttgtggtcagatactcatatgagaatcgtgttatgatgcatatgtttgtgaatttgtacaagaatatgcattcttcgtcattgcatatgtcttgggatgtctgtcctatgtttatacttacacaatcaacgtcgctagaccaccatcgactttttagtattggcgctcttagaattactcatttttgtcagaatgacgcgctgcattttattgtattattggtgcatggttgttttagcattatggactctggatcattctaaatgattnataccttgtctcttgtatcagaactgttctaactcatttgcattcataattatctccacctgaatttgcttagtcggaggaatccatttaatatttttaccttctcttggtcagctacggactg

SEQ ID NO: 70237 - DNA, 388 bp, Oryza sativa
  unsure (1)..(388): unsure at all n locations
agcttgtcgttattttggagagtcttgtatttgtgtagcccccgactctctggttagttgagaaacaactgaacatagagtcgagaactgtagcttcttgtcgtcgagtagtcattgcttgagtgaacatacgtgttgaaaatgtctgagtagaaatattgaagattggaacaccacttgttgtagtaaaataacacggcatcatatttcatgacacatgccgagatgtcgagtctcttgtagacgtcgtggctgatgaagtancaaaacttgcaaagtagcagcaattgagtttgccggtgccgaagataataaagatgaagtcgctccactatggggacaaagttgcaaagccgtgatgaagtgaacacgattcagcggcaacagt

SEQ ID NO: 70238 - DNA, 361 bp, Oryza sativa
  unsure (1)..(361): unsure at all n locations
ntatacttntattagaatactcttctatataaattatggtatagaaatactctccgagtatataaatgcctactttacattatgttcatgttatactgaatataaagctagcttatctgggagatgctctggtgcgggtataattgttgcatatgcaattactctatgtcatgacgatgatattagagtattatctggtagtttagacgtggtgtctggactacgggatatcattatttggggttatatattgcggatgtatgtaggccgcttatggtgacaactcactacggctattcctttccgccgatatataattctaacttaattttcttgggaaggtattacatcgtatttatcc

SEQ ID NO: 70239 - DNA, 325 bp, Oryza sativa
agcttctctgcttctcttctttgatcccctgcttacgaaatatttagcaccaacaactggtatcagagcgcccatgttcgagtagggcgtgacagagtagcacggcgtatcggtattgtcaattgaagctacaagtatggcttcaagttcgggcgccacaatggcgcagtctatggttcctgtatttgcaggagaaaattatgatatatggagcatcaagatgcggaccctgctgctatctcatagattgtgggatattgttgataatggctatcaagatgattatcgctggagacactcttactgctgaacataaaaatttctg

SEQ ID NO: 70240 - DNA, 340 bp, Oryza sativa
tcgccgagctctgtcatggtatgcactgctctggggttttgccatgcgatcagttggagtgctagtttgcagaagtcgtggatcacaccagtagatgcaagttctcattcttattgttcgatcgcattaaatttctggatatgttttgactcttcaccactactgtgtatcagacttgtctaggaacgaaatcatatggcagattctgagctattaactattaaatactatttcaatggtcattcctctcttgacgggtctaaagttcaacatcattaccggcgatgatggcttgccacgtattcaatttcggagatctgcattcctatccttggcgcct

SEQ ID NO: 70241 - DNA, 419 bp, Oryza sativa
agcttctatgttttcagtttatgacagatcatgttcacaagggtttaaaattattcaactaaaaatcccttcagaaactattgaaaccagccagctcctacttcctggtaatgccatattggacaagtgctttgtgcatcttgtacaagacttcctaaaactgtccacaattaggataatgttttaatggtaaacagatgctagtgattacgagagaaggaaaataacacaacctaatgataataataataataagttagccagtaaacaactcaatactcaccagtttggtgcacaccagatcaagctgggattggaacaaaaaaaaggacgtgggaagtatcttcttttggccatcacattatataattgtcagcttatatgaaccacaatattttctttacattggatgtgcttat

SEQ ID NO: 70242 - DNA, 338 bp, Oryza sativa
  unsure (1)..(338): unsure at all n locations
atatgacaacagattnttcgcgatctatattcatgctaagaaccgttatcaacacagctgatagatatacccatcagtcacaccctcaagaaaagtgaagcattacaaacatggaagaattgagtggtgaaagcgaaacgtgctcaggttcagtgacaattaaggttcggttgccaatccaacatcgccgttnttttggcgctttgttgaaggttcatcctcttcattcgttgcatctactccggtttctgtcgntggattattnggctcggccaccttttcatcttcggtgctggcagcaccgttgataacacgcgtgacaacgtctggacctaaca

SEQ ID NO: 70243 - DNA, 328 bp, Oryza sativa
  unsure (1)..(328): unsure at all n locations
agctttcaatcatttatagtgttaagntgttgtacgcggtgtctttacagatttattcatactccattgttttcttagaaaaggaccagttagaagatgaagcctaatgatggagtcctgatggtgtgagcaaattaattagtttatttcctacctaccattatgtagaggacttagctagacaaaatatatgggtcatttgtatgcatattcaagtggttcttccaagcccagctggccacccancttataacgcacaatgatttgcactgattgaactgccactctgccagcgatagctgatttcacgttttgattntctgcactg

SEQ ID NO: 70244 - DNA, 296 bp, Oryza sativa
  unsure (1)..(296): unsure at all n locations
tatcaatatctttgcatttcacacatggatcatcgcttgggttctnttntgaacaagatggctcgctacggagaaagacctatnctttaaggttctaacttctcttcaagagagaggtatgctttgtccaagccatccactctctcttgaagttgagcgttcgccacctcaagattagcatgagactctttggtttgcttgtaaagctgtaccaatgcctcatttttctctctctccttagcaagctcactcttgagttcatgacaccgctttttctcacgaatgagcaaaacatc

SEQ ID NO: 70245 - DNA, 394 bp, Oryza sativa
  unsure (1)..(394): unsure at all n locations
agcttggaataggtgtatatctgtnttgttgcaatgtagatccatcgaggtccacggtctttggtcatctttccattttatccaaggccatcttaatcttaaagctcttgaaaatttccaatcctcctaaaacttttggcctgcatactgttttgccaattcacaaggcttgttccaaggcgattattctctggatcagttcctttccttagggatttgcaaagcggtcacttagttaattttgccgtcgtcagaagaagcgtaatgagttnttgtccaacagaaatttgtttgtccctctgtcgaatttcgctcgattatcaacatgtttgctcatggacatgccgctggtcgctttttgcaagtgtttcggtgcgcacattgatctgttcct

SEQ ID NO: 70246 - DNA, 423 bp, Oryza sativa
  unsure (1)..(423): unsure at all n locations
ttttcatcctagagctggctggctccagtgttcgatatgaacctgagcatagttcaatcccattttaacaaaaaagttggcaacgcccttgaccaggggatcattccgcaagcatttgactttaacacttgtaaggtgctcacatgtaaatgatctttcttcaagctcgccaatcattctttgtgatgtgtttgcgcaacgatgctatatataccaagaataacaggtaagctatattctcctgatgacatgtgtgcttgctaaanatctttcaagttggatcagtatacatttagagggaaagaatttacctttcaagttccagaattagcttctccagtattgtgtgagtcccgaagaaatacacttaatccatagaaagattgcatcagacaccattgaccaagagtcaagctgacaaga

SEQ ID NO: 70247 - DNA, 419 bp, Oryza sativa
catcacgtgaccttatatactcaagctcatagctcccccatacttatcgtcttcttattgtgttcgcttgctactcactgtgcttatgtgtgttgctcgtgggtcacactgctaccgatatcatgtgacatcggtataggctgcttttattatagagatcgcgcgcgctctttctttcaagcgttccatgacaagattacagacattggcacttacatttattagaaagattagcttacaaaccatctgagttcctcctttctctgttggcacgcattcatcttcacatgatgaagatcaagaatgagtcccgtgactccaacgactcctgtgctcggataaacagaccgatggagctcatgtcatcggtgcattcggcatcagatcatattcaccgccggaaaccctacagtcactca

SEQ ID NO: 70248 - DNA, 356 bp, Oryza sativa
agcttatgtacaatagactatgatttcatcagcaaatacactctaaataattgcagttttcaacatcgcagggcggacttgaagcataaacttataagtcaatacagctgtgctgttgctcgagagtgaagcaatcatgcgctttctgtggtgcatataaatgctgacaagcatatatcgtaccttgcgtatacttccataagacaatatacattgacactcttgaaagactagattaaccattgatgtctcataagatgtggttataaaagacgtccaactagcgttgtgagaagcattttgaatatgatccttgtcgggatccttatactgagagacttataatctgggtaatt

SEQ ID NO: 70249 - DNA, 314 bp, Oryza sativa
actcagcttctcaccatctcgctgctagccaaggagtagcagctaccttcatcaatgatcatgcggcaacaacgctgtttgacgacacactttgtatgtgacaacgtcgcgtcgcatgagactgctccgccttctccatttgagctgctatgacacgctgcacaacgaggctgtcataccgatccccgtatgcaggctcaatgagctcttactgtggctcattatctgcatggccagccgatagcactgttagtgtataatcattcgaatcactcgcagatgagtgctcaccatcggatactagctaccgaact

SEQ ID NO: 70250 - DNA, 376 bp, Oryza sativa
agcttgttctaaagttcaaagtgttgcaatagctcgtttcgttggcgccaaacaattaaaacatgcacagaccgctggcaatgtggtcaatttggctgaatccgctgccaactcaacaagcatgcaaggggtgggcacgaaagatttaaaaacttggaaaagcctccctacattcctgttccctgccatatgtgcgccattagtgcgggctgttttggctacacgacacgccagagtgagtagtaatcaaactctgggtcaacctaattaatgctacaatttccattggtttaagtatataggtaggctatgcctgcattactggtttgatctactgatattgcaattcatctcatgtgtacatgagaatgggatt

SEQ ID NO: 70251 - DNA, 453 bp, Oryza sativa
  unsure (1)..(453): unsure at all n locations
tcgcgctccttgctgcngcctcagatgcagcaatctttgcttctgtgtccatctctntgcttgacttctttgtcttcattgaggctaccttctttatacgatccttgacatccatagaagctacctcttcatcaggctcagcaccagcagcttcttccaccccaccattaagttcctgtgtttctttcgcctcctttgcagacttgtctttcttagctttcttcttctttgagctcttgctctctgcaggggcaggtgcaccttctttattctctccatcagcagcttgctctgcacctttcttgcctgaaagatacatacaaaaagtttgatattacaatcttcaacaacagaacagtgtcggagccagaaattataaacaagagtagggctaagccctaatgagttgttcattntctccaaaattacatggtgattaagaggattcaacat

SEQ ID NO: 70252 - DNA, 279 bp, Oryza sativa
cagcttgactatattggtggttgactgatagctggagtttgtcatgatcctgacaatatatttgatggtagctttggttactttaatttatgtcacatacgtggtaaggatctcatggtttgggacgttcaattgcccagtagtttttctctaattaattaatgtgcatcaaactattttctctagttattatgtaagtctagccgtcaagtttccaaaaatcagaatacactgcatgcattacttgcatagtcaaccaagtatctcaatgacaactga

SEQ ID NO: 70253 - DNA, 140 bp, Oryza sativa
aaatgcctccgagtgcccaccgagcaaaacgacccagagcaaatcgaagatcccgaagagaagacctacgcggagaagccaagaaaaatgctcgacaacatggagcgcaggaccaggaaccgggaaaacgattacgcaag

SEQ ID NO: 70254 - DNA, 408 bp, Oryza sativa
  unsure (1)..(408): unsure at all n locations
agcttggcattaaaattctcatctaagagtatattgcctggcttaatatctctgtgcaggatatatggcttgcagtcgtgatgtaggtagaatagagccgagccaatattcttggctattttgtacctgatcatcgatcggatataattaattagctagatatattgaaaatagtaacatatttgtcaatagagtctcactacgttgctctctacaggtattagaaagcaatcagaaccgtttatctcatttgattgaattagtaatgaattgtcaataatgtgttgcatacctcgtaggccatgatcatactgctgctacctcgctctcgtgaagtactcgtagaggttgccattnttcatcaattcgtagacaagaaaaagctccttgttctccatgttacagcac

SEQ ID NO: 70255 - DNA, 418 bp, Oryza sativa
  unsure (1)..(418): unsure at all n locations
cagcttttcattgatatataantcactatttaatataagatatctataattataaactaattaatatcaaatgattagataatagttaacctaaatagtgtgccaataaataaaaatggatattgtacagtagcataattatctttaatatgtcttgtcactatagcaaccaaataaattagttataatcaatccttcaaattaatgggtgtataggaaaatattagtgccatttactagtctatgtccaaatataactaaatccatgacttataaattatctacataaaggttagcctcatcttttgtaactaanatataaacacacatatgtgaatctttaactctgttaggagagtaatcacagaactagctgtatttggaccacttataaaatagtcgatacaatgtcatgtga

SEQ ID NO: 70256 - DNA, 154 bp, Oryza sativa
  unsure (1)..(154): unsure at all n locations
ccatgcttgttggagcttgttggattntgttccaacaagtgtatagttagtatatatgattaattatcatcgaaatgtccaccggccactgtttttntaaagaaaatttgagtgatcacctactgttgaaaacatataggagtagcatatacat

SEQ ID NO: 70257 - DNA, 60 bp, Oryza sativa
tcactggttcagggaaaaaaaaagaagtccagaaacggccaccgctttgttttttttttc

SEQ ID NO: 70258 - DNA, 410 bp, Oryza sativa
ctcatgttagtgtaccatgaacaacgtggatactctgtgcataatcatcagaacaggactcagcaacaagataattaatatggcagtaataaaagtacaagttttgagaacactaaggaggttctaataagcagcaagtttcttacaatatgacatgcagaaccaaacggatgtgatctcaaagatcgggaagagatgttagctataacttcacgtaaaactatatttgtttgaattactaccagatatatgtgccaaaactaccagatatatggcccacaatctgaaattacatcaagtgagaaatgcatatggaacggttcacaacatgtgcactggaagtgatgaactacagcataaacatggacttgcactgtaccaccaaataaccaagtctaacacacattgta

SEQ ID NO: 70259 - DNA, 436 bp, Oryza sativa
  unsure (1)..(436): unsure at all n locations
agctctacattctttgttattatgacaaaacatggtagagtaaatcgatcttcttgtcatatatatttgcgtcatattataacttatcactgcaacagggcagcactgaccttcgaatggtgataatgatctgctgagacatctgctatggcaccgtcaggcgagtaccctgcaccaacactaatntttactagtatataattaaagttttattaaactctaccaattacatctaggtagtacaatgtattaaaaactctaactttagcctgtatgtttgtggagtaatatatcacatgttaatacatcttcttaattctttcatcataactatttgagcgacatacacacactgagatgacacaccttgccattatcatggacataatcattcttgaacaatgctaccatcctaaataatgatcattataaaaaa

SEQ ID NO: 70260 - DNA, 408 bp, Oryza sativa
  unsure (1)..(408): unsure at all n locations
agcttaattatggattaataattaacctgttctactaccgaattagttcggcatgtggaatccattacagatcactaattatgcacgtttgtaggaatccaaatggatcatgacggcgacatgtgtatagcgcaagagactgtatatcgccatgcgtgtggccatccaagctctgagctatactggtaactatcactatacatagaatctgccaaatatgacgtcttatctggaacgattaaataagatttgcactggacggacaaaaactgatactgtgatgaccccgtatcaatgccggttcaagtgaccaaccgacactgatgtattcattatgattntttacatgaactggcatggaactaatatcaatgctgggtttataattaaccgacaccaaaacagagt

SEQ ID NO: 70261 - DNA, 464 bp, Oryza sativa
  unsure (1)..(464): unsure at all n locations
tcggagtatagaacatacagtaacattagcttgtgattcctttgtagttctctgcacattcactatgtgaacagtaggcgacaaactggaatatgcctgtgaaaggatcaaatagacttgagggaaaacaagcacacacatgaaaatgaaacatccagagtgctaaatgattaatgtcagcacccagttcgatgcaaaacaaaccgttcaccacggagataattntattcataaaacaacggctattggttgtcaattgatatatcattgaattttaaaatggtaaactaaataacaaatcataaaaaaagtgaacttcaccaatatcagcatgcaaaagagaaaaaatagttnttcaacatgtcttctattttctatatagcatctacatggagatagcangtagtttttcagattggataaatgttaccactatgtgtatcattnncccgtacaattacaaa

SEQ ID NO: 70262 - DNA, 396 bp, Oryza sativa
tacttggcgcgccacaataccgaacgcggggcttcttaccgagagacccgcgcagcccccctttgccagttctgcccggggccctgggtgagaatctaagcttctagtccgtgtgttgaaagttcgcgagaatggaagcacacaagacacgggcgatgtatacaggttcaagccgctgagaagcgaataccctactcctgtgtttctgcggatctattgttgacgaagcttccatagagctggagaaccagagagctcttactctctgcctctttgatacttctggatccgacaaaccatcctcttcctagagggcaacgtcctctctttatacctcaacgtgataccacatgcaccatctctctctttttgtgggactatcctatctttcataac

SEQ ID NO: 70263 - DNA, 370 bp, Oryza sativa
acactattatactcagctttcaccacctgttatcttttgctgccgaggaactgtgtaactttttattctattcgcgacatcgtgagggacaaactccgtcctaaatgggccgatgatttggtttttgtgcacaacaatatgcggcttctatcaagaagatcagaagaatatcatacagaccgagaggcaaggtactgggatgtatgagacgacaactttaaatcattgggtggtgctggcattcttgagtctgctaacctctctcttgatgaaccgtaattcgagcttgccatgatagaaaacatcgtgtgatgaagaaaaccaaatggaaatcaagacagaagcttagcttagctaagctacccatgct

SEQ ID NO: 70264 - DNA, 403 bp, Oryza sativa
  unsure (1)..(403): unsure at all n locations
agcttatcttatcttagcttagctatctttctctttcggctttgcttcctgtggaagcgacggatcctgtttcgtgcgttcactatgcattcgtaaaacagggatgcttaagagacctattagcttagggactatacatgcatgtttagccggagattgatttttctgtctcgagggacattccctcagtttcttccatgccacataaataattatcaaaaaaaattaaaaataagaaaataaatcaatataagatatactcccttcgtttntttttatattacactggctagctcaaaattaattagccaacgtcatacatataaatatagaggttgtattanattcgatttctataagctataataaaatagcaaattaagctgaaactagttaacgtata

SEQ ID NO: 70265 - DNA, 473 bp, Oryza sativa
  unsure (1)..(473): unsure at all n locations
acaaccataagaaagaaggggaccaagtgaatgacattggttgatttcccaatccatgatttcacaaatatgtcttcctctctgatttggccccaaactgatctgttggctaaaaatagcgaanaaaaatgtcagatggcaaattgcaaggccaacaaattccgcaacataatcaggaatttcgctatgggtgttcacatatataggtagctagaccagtgtgtgctttggagtattcagaaatcacgaaaagtttgtgttgtactgctcaaaaccttcccagtactaataatttgaaaagatntactcattacaaagactagtacatgtggttcagtgtggctttttcttccctctatcaatcatttggagtctccccataggcgagaacccatacctgaacaaacatacttagagcaagtataataatacttagagcaagtataatagtagactataaaccggctaaatgc

SEQ ID NO: 70266 - DNA, 385 bp, Oryza sativa
agcttatgcttttatatcatttcatgcgtaactgaacatcttggacagttacgtattcgtgggggcaccatgactttatcgggtgtccccacaccctcaccgcggtcgccgcgtgcccaccctcgctaccgtcgccagcacgctctcgctgattccaattcacactagcacgggttgggaggtgaggaccagaccctatccattcactcagggatactaaggtaaattcatatttcctaaaaccttttttttattttcttttgtatttctttaacacaaaatgcaggacccaccaaacggctgttagaagtagaggtagacgctcgcttcaatttaaaaagtggggtaaaactgcaaaccctaaaaagtgggactaaaacaacaa

SEQ ID NO: 70267 - DNA, 480 bp, Oryza sativa
  unsure (1)..(480): unsure at all n locations
tgtagctagtanatatatagcgatggacatcatggaagatctctggccagctgaagcaatggtgagggacacaactgtagatgatactgtaacccatgacatggagttaagtatgacacagatcatgttcctgtacttggggaagatattgttccattcccagagtgagaagagcttcatcaggaattttcgaagcatgctgtcctcctgcagcaaccataaatttgaccttatgaagctattttatttaaataaaatgatcttacacagatcaattttagttagaaaagtaatcggtatatgggacctagataatcaagatagtgtaattttnttttactagaaaccaactgtaaaaattaaaacaggtgaacattgaaactcacacattgngaagaattatttaataaatgaacagtacattaaaaaaactagtactacctctggtttttcatgtatgacagcattgacttttcacat

SEQ ID NO: 70268 - DNA, 454 bp, Oryza sativa
  unsure (1)..(454): unsure at all n locations
agcttgcatacacctgaacatcgaggataattatcatcagcttggtccaggaggaagaatcgggaaagtcagagtgggaccccttgcaatgctagactattttgaagtccttcacaaatgcaatggaatagtgacaacagatgttctgggggctgtggctggatttgctgctaacttcgcagaaccaatacgccacgaagatgtcttggaggatatcttagagtcgtttgttcattntgatgtggctatgctggatagcagaagggcactatccttggacgtaaggaaatacgaccactactcaagggagttnctaactggtgttgatggcttattgcacggtagaccaatgccagagatattgaagcgtgaggagagtacagtcaagtcacttcatgagttgcgtgcagaatcaaagttccgctgagagactcttataatgatggtgcattta

SEQ ID NO: 70269 - DNA, 463 bp, Oryza sativa
  unsure (1)..(463): unsure at all n locations
actcagctttcgcgctaccactggaattngatgctttctttgttttccactggaattggatgcttgtgcataagatgttctaaaattaataatatgaatattcttagtgatgcaacatccacgataacaaatcggactcggtaaataaggatcgctcgtgtggatgaaccggaggatggacgaaattttctaccggaaaccttgcgtattttttaattaggtataaatattataaaagtttaatatgtttttgccacaaatttttcgtacgtcgtcccagcgtaatacgcgatttttctgtgcacgattgttgagaattttcagtccgattcccacccgtatagcacacggatttttcgtcgtcatccgtccccagtgcgccttcagcccttgcccgtaaagcctacccccgattaggatcaataaataataaacagaatcgaaatatgcctcctaacatgat

SEQ ID NO: 70270 - DNA, 446 bp, Oryza sativa
  unsure (1)..(446): unsure at all n locations
taagaagctgaagctcctgtacgttcaagaacagagtctctgttgttatgttcattntgnntncatatgctcaacatcaaacatgtttttgtgcttgtatgcgggcatcagataacgattttacaggaaaaatacctgattatattgggagcttgactaatttggaagatctgtaagagctaattttaactttttatcacatcaatgattgtatcctattcacaagacaagtggaactgcaacagaaattttctgcatatgttggttccaattgaattcgaactgtagcgtgtttttttcttttaagtcatcactatgaacagaaatgtgcatacctgtatgccattactctggtcccaacagtggcttaatatgtagagggtacttgttctaatatttnaataaacttgggcatttcatactttcttcttaaactatgaactcac

SEQ ID NO: 70271 - DNA, 333 bp, Oryza sativa
atgggataaggaggaaaacagacttttgcaaattgatatttggtttagcaaagacacgtccttatgggtttaaacgtttggcttgacctacagtcgagattgctctgataccaacttgtcacgcccagaaattcacaagtaatttctgaactaatttgtgcattaaaaccctcgtccaggaatcagccgaggtacacaaactgacaatttaatatatagattcatcaaaataactaaaacgataaatacttacataagaggcacttagtcctcaccatgaagaagactgcagcggaaaataaaacctagcgaagcttcagctccacttccaca

SEQ ID NO: 70272 - DNA, 378 bp, Oryza sativa
  unsure (1)..(378): unsure at all n locations
tgtattggttagctatnttcatattatttatatttactgctatcatactaaagttaaagntaagtagcaatgcgcgagatttcacttagtatttaagtatgactgaagtacacttgtcttgctgccacgccttcaaccaaacaatggtcactagtcaagctgtgcaaaattcttttatgtttcaagaattccttttcgtagcatattgcggaggttgctaaacaaacaaccaatatcgcataatgttgcctaatatttaagtgcttaatagaaaatataaaactggagaacagagatggcgtgaggagaggggcacatggatggataagtacgatcgatgggtggttggattgacagagggtgccagtcatatgttat

SEQ ID NO: 70273 - DNA, 443 bp, Oryza sativa
  unsure (1)..(443): unsure at all n locations
agcttcttccaataatttgaagtagactgactgcctcgatcagacactattttcttagggacgccatgcaaacacacaatccttgccatgtacaattncgccaaccgacttccagaataagttgtctttactgggatgaaatgagccactttggtaagtctgtcgactatcacccaaatagagtcatggcctgatgacgttctgggtagaccagtgatgaaatccataccgatttcctcccatttccattcaggaatcttcaaaggctgcaacaaaccggcgggtttctgatgttctgccttgactcgctgacaaacatcacatactgctacgtattctgcgatttcacgcttcatancttgccaccanaacctttccttgagatcctggtacattttggtactaccagggtgaatggagtataaagtatcatgagcttcttt

SEQ ID NO: 70274 - DNA, 479 bp, Oryza sativa
  unsure (1)..(479): unsure at all n locations
gcttttagctcaaagctgttgggttagcttggaatgactttgttttatcatattcatttccttggtatggtatatacctatttttatggaggtaactcgacatagcccangctattagtcctttttggtaccataaattttataatatttggtgggtaatctttatagttttatattcggatgcctgtccagtgtggtcattcgtgaaccttttcgagtgtaaaccactcggattctttttattatggctaanaagcagtcggctagaatacctctttaggcgccgcatatgcttttgccatctagtgcatgattgnngtattatattggtctcaactatatgtttagnttggtaactaatcacataagttggggctacacctaattaggtgcatctattcgatgcaccatattctttatcttttcgccctttacagtcttcgtcttcgctacttcgtgggccctggcatgaataatct

SEQ ID NO: 70275 - DNA, 198 bp, Oryza sativa
  unsure (1)..(198): unsure at all n locations
aagcttggngtgtcatactgttaatgtgtacagcttgtattctatcacggcgatgagcttgaccttgaattccacaatctgatcgacccgattacaggaaggttgagctcataccatgagttacttccaaccggacaatctaacagaaatgagcggttgctgactacgagatgtgagtttgagtgacgtgatatgagc

SEQ ID NO: 70276 - DNA, 229 bp, Oryza sativa
  unsure (1)..(229): unsure at all n locations
ctaagcttncattntctgaatagaagcttaagcatgcttatgataggtgctccatgtttatgttgtcattgctgaacaagaaatcatggcttcaacattcggtgccacttctaccggtggcctcattgcttgcgccaccggaattgtatcagacaagaagccatcttctctatcttcggtgtcatctggttcttgtggcaacccaccacgcaatgcacgccttcagaag

SEQ ID NO: 70277 - DNA, 143 bp, Oryza sativa
tcactcgacccggatcttaattactgagcatcagctgggtgttatatacaccaatatggtgcccctgcccttcatcggaaccgcggccactgataaggatcggcacccaacccctgcgtcgcccggcccgcgccaattttaag

SEQ ID NO: 70278 - DNA, 358 bp, Oryza sativa
  unsure (1)..(358): unsure at all n locations
ttgagagaaaagaagaatctatctttattctatatgcccttangcacggccatacataacatagaaatcacacgtggaaggggtgggcaattagctataacagcangtgctgtagcgaaactgattgcaaaaaaaggtaaatcggccactttaagattaccatctggggaggtcccgttggtatcccaaaactgcttaacaacagtcggacaagtgggtaatgttggtgtgaaccacaaaagtttgggtagagccgggtctaagtgttggctangtaaacgccccgtagtaagaggggtagttatgaaccctgtggaccacccccatggnggcggtgaanggaaagcccccattggta

SEQ ID NO: 70279 - DNA, 435 bp, Oryza sativa
  unsure (1)..(435): unsure at all n locations
agcttgttctttctgttgatttagttcctggcaaaccaagacttaatataaaacacatgttactttcagtgacgaattcgatcctcgattcgttattatgccatttagttttatgacgtttggtacgaggattgtgttgcttagtgacaaaaatgagatgttcgtcattgagaccaaagacaaattgacatgaactaatccaatgatatatcatgacatatgtttttctataagagaccaaccgggacaaatatttttttataagagaccaaccggcaaatgtcttaagttcatgattgaaagcaccatggcctgaatttgtaagctgtcanaaattacttaatgtctttagaatctataataatgtgcaaaaatgaattatgttaatgaagtaacaggagaataaaaattattaataaatcacggtgcgagtta

SEQ ID NO: 70280 - DNA, 462 bp, Oryza sativa
  unsure (1)..(462): unsure at all n locations
ctcagctttattgggctatctaccgataagtttgaaatggcttttattaaaaaaccagcaatctgcaggcatgtgcaaatttgtataatagtagcatacagagcatcatgcatatatatactagttcttaaacactagcatgtgccttcatctacatgttatatatatacatggcacagcagttggaagaacttcatctacatgttgttgaggcatactgaattattagtgaattatatacaccgtttatctatgcaacactataaaactaatcgctttggattgggaggtgtcaggatttctggtgctacatctgttagcactaatcttgttgnctntaatttggaatacctagtaaacaatcttcacaggagcgttggctcgtcgtccgcggtagcgagcagcgcttcttctttcttcngttngcgacattcgttagcataatgaccatgtatgccatag

SEQ ID NO: 70281 - DNA, 391 bp, Oryza sativa
agcttgacaaatcattcgtctactcctacataattacacatggactgttcaataacaaaaaaaaaaggatgcaagtcgtataataacacccaaaatagtatagtctatgaagggcctgcaaccatacttgaagccttctatttgtgcattgagacatatgaagaggcccttgaatctaggattggtaccaagtgggtacggattataggtagacacaatgcatcgactacctgggttcttatctagtacagtctgcaagtaatccctgatccttaggtattggttcttgtggttccctaacaccacctcatccgccttgctccttgccctataagccataatctttgatatgtcaactccatatttcctcataacagcatccatcatagaa

SEQ ID NO: 70282 - DNA, 309 bp, Oryza sativa
gtccaagtcgcggccgcgcaacgggaagaacggcgcggcgacgctgtcggctccggcgacgacgtccatcctggcactggctatcacctgtgccgctgttctctcatctttcagcttctgatcagatgtgtcggtggtgttcttgcaagaaaggtactagtagagtgtgtgttgtgttttctttgagatgatatatgatgtgtgctgtggtgtgcttataacactgaattccgtgctgtgtgccagtccgcagaagacactgaatcgtttcatgggtaatatcaacatgccttattggtgattcgcatc

SEQ ID NO: 70283 - DNA, 422 bp, Oryza sativa
agcttgttgtgcctactgtcaagtgtaccgcttgtattctatcaccgcgatgagctgacccttgaatttcacaatctgatcgacccgattaacaggaagcttgagctcataccatgagtcacttccaaccggccaatctaacagagatgaccggttgctgataacgagatgtgagttgggtgacatgatatgagccgtctgagtgccacataaggagatcttctcatggtccttgctgaatggaagacgtggtggtgaaacctcagcaccggtgaacacatcaacgacgagacagtgaccactgcggcagcatatgagttgaccatgagaagagcctgcatacagcatcttttgcagagtttctcgaggaatctggcagcggagcggtgtgtttctcgtggctagatcaatgacctgacatg

SEQ ID NO: 70284 - DNA, 387 bp, Oryza sativa
  unsure (1)..(387): unsure at all n locations
ctgaatagaagcttaagcatgcttatgattggtgctccatgttaatggtgtcattgctgaacaagaaatcatggcttcaacattcggtgccacttctacgggtggcctcatggctgcgccaaccggaattgtatcagacaagaagccatcttctctatcttcggtgtcatctgtttctgttgccagccgaccacgcaatgcacgccttcagaggaagtgcaacttcagggtaaaagctgccaaggagttgtacttcaacaaggatggctcggctatcaagaagcttcaggtgagctccaaagntcttggacacatcttattcaaatttggtcactatgattcttagccttgacacgcactcattagtatttctacatgcagactgga

SEQ ID NO: 70285 - DNA, 279 bp, Oryza sativa
  unsure (1)..(279): unsure at all n locations
caatcagctcgacccggatcttaacgactgggcagcagcttgtctacattacagtatctcagggggggttggcaggggagcaaaaaagcttagatcataccgttcaagcccttgntcttcttcgcattcgctattttggcacaagattttttggttctcacaaagaaacagcttgaaaagggtcaattgtacgaaatgaaattctaagatccgggatttcttaccatcaaattggtaaaaagccgcgatttattggcgattgctaaaattctctatgat

SEQ ID NO: 70286 - DNA, 401 bp, Oryza sativa
agcttgacatggttttaatgtctacagagtgggaacagaaatttcctttatcttctgtggtggctcttaatagggatatctctgatcatacccctttaccgttgaatacaaattcttcatctctgagtaatgctcaacatagttttaagattgaacttggttggcttttacgggatggttttgctgagatggtgaaggaaatttggtctagtgttgacgaacgcaatactgctatggagagatggcaggcaaaaattcgacggttacgacagcatcttatgggctggtcaaaacatagtagtggtttatataaaaaagacaagaaaaaaactttagataagttggatttgctagataataaggcagaacattcccttctgagtcccgaagaattggatatt

SEQ ID NO: 70287 - DNA, 408 bp, Oryza sativa
  unsure (1)..(408): unsure at all n locations
nggagtgtctgttgaagtgagtgaagtgaagtctttatatattgcatgtatgacgggtataaaacgcgaaaagtccattctgcccttcaaccgccattcaggagctcatccagaccgtccctaccaaaccttgaatcggacggtgatcaccanggttcggccaaacttgggctgggccaggcggccttcaggcttggtctggttcccctccttagcctgccttatccattccttcgagcagatggcccatntgatgatgtttcaatgtagttcttggcccactcatgatatggacaggaattcacctttacttaagtctatatttcatccaatcttcgacggtttatcacctacattcaaatatacaccaacacttgtggaatatgttagaattaaaccctatcacta

SEQ ID NO: 70288 - DNA, 433 bp, Oryza sativa
  unsure (1)..(433): unsure at all n locations
agctttccccagccccttttcatcaatggactcctgacgtctacgaaggagtgtggttcgttcgacaaattcctacctctatatctatctctgaggtgtttgggttntgcaaaactccatagatatgcagaagagaaatgctatccccactccgaccaaaacagaacttttaccaaaagtttattgtgatctttttgttcaaataacaattaaggtgaagcanggtcaggaacaacgaatctctttatgataaacagatccattttgcaagctcgttattacgggtagttcctacaaagaatcggactaatgacgtatacaatgcttgaattatcgacgtagatgctacatagtgggttctcatccttcagagactacgagtgtaataggagcattcgttgacaaaaggatcaccctaagatgatcatctcat

SEQ ID NO: 70289 - DNA, 340 bp, Oryza sativa
  unsure (1)..(340): unsure at all n locations
gagcttacacataaaattggctgccaaaaaacttcatggtatcagagccgaccggccggcggctggccgacagtgaaccctatctggccggatgcgtggatgcttgatcacggtaaagagtgcgcatcaacagcggcgcggaagagcggtgccagcgcggcgcgttatgaggaatacaccgagcagctgcatgtgcagagctgctgctgctgcttggggctgagctcgcacgtgcatagctgctntgggctgaggcaagaaagaaagtgctggtaaacagccggtgttggtgcttctcaagaataagaggctcttgctctgtagtggcggggtcacagca

SEQ ID NO: 70290 - DNA, 306 bp, Oryza sativa
caaactggcaaacaacaacttggacccgcgtgccttttgtagtctctttggctctctcatagcagtaggactaggagtaaatgcacgtgtatcgtggtgcgctagatgttgcgttatctaagagagcatgatcacagggcacgcacccgatgctcggaaagaagcaataatttacttgtatatgtctaagaaagaatttagtgaaatctaaaagcaatttagatatattataaaagaaatctatcatttctcatcacaatataatcatgtgagatcttgttataaaaattaattgttccaacacac

SEQ ID NO: 70291 - DNA, 398 bp, Oryza sativa
agctttgaagaagcttctaaagatgctttgaatgataagtcaaagggccgcgatagtgagttcctaatattatggtcaggtcttgaacttatgaggttgaaggggatatttggatggtttgatagtagcttcgacagtcttcttaaacatttgaagatcatgctttcgaaccctaactcattaccatccaacacatattgagcgaggaaactcatatgtcccctttcccttcgtgtggagaacattcatgcgtgtgtgttggtatttcttaaactcacagataaaatccgcaagcgcacggaaaataccaatgtattacttcacccgggagtattccaaggtatcgatttccacagggaacgtgtgtgtcggctctttcacaggttcgtctaatgaca

SEQ ID NO: 70292 - DNA, 380 bp, Oryza sativa
  unsure (1)..(380): unsure at all n locations
tcaatgcattcttatcaacagagcatagtacaataacagcgatgcccactccaaattcaattgccagctgtcacacaagaggcttaatattcagaacaattcaagaaaagaaacactctacaacacctgtataacaacttagaaaaggatataaacaagtcagcattacaaacccagaataaactgattgccataagtgaaatgaacgtgaaatagttcttccgtccaacacaagtatttagccactgccaaagacatncatatcagctatccaaaatttaacgttgcaagatngcatcccaagaaagtacaagaaaaatttacccgacaatgatgatcaaatncatcaacacatttgtcacaacttcttgcagtgttac

SEQ ID NO: 70293 - DNA, 368 bp, Oryza sativa
  unsure (1)..(368): unsure at all n locations
ntagctatagaggtgactagtgactggtctctcttccaaacaaagatgctaactctgntcttctaatctacagggtaaatgtcattaactctaatgagaacttcattttcctattgtgctcctaggtttaacaattggagttggaattggtagtggtgccggcctttntatcctggcacttggtgctgtctttttaacacgtaggattaaacaaccgagaaccagaacactgagacagaagttctttcaacagaaccgtggccattttgtgcaacaattggtatctcaaaaggccgacattgcggaaagaatgatcatccccttggcagaactagaaaaggccacanacaactttgacgaatcgcgtg

SEQ ID NO: 70294 - DNA, 346 bp, Oryza sativa
  unsure (1)..(346): unsure at all n locations
ggatcgcactctgaagcaacacgacttcgactagagcaagcattgtgttactcttgtctcgacacaacaatggcagctatgctctgctcgttggggtctatgtaaatgaccttgtgatcaccgggccattgacaagaacaattgaataattcaaggaagaaatgaaggcgaagtttcagaagtgatcctaccaacactctattagcaacaccttgccgccagaaaatggccatgttaatatgctatggtggaggagaagggatccattctctcttctcnttctctcntacccaactatgangatggattntgagcgtgtcngatgtcnagctcctacatgatggat

SEQ ID NO: 70295 - DNA, 402 bp, Oryza sativa
  unsure (1)..(402): unsure at all n locations
tagcttatgtttggttggaatgagtatcagtgtcgcgattcatcaccaattagattttagtggagggcgaatttaagtcagcacaaatatcgtaaaactttagcatgacaaatgccaaataaatgacgcggggttttaaaatataaccatgataactctttttttaaaataggatcacagcatgagctatttaactgtgtcatcctgaaaggatttccaatggtaatatacaaatatggttntcgcttatctaggctacttaatagaaaatgatccaaactcaaatattgaaagttttgctaaggaatcaccacatgttatatgagggcatgactgcatgaccatatatgatatatatatgaaatgagaaattgcgttatatacgtcaaaccatctatatca

SEQ ID NO: 70296 - DNA, 433 bp, Oryza sativa
  unsure (1)..(433): unsure at all n locations
gcttgaactntagataatatattctagaagaaatntcattcaatcctaggtattggtgtctaagttgcacaaaaccatatgggttttagcacgtggcacttaaccccaagtattatggctataaagtttcacaaaaccacattatttatcatccacacttttgagttctacaatcacatctcanatntatgagctctgtatccatcatataaatattacacgcatctaagtaattttttaattctttatgatataagagtatgtaaaattggttaccactactggttttgtgaaactntangaccataatacctagggttatgtgtcatgtgccacaaattctgtggttttgtgcaacttggaccataatangtggttttatgaaaattactctatattctattggttaatttggggggaaaggacccttctg

SEQ ID NO: 70297 - DNA, 479 bp, Oryza sativa
  unsure (1)..(479): unsure at all n locations
actcagcttggacaagtctacccttttcatcaggtgcattctcttgtcttctatatcttgctattggcgnngacccctggcctcattgtggtcctatataagagtactgctgctgaatgtgaacatatcttggatttactgttcatatttagcggtaatcaattcatgttctgcacagtcttttacacttttcctcatatttttttccattatatacaatttaatttacagtgaaactgaatatgtgaacagtttttcagctttattccagtgtttatgaattaatatttttcatcatcttctaatatttgataggcacagctggttctgtcatttggctgttcagaagcctggaggctgggccatttgatatcctgaagttttgagtaagaatggagaatgggctgtccgatgaagttcttaaagcagttntccctctactggatggtcaagacctagtcttttgcatgcttgtatgt

SEQ ID NO: 70298 - DNA, 448 bp, Oryza sativa
  unsure (1)..(448): unsure at all n locations
agcttttggcttgcccaattaatacagaattttagttagtgtgtggccaaaaattgatagcaaatcaacacatatcacccatatgatactattaaatcgttaaaataaatgttagtacaacaaaaaaaaatgcttcaatttaaataagccttagtgtatacgagatacgataatttcagtatatataaaaggctatagcggaatttgtagatgtgtggagttcccaagactaggagagtttgtcaatacaagaaaaaatggaactaagtgatgaagagatcgaaacatcttctttctaacgtggaacacggatggagtatatatattnntaaaagtgtgagaaaagctatgttatatgaaagaaataccgacgcgaggaagatcgatttgcataaatgcccacatagattgaatgttagctctanatggtntcatatgcattcaagtt

SEQ ID NO: 70299 - DNA, 380 bp, Oryza sativa
  unsure (1)..(380): unsure at all n locations
actcagcttattatataatccgcanatctccatataacagcatttaacttctgatgatcatatcttggtcatacccgctccgaatcgacccgttcaagtctcttaatgtttgttataacctaaagaaccctgtgctttctttttatgtattggtattgcttctttataggcttgtagctttgcttgtgtgcttcgcgtagctttcgtcgttccggaggttcccgaagcgtggttcgtggtcgtcgccgaaggttctgaaggccgttctctctgagcaaggcaagtcacaccatccttgagcatattgaatcccagtttataaaatttttttgatttaaattaatgcattatcgctttatttaaattcccgccgtatcact

SEQ ID NO: 70300 - DNA, 409 bp, Oryza sativa
agatcacccaaatcggagttggcatgaaagcgctaggtctggttgaaatccacgctgtctccgaagaccgaattggatttcaaaactcattggactttaatatcttggagaaccttcattcattcaatgtattctttggcaaaggtttatatttctcatgcttggttggatgcatatacttgatggtcacattatttccccaagtttaattaaacttccaaatataattttaaaataaatcatttgaaaacttacttttaggattgctttaattaagtcacgtatattctttattcttattggtggggatagtttacagtgatacacaattactccctccatttccataagaaccaacctagtactagatgtgacatattctaatactacaactacaaatctggacata

SEQ ID NO: 70301 - DNA, 434 bp, Oryza sativa
  unsure (1)..(434): unsure at all n locations
agcttgtcttttccgatcgtcgacaagatcgaggtcggcgtcgttcatgagacgtcgcggagcgtcggcgtcctccatcgagacatcggctgatgaacgagctatagactagtcatgatgacttgatgaagagtcggaccccttgaacaaacgagacaatcgcctcctcattctacacaatggagcaagaacggactaactcggcgagggttagaatagcaagaatttcacccgctggttagtttcaccaaagcaacttggatgtatgcaactaaagtattggaattaaggaaaactatcaaagcttgaatgaacttgagagaaaactntanagagggaatganaatggtgtgaaatgggatggaattccctctcttggctggctggcttatatnggacacctacaatggctagaaatgacatgtgggacccac

SEQ ID NO: 70302 - DNA, 437 bp, Oryza sativa
  unsure (1)..(437): unsure at all n locations
acactataaaagactcgagcttctattgatggaatggactactttntaagacatatcttatattcatatcccncatcggnttactcgtgtatgactaatgatcttcatccccgtccctagaaattngcggggccccatccccagtcacccatgggtgagaacccccaccactgccccgtaggggcggcccccacgggatccctggccccaatgtgaaatttgtcaccccaagtatcaatcccgttctggcccatgggccgcacgcgactgtaatcccaagcccacaatggcccatcangccttcttaagagctccccgcgagtccaaacccgaaacgcgaaataacaaaacagaaaagaaacaaataaaaaacatattatttatcgagcaaatgacacaaagttatattggtggcaaccgattactttatcaagtgg

SEQ ID NO: 70303 - DNA, 437 bp, Oryza sativa
  unsure (1)..(437): unsure at all n locations
agcttgttgttcggcacatcataacggaagtgcaagaagatggacgtcctagtgccccggccgaagccgccaagaactatgtacgtcacagcggttgggttgtgcgggataacgtgcctgtcagtacggtgtactggcgaagaacaagggcacgcggagatcatgagagctttgtcccagattcggagaaagagatgctgtggaccacaatgctcgagacattcacccttcctgcgggtacagaggacaaagtngaaaggtggactctgaagataatggcagaacagtttcagagcttcaagggagatctgtaccagaagtatatactgaaggggcagacaccgaacttcgacacattcccaaagctaagggatcactgngacgagttcgttgcatataagacaggtgaacaagggcangcgatgatggaaagaaac

SEQ ID NO: 70304 - DNA, 458 bp, Oryza sativa
  unsure (1)..(458): unsure at all n locations
tggatgtttcttcatgaacaagttgccgattggcctggattgttgtttcgatagtattgcgctcttgacgatcggctaatctgagcttggccttttccagcttaaattggtgttgctcaagataaaccgctggagtaaggatatcggctaactcatcggggatttgagcctggacctcatgaagccgagtcctaattgatccacagtcaactaccaagctgtctagtgatgatgtctctagccgatgagagatatcttcaagagttttcttcacatcatcagacaaaggagctagagccttgctagtagtgtcaacctctgtctcctcataaagataatctctaatatcaaaagagaaaagatcggctaagacctgcagtaatgatttgaagagagttagagatcanataggcatagtcgatctgcatatgttagttataagaaatttactggaatag

SEQ ID NO: 70305 - DNA, 257 bp, Oryza sativa
atacactatttgatctgactggacgaggcctataatgaagcttatgttcagctgcatggaacaagaaaggattggcgcaattctcccattgatccaatggctgtgcacatgggtggtggtggaaagaaacatggtcgattcatgatcagtgatgggctcattgactcatcagcaatctttggtgacagttcacttgatgatccacgctctcgcagaagactgtgaacaaatcctgacaacacataccaaattgaaga

SEQ ID NO: 70306 - DNA, 423 bp, Oryza sativa
  unsure (1)..(423): unsure at all n locations
agctctttcttccatgaccccatatattcattngttgggtagttactggaatattcaaaagcactggaacgaggccgcgaggagcgatcaaaacgaccaaactacagagctgttctggagtatgatggtattatatcacgccgagtagatagccaggtaaaggcatgcaaccactctgtcgtagtaggttctaatatctagatagtagataccatgctcatgctcaatgtttttatattttctagttgttccaggagatgtatgtacctattattgaacagctcttaagaaaaaaatattgactcatgaaacagttgcatttattagttttatgatccttaatgatctgtagatactntatatntgaacatttgactaacatgctctgatctctttgctctgntatctactatctagatgcac

SEQ ID NO: 70307 - DNA, 355 bp, Oryza sativa
  unsure (1)..(355): unsure at all n locations
agaattatctacaccgaagaatgaaagaaaagcccaaaaagattaataaaaatctctggaaaacaactggattcaaacaagattattattacccactcaataccaaacagatggttatgttgtcatgttggtttcacgagaatcagattgattgagagctgtggtggcaataagccacacgtgtatgttgtcaccaataagcaacacaatgacaatagaattaattgaaacccctatcagggtaattaatgatactgtctccagtaatgacagcgaccanattaacttttcagacaaattgtgttgacctgacaacctaaactagcggcatgaacaattcagagattatttacaa

SEQ ID NO: 70308 - DNA, 401 bp, Oryza sativa
  unsure (1)..(401): unsure at all n locations
agcttcntgccaacccgctcttncttctccagaaagcttcaacccgattatttcccgtcgggcgtcgggccgtcggctacacgttggggacgccatttcaccggctttttattttttttttgcggngggcatttcaccggcttttgtgtcagttggagcaaattcaacccagaaatcaatgaagcttcattctagaggtgatgcctaggcaaataagacaaaacagtttactaaagaataaaaattaatttctaggtaaaattnttactgcctttattctaaaatatgtatagctgtcagttaccgtgtccaatgtttgaccatccgttttatttgaaaaatattgatgattaagatttttattggtattagatgataaaacatgtataatatattatatg

SEQ ID NO: 70309 - DNA, 451 bp, Oryza sativa
  unsure (1)..(451): unsure at all n locations
gcttgacacattactcatgaaggtattagcaacatcaagggcagaagatggatgggataaaggcatgaattgaggatatttggagaatttatccactaccaacataatacaatcaaaatgaccagacttgggtaacccctcaataaaatccattgtgataacctgccggccccatctggcatangcagtggctgaagcaaccctgngtatttgcttctgtcaagttaacctgtaaacagaccccatattctttcaccacagactgaatcatagacttcattntgggccaagcaaacaaagatttgatccttctatcggtgataggaaaacctgagtgaccacccataggactgtcatgcaaagcagatattatcttgagctagaaagcacaattattacccaacccatattctcccttatactngagaatgccactacgaagagagaatgg

SEQ ID NO: 70310 - DNA, 389 bp, Oryza sativa
  unsure (1)..(389): unsure at all n locations
actaagcttttccagtgtgttggtgtccaccggcacagccaccgtcatttctgttactaaaanaaagggggaacgccgttaagaaccctaccttgtcaggctggacatctcgtaatcaggtctgcattcattctctgtgaagggatattggtattattgcagatctgcacaacaatatgtttattacattctgtacaggcagtttaagaaaatgcgaacaatcgttatattaaaggagtacgtttatgtcgagaaaataaaaaatggattatctgctaacattcccaaatatattattttctgatagttttagatacgaaataaatacgatgccgcgcattattatcaattaatgaaattatatgcctttctactatgtacttcgatgt

SEQ ID NO: 70311 - DNA, 374 bp, Oryza sativa
  unsure (1)..(374): unsure at all n locations
tacggaccttatatactcagcttaaagattcgtctcgcanattagtcgcaatatatgcatttaattattttttagactatatttaataattcacgcaggtgttcaaacgttcgatgtgacaatgtgtaaaattttagagtgggatcttaacagggcaataatcacaaagaaacatggaacatgactactgcatataacatgtcaaaaaacttttcttcaactcaaacgacaggatagagcttacaattacatactatgaattccattggagcgcagacaaagataacatatgtttcagcagcctctaatactcaattatcaatagcagcccgaaatttttgcatgcaagagaaggtgcaaatcagacgatgata

SEQ ID NO: 70312 - DNA, 378 bp, Oryza sativa
  unsure (1)..(378): unsure at all n locations
agcctttactctataagttggcttnccacataaattccattcaaataaactccaactttaaactatacttnnttctcctagagaatgcttgtcaaaaatatagagcntatagccatgnnccttccatattaatgcaaggaaaaaaaatggaggagaaggtacatgagaaaggaagaaccaattctttattccatcattccacacaatannntacttctgcatgtttccaccacatattaagacccttgatctaagagtatgactgacgatcttcttgagtccatatcttaggcttgtgcaaatatatgatgcatgtatgtcacaatttatccctaccaaactccacatatcatccttagaatgcgggtaacgtatggt

SEQ ID NO: 70313 - DNA, 453 bp, Oryza sativa
  unsure (1)..(453): unsure at all n locations
ctcagcttcttcatntcgtcacatcggcttgaatagctgcatactcttctggttacgngaaaaccatgttaaccgacgcagtgaccacacttttccctttagccaacctttttgcttcgacggctttgacctcatcggctgtagcagcttggttcttaacacgccactcctgcctcggcttcgttttcttcaaccgatggttaatctcttgctcgacttcttggaagcgttgtctgttcctcaatctttgaaccctcctttcctgattctttgtaaaaataccagaagggcaccattgattttttccgccttcatcatccccctgatcttaatttactgtgcccaatctttcatgaacaggaacccttgtttgccttagccgattgcttctattataagattggctngaactntctggcacattactgcatccaggacaatcttcaatagatg

SEQ ID NO: 70314 - DNA, 356 bp, Oryza sativa
agcttggctttctgtcgactgatgctctacgtggtaagcaacgttcatggtgtaatttatgaatgaatagtactttctctgctacatattttgtcataatatatgtcattagattggtgtctggtgaatctattacgttgtgtgatcagtgcagattaatttgaagtgtcgactcttttctgaagtgaacagtccatgttgcagccttcagtgatccaaacttctgaatctgtgagtttcagctctcttttacttctgagcatgatgaatggtagtttggatgcttaacaagtgattgactcgtaccaaatcatgtaattgttatggctttggatttcaaccacctctccaacatc

SEQ ID NO: 70315 - DNA, 118 bp, Oryza sativa
tattgatgactagaagtctagctagaaccacaccaatctcttaatgattgaagcattaaaatatagtaagttactaactactctctccgccccacgatacaaaggattttgagttttt

SEQ ID NO: 70316 - DNA, 423 bp, Oryza sativa
  unsure (1)..(423): unsure at all n locations
tcgtgcagcanagagcaagaaagtcagttcagagntgtctttctgtttatatcaagaagagttntcccggagatgacctaaacccaatctgtcccagaagagtagtttcgntagcttctagatcgtgtgttgattgcttgtgtgtacgggtatggttcgtatcattggtggggatgcgaccatactatgttgtttgcttaagcaactttgaccataaaaatctactcacactatatcagtaggcaagtggcttattaccttacctttaacaaaccctctcttccgttctggcagcggatggtccgtatcatagagaagagcaacaacaatgacggtgtgttaaagtcatagatcaacagttcagtggaaagttcaatgtactcccgatgccagaagaacccctactcatgatcatacattggt

SEQ ID NO: 70317 - DNA, 452 bp, Oryza sativa
  unsure (1)..(452): unsure at all n locations
agcttgccctgcataaactgttagtctctcttgtcagggtgctgctccagtaaaggggttgtgtttagccttttcctttgttttttacttctgaaccctgttgtacttgtcgtttcatttttagtaatggaaatgggggctttccagccctagttaaaaaaaaattgtaacgtgtttttctttcctttttgctattacagttagttaacctctgtgttagntttttttcatttgtgctaattttttgacaaattttgttacaggagatcatgactttatggttttagctgtaggacactgtccgaagtgacttttagcggaagacactcttaaaaaatggatcgtggatatttgctgatgaacacatcattagttaaaataataattntcggttgaagaggagagagagatcacattanatatcaaaaatgctcttggacccacatttcaac

SEQ ID NO: 70318 - DNA, 469 bp, Oryza sativa
  unsure (1)..(469): unsure at all n locations
ctggactnttcttcatgcacgagttgccgataggcctagatgtgttttattattctctttgcgnnctcggcgttcggctagtctttgcatggctttcttgtcattcccataaatttagcccaaatttccagactattttgtgtattaaatccctgtctaagaccagccagtgtacacaaaacgaaaagtaatatacagttccaaacgttaataaaagcgtaaatagttacagaagaggcacttagttctcacaccaaaacgaaagcagcagcagcggaaaaaggcgatcctagtggagcttcaattcactccacaggcaaaactcaactgatgtctgagccttggtcttctaacttcgtcttcagcttagaagcactacacttctgaaaaggaggcataatagcaaggctgagtacaaccaccatactcagcaagccacaccaacgatgcagacgttctaggggaacac

SEQ ID NO: 70319 - DNA, 457 bp, Oryza sativa
  unsure (1)..(457): unsure at all n locations
tgctcctncaacgaatgtcatccatgcatcccgaagcttgcttttttcttcgcgttgcaacagctccaattccaatgagtgcactaccacaaggtgtcaatgctcaatttcagccccagccaccagctgacaagacagaggccagtatctgcgttggaccttnggaagttccaatacagcagctgagaaatcaagtacaagatgaagaacccgagtgtaagaaagttattgtttgttacaactgcactgaagaagggcattactccaaaaactgtccccaaccaaggcaaaatcgacctccacattaccgccaatttacacgaaacagacattccaatcgtattgtggtcactggagcaaacgccgtacccgtaaagcctcgtgttaatcagaacccatagcagagacaatgcaccaatgctcctcctgctgcacctgactcggaataaatcatagc

SEQ ID NO: 70320 - DNA, 350 bp, Oryza sativa
tttcttgtatctacgtctgtatgctatggcgggctcacatcttatgtccgggagccccatccccaagttttgccaaccttgaaaatgggctctactacacgctgagagattggtgagcaattggcgggagaacgaggaagaaagatatatccggccttagctgtataagcgttacttgtgacagaaagaagtggacatcttctctatatttttttacattttagagtccattaacctttagataaaccgagatgaatctcaactatattatggcatataatcaaatttctccttacagcttatatactgtcaagaatataaaatattaaacattatttgtagttcattat

SEQ ID NO: 70321 - DNA, 480 bp, Oryza sativa
  unsure (1)..(480): unsure at all n locations
actcaagctggtacgacgttctatgttgggctccgcaatggtttcatttctattgagttctggcgngtgctgtgcagctgttcagccagccggngggtgttttttcttttcttgtaacccgtctagggtttttactcctgcttattgaaaatataattggcagttctcctgccggtttagtttcaaaaaaaagtataatagtaggctataagccaactataagcttatgtggaggaaagagaatttgaaaaatggagaggattggctttcatgcaagagctagctattcacatactttaagatagatacattaaatacataggtgagagatagagagaggagaagaaaaaaaagagataaccttatagcccatttactatacatgttaactctaatataagctataagctcatagttggctctcttattaaacttgctctaagaaatcgtccgatcccaattcccaaccttcccctatac

SEQ ID NO: 70322 - DNA, 407 bp, Oryza sativa
  unsure (1)..(407): unsure at all n locations
agcttcttttgttctcatagtctctagagatcaactgggtggtcaattcatcatcaagaccagacataaacttcttctgcttctcggcatcggtacgcacgttctcatgggcgtaacgcgcgaggcggttgaactcatgcaaatactctataactgttctggttccttgttgcanggaacggaactctctcttcttttgtcccacaattccctcgggaacctgtgctntattgaaactatgacgaaactctgttcaagtaacctctgccccagtcggacgggtcaccatgtagttgtcccaccaaatagaagcgggaccttgtaactggtgtgtagcaaaagcaaccttcttctgctcgttgcattgcaaaagattcagcttcttctcaatggcatgaagccagtcg

SEQ ID NO: 70323 - DNA, 400 bp, Oryza sativa
  unsure (1)..(400): unsure at all n locations
tctncttttcttctcagcgcagcaacagcaccaaatcctttttgtttatttcctcaccctctcctacttaggcttttctctctccttcctaccgcacgggcctcctgccgcaactcagccagcaagtgcacgcccggtgccctcagcacttccaccacgtcggcttactctgccgtcgctgcctctgctgcagctgcagcagccgactccttcctcccttctagctctggcgacccctgtcgtcgacgccgccgccgacgctccttcggtcacagcgccgcagtcggatcctacgccgacgatccacgcccagctcagctcccttgccaccacctggctcctcggcggcagccgatccgtgccacctcgccgtgccacgctggtacgcgccgactgcagc

SEQ ID NO: 70324 - DNA, 440 bp, Oryza sativa
agcttcatactttgtccgtttgagataagattctctgtggttggttctagtgagctcctggttgcgaaaaaaatatcaaaaaaaaagttgtgcctctctcctcagcactagagagagcaagcaaaaaaaaaaagaggatccagcgagcacaccacaccattccccctttgtcaccaccttctaccaccggttcttgttttcgttggtgtttgggtttgtgttttgcggcgtcctttgtggttaggctcgcgtctctacttcgactagcctaggaccagcactgtacactatacccttgagcgattattcaatctgctttggctaacgtggtttctagttttctcttgagcattgcttttagcccaccaacagcttcaccacaaacccgactacagcttgacaggtcttgttgctacagcaccgatacaccctcgtccacg

SEQ ID NO: 70325 - DNA, 476 bp, Oryza sativa
  unsure (1)..(476): unsure at all n locations
agctggttattacgttgtggtttaaatgaatgcgaagaagctaaagaattgatgtttttatgtgggcttaacaaagaaattcaggacatgcttgattgtcaaagatatacatctctttctcatttggtacaacttgcttgcaatgcttgaagtaaaatagaggaggatatgaaaaagaaacacgctatgtctttgcctccaattactaactatttgcaggaagtgcgtaatcacgaaaaggagagagacatgaaagagccaccaattccattgttcacactcaagttcgagacacctccatcatctaaagaggacatccaaggtaaagtaaatggtactgaaattaatcaaggtgagtgcattgntaacgaagtaaatttgtccacttttcatgcaaaagtagagcaaccgttagtggaaccaaatggctggaatcctttgtcacaagtagatttactcgctggtccttgtgataa

SEQ ID NO: 70326 - DNA, 402 bp, Oryza sativa
  unsure (1)..(402): unsure at all n locations
agcttcatctgttttatttccgatgtacgtacgtactgaatactttcctttttcttttccgtcccacatgcggaaactattactttttaaaataatacatctaatcgaatggtctataatattgggtccaccaattttaatgaaaattaacggtgagattaaatagtgccacgtggcgatatatgagtgtttgtangagcgccacatggcggcttaagagtgtttgtaggaaatctaatagacttttagtatataatagatagatagatagatagattgatagatctctgtaccgaatctcctaaacctattgacaactcctggaccacanatacgccgccatcactatatattggatcggcctcatcagcaaagcaatcctctgcctcttttgacctacca

SEQ ID NO: 70327 - DNA, 463 bp, Oryza sativa
actaagctgctgcggggcgcatccgctctatagctcgtatcttctcagtgtttgtctctatgcctcgggcagagaccaaaaacccgagaagcttgcccgcaggtacaccgaacacgcacttatcggtgttcagttttatgcgggcggagcggagactctcaaaagttttcgctagatccgagagtaaagtctcttgggtgcgcgtctttacaaccaagtcattgacataagcctcaacattacgtcctatttggctacccaaagaaattcgagtagtacgttgaaaagtaggacctgcattctttaacccgaagggcattgtcgtataacaataagttcctatggtggtaattaatgcagatttttctcatcctccctagccatgcgaatctgatggtaaccagagtatgcatctagaaaacacaaaaagtcgcaccccgctgtggagtcgaccatctgatct

SEQ ID NO: 70328 - DNA, 379 bp, Oryza sativa
agcctttctgtctctgttctgaccacacaaacatctgtatcttcttgagtagatgtgtcattggtcgggctatcttatagaacccttcaatgaaccgttggtagtattcagccaagcccagaaaactccgaatttcagtcacagatttgggtgctgttcattccgtgacagcctgcactttagcatgatccactgctactccaccggccgagactacgtggcctagataagcgacttcttttaaccagaactcgcacttgctgaattttgcatataacttatgcttgcgaagcttctagagaaccaaacgtaagtggtccgcatgttctttctcatctttggaggagatcagaattgcatctatgaataccaccacaaa

SEQ ID NO: 70329 - DNA, 478 bp, Oryza sativa
  unsure (1)..(478): unsure at all n locations
ctaagcttgcaaagctgagaagaagctaggtagctagagagagaagttgattttatctatgactatgngnnagnaattgacaaggtaagccgcaggggtaccaaaatttatacacacgatgcaattgcaaaaaggagctatctataacttagcctaattagccctatcactaaattacatgtgtgagtaacatgcaccagccatgaatgctagtaaatgagggtggctttgggaggaaaattttctcatgtaatttaatctcagcagctataaattaattgtgtccggtttcccatgtaatttaagctagctagatcttctgatttaattaagccaatacataagcctatatttggcatacgatggtctgacttttggatgagtctatgacgtacgtggaaacttgtaattacttcctcatctaagaatgtgaggatttcactttttgtatttaanaacaatgacatatttatagctc

SEQ ID NO: 70330 - DNA, 213 bp, Oryza sativa
ctcgctcgaattgaggatagatggcgctccactcccacctgcatgcgaaagtacaaatttggtctcctaccatcaacaacatttggtacctgcttgatgccatagcgccaggtaccgagcctttcccagcccgtacataaaatggaatggacgaccaagatatggtaccttctccccttcaggactgtaaaggcctcttattattattttgat

SEQ ID NO: 70331 - DNA, 436 bp, Oryza sativa
  unsure (1)..(436): unsure at all n locations
tatgccatatagacttactccttggacctcatgaccgangtgtattttcttttatatattttgggccgcggtttgcaaaaagggtaatatatgttcctccatacagccaatatatgtatacaaacagtgcttcatcaagacagtttgaccctactgtttcgactgatttccctatgcatcccatccctatgctactgcgctaccagcaacaatctagcataccaacggcaatgaactttgaaccacctaatgaagtgaaccactgcctccctgatgagttctcagntactctctcagtatatgttatatatacagatgaagctacacacatgttgcatgcccattaactgcaatggtagtatatatgtgcatgagtaacctatactcccatgtcctgacgtgtagttntctagtacaaagtacagaatcactggct

SEQ ID NO: 70332 - DNA, 388 bp, Oryza sativa
agcttgtttgttatgtagtttcactaacgctgcatgtttgcaagggaattgctaaaaaacagtcacaagttcttttaagtatgatgttataattaagaagataccttgtttcgacagtagatattctttcaccgctgattcattaaactctgaaatgctctctacatttgcagattacccatggaggcaacaatgtttacctgatgacttttgggcagccgcgcgttggcaacgctgcatttgcatcctactttaccaaatatgtgcccaatacaattcgagtgacacatgagcatgacattgtgccgcatttgcccccatatttttttcattttccagaccaaacataccatcactttccaacagaggtatgctagctcttgcataa

SEQ ID NO: 70333 - DNA, 472 bp, Oryza sativa
  unsure (1)..(472): unsure at all n locations
gcagnctaaaagacagagctcctctgacatattttttatggacgtgacaanccctaacaggtaggtcctatctttatggacacacgcgtcacagatcatgtctctttacgtcagagaagcctcttccgcattaaaaaagtggtaggtacacagagcacattaagaactactcccgaaagttcccaaaataaactactccgtaaaatcgaagagacgaaacaattgatacatgggcctttattgattggagagcagtacaaggtctagcctagaccataaactgagatgccacgtactagcatgcagatgcagtacacgtgtccccaatcatacacgtacggcgatacacgcatcgaccagcaactgatagatgatcatgtgcatacatgcacttagcccactagcaaatatctaagcatcctacaacgtcagaataaagaacgcggcaccagatacatacaggcacatatac

SEQ ID NO: 70334 - DNA, 448 bp, Oryza sativa
  unsure (1)..(448): unsure at all n locations
agcttatatgaaatggagaanaacagccagacctaaaatcttagccaaagaacaatatattntggatccacagatggccttcacctgaaaatcctgttaattagaactctggagtaaatgatgcatgcagacaattagagactgaaggttgcaaagtcaaggtcttagtgtagcatctattaacttgtaatcaacaggaaacaaacagggatcatcaacgaactcacgaatgcttagaattttaggagcggatgattcgatggctgcttaccacctcaatttactggcagtgcagctttaaagcccatgaaagtggactgggataggagataattaacagaaacatgagacatatcagagatgatgtaaaaatctctatgcagaggaacacaacaactgctttcgttggtgctacacattgcaatgtatatcaaccaatcagatatgg

SEQ ID NO: 70335 - DNA, 413 bp, Oryza sativa
  unsure (1)..(413): unsure at all n locations
gaacggagntgcaaaatgatttgacagccgatgagtattataatctcatggccgatgaaagggaagaattggttcaatcaagattaagagcccttgcaaggttactgaggataatgaacgagttgctcgacattacaacaagaaagtggtgcccaagtccttttcggaaggagaacttgtatggaaattgattttgccgattgaaactcgggataacaaaattggcaagtggtcgcccgaattgtgaaggaccatttcaaatctataagggtgtgtctaanggagcttacgtgttgcaaggactcgatggagaagtttatggacgagcgctatatggcaatacttgaaaaatattacccatgtttgggttatgcatgatcgctggtgtgccgatcatgataccgatgtgtaca

SEQ ID NO: 70336 - DNA, 461 bp, Oryza sativa
agcttgtctatatggatcatggaacgattgcaactgcggaggggaaaaagaaacaaaaattcagctttgattgttttcgctaagctacatgagacagacaggaggtatggtgacatctctttcttcgatcgctacaccagcattgcaacttggttgacgacgaactcgatatgccgcagcatattccagttgtttctaccacctgcccaggcgccgcctacatgcattgcatatatattgcattgcagctgcaggtagaaacagccactgaaaagagatgacgtcgagagctagagctagggaaaattgacggctgatatagatagatatggatgcattcacctcaccaaatgtggcacatatatatctacgctagctatatcaatgatgtcatttatgcacatgtggaacaggtctgatcgatcaaggcatgtacctgttcgtttcacagaggcataacg

SEQ ID NO: 70337 - DNA, 448 bp, Oryza sativa
  unsure (1)..(448): unsure at all n locations
agcttcgaattataattgggtaaatgaaaccaacaaagcaacacggtttatccatcacacaagtccatcttgtacttgccttaacttcttcgataatccaactcaactcctccaacgttggaaccctccacacctgtggagaaaaactacgcataaaccactatatctaatgatagttacaagggacatttactaaaatcgaaacctagaatatataaaaaattttaccgatttatattaaataacctatagctgttcccttactgttttatgcgtaactcacaaaccgtctaacgaaatctatcaaataatataacttcggacatctatacaaaatngtctacaactttcatgttgggcgaaaattccgattatgcctctgcaaatcccagattaagganaacgaattgctgtcctgatntccggatccggtcagcagtactgtttc

SEQ ID NO: 70338 - DNA, 403 bp, Oryza sativa
caattgtggcgtacaaaatatgaaggttttttatttatgaaacacatataatcgtaattccttttgaaattagttacagtgtagctgaagcttgagcattatatcaccaagcttaagaatcaattgacatagtttaaaattttaaatacctttttttttgcatgcttctgcaaaaacatattttcagcatgacatgcctaacaatcaacttaaaacattgatcgtgttagttctataatatacgatgtaagcataaaacttaaccaaaatgcatgtaaaagtatatctattgattggttaaattggatatatcatatagtattaacacaatatattattggatacataaataaaatctgcatatacttatttgcaagcgatattatagtaataggaatatagc

SEQ ID NO: 70339 - DNA, 434 bp, Oryza sativa
  unsure (1)..(434): unsure at all n locations
agctntgtattttatatgggcctgccgagacacaaacggatcgaagattccgagatggtctggctggcccgtttatcttgctgggatggatacggaaaacataaaggtatgggctgacggaaaaacacccaagatcaactttaggtacttttaaagcccaattcaacttgtgcaatgtgacttgaagaagataggcgtgcacatacatacacgatcttgcacgaatcgacgcgacaatgaatcaacaaatcatcatgaatctattatatagntcttccacggtgggcaaaaattatgtctaccatanatatggagattatattatacgcctcctaatgagactgatgatgaagctgctggacccctacaagcgccctatacaatgcggtccatcatatgggattagtagtagtagttgtagtaactcaacaagt

SEQ ID NO: 70340 - DNA, 461 bp, Oryza sativa
  unsure (1)..(461): unsure at all n locations
actcagctngacaagtagtcggcagctgcttgagcagccggatctgatgtatcatcgtttatttgggccgatgacgttgatgcggtggccgcattcttcttgtgccatagtaatatcctcttgcgagcagcatcacagacctcttcgttcgacattacatcccaaaggccatcacttgcaagaataaagcaatcatcgtcttttgcacgagcgacaactgtgacctcagggaccgggattatatatggcttcaggtatttgtcccctgcaaatacatcaatgcacagaccagaagtattggcaagcgcaccaataaatcaaacataatttatctactntgaactttgaagtatcaacaaaagccatatattaaagacattgaaatcaaattaccagtcacagaataacatgttaagagcaacaaatactgacaggatacatgaacacttggactaataaac

SEQ ID NO: 70341 - DNA, 414 bp, Oryza sativa
  unsure (1)..(414): unsure at all n locations
agctntatgttcggcgcagtactaatactggaacttatgagcaagaattgctctatcaatcaccatctactttagacatatcttctgaaactntnttcaaatccaaaagtccagtatcttcctacaaattagtgaattaggaggagctctttgtgccgaanaagaaagagcaaggcaatatttcaaacttgcattcgaactgcgaaatatttatacaaaggaggagagatcaagataatgcagcagggttggttatctaattggctagtcaaacatgagggtggtcatagatctttgggcttcgatcatcgaggaatagagactttgcanataaaagcagaggatgggggatccattgctgtcatttatatgtatatgggtaccaatatntacgttcccaatgtgcttatgacg

SEQ ID NO: 70342 - DNA, 468 bp, Oryza sativa
  unsure (1)..(468): unsure at all n locations
tncctggatctgngaagtttctctttcacggtattgggatctgttttatcgatttccttgatcgctacttatgggcgtgcgctcaaaggatacaaacagggattcgcaaacaaaaaggggaattcgtagtcactttttcctgtcgcgtaaaaaaaaggctttacgcgagagcaatagaggttgggatacatctatctcttctgagcaacctcttttggattcttaagaccacccttgcagtaggataccgtctgctttgggttctttattatattatctccttcgagggatttttaggatcgttcaggctatatttagtctattntggcttttactgtctccttttctcagggaagtggttaaggacctcagaagatagaggagagcgccaggcgcagatttccggaatacttctactgngaatgctcattgaatgcgcattctccgtattatgccttgaagaggact

SEQ ID NO: 70343 - DNA, 420 bp, Oryza sativa
  unsure (1)..(420): unsure at all n locations
agcttgaacaggttcgctgtcaatctnttttccaaacgttgtcggtgacaaaaatttcaaagtcaaaattccgtgtccatgtgaatgcatgcatctacagacttacggttataccaggtcatagagattccatttttccatagaccaacactgtgtttagttccacgccaaaattgaaagtttgaaaaaattgaaacggtgtgacagaaaaattgaaagtttgtgtgtgtaggaaagttcgatgtgacgcgaaaagtgaaagttcgaagaanaaagttagaatcaaaacagggccactcaggtatcttcttttctttaggactacactcangtatcgagtccttgattctagaacaaggnggaattnttaaaatctcacacttagagttcagtcctataaagacaaggaaaagaacattc

SEQ ID NO: 70344 - DNA, 479 bp, Oryza sativa
  unsure (1)..(479): unsure at all n locations
tgatcttgcaactatggcacaggagggaaacggtgatattcttattggactcacacaaattcttcgtaagtttctttatttctttacctcataattgttcatctaaaggcattgtccacaaatatgtgataatattgtctgtatgcatggctctgaggttatataaatgcatgcttgctccaaaagttgtctgcatagaagaatcaatgataactctcttcaagcttaaacctgttattgcatgagcatgcctgtcatattgatatatcatggcactactgttgcctatccacattccccatttcccaatatctgcaattgcatgtaagacatctgacatttcttgctttgacttcttcgttctctatttatactcccattcaacgccatatatctgtagctgccattcctgttcataattattatctnntttgacaggaagtcctgttcctatttatngtgtcanatacatcatgttg

SEQ ID NO: 70345 - DNA, 454 bp, Oryza sativa
  unsure (1)..(454): unsure at all n locations
agctntcagaggcagacatagctctagctcacctggagccacttacattagtctacttaaatcccatagctaccactgggattctcacaaggtgacctcggtcccctttcatggtgatctctccaaaactgtaggtgccagtcactgacctggccgtgagggtcgccgttatctctctcgatgcgccggggagcactgtcagcgctggaggtgagacctccagcgcgatctccggcgacattcttgtcatgatggtgtangtttcggcctctgcggccacgcttgtaactgtccgcttcaccgtctgcgtgcctctaagctgggagatggtgattgaggggatgttgagatcataggggcgctgctgcaccttggagctggagctgcaagttgaactcagtatgtntgatacttcactgtgttccacgtnggggatcgaacacacaaatgtgat

SEQ ID NO: 70346 - DNA, 432 bp, Oryza sativa
  unsure (1)..(432): unsure at all n locations
agctntcgatctaatttgtgcagatattcagccgatatcttatcgctcaccattattcttttagacattcatcctatgaaactgccgcacagatggtggtgggaactgaagttgcgtaaagaagggttcaataattgagtcaaaaaaggaacgcggtcgtcagattaaagccgcgggacaaagtccataatttccaagagttgttgaatttcgcagcttttttgaaagcctttgtatcatactaacaagtaaaaaaggtttaaataccaaaattaacctgtattnttgataagtcttaccattgtacgatttacacagtttctgctccttcttgttgatagtggaaagggtgcattgtgcacttgcgtaaacaattatgacgcgttgatgtncatggntcacatttccttgtaggggatcgactttattgcg

SEQ ID NO: 70347 - DNA, 276 bp, Oryza sativa
tctctaccaatccgggatatcaatattcatcagcgccacactatttctctgccttaatctctaccggcacccgcgtgctctgataatggtctcaaatcactgtagccacttgcgacgacgttgctcaatgaagaaatatttgcgagcataatattcaacaccaaagcagcctcattcttacatacttactgccggcgactaccgctttccatatattgacctcaattttcagccagggtaaaaatagcgaccagctcagtcgcaaatatagcgact

SEQ ID NO: 70348 - DNA, 335 bp, Oryza sativa
  unsure (1)..(335): unsure at all n locations
cgacccggatacttgagtcacctgaggcatgcaagcttactctttcactggatgaacatnagcctcaatttgctcgagcaacatagagggatcaagagcccctgaaatggaaagagtgaagacatattttgggcagataaagcatttactaaatgaacagcattaacagcttaacacacatgacacatactctcaacggaatgcatgagcaaacgatgtacgaggatcaattaactgaaactaccttctagaacttgcacagaaatctaacggtgtgtacagatgcacactttcacaactcctctctctctagaatccgcgcgcaagatttcaaa

SEQ ID NO: 70349 - DNA, 420 bp, Oryza sativa
  unsure (1)..(420): unsure at all n locations
agctcgtgctttacttgtgcacgctttggcgctgtaatgtcctccggtggatggatgggtgggatatttattgtggcgaaacggcgagtcaccaaaccaggccgaaccgaaccaaatcggtggccgttgcaacggtgaaacacgctcatatcaatcagtagtggtacggttctcaaaaaaaaatcacgagtggtacctcctatcatccggtagatgccctgcccctactgttgtgttgtctaataaccgatctcggatgatttagggccaagcgtgccgcattgtgcgtgaaatatcattagcataagtgataccctgtgactgcaaaattactaagaattctcgatatatttaanaagaaacaaacataaaccgcacgggttacagtacttatcgtgaataaaattacctatgtttaat

SEQ ID NO: 70350 - DNA, 159 bp, Oryza sativa
ttgaatcaacctcatgatgtaaggggcataatagattctctgatttaatgtcctcttggagatggcaatctcttgcatcatgagagacacaatgtctaactgacggccctaaataattccatcgatgacgtgccaagccaccccccctaatgtcatcat

SEQ ID NO: 70351 - DNA, 349 bp, Oryza sativa
  unsure (1)..(349): unsure at all n locations
agcttatacctcgtatacatcaccacctaccaagccccagtaatttccgcaagttctctcccctcccagctttccttccctctccctcacctcacccaccacccttctcagcaggcggctgccctccctccctcccacttcaaaccagggcagcaaaggacgccagcggtggtagcagcgtggaggcgccagagacgacgctctcctcccttcctcccagctcctaaatctggccggaggagggggagcgacggccaccgcaagcggcgatggaggcgtcttggagggagtgacagtggcggcgcatangcggcgctcccctccccctctccctcccttcctgctccta

SEQ ID NO: 70352 - DNA, 395 bp, Oryza sativa
gcttcaggaagagatgggttctaagctgaactttagtactgcttatcatcttcttacagacggacaaaccgaaagggttgattatattttggaagacatgttgagagcttgtgctttatacttccgtggaagttgggataaaaatctaccttatgcagaattttcgtaccacaacagttatcaagctagtcttcagatggctccttacgaagcactgtatggtcgtaagtgtcgcactccgcttttgtgggatcaaacgggagaacgttaggttttcgggacggatatcctgagggcagcagaagaaaggtgaaaatcattcaagaaagattgcgtgtggcccagtctcgtcataagagttatgccgacaattgtcgtagggatctaagttttga

SEQ ID NO: 70353 - DNA, 448 bp, Oryza sativa
  unsure (1)..(448): unsure at all n locations
agcttgtgtgatgaatatgtacaatgaannattttctttcttgatatcttatttgagtgacaatggatatgggtgtcttacggaatttgcatctctaacacacttgaatgagaaagtttcgcgtaaatgttttttagagtgatggctgtccttttcttcttctgaatgctcttatatgactgtttatgtacacaccattgtccagataaagcagttaaatgtgcctatcaaggttaaaatttttgagtggaatgccggaggcctgctgacaagaattgaggtataattntactattctacattacaaggtccttttttcatttttatgactaanacttatttcactcctcangggcttcgggcattccttcctatacctganatgatgactagaccaagaaacttcacggatctaaagaatactgtaagtacagcatgacatgtaata

SEQ ID NO: 70354 - DNA, 455 bp, Oryza sativa
  unsure (1)..(455): unsure at all n locations
tatntattcttttcttcgcttcatcaactttctgaagcaattcttagtttctttcctgagatttagaaagtgattgctttgtttcatcgtgctcttgcctttcagctaaatacagggcgtcccttgtggttacattntcttcaaacctatatttagtgaagaaaatgttaccaagtcatctcgtaatgctgacagcagaataataataacttccttgctaaatacgtgacaaagaaggcacatatgcagcaccctcacattacgccccaaactatgatcaatcccttagaaaatgatgatttccttcagttcaggatcccaaagtggtatcctgagtaccctctttacagtgcataccagggattcanggccatatgcctctcttctttccatanttaactcttcaatcatactttcaagcctttatntgtgaagagggtatatcactaatgaga

SEQ ID NO: 70355 - DNA, 431 bp, Oryza sativa
  unsure (1)..(431): unsure at all n locations
agcttgttccacaaagaagctctctctaagatgggtttcactactttctaataatatttcaatttattntattattttagttatcgaatcaaaaggtatttcacccttctctttgttttcttctcctctactccatccattaaaaaaataactaacctcgtattagaaactatatccagatgtcacatcctagtacgagattaattttttttctatggggagtacgtttcttctccgcattaacgaaagtcatgatagtcttttagtctcttatgtaatttaccttataactagctaaaacaacggtattttagagacggagagaatntagataacaaccttctctttttttcttttgttccatttgttaccangattgtgctgttgattatagctagctctctctatnttgtgtgttcgtagcaacatgc

SEQ ID NO: 70356 - DNA, 414 bp, Oryza sativa
actcagctgacttcgcagcgggcggctccactccacaggcaatctcttttcttttgcgacgaaaccaacttgacaaaacagctccaactatgaagatcttcaactctggtgtggcggaaaagagagcaagactgagtactacccacttgtctcagcaaggcataccggaagacgaggtatgatgcacgatgtaacccaaggaagctagaggttcttttgcataaagctagcatttataaactgtagttgaaggcagtaaaacagttgtagtaattaatcaatattaaccaaacactggtcaacgctacaccacgttggaacatgcccaaccaaccacctgaactacaccaagtcattatgctaaactaggggtgagactaatcaccgtgaatctgggtgatcgccataaccgcg

SEQ ID NO: 70357 - DNA, 429 bp, Oryza sativa
  unsure (1)..(429): unsure at all n locations
agcttgcaatgcggacactntcttccctntcagtaattcagaagaatttcctgctacattttctgtggtagtacccatggactctgcatcaaccaaacttctcaattccttgcttttgtactgtgatggttcatctttagcacacaccactttccctcggtctctcttaagtgacgntttcttagcaggatcaatttgcagttgacttgaagtggtaacaggttgatcattgcatttatcagatttagttttgtgtgagaatccatcatcaagtgaactttccatcttagcatttcttactaaagttacttttaactntgctttgccctttggatgtttatcatcatttgctgaattagcagctttaacatcaatgatngacaatgaactctgagtactacctttccccttgaatngaccatttttcgc

SEQ ID NO: 70358 - DNA, 323 bp, Oryza sativa
  unsure (1)..(323): unsure at all n locations
tgtcgggccccgatgttcgcgtccatcgtatgacttttaactccatgcacgcacgtcgccacgtaggcacgcgcctaagccgcaaccccttgcaggataaaagcgcgcctaccgcctnnctctcttgttggctccgacccctcaagctccggcggatgctctcctccctctacgcctcctncttcggcgttgtcggcgtcagcagcggcgccgccatgggttgcggtggttccaagaggacgtggccaaccggaacaccaccgaccccgccgtcgctggtagagtaaagctttccggaggaagtccttcgtttccgccagcca

SEQ ID NO: 70359 - DNA, 470 bp, Oryza sativa
  unsure (1)..(470): unsure at all n locations
aactcggctgccgaggaaaggagaagctgagctcgagtttctcttctttttatctctacatggccgtagtcgccggcgagctcgcgctgccgagcttgagctcgccctgtccccccgctgccactgtcgagctcgcacccgccccgctcgtgccttgctcgccgacacctgcccccaaacgcgcagacgcggtcggcgacacctctccctcgggtcgggctccttcgccacactactctggcggcggtggcccccacatggccattgtcttcgtcgagctcatgctgccgagcttgagcttgctctgccgtcccactgtcgcgggtcctctcctcccgccaggcggcgtccgtgcgccgatcctctcctcccgcccgccggcgcccgagcacgcacacgccactcctggccccgnatcctctccggtgcacgcacgctgaccaaccacgtgaggtgaggaatgagagaaa

SEQ ID NO: 70360 - DNA, 381 bp, Oryza sativa
  unsure (1)..(381): unsure at all n locations
agcttgctttactccatatccagaacgtaagttattatgccgggccatcacaattntgaccttntattgcttacatactggctggatatccaatagagtcaacttgcatccaattatttcttcatttcctcatacttgggtaatacagcttgtgaattgttctttggtttgtattccactgcattcttgactgagcatgtagtggtacaagtttactcttaccattagaatctgagtgaagcaaagtgtattcctggtattggatactgtcaagggttctatgcacttggatangactcaatataatgtggttcccagtaatactatgtgatataaattcacatcctgttgccctgatgacttggttaacatcatgggagt

SEQ ID NO: 70361 - DNA, 364 bp, Oryza sativa
aagaaagaaaactggaagaatggtccaaggtacactcctccagctgttgaacaaggcagactcaggatctgtgcattcatcattcatcaatgccatgcaatgcatgcaaacgcttgggaaatgcaggaacactgcgggtttttattctattattattaataatatttttgcagctctgaacaatcaacagcaattcagcagctctctgccaaattagtgtggtggctactgtgcacttgaatgctggatgcggcaaaaccggatcggactgctcatggcatggtcgaattggtaataatagtaatccgaacaatcaccttcttttaagttatactccctccatctacatctgaaaccatattta

SEQ ID NO: 70362 - DNA, 355 bp, Oryza sativa
  unsure (1)..(355): unsure at all n locations
tcataacatttcaactcgattggntatatgtacgtttattgtgaaaacactatattcgaattagaaactatatttacgcttagctagaactatcggcgggagttaacggcgcactgcgctcaaagaacatgggccgaattgctatcacggataactgcgtgcaatagaaaggcccatctctaaagattctactccctccgtttcacaatgcagatgccagtcattctaagtatttcacatattatattgatgttaatatacatgtgtgaaatgctctaatgatttactttgtaacacggaggaactacaattttacataatatattaagactttcctccaatatgtatatatttt

SEQ ID NO: 70363 - DNA, 457 bp, Oryza sativa
  unsure (1)..(457): unsure at all n locations
tggcatggccatttagccatagtgctcggccaaatgaatctattcntttagttgancngnnatagagggagcgagtattaattgagcaagaaagagcctgcagagaatttactacagagttcatcagtgtatgccaagaaattaacttctcagaaaactactgattgtggtgaaaggataacaatatgatttggtaacgaccaaatttggtaatatcatcatcggaaaggaggattagattgaagtggagtcgaagacggagatcgattcgagaacagaacaagaatcggctggagtctggatcggctacgattggatcggctaagtctgagtcagactgggttaagtgatacagccgcattcgacaatatgacttggtgacaacatcaggttgagttgatatgtttcaagatgattgtcgcacatggatagagtcctgagacagcaattgtatcta

SEQ ID NO: 70364 - DNA, 460 bp, Oryza sativa
  unsure (1)..(460): unsure at all n locations
agcttagtaatacaattaatggtaaacctgcaactgcaattagatatacataaaacaagtgtcttgaattcaaaattgtcacctccaaatatactgttcactcagggcagcattaggaaatattctttaatatgggacttgtaatataataaattgcaatgctacaaacacatttcacaagtggttgcttgatggattacaaaaggccatacagaagatgtactagcaaaatttgaaaatttgaaagcttgaaatatcaaacatacaaaaataacaagcaagaattgcatttatttcctcggaagaccatgttttggcataaaaaatatgttgctacacaaagcaaatatacagaanactataatgaaacctaagaatgagaaataccaaatgaataaataacaagtttgaataatcaaacctttctgttccagcacatcgaggaccaccatttatatgt

SEQ ID NO: 70365 - DNA, 393 bp, Oryza sativa
  unsure (1)..(393): unsure at all n locations
acataaaactaagcttctaaccctagccgaacgcaaacccttcactcctgctctgtctttagtcttcccctaacgccggcgcaaattaaccgacgtcgacgatgatgcaaactgcccggcgccgacggcaccgatgggtcaaggagtgggccgttccttcttcctcctcgaattccaatcccttcttctaatgggagagagcttcctggtggtttgattcggattctgatctgatctctcngccgcgccacgcgcttatacatgttgttagggtttctgacgatctggtcgtcggcggtgggccatgcgcgctctacaaatgggtgcgaggcacaccccgccctcttcaatntttgctatgcctcccgccctgtactactttgctatgtgcgg

SEQ ID NO: 70366 - DNA, 447 bp, Oryza sativa
  unsure (1)..(447): unsure at all n locations
agcttagttcttgagcatctgttnttcttcttttccccgtctgctcttccctccagatggtctacaccaggactggcaaccgcacgacaggcgagggcagcaacggcgaagaacgcgtggatggtgtgcaccccaacagtgattctggcaatggtccgccaccactttccgagaatccgacgcttgcccaagttatggcacatcagactcagatgatggcagccatgatgcagcagatgcagcagcagcaccagcagatgcaccaaatgatgatgcagcacgccgaacagcagcaccagcagtttggtccctctccccctcagtccaagttgccagagnttctacgcgtcaggccacccaccttctncagcaccaccaaccctatggaggcgaacgactggctccatgcaatagagaagaagcttgaatctctgcagtgcaatgatc

SEQ ID NO: 70367 - DNA, 137 bp, Oryza sativa
cggagagagctccgcattcttcttcattgatatcatcaagaagcacaacgccttgttcccgaggaatgcacttcatgaggattccattaaccgcgcgccgatataaggtcccttctaccaacacataacatttggag

SEQ ID NO: 70368 - DNA, 452 bp, Oryza sativa
  unsure (1)..(452): unsure at all n locations
agcttgttggaaaactttagtgatagaacctattggctatntgtagattaaaaattttataatgatgtaatctctgaataatgtgtattgtatttcatttttctgaaattgtacgcatggagtcccatatgttaatgtacatacatgacatatgctagtctatttgtacttgtcataagacaagtttagaactaatattttgggagacttaatgtaggtacaccagacaaccgtcacatgtggatgatacaaagtggactttgagggcatctaccttcttaacctttatatttggtgaaggttcttaatgattataggatatcatgaaataaaaaatatttaattttgaaaatgaaaataaaatatagttttctatcacactttcatcaacaaacacgcttaatcaaacttgttcttaaaaaatagaanacataataaattcaaccatatac

SEQ ID NO: 70369 - DNA, 425 bp, Oryza sativa
tatggatatctatggacggaacgcacatattttattgttttctattcaactttgccaagaaagatatgaagcccatatgccctcatttgttagttgcacgcggtctaaaaatgctatgaaaattatgaaaaagaaaagacattatattactgtacaccatattcatccacaaaatgcacataaattcgaattcgacctaagaatatataaataaataataataaatcctgaatataagtctacgatgaatctaacacttggctgcgaattgaaactaccctggcgaataagatgggttaccgccgcatggctgaagtaataagggtagcacgtaccgcggcttcaaagtcgattgcttgggtgaatactatcacatcctgaaccaatccacccacacatcggacatatatactgaaaatgccaat

SEQ ID NO: 70370 - DNA, 411 bp, Oryza sativa
  unsure (1)..(411): unsure at all n locations
agcttcagttggttgtattcagtggtttctttagcactgttggttggcaagttcatccctgacaaagtgctagtgaggctaccagtattgactccttcaaatgaagatgaggcaatgattttatcacggagatcactgagtccagtcagttgataagggtttttgcttccatataaggctctatgtgatggttcttttgcagtttcacaagcaacttgcatttctttgaccagaattccaatatatttggcctctcctgatgaactcacaacatgttgggaagatgaattgctggaactaacaccttgagtcacaggaaatacagggtggtatggctgagcagaaagagccttcgccatacgttgctcaagctgctntcctgatntggctagtggactccctttacctgat

SEQ ID NO: 70371 - DNA, 193 bp, Oryza sativa
ttctcagccacatcaagtgtggcatgccacatcttagctggtaaaagtttgacagactgaaacaagcatcccctatgaaaaaaccataagaacgattctagaagtgacatttgaagagcggatgtttcttagattggcaaatagttgaatccctccatgcaagatgagtactaccttcatattttaatgtatg

SEQ ID NO: 70372 - DNA, 355 bp, Oryza sativa
  unsure (1)..(355): unsure at all n locations
ctaagcttccacaagtctctgggccccgaattcctctagacagttgcttttctgnttgaagttgatgctgcgggaggcccgaatccaatccaaaacgtgtacaacttgatctcttgtcttctatgggccaaaagtgacatggtgaggtagaagtatacttgtagaagggcttaattttggccctaatcaaacttctcaatcattcatgcattacttacgctcggtctcttttctttacccagcaattacctctgcgaacgaaaacacacgaaactcaatgtgtagcaacgtttgtttaaatatataacaagtaaatctatatatagaacatatgcacctcttgttgatcaataca

SEQ ID NO: 70373 - DNA, 451 bp, Oryza sativa
  unsure (1)..(451): unsure at all n locations
agcttctactgaaactggaccatgtaagtcatataaggaataaaacagacaatagggaaaaattgaacacccatggattcacaattcacgataaaacaatggaccatagttcagaataatttaagttccatgcatgttgcgttaagcatgacctgaatatgaagccaagatcacaacgaattaaaaataaacacaattcaacacgatgactgaacaccttaatggcatcaactaggcaagaagaaactcctgcagactaatcatgaattatccaggtgaagccactctcattaagtggctcgttagaagatactgagaagagctggctatggttgtctgctacctcctgcaagatctacaaatacacacaacgagtaataacttaagaggacaacgatgatatagctcaagataaatgtacagacagatcaataagtacctangttaacta

SEQ ID NO: 70374 - DNA, 299 bp, Oryza sativa
cctgcgatcccaactattggcgtgcgaggattccctgaatcaactagatatttatccaaggtgtcccatttcaccttgtggttgcaccttgattatgttcgatgaagtttccacaggaatcggttcttatatacgaatacgggacagtgccacatatccacaacccccgcattgcgaggttttacaattcatcttatttttaaacacaccgacaccacatgttgtgttttgaatgcttacaaacccattttccaagtttcaacaaacaacggtgatgtgggatatttggttacgcgctc

SEQ ID NO: 70375 - DNA, 438 bp, Oryza sativa
  unsure (1)..(438): unsure at all n locations
agcttaagctagattctgcgcacaatctctccaagatacatgccggaaatcatcttttcatatatctgaggaaaagaagaccgaaattctttcatgcccacatatagttggaaaataaaaagataaaataaacaatacctgctcgcctgggtttaaactttcaaagtccaaggcattatcgtaatctgaacgaggaagcctttctgacttgaagtttccccattccatgttaatcaccttcatcataccaaagatccaaatgttataatattaattgatgtgacaatcatccagtgcagaagttgaagtggatacatacatttatacaaggttcaaagacatttaatgctacaagtataacgaaatcagtcactaaccatatntcctgatctangtagtaatccagtccattttggaattgatttgcatgctccacgt

SEQ ID NO: 70376 - DNA, 157 bp, Oryza sativa
  unsure (1)..(157): unsure at all n locations
taaaatatttaggttaaaaaactagaacaacatatatattnggcttttaaagtactaaacatggatttatttattatatatattataatagaaaaataaggtccaagatgtatattgtagaccgtgttattatttaaaacgttaattaaaatgaaac

SEQ ID NO: 70377 - DNA, 447 bp, Oryza sativa
  unsure (1)..(447): unsure at all n locations
agcttagctcagtctgtgagtccgganaagcaatttctgcaaatcgaagcagaactgtgtaatttccattttcaagtccaaggccgtaatacctcagagatgatggcgacacccttccagtttcaaacaactttgaatcaactacattgttaaaattttgggaactatatataatgttctttgcatctgtggcccggaagtagtgtcctacactgctgacaccccatcttgtttgaccagtaacataatatgttgcagctccaagatttgcaggatctgcttcataaatggtattatctgatcctctcgttgatgtattactaccacagtcaaccgcaaaagaataatctacgatcacaaaattgtaacaatcattaaaattccttagctcatattatngtctttggttcaatgaagatngagaaatgtacattttggagatccacg

SEQ ID NO: 70378 - DNA, 458 bp, Oryza sativa
  unsure (1)..(458): unsure at all n locations
aaaactcagctgagcagttcaagaattaccaataaaaccatcttgtcctttagctttctgtgcctggatagatttgaacgcctgctctaactctgctagagtgatatcttcttcctggtcattaaggtcaaactattgcaagctgatttgggtccaatttaaagttgattgacttatgtgggttngcccaactctctgatgaaagaaatgttcagctcttccactttctctagattggaagaagctatttcagaagtggtttgaacacctggatggtttgaacacctagatgaagtctttcttttcttcattttcttttaagtggaaagctttgatttgtgtctccttcttaatcaagtagtctgatctctgcnaattttgatttatcgagcccagaatttgtgcttcagctactgncagaattgttcttcatagaaaagtcatgattttggacacac

SEQ ID NO: 70379 - DNA, 369 bp, Oryza sativa
agcttaatgtttctgttcagagcgatgaaaccgctctgtttgccatatcactttgtttcactaattagccagttcagctacatgaggtagcctttaattataataaatatgaggataatgcagttaatagcactgctgtggatccgaaaactagagagaggattgggctctctgaagcatgaatcattcatcgcagagtgtgatgcagaaatatttgtaagggattgaaccttgcattgcaatagtagtgcaaataatacacaagacagcagaggtgagagtacgaatgaagatcagaattgggataagacgatggaggagagcttacgaagggcgcccactcgtgggtgcggcggcggaggtggagga

SEQ ID NO: 70380 - DNA, 411 bp, Oryza sativa
  unsure (1)..(411): unsure at all n locations
tggtcccagctattagcattcaaaaatgtccatatacctctttgtacgaatggggatacactgatatactctttggctcttgtatgctactgattcattttcttgtgtacctacaatgtgtgatggacccaaaagttatgcaacacactaccaataatatatcctctgattgaaactctcaatgtgcaaaaaacaaaattctagataaatctgatatttcttgaaatggtgtggttgatgtgtattatactgtgcatcacagaaatgctgttgctttngcaagtgaaggtcctgggttatcttaattttcttctaagtctaagcttttgagttatatggcttattaataactgctattcctctgttctatgaataattagcatctccttgtgaatactggccttgtatgat

SEQ ID NO: 70381 - DNA, 455 bp, Oryza sativa
  unsure (1)..(455): unsure at all n locations
agcttattggaaggccagggacttatacctttggtccacccccatgaaggagaaatgggattttctctggtttggatcctttatatagctcccaaatcacgttatgagagacaaatggttgggcaattcaaccttaaaagaacagtatccttgccttcaaaatatagttaagcataagccggctactggtgcacaagtcttagaaaccaatcattccctttcatggagaagggaccttataggatcaaaataggtggcttggaataatttattatgagtaaaatgcacgggtgggccttaaacttgtatttattatcatgtatcactgattntcaattaactcaggagcaagacgagtttcgttagaacttaacctcanactggggagtctcggtgcagtctcattacctagctctaattcacatcaatgttcttaatattanataacatctttg

SEQ ID NO: 70382 - DNA, 474 bp, Oryza sativa
  unsure (1)..(474): unsure at all n locations
tattacggacctatgaaactcagcttataggaggaacttgaattgatccataanaagccatcctttatgaccataatgcttcggctaatcttgtatgtcattgccaaggaaaatcagagatctttctcttaattaacttaatcaaactcttgttggatgcctcagcttgcccattagcttgcgcatagtatggtgaagaattcaacaacttgatacccatgctatcgacaaactgaacaaattcatcggacacaaatatcgatccctgatcggttgtgatagtttaaggaacaccaaatcggtagataatatattccttaacaaattgtattgcatctccagaatcaactntcttcaatggaactgctctcacccatttggtgaagtaattggtccncaccaatataaacttattctctttgctcgaaggtggattaatctgaccgatcatatcaatgccccatcctctgaatg

SEQ ID NO: 70383 - DNA, 415 bp, Oryza sativa
tgtctgtttatgctaatcttaccagtcgtcacctatttaggcataggtcaactacctaacctacttggtctgctatgattttattatgctgctgtctaccactgctgctgctactatgatactatcccaccatgtgaagaacactgtactccatgccactgtcttatttgttaatcaatccaatttaaaactgctaattgcggcttcatctttccaacttctattgaaaccttagattttattttagataatggaaattaattcagccttagcttcatagaaactacaactgcaactcacattactgtgtgtgaaaatagaacattgccaaggaaactaaataaagcgacaccatgtagatggagattatacaatcagaaattaatccttattactaaacattcatccatggtga

SEQ ID NO: 70384 - DNA, 306 bp, Oryza sativa
tcagctgcacaaacatattttagagaggaactcaatcatggcttgtgttgctagaatgaagggaaactagttcagtcaacaacgtgttacagtaggaaatttcttcaagggaacagagcagcagaaaatgccttatatatgggtaggtaccttcttcgataagaaattgcgcccaggcattttttccaactcttttcacataaatagtccttgcagagatttgaattggatagataccatgctccaatagacattccagtccactgcacaaattcctaagaaagaaaacacatcttttgttcattc

SEQ ID NO: 70385 - DNA, 457 bp, Oryza sativa
  unsure (1)..(457): unsure at all n locations
agctgatttgtctatattatcaannattgacaattggtaaactggcatgaacgcttactgtgtttagttgaatatattgacacgcatgcaagtctgacaattctttgtggtttctctggtttaaaatgattttatttgtcaaggtaatgccgcgaaatgcaacatatattgggtgcccaaatgcaaaatatgtatttcttttaagttatcagtaaggaaaccgtaaaatcaggtgtgctgtttccattggtatttatgacgtgcatacgttatcatanaatataaaatacagttgtggttgctgactttggtgtagtcaaaagatgtatctgtttgaacatgctctgggttttatgttttagtcaatatcaataacagtacctatcttatgtcctggttagaatccaacttttttcttcanacttncaaccttctcgtcacattgaacttttctaca

SEQ ID NO: 70386 - DNA, 409 bp, Oryza sativa
agctgtaattcttttttcttggccaatggatcctattttcgcaacaatgatttgtctaaagcaacaaatacgttattaaaaggcttataacacatgagtagtctgtcagaactcagaaacaatgatcatattacaatttacagatgtgataacgtgatttctataactcacggattcttaatctccttatccattgcaaacataatatgactacagggcaaagtgctatcagaggcacaagcatagcaactgtcaacaccttctttctccctgcaacgaaatctcatctcccaaaataattatacattgctcataattgtattttatattctcattacacatgatgaaattacttctataccccattcgggttgtagcgaagggagttgattcagacagcggcgtaatt

SEQ ID NO: 70387 - DNA, 435 bp, Oryza sativa
acgcatgacaacttgctgtgcgtcgactttcatttatcatacaacggcatctggcaatcttccaccaacttactaaacttctcataatctctgtcgatgacctctgcgtcttcaatgtcatgcaacattgtagatagacattgaatgtccaaatctatgggctctccacctataggaaaaggtgcgaacatgccttctcgaactgcggcggtgttctctacattctgatccaacactttttcaactgcgacataagcgccttttgctctccatgcttggtccaccaagtatatttcttcatgaatacactcattatctaatgagcatgcacttcattcctggcttcgaacatctggtcattcttacagtccctacatgggcacaacatgtgcatgctcatcctactttttctgtccatatccgcaaaagtgacaa

SEQ ID NO: 70388 - DNA, 429 bp, Oryza sativa
gagctcggccattgtgccaaagactgtcgacagccacgacgcggacaggcccacgtcgcacgggtggaggaggaagagccggctctgctcctggctcacgcaagcatggaactacctccagcggcaccggccgcagcggctgtcctccaccttgatgagccgaaggtactcgactccctctgcaacggctccagcaacgacaaggctgatgggtggtacctcgacaccggcgccacccatcacatgaccggccgacgggagttcttcaccgagttccactccagcgtgcgaggctccgtcaagattcgtgacgcctccagcgtggagatcaagggagtaggctccgtgcccttcaccgcctagtccggtgagcataggctgctcaccggagtctactacattcgcacgttgaggaattctatcatcatc

SEQ ID NO: 70389 - DNA, 385 bp, Oryza sativa
  unsure (1)..(385): unsure at all n locations
taggcccgcaatatgttttagagcctcatggaatcatctaatttcacttattaactggcggatgctgatatgtgaagtgttctattaagtgacaaaggtttggcttcaagattttcttcagacaagttcaatatttttcaaagcatggcttttattttcagctgctgcttggtaagttcgttggaaaaggttcgatttgtgatatgttattgcgccagatatggtgatgttaatgatgctagggcaggcaacaagtattctctagcgtaattgtcatgattatatttgattgacttgtttgtttgaactccgctagatacttgtaccggaacattaatatggnacttccatttggaatgtcagaatctcttatgaactaaagatg

SEQ ID NO: 70390 - DNA, 442 bp, Oryza sativa
  unsure (1)..(442): unsure at all n locations
agctngcactataattaataatactgtaaagagggctntcaaatttatctcatacaattcatatagcgtgataacctcagaaaaagcaatcaaaaccgtactaaattacgcaccagacaaaagcattgaacatgattgccgagattgtcttaaaccacgtttctcagcaaacagagacttaaaaaataataattaatgtggtgagacattttagaagcataaccaccagattactgttatctcccacgttaaactcaccagaaatcgattnttgcctccatgactgggcaaccatgagaaagaacaatctcaaggagccaaaggtgaggagaggcacgcacatggcanatactacctcaagatttcaattcgatnttgcacatcctctatagctataataataaacaaaataatcaagagtcttaccatcatgaatcggtct

SEQ ID NO: 70391 - DNA, 452 bp, Oryza sativa
  unsure (1)..(452): unsure at all n locations
agcttacttataatggctcgtgaatgctacactagtatagaanaacaatcatgtgggatggtaaattaaagggtcttcttttgttctgttgggaccttagaatctaattaatgcaatatgacaccccaaatttcatctttntactgtggcaagttaaaataaaataagtcataatatcgtaattttaaagaattcgtttgactacgtggcccaatctttgtcgttgaaataatagattatgcagaaatcatgctacactagcgatagtatttcccactaaattagtgggttatgctttgcttaacaattaccttactatattatttacttggtggcgaatatcagtgcctatactttaacccgaccgtttcaatcggccactgaatgtgtcatggtaagtgatctaacatctaagcatatagaggtaaatgcagaaatgttagcatccacta

SEQ ID NO: 70392 - DNA, 275 bp, Oryza sativa
acaagaacagaatgtgaaggaggccgtttattgaaatagcatactaagactgttaaatggctatctgtatattatctttggatagcaaagatgtggcctactaatcactgcccattaattcttttcaaggttgttgaatatataagcacataatgatttaacttattccctaaataaatcatgacaatgcatatgtaaactagcataatcgcatcatacgatctacacatgtatactagacacgttagcatgaacaggtcaaatctgcgaaacat

SEQ ID NO: 70393 - DNA, 343 bp, Oryza sativa
agctttattcttttctcgaatgggggaactcgaaaagaccacatatacggcacaaggattatctccaagctgcccacagacacacgcggaaatccggccctaagtaacaagcgggattcgaacgaatgtgcaaataaggcaccattcacatgcaaaatcagtgcgacaaccgcaagacggaatagaaggaagagacacaataatctataagaacgatataacgctcgaacaaaacaatggcgaatcagagagtcaactaccatagactctaacacggagacaacactgtaaaccagccagataaacaatgcaaggcttgagcccaaacacaaacatgcaagca

SEQ ID NO: 70394 - DNA, 417 bp, Oryza sativa
  unsure (1)..(417): unsure at all n locations
actcagcttacctaaagnctctttaaggaggaaggcaagagtatttctgtttttcgacagattacaaggtatggattaccaagtttataattattaatagtacaaatggacaacatattctacatacacaagctttttgcgtacgtatcgtacacaccgattaatggatttcaccattttttaaaataattgtacatgagtaacaatcttaactcaaaagtcattatatattatccgtaagataaaaaaaagttgaaatttctaacaatcntaagagtgaaattctatcaaagagttaaatattagaaagttgataggctaattcaaaaggtattataagatatcttacgaagaaagtttctatagacgatgtaccacttataaactgtgaatacgtgcccatgattagtttgactc

SEQ ID NO: 70395 - DNA, 410 bp, Oryza sativa
  unsure (1)..(410): unsure at all n locations
agcttcgaatagttacctactgaattagatgaaaacatgcagatttcttcatgctatcagtacatctctctattatacactaaaagtctattaaactttatacaaatattctcaagccgtcacatagaactcctacaaatgctcctacgaagccacgtggcactctaataaaccggcggacccactatttagatccattgaatctattatgattaaataactaatttaacctccccctaaattaagcaaagcaaggtacgtgcccctcctcccagtatgtatgtccaccgactcccccctcccatttcctattntctagctaatctctctcattntccaactaactactaaatatataananaagggtattagatagttattagcgcttataactcgagaggtatatatt

SEQ ID NO: 70396 - DNA, 381 bp, Oryza sativa
tcagcaccatggatgctatgcacatgtgaggttccatcctctatgctggagacggggaaagatttgtcacccaagtagcgaacagagtagacgcagttcttctgaatcccgtaattgccttcggccaagcacgacgcgccaaaatagaaaggagcaacgaagaatgcgcggttaccaagatcatcagctcggcaccatcttcgctctgagaaatccatctttgtaacaccgacctgcagagacgacaacgacgacgatgatgatgcaggcgtcttcaggcagaccatgtagagctgcccgtcggattccaccaagaaaacgtggcaggctcctcttccccagtcgcctggaacagccgcggccagtttgatggagctgaac

SEQ ID NO: 70397 - DNA, 453 bp, Oryza sativa
  unsure (1)..(453): unsure at all n locations
agcttctgtctgaaatcaataaggttnttcagtttctgattgagcggcacccattctttgaaactggattaaatttaatgaacattccaggatcgatgtatgatctttaatctttatattgcattttagtaggtgggcaacagatatattgatgaatgaattgcagagcttgtacctggagttctgttcattgatgaggtatcttcttattttatccgtatgattgaaagtttactgctctcactgggctaattatggagtcagaaagtacatatatgaatgatggtgtgattatatgttgtgaagcatacagtgtcttgtccttgtgaagcagtgccatgcttgataacttatttattactatttgtctactatatggtagaaatatgtcttaatgttgtctgattaattacttattattgttaggaactntaattgcattgtcacatgcta

SEQ ID NO: 70398 - DNA, 454 bp, Oryza sativa
  unsure (1)..(454): unsure at all n locations
taaactatntcagagcaagttcaggtaagaccatactgtgatttatacttacnaaagcttcatcgcacgaaactctcgacggctaaaaaacacaggggatcacacgacgccagccacatcacacggttcagactcccttgcagccggaatcacgtaggaccaccaccagcttaatcgacctcctcgatcttggggcctgcaccgctgccacccgccggcgcgttctcgtccatgccagcggcgccgcccatgtccgcgccggcgccctggtacatcttcgcgatgatggggttgcagatgctctccagctccttcatctttgcctcgaactcgtccgccttcgcgagctgagtgctgtcgagccagttgatggcgccgtcgatggcgtcctcgatcttcttcttgcgtccgccagagcttggagggatctngtcgtcctgatggtgttctcatg

SEQ ID NO: 70399 - DNA, 421 bp, Oryza sativa
agcttatcttattcagtcctaatacgaaactgagaagtgattacaatattttcattgatgaggaatcggacatgcacgttgcatgcatatattatgtgttggagccgaatagataattagaatacaaaactaattacagaattccccgttcatctatgactgaataaaatatgataaatatattaagcaatgcagagtgattggcaaaaatatattgacatgtgcttaagattcaaacggaagtagccatattgaaagatgagtccatataagaacccaacacgagattaatcaaaatcgaaataaaaataagagtatatccaaaaatagaaaatatgaagagcccaagtacgactattatgtataaataactataatttggaattacatataatggatattgaaagaagatgcatacaag

SEQ ID NO: 70400 - DNA, 406 bp, Oryza sativa
  unsure (1)..(406): unsure at all n locations
tgtgttatatgtggtgtggaatcttgggtgccatgttgtgtgtatttatctagagagtcaagaaagaggaatatatgctntatgtagataggagtaggatctctgggtctttaaacatcaccatgacaagcaaagataagaacaggagagcagttcttgattattatttttcttctcatcaagaaattaagccggagatagacatggcagctgcacgcagngattcacttcttgatttcttgatttgngttgttgcgtttgtgtccagaccgatctgagctgcgggccatcgtcgatgacggagctgaccgcggcagcggcgccggctgggtcaagatcgtcngcggcggtggcggcggngagcagcgagaagatggggagggggaagatcgagatanagcggatc

SEQ ID NO: 70401 - DNA, 264 bp, Oryza sativa
  unsure (1)..(264): unsure at all n locations
cagcctatgattccgttacgatgtctagacaggcatgaagagagcgacatttgtcaacctatcaaccactacccacatagaatcatgacctgccgacgttctgtnagaccggccaaaaaaccaaacctatttcattccacttacacactggaatcgtccacggatggaacagaccaactggcatccgatgctctgccatgacccgctgacatacatcacacagaaccacatactctgctatctcacgtcgcatactggcccacc

SEQ ID NO: 70402 - DNA, 389 bp, Oryza sativa
acacataaaactcagcttctcgacccaacaacagctccgacttacctactatatttcttaaaaagctggacgctcggcgcatccaagaatggaacccaagaggcgaaggcctctccgaacagctaagcttatagagcttcaacgcagaagtccacgaacgactatcgttgcacggacaagggtcttggtagtgggggagaaaagacgccataacgacgcatccaaagaggggatcgacacctaatggcgccgtcgtcgcaagccaaccaaaggctagccaaggctttcgcgagccaatttcattcaaaaacacacaacccacctacacaacgtacattgtcggacaaccacatcgttcctctagcctccgagcatagcccaccacacac

SEQ ID NO: 70403 - DNA, 197 bp, Oryza sativa
actccagttagtgtccgtccatctgaagtaacacgctcacaactttttcccgccgatctaaatacaagcttaatctattcgaccatatggtaaaacaaataaagatacaagcaaccttccatggtggcaacagacttcgatggctaagccaccgttggattatctagcccatctgacatacaccattgtttaaccta

SEQ ID NO: 70404 - DNA, 332 bp, Oryza sativa
  unsure (1)..(332): unsure at all n locations
ttataagctntgttgagcctataacccaaagaagctatttataactntcagtcctcgcaaactaagtagaagaaaatcaaacaaggcaatgatagaccaaggaagcaaattgaattgataaaaaatcacactccgttattatgatgatagcccccgactgacaacttcaagaagaaaacttgatgttgacagtcaagatagggaagtacagtgataagcttaagcgtagaaacgacgaagatgttcgatgttccaagagttgtcgacgagtgtaccgtcttcgcgcttgagtcnatnngaacctggccgggtgactgcagagatgataaatg

SEQ ID NO: 70405 - DNA, 250 bp, Oryza sativa
taccaattggaaatcccgactattctgaccatagccaaaaaaggaaatgagaattcccttaaaaaaagaagggcaaagctattcaaagtccggatgggttttaagtaccttcaccgaaggttcctaaggttacactggaccagtgtctcgaccaaataccgatggcatctttgagttcccctgtgaatgtcaccacaaagactcatcactagtgttcctgctggccgcaatgacttagagtgaacagtag

SEQ ID NO: 70406 - DNA, 207 bp, Oryza sativa
actggatcttgaaatacctgacaaattttgatcctgctatgctgtagagaaacagagaaactggctggctgcaaccaacttagttgccacgcagtgttcatttggcttagtagcaaaatcatcatttgttagcaattcggaatgcctctttcgtatgattggcacatggcacagcttgaagaattgtgtttggcgcactcgctcact

SEQ ID NO: 70407 - DNA, 433 bp, Oryza sativa
  unsure (1)..(433): unsure at all n locations
agctntcctcttcctcttttcatcaatggactcctgacgtctacgaaggagtgtggttcgttcgacaaattcctacctctatatctatctctgaggtgtttgggttttgcaaaactccatagatatgcagaagagaaatgctatccccactccgaccaagacagaacttttaccaaaagtttattgtgatctttntgttcaaataacaattaaggtgaagcatggtcatgaacaacgaatctctttatgataaacagatccattttgcaagctcgttattacgggtagttcctacaaagaatcggactaatgacgtatacaatgcttgaattatcgacgtagatgctacatagtgggttctcatccttcagagactacgagtgtaataggagcatcccgtgacaaaaggatcaccctaagatgatcatctcat

SEQ ID NO: 70408 - DNA, 416 bp, Oryza sativa
agatcggatagattctgaaccgcaattgcaaaggtaatcactactatgccagcccaaatcatgatcttcaccaacttggatttggttctctcgcgaaaatcgcgagttgcagagatgagaaccatgaaaagcaagatcccgaataagaaaacagaaaccgaggataccacaagagcgaagactagtacaggctcgtcttttgtcattctttgctcctttgtcactcaatgattcattcgaatttcccgaccacaaattctatatgtctattcatagggcctcggtgctaagtgctacaagatctagtgcactggaacttcgggttatggacccgaatcctttagtatggaacattgtcttttccaagtaaaaacctccagtatatgaaagaatgaaaaggtgctctccgttctttt

SEQ ID NO: 70409 - DNA, 255 bp, Oryza sativa
  unsure (1)..(255): unsure at all n locations
tgtatttaacgatattaccgcggtatttatattaccgtacccacgcgtattgcagtaactgtgcggataccggcggttacataaaccctggttcggacatcttgaattcgttcatgctataaacanaatggtgatggaagccatacatttataaaacagagaaagtaatttattgccaaaacatttttccgtgccttgacataatttgtaaatacacaatgaaaataattttttgcagacctggaaggaaattac

SEQ ID NO: 70410 - DNA, 383 bp, Oryza sativa
  unsure (1)..(383): unsure at all n locations
aaagaaaggtggagcttgtcaaccaaatttaantatctttgtaagaatttantcaactctatctttgaaataatctgagtcaatcaacttcgaaaaacgattgctcctctaggtcggagaccaggaaaatcaaacagagatgaccaattaaccctttaaaatatctctacacttctcaatttggaaattgctatggaattccttgagtatatactgtaggttcctatactgtatttgggagaggacagaactcatagtcggaggaccaaactttcatgggcttttcctataaggcccattaactgcctccggaggaatttattntatttantaatttttttattaaaagttttacaaaaataaatttccatttttgaaaatga

SEQ ID NO: 70411 - DNA, 356 bp, Oryza sativa
  unsure (1)..(356): unsure at all n locations
gaaaaaaacatctgacagctttcaatgacttaacggcagctgaaactaacaggtttaatgggagtggtgcaaaaaggataaatgttgaaacttactggtatggaagaaaacatatatttctagtgctataagatattttatagaaagtatatgccttttatacgatacgtgcaatcatacattttaaactttgtccactgatgagcggagctatttttccnctgtgaaactgacacatatactttatgagaaatcccttcataatgtaaatctttatttattaaaaatgttaccagaaaaatttgatatgaatttttaagtattggatactatggtaaatgtctgaaatgcccaat

SEQ ID NO: 70412 - DNA, 263 bp, Oryza sativa
  unsure (1)..(263): unsure at all n locations
ctattggatcacctcttatcaatgttcaagggaacaagcttgccttctagagaaggatcccatgttctgacgaacgagacctctgcctggntntcatcctgatatatgattcggaactctgtcccttntattctgcgtaacaacgttcaatgtcagctacatctgggctctctctagcacaaaaagtgtattcatatggaggcacagaactgatgcctganatctgaggagttgaatgagaacccttacacatccaaatattg

SEQ ID NO: 70413 - DNA, 453 bp, Oryza sativa
  unsure (1)..(453): unsure at all n locations
tagctaagctagtgcgatcgagctgaatagtatagttgnngttgtatttgctgatgaatttnttagtggagaagcaaccctttcagcaacctaccaacacccctctatataaacgtacatgatccatcaagctggtgcgtctgctttaattttttgcaaatgccaactagtagcaaaatctctctcacctaccacgcnattgaaagggatctgaaactgaaatcagattgtacaacatgatctctctcacctacatgtacatgatctgttgcaaaatgtacacatgtgggtcatactaaacagtttgtcctgtgcaaatgattgagattttgtggaatggttatgtcgcaaacgtgcttttcccaaactttcagacatataaaccaatagacgctatgccaattggaatatcaaactcagtgtacctgtgtgtcttctggacttgaaacttct

SEQ ID NO: 70414 - DNA, 263 bp, Oryza sativa
  unsure (1)..(263): unsure at all n locations
cattggctcctgattnttcaagataaataattgctaattgaatgcccctattgacagcatgtgattggataataaactcttcatctttatcctgaactgatagcattggaaatatatagatgcttgtcaaatctgttaaatgtatgatatgacttgctaacctcctactctctctctctctctctctctctcgatattgacgtgatcacgacacagaaacacaggaactggttatcctcatataaatgtattagcaaaaagac

SEQ ID NO: 70415 - DNA, 439 bp, Oryza sativa
  unsure (1)..(439): unsure at all n locations
ccttaaaactcaagctgcaggcggacactttcttccctttcagaagttattaaatattttctgctacattntctggggtagtacccatggactctgcatcaaccaaacttctcaattccttgcttttgtactgtgatggttcatctttagcacacaccactttccctcggtctctcttaagtgacgttttcttagcaggatcaatttgcagttgacttgaagtggtaacaggttgatcattgcatttatcagatttagttttgcgtgaaaatccatcatcaagtgaactttccatcttagcatttcttactaaagttacttttaactntgctttgccctctggatgtttatcatcatttgctgaattagcagctttaacatcaatgattgacaatgaactctgagtactacctttccccttgaattgaccatntttcgc

SEQ ID NO: 70416 - DNA, 483 bp, Oryza sativa
  unsure (1)..(483): unsure at all n locations
agctcggacctcgggatcctcgatactctacactcgagcttgaagcatgcaatcttgcaatatatcttagcatatcccaaactgacagctgatctaaatattacaacaaaaaagcaacattaaagaactacaaagatctgtactctgtagtactagaggcaacaacaccaacaataaaagttatgacatgttttttatgaatctggtatatgtgacaaatgaaacagaatgtttgagcacaatgttgcaaagggaatcatgaaatgcccattgtgttaaacgttgaaacacacagaaagttaatagaagtagagaacacattttttcctccttttgcagaccacccaaagtcctgaatcacttttaagaaatactatgtgtaagcataatatttagagaaatgatnngtataccccgtcttggactgctgctttctgaacgaaccctagaccttggaactgtcntcatgattnttcctttatg

SEQ ID NO: 70417 - DNA, 472 bp, Oryza sativa
  unsure (1)..(472): unsure at all n locations
ctctgctatacggatcttctacctcacacaggcaaatagggtatgcattctctaatggaagttgaagcaggccattgtactttgtagaatttaccagctcagagatcatttcttccaccctttgcttggcttctttactgcctcgaacgtaaagngtatgttgtcgtaaatntaatcgaagctctactgcaggcacctctctcttcaatccttccagatcagccccgaacttttttaacatttccttcatcaagtttggaggtaggttacggccacgaagacgaatatccaaaggtttcttatcacggagttgtagaagggcatggatcaatttctcctctgctgcagcaacctgatcttggagtccaaagactntaatatttagactntgtctgtcatacagaatgtaagtgccagtctcttgctcaacagatttcaaatctgctacaccatcacgggacatgagcaactg

SEQ ID NO: 70418 - DNA, 310 bp, Oryza sativa
  unsure (1)..(310): unsure at all n locations
ttattctaaatacacctcacgcggaaaatgcacacatttgggtcttcaaggctgctatccaggatgctgntgcaacacttctcagagggattcccatcgtgcggaaactgacattgcatgtttgtttccaacaaaatagaggattgctcttggaaaatcgctgaattaatgctgccattttaatgtatctaccatcatctagctgatggcatatatttttttttctattttgtttacaggcaccatggctggtggataacccacacaactttttcaatcttatgcatttgcgttggtatgaacctaaaac

SEQ ID NO: 70419 - DNA, 458 bp, Oryza sativa
  unsure (1)..(458): unsure at all n locations
cgcttctgagganatgcgagatggtgatgattatgtctgattactctctgcgcgagaaactaaaggatatgcagcaaaggatcgatgtaattatatctttattttacaatgctaagaacattctcttgtgagcattcaattntaagcacttttaatgcaacttatatatataatggttcaactagcgcagaataagacaaaatgttnttgatttacaatctgcaatcatactgttggttacgccatgattccatgctttatttttggcacaacaggaaatatagtaagttatctgcttgtggtctttctggatgactgtgaacatattcttttttgttcttcattacgagcatttgctcggagaanattacttgcatgcattagtatgctagatgttcatcagacatgaataagtgaccatgttagtaacacttatatgtacatcccattatgtggac

SEQ ID NO: 70420 - DNA, 414 bp, Oryza sativa
  unsure (1)..(414): unsure at all n locations
tagcttgccatttgatgaagtggtacttctgtttcttggcagtgccttgccagtaaaacctccccctcggactattcattttcttatgaaaataccctggcaaataaaataaacccatatagtacaaaggaatgctggaaaggtaagagttgatcctaatttctctcccccaaaagaaaggtgaccactatgtcaggactcaagccttttctcagctttctacatcccaagagttaaatccctctttttcagtttatcagcccccatgatctcttcctcctcttgtcttgcctgtgttgccaaacactaaccacatttgataaaaaatgcttgggtgccacattatggtcctctgattagtgcctnctcttcgtcctaattagtcacccagataanatcagaagagactagtat

SEQ ID NO: 70421 - DNA, 477 bp, Oryza sativa
aacttgaaactaagcttgcatgcaccggcggcctgacgctgccgagatgagcatatgttgacgttagagatgcaaacaacttgatggtgatgattgaaatagcccagcatacagacatcatttgcgctgagtatgtatgactaaaatcgagagaagctcggcacaatcagaggacgcaataacaaactatcaatgactcgcaccgattcatgtcataagacattataactttaatcaaagtcaaactgtcttaagtgtgatcaagttcgttgaaaaaatagtcacatttttaaccgaagacaaatttattatgaaaatatattcaattattgatttgatgaaacttatttagtattataaatattactgtatttgactatcaactaaatcaaagttaaaacaaggttgatattgaccaaagatgaaacagtttatatacctgaatggtcggagtaataacaaataatagtatacgtt

SEQ ID NO: 70422 - DNA, 195 bp, Oryza sativa
  unsure (1)..(195): unsure at all n locations
cacataaactaagctcaacttgccgtgaataaattctgggggtttattgttctgnnggaaaaaaatcagaaaaaaagtgtgcctctctcctcagcactagagagagcaagcaacaanaaaaaaaaaaataaaagagtantcagcgagcacaccacaccaatccccctttggcaccaccttctaccaccggttctt

SEQ ID NO: 70423 - DNA, 459 bp, Oryza sativa
  unsure (1)..(459): unsure at all n locations
agcanggacttattcctatttaattctaaacatactcccttatatatgttgcactattatattggatttatatccatgaaagaataccaatattcaatttcgatccgttgacactcctaattaaataatttaaccgtgcatgtgtaaccaacaatcatgcacaaatatactattccagctagctcctctgataattggtgccccagaatacaagacacatatttgttaattcgacagactgaagatatgttcttgaaggtaaacgttcgagtatacaaatattttataccgtgtgcatgcattntatgtgtaaacgattgacttgacagctgcgagggtgtgacgtctaatatatatgaggtgaattgactattgcctacacactcaacaaccatatgatgacgagatgatgaccttgtgatgatctatgatgaagtttactcatgttcatgtaattgg

SEQ ID NO: 70424 - DNA, 246 bp, Oryza sativa
atattaggattaaaatatgtaattagctaaaaagaggatgtttcagaaaaataattggagacaatgagacaaacattattaaattcaactttcaggcattctcttttgttgggttatgaaactccaaaagtaatggcggcttagaggcagaatatatttcaacagatgagtatctgaacatagcaactttgggtcccatgctgcaagtcatgaaacaaagtaacttagtgatgctactatgaaaag

SEQ ID NO: 70425 - DNA, 460 bp, Oryza sativa
  unsure (1)..(460): unsure at all n locations
agcnttgcattatatatctatcctgaaattntagagaagagtaatatataaattgattnttgaacgtgttcattaaatagccaagaactatcatacccatccagaattccagatcaactgcaaaatagtacagaacaaaagttatacctgagacccatactgatcacagacgaccaaacggggtacaggaaaccgctccctgattatagtatcagcttcctcatgtggagatnnttaacaatgggcaaatacctgaatatcatgaaaggttcagcactggatggcaatgcactactgcactttaaatgcagcttagataanaatctgtgttagcccctaatatatgaagaaaggtatatcgataggaaggtgagatattacactaaagcagattataagatgtatttgataaataatctcactaaagcagactataagatgtagtattcgataaataatc

SEQ ID NO: 70426 - DNA, 317 bp, Oryza sativa
tagagaatgttactgtacatcacatgggttatcgggaactagtagctcaatagattcatctcatgaactaatccagggttatgaaatgcggttctgctatagtctacgtttaataccttctactagaggccaaacatccgatgtgacatgtactaaatatttttagcctcatctaaactcaccatatgatggactgtttgattgcctgacctagccaatagtccatgagatttttgttgatcgactgaacttgctaattgataaaaaaaggatcggttaagacatttacaatatcatggtatggggaccgatcttgc

SEQ ID NO: 70427 - DNA, 383 bp, Oryza sativa
catgtctttgcgctcccgacgctcgactagtctcagcttggccttctccagcttgaattgatgctgctcgagatagacagctggagttaggacatcggctagctcatctgggatcagagcttgaatctcatgtagccgagtcctaattgagccacaatcaaccactaagctgtctaacgatgatgcctctagccgatgagagatatcttcaagaattttcttcacatcatcggataagggggctaaagctttgcttgtggtatcctcttctccttcatcaagatagtctctaatgtcaaaagagaaaagatcggctaagacatgcaataatgatttaaagagaaagtagaggtcacatagacatatccgatctgggtattttg

SEQ ID NO: 70428 - DNA, 242 bp, Oryza sativa
  unsure (1)..(242): unsure at all n locations
ctcagcttcacacaccgccaaaaccaaactgaaccgtctatcncttcttttggcgggcctagttacatctggcagtttttcttggatatagactggccttaaaacaacacaaggtttttcttgacaatttgaacaatttggggtcacaacaagcattgcccactggtaaacaagccccccaaggccgggtcaattggatttggcagctttttaaaatggttctaggccaacaacgctaaacc

SEQ ID NO: 70429 - DNA, 445 bp, Oryza sativa
  unsure (1)..(445): unsure at all n locations
agctttcaattattgaattntggacatagcggagcgcattgtgtgcgttcgtggcanaaactcacttcgtgaatcgcgcgggtactttttgccattattaccaatattggcatattgtgagccccacgggtgcgatgtttttgaacggaatgataaagttcaaaacgcaccaaaacatgaatttcggacatattggagtgtattgggtgcgttcgtggcacaaactcacttcgtgaatcgcgcgggtacttttgtcattaatgccaatattggcatatattgagccccacgggtgcgattgttttgaccggaatgaaatagttcaacaagcgccacaacatgaattttagacttattggagtgtattgggtggcgtccgtggcanaaactcacttcgtgattcgcgcgggtacgtttgtcaataatgccaatatggatatattga

SEQ ID NO: 70430 - DNA, 467 bp, Oryza sativa
  unsure (1)..(467): unsure at all n locations
ggtttggtggcttttgaactttntcattccggtcaaaaatatcttacccgtggaggctcaatatatgccaatattggcattaaatgacaaaagtatgatgcgaacccgctatggtttgtggcccgatctttcgatgagaggtaagggataactcgattagatgaagtcgacgttcacggtccgactacaactgtccaaagacgctgcgccttagcaaccgatacacctgctccaatggtcgccgcgatattgctgtgcgcgtcaacccggccacgagggcactcgtnctgcaagcaatcgaagaacaagcaagaacaagtaggacaagcactgaaattgctagataaagatgaaagtttcactatcaaacacaatatggtggnggtccgattacaggcagacgggcggtttagccaacacgcgcgctgcgagccggtagcaagaagctaactctatcattcaaaacc

SEQ ID NO: 70431 - DNA, 468 bp, Oryza sativa
  unsure (1)..(468): unsure at all n locations
cggccggatggaggagaaagacagaggattgatgattgtgataggtctactggacccacgccaanaggaaattctccatgagcacgcatgcgaagcagcatcagcatcacttcgatctgcaggggcaaatcgcaccaccggctgtggcctgtcacaccaccaacttcccaatcccggccgttggaggccgatcgatcgacaaacgtggcagatcgatccccgcaagtgggcatcgcattcccaatccgtaaagccgggaggtcaggggttgcaagctgagggagtgaggggactgggactgggtaattaatgcgcgcacggacgcctcccttgctcgcgtcctccctatataggtatccacctacgtgtaaacaaaanatgtgcatatacttttaatagtattatacctacatgtaaataacctcacattcggtatattttatgaaaaacaaaacttattgctcgata

SEQ ID NO: 70432 - DNA, 439 bp, Oryza sativa
  unsure (1)..(439): unsure at all n locations
ttatcttcttcttatactctgnatgaaagccagataagtgatatcccccaagtgtctcaattagaaaacaattctttagtagatgaatttacggaaaatgaaattaaagatgcaatttctcaaatggaacataataaagctacgggtccagatggattttctgctaagttttatcaagtgttttggaatgttatcaaacctggtttggtagatttatttaaggattttcatagaagtctaaatctttaatcactcaactttggtactattattttacttcctaagtgcaaggaggctattaagattcaacaatatatgcctatttgcttacttaatgccaattttaaaatgtttactatagttgctacaaatacaacttctggagtagctcacaaagtattagtcctacataaataccatttatacctgcgagaaacat

SEQ ID NO: 70433 - DNA, 335 bp, Oryza sativa
  unsure (1)..(335): unsure at all n locations
aaatgatgtgaccatcaagaacaagnatcctttatcgcggtttgatgatctatctgaccagatgaaaggagcaggagttttctccaagaatgatcttaggtctgggtatcatcagctcagaatcagaacagaggatatcccgaagactgcattttctactagatatgggctctatgagtttacagttatgtcttttggattgacaaatgcccctgcttatttcatgaacatgatgaataaggtattcatggagtatttggataagtttgttgttgttttcattgacaacatactcatctactccaaggatgaaaaagagcatgacaatcatttaa

SEQ ID NO: 70434 - DNA, 358 bp, Oryza sativa
  unsure (1)..(358): unsure at all n locations
gttacctgcggcatgcagctgctctattttttgcgttccgggtggcgccgagaatgggcgatctattttctgaaaaccagactgccttcatncgtgggcgatcgatacacgaaaacttcatatttgtcagaggttttccgctgcaattccaccgaagaaagaagcctatgatccttcctgaacttgacatcactaaagcgttcgacacagtctcttggtgtttcttgcttaacttgctccgaaacagaggctttgggtccaagtggcgatcgtggatagcttgcctgctcttaacttctgaaaccccaatactgctcaatggccatgaaagtgacagcttctagccggcgcgaggact

SEQ ID NO: 70435 - DNA, 109 bp, Oryza sativa
  unsure (1)..(109): unsure at all n locations
aggctntgtcttgattattttccttacattatttcacttacggatacaaaagcatactcaaaatcctataatatcacttttcatgggcaaatggtaataataataaaat

SEQ ID NO: 70436 - DNA, 384 bp, Oryza sativa
  unsure (1)..(384): unsure at all n locations
accttgatactaagctttaccatgaatatcatggaacaagtgacactggcatgatcgtgctaccagtcttcaggtagaaacctccaccacctgtaatatggtntattcatttcaaaatttccacccgatcagggaaaaaaaggtatacctaatggagcccaattaacaccacattacttcaaacactcagaatagaaccggtttactggacaccatggaaaaaggcccacttttttttttccaaaaagatgtaaggaaacgaggagatagatataaaagtaactgagcacaactgtgaacttatgtgattactgataactctcacatggtgcacaacagaatatgaatcttaacacaaagtaaatgttatgtgtgtgcttttat

SEQ ID NO: 70437 - DNA, 363 bp, Oryza sativa
acaggagaagtattatgactattaatactcccggaaagcgagacgagagcggggagaaaaaaacacaaacaccagagaacaaacctggccggaaaggaaggaaccaacaaagtgaataaggacacacaatacacacggcgcaacaaacgcccacaaaaaaaaggaaaaaacggcgcgtaaacaccccaaagtgccaacaaaaaggcagaaaaccagaacaaaacaacccaacaggcaaaactcactgacgaaacctgccacccagcaaaagcacaacagcggtcccgagctgccagaaggaccaacaacaccaaaacaggaaaaacacactggcagaaccaaaagaaataaaaaaaaaaagca

SEQ ID NO: 70438 - DNA, 478 bp, Oryza sativa
  unsure (1)..(478): unsure at all n locations
gctcggcccggatcttaagtcacgcagctgcaagcttggtttatttttgaggncaanactacacattcagcatcacgacctgcagttccaggttcattatctactataactgggaagttggctctccttttcttttggcccctgggcatttttgttgtaattttggaacgtttatttcctcaccaatgtaaccaaatagcagtcctgctgtttcattcagaagattttttttttaaaaaaaaacagaggagcatcaagctgatgctcacaatggtggcaaactggagagcgaatttaagagatgaatgaatgaatgaattttccgaaaatagatttgtacgggataggaataagattaacattggcacatcagggagcgatcttaacacaatattgctactgtgcagctatggccaaaagacatgaaccaggtaatattgatgttaaccagggatcgaataaaaaaaagggcctgaac

SEQ ID NO: 70439 - DNA, 466 bp, Oryza sativa
  unsure (1)..(466): unsure at all n locations
tctctggatctgggaagtttctctcgtcacggatngagttcgntttatcgagttccttgatcgctacttatgggcgtgcgctcaaaggatacaaacagggattcgcaaacaaaaaggggaattcgtagtcactttttcctctcgcgtaaaaaaaaggctntacgcgagagcaatagaggttgggatacatctatctcttctgagcaacctcttttggattcttaagaccacccttgcagtaggataccgtctgctttgggttctttattatattatctccttcgagggattnttaggatcgttcaggctatatttagtctattttggcttttactgtctccttttctcagggaagtggttaaggacctcagaagatagaggagagcgccaggcgcagatttccggaatacttctacggngaatgctcattgaatggcattcttcgtattatgccttgaagaggact

SEQ ID NO: 70440 - DNA, 312 bp, Oryza sativa
  unsure (1)..(312): unsure at all n locations
agctttttcgnttttntatatgcagngaaagctaannncgacaagtgatggatatttgaaacggaacctatccgcgtttgcgaatgagcctgatgtccacatcaaaggagcattcaatagttggagatggaggcctttcaccgaaagaatgcacaagaatgaaatgagtggggattggtggtcttgcaaactgcacataccccaagaagcttatagaatagaacttgtgttcttcaatggtcggttaagctatgataccatgaaagacatgattctgtgctgcaagcacaaagacaatggatgaaaaattcc

SEQ ID NO: 70441 - DNA, 332 bp, Oryza sativa
  unsure (1)..(332): unsure at all n locations
ggattctgctgcccaatggcacttctcatcgatataaaatatttcacttgtctctgagacctttctgaagaacttgagtgcctgtctggaaacacacagatccaccttgctctcaggaagagccatcgatgcgtctgcttgccaatttggcatgttcagcagcaagtaaccttggcctctcaattcccttacttctggcgaggtatgcaaggcctgcgacaataaatgagcccaattggaataantagctgtagagcatttcacaactcanataattntgaaccatactaganagaagaatgaaataaagtctcggtactaactgcgtctac

SEQ ID NO: 70442 - DNA, 460 bp, Oryza sativa
  unsure (1)..(460): unsure at all n locations
ngaatgtcttcacacaagtgcccgagagacnntatttatgttgttttctncgctgacgaaanctgcctcacaaacatgttcatccaatcccaacgtatccttggtaaaggtgagggttggataacataaccaggaatttaaaaaggcacgagacacacatgcaacacgagccgcatctcgcattggcatcaggcaatgtatacggcgccagatgtcctgcacacaccatcatgggataaagtttggatattgtgattgtgataaactttgattgcgtgaaatagcagaacaaaaccatatggggtatcattctatctctaccccaggtattcactcatgattgcacaagtacactgcatgacatangcatattgagcattagaatgtaattgtggtgcctaaattaagcattcgatataattgtttcgctctaacagtgtaattccgtgaaatatatttt

SEQ ID NO: 70443 - DNA, 405 bp, Oryza sativa
ctccctcagaactgcatgcgggttcggcgcaacggcgacatcggcaacatcctccttaccaaaagaggtactctccttccgcgccttctcagctaccgaccagggcgaggacagccataggccacagtatgttgccgccggggaggatagcaacgaggcttcactcatcatcgctcctatcctgtgcggctggatgtctttgattaggatctggggattcagaaagatgtgtgcctatgtgagaaaggagggagatgagatggtgtatttgtcaatgtataaagcctgacgcggggggttattcataaaacgtgttgagtgggagctgggtaagtaacgcctaatctggaacgcacactttagatccagtggtccacaacgtaggtgtacggtttcactacatat

SEQ ID NO: 70444 - DNA, 461 bp, Oryza sativa
  unsure (1)..(461): unsure at all n locations
ntgatttttcagcttctcgntgctagntcattntcttatgtttaatagctaatatgggccctaaagtttcgctcctgngtcactttagtccttaatctttcatattatccaaacaagtcctttaaatatgtcacgtgggttgatataatccttggccccatcaaaatcgccacatcgacatgccatgtcaccctcctatacaaaatctatatgatttatctaatttaccctacatatataataagaaaataaaatacaaaaggaaaaagtaaaaaatatatatatagtatatgtaagagcaaaaatatatgtcaaaagggtgaaaaaaagggaaagnttttttttctatggttatatctaattcaccgntatatttatttttctatgatacgtaagggtaaattggacaattcaatcataactttgcataaatgattacatggcatatccatatgacaatg

SEQ ID NO: 70445 - DNA, 444 bp, Oryza sativa
  unsure (1)..(444): unsure at all n locations
atcttcacttattatatataggaactatgtcagncagtcacaaaagtaccgattntgaaacaatactgcagtcagatatgcgctctccatgctgatctccttcagatttcagtagccagaattgatctgttccccttcttctgatcggctgttgagctaccgatcatcntcctctaggagcaaaagcnattactcaccaacaatgagccgtccattaccggtgattaattccatttatttccctcttaagcctttntcagttcctctataaaccacactccgtcgttgtcaacttttaggactctgaattcatccncaatgctagcagggtgatcatcagcactggacaccaatggcggagcgccagagcctattggttagaccagagcaagccaagccgagcaggcgccactggctggagctgatggaattactttggtccga

SEQ ID NO: 70446 - DNA, 335 bp, Oryza sativa
  unsure (1)..(335): unsure at all n locations
tatgtaacacaaaagccttangttttgcaattcgtttcatgaaatcccaacatttgttgtaaatgttcacaaaccccaatacagcttattcattaatttgactatatattatctaaataatggtatatatttttactacaaaaatgtattgctttcacaaccgtgacattggattgatcatttatgtgcatattaaccaatattatgccattatcagtacatatgtaattttgtaagtgcaaattcaaaaaaaatgattaatagagatatgtgtatttgagtaaagattgtattaaacaatatggtaaatttgagatttatacttaagaaaatgt

SEQ ID NO: 70447 - DNA, 462 bp, Oryza sativa
  unsure (1)..(462): unsure at all n locations
tgtaacgagcctgcaagcatcattcgggcattacgtaagttatgttatcataataaagtctataaacagccaaagaagtgcctcacctttggctgccagcgctcatattgtgagtgcaatgttttcccaatagtttcagggctattggaggtgccataaaanatggatctgaagataaataaatgaaagagctatgagaaaaactcaaagcaactgtacaaacgcattangagtacaaagatgaatcaccatgtttattttagattagctttctcactctagaacaatcaacaaataataaattntattgatcaagtccctctcctccacaacttacaggtccagcatcttataacgcagacccggaagatttaatcctctacaaccaatcctcaagttttcacaaatcagagtttttaaatgcataaaatcaactgaacacagaaaaattaatacctcatt

SEQ ID NO: 70448 - DNA, 271 bp, Oryza sativa
  unsure (1)..(271): unsure at all n locations
taaagcagctacaagttcatactccagctcacagcttatgacccataggctgggaataatttttatcaatggtgtaaccaaacatctggcggcatgaccagaaccacgggttgatccgattttgtttgataattaaatcacaagtttatcttctgccattntaacctttctatctgcccactgggcaattgactttttgacagtttgacatcgatcattcgtgtgagatcatttctgtctccttgatcaagtaatggggctttctgatctc

SEQ ID NO: 70449 - DNA, 91 bp, Oryza sativa
  unsure (1)..(91): unsure at all n locations
ctcaagcttcgctagtggccagaatgcacatatgtgtagacgcttcacaatagtacttaaccggaaaggacgngtcgagcagaatcagcac

SEQ ID NO: 70450 - DNA, 325 bp, Oryza sativa
  unsure (1)..(325): unsure at all n locations
agcttgtataatgtgtccttttttaagaaacaattcttcatcagtatctgttggaaaacattntaaaacaaacttttcaactctaatattgaatttatttatttgtgctcttaaacaattgtcacaaactcaacttaatccatcattcatttgtatcaacactttaaacatgtccaaaggcaattttttttatgaatgtagtggaaaaagaatacgtgtcatatatatactcatttactcccattttaaattttttcataatgcaactctgatccataatttgacatgacctcaacagttacagttacagctgatagggcccata

SEQ ID NO: 70451 - DNA, 478 bp, Oryza sativa
  unsure (1)..(478): unsure at all n locations
ntattaagactcagtcaaataaaccaagatgatacatttcatctaattctatcctcggcctctgcataaaatgcacacagccaataaaaggacgaaacatacttggcttaaatattttaaactttggtatcctaacctagatatactttctccaataaagctaagagctacgtagtagaaccatatgagttnttctctgaatttagtttctcaatttgctcaaaacatctggcttcatatatatgtgtgataagagtagatgtcaggttagcattntatattttagagctaccaagatatgccatcctgctaatatgaacataacccttttctttcagggtttgtccactttgtcgtggtgatgtctgcagatccaatgcatcatgcattggaaaaaccacatgatcttctcttctgtgagaaaaatggagcttctgacattgtttctgatccaatcccaacagaaaatttgtaatac

SEQ ID NO: 70452 - DNA, 361 bp, Oryza sativa
agcttacctattatcttataatgcgtgatctaattacttaaggtagaagaatttttcttgagtaaaacgtatttttctaaagcatgaattaaatacttccgttcggtaatctaataaaaaaatctagaaaagtacaatgcccaagtcgaggaagaatgtaatggttggtggatcgtatgtatttaatatagtagccagcgtacaatactggtgcgaacggatgggctgaaagtacatacgtgcttctacctgggtgattgaaaactacatcacattcgctcgtgctgtcagcaactgaaaaggttgaaaactacgacttttgatacgaaatcgctatatgtttcacgagaagactcatttt

SEQ ID NO: 70453 - DNA, 71 bp, Oryza sativa
  unsure (1)..(71): unsure at all n locations
tctagaagctccggccggggaagccacctcgagcgacgcgctgngttgtcgtagctggagaggtgggacat

SEQ ID NO: 70454 - DNA, 465 bp, Oryza sativa
  unsure (1)..(465): unsure at all n locations
agcttctcttactgaaggggggggtgaaagatgagcanaatgatttctatcacagnactcagcaagccacaccggcagatgcatgattaatgcaagggggtacaaggggtaataatatatgggttaagttttgcagaaaacagcatttaaaagtcacttagttgcccaaagccattttataaagacgatcctagagttacacagtgttattaatcaaggccgtgaaccctcacgaacctgccttaacccaaggcctacgatgattcagaccgaactggcaacccgaccctgtgtcccagctcgtcccaagccaacccaggccaaccattccacattttagttgttaagcatgttttaagaaataaaacactaacttgggtacattgctaagcttgcccataaccgagggcgcggctattcgaataggttatactctgatcagaggtgtacatctttacccacaag

SEQ ID NO: 70455 - DNA, 341 bp, Oryza sativa
  unsure (1)..(341): unsure at all n locations
gctcggacccgggatccttaagtcacctgacgatgcangctttgatttttatntctgcacccaggaggctggattaccatagcacctgattagtatcactcaatacttcttcgttcagagtgatgataaccctcacaaaccttctaggctaatatacaatcgggtactcgcagggacgcctagctggctaggatgagaactaaaagagtaagaacacaaggccaacgagggcattgatcatacgtttcaattcatactagtcactatattttagatcaatccctgctctcacacataaaatggtaacacctaaagagaagggggaaacctagagataggct

SEQ ID NO: 70456 - DNA, 420 bp, Oryza sativa
gggagagtagccttaaagtatccagatcttcaagaatgtttttttgtttatttgtgatgagaagcagatacagtgcttcaattggttgatagacataacgaacattttcagtctcaacataagaatggtgcttttcacttccgaccagcttcggaaatgctgcaagcagcccatcgatccttatccgggacatgtcaacaaatggtctcgaaacaagagctgaaatcaaaaaatgacaaacttcttgtcataacaatataagtgtagacatatacagactacacaatgcataaattctaaagaccaaaacttgtgcatataaaagccattctagtggtgttacttggatagaattggtgtacttgcgtataagaacaggatgttaattgctattgttagcaaatagtattgccctttttt

SEQ ID NO: 70457 - DNA, 440 bp, Oryza sativa
  unsure (1)..(440): unsure at all n locations
agcttttacttcaattggcaatggcatttgcgtttgcaggcgtacagtgtgtccaaggtgcttttggagaaggccgcatgcaagttcgcggaggagaacaacatgagcctcgtcaccgtgttcccggtgttcaccttgggcgcagcgccagcgccggtggcgaggacgagcgtncncggcatcctctccttgctatccggtgagctagaagcaccagcaacagcaatcaaatcaacaagctagcttccacaaagggcctgtttggngggagcttctagctgctgcagtatattctagaattagaagttgctctaaacagttcagcttttgatttagattataagaagatataattgtaaatccacaaaatgaagctgggaacacaatttttcagattgtatcttaaacttcaacagactccagtctcacactctttgcac

SEQ ID NO: 70458 - DNA, 486 bp, Oryza sativa
  unsure (1)..(486): unsure at all n locations
tataatactcagctggatgccttcctttttggtatgttctgagttcctttcttatattttatgattagtgaattagtaaaaatatatactgaatgatggctgacgatacactntgttcatgttaatattgggagatgctacaagaaaaacagtgcttgattggccaaaccggttcaaaataattaaaggggtagcaagagggcttctttatctccaccaagattcaagattaacaattattcatagagatctcanagcaggcaatatcttgctggacgctgaaatgagtcccaaaatatcagatttcggcatggcacggatctttggtggaaaccagcaacaagcaaacaccacccgtgttgttgggacatagtaagtgatgcatgaattatctaatgcttaatgtgatcaaatttacatgtntactgattcaaacggtgcattcctcaccgcttaacanacagtgggtacatgtcttcctgaaat

SEQ ID NO: 70459 - DNA, 381 bp, Oryza sativa
  unsure (1)..(381): unsure at all n locations
agcttttattcatttcatagaaccaccacacctgcgaccaattatgcaaaagtcataaagaanaaagattgatcaatctctccattagagcaagtttaatagtatagccaactacaggctccaattcatctatagccaatctaatagctcattcatacaataggtacatactacactattaatatctggttccacctatcatacacacacttcgtcttggaatccgtgctacagctggctacaaatatatagcctgctgcccttctctctcctcatttatctgcttaagatatgtntgcagttggcttatagcctgctattgtacctgctcttactgcagcagcagctccgtcagttcctgaaggcaagacatgttcgctg

SEQ ID NO: 70460 - DNA, 463 bp, Oryza sativa
  unsure (1)..(463): unsure at all n locations
ctagaaacctacgcacaagaacgaagcactcttagtgttgtttgtgatggcagatcgccggcccggaagcgagcgggccagtggcgtacatgacgttatagtagtcatggtcagcccacccgttgtcttctntcggagcggcgcactcctcctgctagagtagtngatgcttgtagggttgttgcattttaaatccggcgaggcccgatactgcacatagcacgccttgcgcggatcgcccatgtagaagtcggagactttggtctcatcgagctccgcgaggaagtagccgttatcgttggagaacgctcgacggcacctcaccatgacatgattattggcgtcgtggcagatgacggacacctccgccttatgcagtggcttcgcgccttcgaggctgtgtgtgtttctttgagcgcaactctggcagtacaccataccctccacctttaacaagcagctt

SEQ ID NO: 70461 - DNA, 443 bp, Oryza sativa
  unsure (1)..(443): unsure at all n locations
agcttcttgataatctgtatattntcggctaacccatcactaactcttcgatatatttcttgctgaaagtatccctgatcccactgataacgagtaggcccaaacaattcaattggggtagttgctgacccataccacatagttccggcaactacgaaagctgcaaaaaaaacagcagcgatactactggaaagtacagtttcaatattgcccatacgtaatccttngtatagacgttgaggtggacggacactaagatggaataggcccgctaatatgcccaatgtacccgcagcaatatgatgagaagctattcctcccggaacaaaaggatcaaaaccttctgcacnccacgccgganttacagcttgtacttttccagttagtccataatgatcagacacncatatcccaggaccatacaaacnncttacatgaaatgc

SEQ ID NO: 70462 - DNA, 455 bp, Oryza sativa
  unsure (1)..(455): unsure at all n locations
nttcttacttagagccattgagccattatataccttattcattatgttatcttctacggntntatttctttcattcttgctcgagccggatgatgaaaaattctcatgtccggntcctttgggggctggatcttaaagaattcacctatcccaataacaaagaaacctgacttaaacgatcctgtattaagagcaaaattagctaaagggatgggacataattattacggtgaacccgcgtggcccaacgatcttttatatanttttccagtagtaattctaggtactattgcatgtaatgtaggtttagcggttctcgagccgtcaatgattggtgaaccggcggatcccgttgcaactcctctggaaatattacccgagtggtacttctttcccgtgtttcaaatactccgtacagtacctaataagttatggtgcgttctctttatgggttc

SEQ ID NO: 70463 - DNA, 446 bp, Oryza sativa
  unsure (1)..(446): unsure at all n locations
agcttgttctacattctaatcttgacaactgcatgcattgaagataaacaatatattagtatcataaatatgtgaagctgtctagcacattgtataaatacttacatcctctacgttagtccagtacctcccattaactctaaggaattcgcaagtgtaatacccacaaaggaccgttcctcgtggttgcttgtgacacttcaggacatatcataaaaaaatagttaaaatttgcaattagtgaaacaattggtatacattaagtgagtggagtattgccggccaatatgtacgtactagcagcttctcccttgttcgggtctgttctccacccttgaacttgtattactggtatacactgtatggatgtcgtatcgtttcacattaaggaggatanttatttataatacattcatattaaaatgcaagagtcataatcacttact

SEQ ID NO: 70464 - DNA, 454 bp, Oryza sativa
  unsure (1)..(454): unsure at all n locations
tcgcagaaccctcattgatggtggcagtgcacttcatattctcttcgccaagactttggatgatatgcagatccctcgctccgagttaaaaccaagcaatgcgccttttcatggagtaattccaggattatccgcaactccactcggccagatcactctcccggtcacttttggcactcgggaaaaccttcgcacagagaatactagctttgaagttgccgatttcgagacagcataccatgccatactcgcacccccggcgttagctaagttcatggccgtcccgcactacacatacatgatgatgaagatgcctggtccccgaggaggcctaaccctacggagcgacatcaagcaagctgtcacatgcgacaaggagagttgcgacatggcccaaacccgcgagatggcgtctgcccgagaggaaatccgactggctgaaccacngtgagcg

SEQ ID NO: 70465 - DNA, 173 bp, Oryza sativa
  unsure (1)..(173): unsure at all n locations
aactcgctcgctgacggagttctgagcgaggtggttccgacgtcgctaacctgctgtgggaaaaacaacccgagcctccctctcgctttcgctctctttcaccgaagcttgctgaganagaccacgctggccgatggaaattggtggcctaccggccaaccagaaaagaaatc

SEQ ID NO: 70466 - DNA, 452 bp, Oryza sativa
  unsure (1)..(452): unsure at all n locations
agctntggtgtttgttaatgagggagaggagagggccgtatctataggtggagagatgccttgtgaatgtggagatgctaagcatcctaagagcattttctctcttgtgttgacaagtggcctctctatgacggtgtccaccggtagaaacggtcacaaccgccaatggatgaggattgcaactgccaggtgaanaatgggcctggatggactagctggtggtttggccgaacccttgccggctctgctagcccagcccttcctcctagagactgatatgtgggccccattgtatattcttctgaagattgggtcanatgattgcatcttattgggtttatgggctcaagactccattagctnggatatgaaaggtatattctcatccttcatgtatatattctctcaactgtagtaactggtcacctgcatacaaatatataccaacactc

SEQ ID NO: 70467 - DNA, 132 bp, Oryza sativa
  unsure (1)..(132): unsure at all n locations
gcctngggtgnattgacagnnntaggcaaaagtgggtggccgatcctanatanatataacatatactagcttataattaaataaataattaaataattaccatggagtattggacaccaagtaatttttaat

SEQ ID NO: 70468 - DNA, 398 bp, Oryza sativa
  unsure (1)..(398): unsure at all n locations
agactgcattatacattatatttccgtgacttgctgagtacgaaagtactcacccttgctctatataaatatatatatatagttcctccgccctgaagagaagataaagtaaagtgaagattatggtttcgtcctggtttccagccgtcgcctgtggtgttgggtgttagtccgttggttccgctgctgctgctgctgttggtgtttcctcgtccgcgtcgtcggttgtaatctcgggctgtctgagctgcaacctaagttaaggtaaataagtcctctatttagtttaaggattgctatgattcatanttgtcaccgtgggtaccagcactatgtcctgngactggtaccgtgatcgcggtttcgtaggaagcggttcgcgccgttttcctacgaca

SEQ ID NO: 70469 - DNA, 329 bp, Oryza sativa
  unsure (1)..(329): unsure at all n locations
gacactatcataagcttctgcatatacagccgtgcaccagcacagaccgcaccccgatgggcctgctgtatgcccattccatcgaacaactccggggcgctctgacctcgcccccccgctatgccgctttctgacaaaattccgcgccctttttggtggcggcactgaaagagaggagccgaggtgagggggaggaggagaaaatgcggtgaggatggagggtgggtgtggccnaattttgcatttctagggattctgatgaagagctcgccgctttgcgatctttttgccggggaagcctagctcgtcatcttctcctacccggagcg

SEQ ID NO: 70470 - DNA, 429 bp, Oryza sativa
  unsure (1)..(429): unsure at all n locations
agtttgcttgtcttctacgccattcatgccgacgccatcctccatccggtggcctctccttgtttgttgcttgttgcccaccgttctccgctggtgttaagagggttgggggattggggcggcaggcangagagacgatgtcacgatcttgatagcctgaggggagagatgtgggtggagggctggcggtggcggcgcancgaggggagagatggcgggtggcggtggcgtggagagtggcggttggcagcggagagtggtggttggcggcttggcgccttggcgcggtcacgctcacgtggcggcgccgatgcccgatggcgaagggggttggcggcggcggngaccggcgtcnatgtgcacgatggggaacggcgctatggtgaatcangcaatcggcaaggggatgcactggtcattggtggaact

SEQ ID NO: 70471 - DNA, 454 bp, Oryza sativa
  unsure (1)..(454): unsure at all n locations
tgacaatgataggccttgtggtgtcgggttcctccctggttatgttgtcgntntgcttctcactttgcttgaggtacatgtatatatacaaagcttatatgcaaatactttatatgtctactattataaaaactagaaaaatactcgtgcgttgcaacaggtgaaggctattttaattttactagcaaggatgcccgtgcattggaatgggtaaaggtaattttaatcatgtatactggtgggaaaatatataaaggaatcataatcataataataataatattaatgaaataaaattgcagtgacctttggtcaaaaagatgaaaatatataattaatttaccattaacttcaatagctaacaataacttcattcgactgtcgaagagctattctctaattttagccattcttctaaagcttaaatagagcaaactaattatataaatgaaaa

SEQ ID NO: 70472 - DNA, 382 bp, Oryza sativa
agcttgcctgtatatgattggcacaaagacagagtaagcatttctcagtatacaatgacattaatgcacatgttgacaagagtcaattaaattgatactcctacttgtgaggcttatcccatatagttcactggctagaacgttgctgcaaatttcatgtccagtaccacaccaatcaatggctacatccaagtcatacccacgctagcttccaaatcttgcattgcgttgctgcggtgtcaaaatcaaacaatccaaagcgtaaactgacatccaatgcaaagtccaaaacaaacacaggtactaccaacaacatggaaatggaagcatacacatcgaactcggctacgctgtatatatatacatggacgttgaactcaac

SEQ ID NO: 70473 - DNA, 460 bp, Oryza sativa
  unsure (1)..(460): unsure at all n locations
ntaacacattnttatcagacttctgttgctcgattcttgttatgtggatggagncgctntgctcagagttctgtaggggaaatcagtaagacaaacagtcagataagatattctaacaaagatcatcgtaaccagactgtaaatgcggagctaacaggaagtgtaatatagatacatgacaagtatacagaaatcctgtcacccctagaaagattgtcatagctgttcctgaagatagaactctgaagaggaaatgcaaatgctaaacagtaacataaagcatagagagcaaagctgtggttacattcataccttnttcatctcactctccaattntcttctttctatgtcagtttgagcaacaaacttgcttagttgcttggatctcctctcgatggcattctctttatcatccaactgtttcctcagctgatcagtctcttcaaatattttctgtgaa

SEQ ID NO: 70474 - DNA, 343 bp, Oryza sativa
  unsure (1)..(343): unsure at all n locations
tgaatctcaaataattacgggtggaaatattttcaaacagcaaggttcgaatttgctgaaatctttggtttcagatctgctcaaatttcattgttttcaattaacatgtgtactactccctccgtcacttaatataaaggattttgatattttgcttgcactgttngacaattcgtctaattcacaaagttttggaattttatttgtgacttactttattatctaaagcacaacctttttgtttttatatttgcacaatttttttaaataagacgtgtgcataaacaggaccacacaatatcaaaatcccttgtattaanggatgganggagtaatattttgc

SEQ ID NO: 70475 - DNA, 383 bp, Oryza sativa
  unsure (1)..(383): unsure at all n locations
tcggaacacgcgtaatttctaagttttacacaatttattgatctaataagatcaacgcattacatttgctaatatttaagatatatcaattttattgtctatgtgtaaattaatatttaaaaatttaaaaccatctatgatttatatgtatacgtacanaagttcaaaatatgttcgtggatcttggagttgtgcaaaacatgacctatnntttttcacanaataaaatgaaatccgtgctccgtttcataaaaagatatttaactatttgtcagtcttataaatggttaattaagggtttgtcaccggatccatataaaanatcgtgagacgtaaattcttaattatcgcatctttaaagtggtagaaaaaagtaaatgcac

SEQ ID NO: 70476 - DNA, 447 bp, Oryza sativa
  unsure (1)..(447): unsure at all n locations
tcttggagtacctctgcccttctcaaactttattctttgttccacatnngcatgaacaaactgcacacagcatgcacaattcacgtagaggtaaatggatgatgaatcaatacctccataggcaagtatacaggacgagaatcactgccagactgtaggcagggccaagaagcatacttcagtctgtaattgtacctatcccagaagtactgaacaacagtcttccttgtcccattatcatcaacaggaaatctaacaacatcaaaccaggcatcagtttggagaaaaacaagttatgttcatgctatataacagtgaacaagcatgataacaaaatgcaggtcctaaaaaaggatgacaaagcactgctattcttaggacagtgtgcaatcatcctttacacatcaatttataacattgaaagacatttaacagcctttatagata

SEQ ID NO: 70477 - DNA, 439 bp, Oryza sativa
  unsure (1)..(439): unsure at all n locations
agcttgacttcatctctatttaatggccatcctgcctatttaattaaatagtactgtggtgccaaaaattaacttggtgtccacttacaagtaaatggaatgggggtccaagcattgcccccaacatgtgttgattttttggtatcatgtttaatatttctcaacaatctttggtatcataagcttgtctgcgaccaaccactaagaacacttgacaagaaaacaaaggatgttcatcttcatcaatctacacgttccaattatgaaaagaaccacttaggcctatagatcataacacataaagcatgtgaataaatattgtcaacaactaaactcaaccacatcagcatggccacctcctccatttacatcttatgtactatntgtcactagtctttgttactacactttgacttaagaatagttagatacatcacat

SEQ ID NO: 70478 - DNA, 467 bp, Oryza sativa
tattgcattagtatgtaggaagatgagtactattgtccatggtggactccattgggtctgtctcaactcaatcatatgtatgtccctcctatagttgtgttaactggctaactgctcgatgcccttcatgaaagaaagagaagatagatgtgaagaaaataattctttccataaaaatattttttttacgttttgagtagagacaatttgtttgtattgttaatcagtactgcttaagtttttatggcatagagaaaatattctcttttgaaatgagtgaggttgattattaagaaatgtatcgctaaatatccatacgaccgtgacaatcttttacggaagcccgcgcggttgcgcgggcatcttatttattgttctatgaaatagtgctaaaagaagccatatctcacatttctacgtcgtgagatagatcatagactttagtatacttcaatggataataattt

SEQ ID NO: 70479 - DNA, 112 bp, Oryza sativa
  unsure (1)..(112): unsure at all n locations
agatggtctcgaatgagcagacaaagctgnngcgataataactgcaccaacaggcaccaccgcagaaaaaaaggaacaaagggcccaccccactataaaaaggcaaaaagga

SEQ ID NO: 70480 - DNA, 264 bp, Oryza sativa
  unsure (1)..(264): unsure at all n locations
agctcaattacttatatatagntgacgaaaaaagctacctaactgtaatagtgcatcacaaatgtccttctgcaaatacccctcaaattccaatggaaagaattcgatgccaaagcacggtggaagtcatgtggcttccacccagatatttttccctctctatagcttagagatactggatgcttatcaaattagtgcagtcaacagaattgtaagtcacactcatggtatactcatgttttagcagatcaaatctacacaaaa

SEQ ID NO: 70481 - DNA, 357 bp, Oryza sativa
  unsure (1)..(357): unsure at all n locations
ntacagagatcaacagatcagagacaacagaatgagatgggttattctaactgactgccagagcaaaacaaagaactcagcatcactaacctcctaaacttttcattccaagcggctggtataaatcttccttccaaatctggacctgaagacttcatttgccactggcctcgccagctggtcttcccaacattaagcttcttttgtcttgcctccgatttctgcaagtaagccccagttntcaatcanatgacatgtaagatatatcagctcaattggatcattaggccaattttcttttatcacaacacactctgnttccggattccaaatagtccatacacagctgccacccca

SEQ ID NO: 70482 - DNA, 448 bp, Oryza sativa
  unsure (1)..(448): unsure at all n locations
agctttattttagattggtgggacgtttgatctatctttgtcatacaagacctgatatctcctatgctgttagtgttgtgagtagttatatgcatgatcctcgaactagtcacttggatgttgntcatatgattcttagatatctaaaagggactcctggaaaggggttgtggtttatgaagaatggacacctaaatgtggaaggatattgtgatgccgattgggcgagcggtatgaatgatagaaggtctacatcgggttattgtgtgtttgttggtggcaatcttgtttcttggcgaagcaagaaacaagcagtggtggctcggtctactgcagaagcagaatacatagctatggctttgggtttgagtgagatgctgtggatgaagaagttgttgtctgaacttcgagtgttaagaaatgataatgtgatgcttcattgtgacca

SEQ ID NO: 70483 - DNA, 472 bp, Oryza sativa
  unsure (1)..(472): unsure at all n locations
tactctgctctctgatgcttaaaaggtgcccaatgcttatttttatcttgtccatcaactgaccaacttttttgaaaacatcgacatagcttgaccttttgacagggtgcttctgtgacccctcttcctgcagttgatgagcataatacaagtacttctccattacatcctcaacaatgaaggccagcctcctcactgtggcaatccaactctcatctaatgggtcaccaaggttggctgtgcctatgtgattttggatgaaatcattggtgatatcgcaattgctcctgtatttgtttgatcttttccagcaattccttcacaaccttatcctttntagatagcttggacattgcgttgttgaatgaagctccagtctctacacaggtttcaatctttgacatcgcaagggctatcgcttcagacatcttgtgcactctttctcagtgtcgctgctagttaagtctggctc

SEQ ID NO: 70484 - DNA, 427 bp, Oryza sativa
  unsure (1)..(427): unsure at all n locations
agctttttatcgcacttttcctccacatcttggtgaccgagtacaggtacattcgcatgctggtgttcactcattgcttgttaagctcactcaagtagtagtttgtaactgatgtacatttctaactttgctgtttttatcttttgcccgatgaactctctgtttatatggaaggagattgaaggaggggaagtattgcgcatctcagagattatgtttccacaaggctatcacatccaactaattcctcgtacttaacatacctatcttatatattccaggaccgtaataaanaaaatgtgtgaatccaacactttgttgcacatcttattgcaactgtaatatcatcctgtatgtatgtgagtatgtcgtcagtttgcatgagtcaagaaatattatgggagtaaatattgcatgaactatggca

SEQ ID NO: 70485 - DNA, 427 bp, Oryza sativa
  unsure (1)..(427): unsure at all n locations
ntagcagctcgacggagtggtgatagataaccacttttggttatataagctntagcagcgatggaatatgtggagtagattggtcaagaggcgtgagttttttcttggcaactgcaaggtagttggcagactactattatccccttcctttgctcaatggcggatcaaaggaccttttgtagttgatgcaacgatagtgagatggtgtggcaatagtaatgcaggctagccccgcatctccttatagttctaagtgaggaagaaaagtttagggttagtcttctagtttttgtttccggttgttcgttggtttatgtttatcggttatgaaatttagaatgtcagcactcgtgtaatctttggctggtttatatccatntatggaaaatagaggccggatttctatccattatctaaaaaaactcag

SEQ ID NO: 70486 - DNA, 266 bp, Oryza sativa
  unsure (1)..(266): unsure at all n locations
taccatgcaaaactaacatataattttttgcaaagcaactgctatgttaaaaagattgcaacagttgatgaagagaagtattttacgtcatgtgatacgccagcaagcaaactactcatttaggtaccataacaactgaatactttgtgcataatcatcanaacaggactcagncacaagataattaatatggccagtataatagtaaaagtattgagagaactaacgatgttcttataggcagcacagttcaaaccataagacat

SEQ ID NO: 70487 - DNA, 415 bp, Oryza sativa
  unsure (1)..(415): unsure at all n locations
acagaggtgcatgatgcaaagaatgtaaaaagttgcaataaaacatgtggttatatgatttaaattaaaactttactttagtgttgatttccggagttttgatcgtagtctgttttgcagccttagcttccaaatgctagtagtaataaacatgtttatttataatttataatttgttatttttactttttggtggtttattcggcaaagcttaagtaatgagatattgctcgtgcaaattcgtatccccttcatccaaaagtaaataaactaagtacaggatatgatacatactactatgataaaagaaaaattaaaatacgaggttagtttattccaaggctgagagagtangacacactagattnttcataatttggtccttttgaaaaccttattctacanatatacctct

SEQ ID NO: 70488 - DNA, 201 bp, Oryza sativa
ttatagaaaagggatgtgggatgcgggcggaggcgggtagggatctgggctaaggggtgccattatgtgaaaaaacccctcaacttccatattttagagtccacgcctacttcacaggtttactgccctttgcatggaatatacgtgtttacgacaggcctaaacgtataaagtcaactcacagggacggttggtgaggga

SEQ ID NO: 70489 - DNA, 437 bp, Oryza sativa
  unsure (1)..(437): unsure at all n locations
agcttgacatcatctctatttaatggccatcctgcctatttaattagatagtactgtggtgccaaaaattagcttggtgtccacttacaagtaaatggaatgggggtccaagcattgcccccaacatgtgttgattttttggtatcatgtttaatatttctcaacattctttggtatcataagcttgtctgcaaccaaccactaagaacactggacaagaaaacaaaggatgttcatcttcatcaatttacacgtccaaattatgagatgacccactatgcctatagatcataacacataaagcaagtgaataaatattgtcaacaactaaactcaaccacatcagcatggccacctcctccatttacatcttatgtactatttgtcactagtcttttgtactacantttgacttaagatagttagatacatcacat

SEQ ID NO: 70490 - DNA, 469 bp, Oryza sativa
ctatagaatactaagcttattgcattagtatgtaggaaagtgagtactattgtcaatggtggactccattgggtctgtctcaactcaatcatatgtatgtcccttctatagttgtgttaactggctaactgctcgatgcccttcatgaaagaaagagaagatagatgttaagaaaataattcttcttctgtaaaatatttctttacgttttgagtagagacaatatgtttgtattgttaatcagtactgcttaagtttttatggcatagagaaaatattctcttttgaaatgagtgaggttgattattaagaaatgtatcgctaaatatacatacgaccgtgacaatcttttaaggaagcccgcgcggttgcgcgggcatcttatttattgttctatgaaatagtgctaaaagaagccatatctcacatttctacgtcgtgagatagatcattagacttagtatacttc

SEQ ID NO: 70491 - DNA, 244 bp, Oryza sativa
taaaggaggaaaggggggagggaagagaaaatgaaaaagaggaagagggtggggaaaaaaaaagatagggaagaacgaaggagaggaggaagggcaaggagaagcggaaaaaaagaaggaaggagaggggaaaaagaagggggaaaaagaagagaagagaaggaaggaaggaagaaaggagggaaaaagagaagaagagcagaaagaaaggaaagaaaagagagaaggaagggaaagagaaaaa

SEQ ID NO: 70492 - DNA, 97 bp, Oryza sativa
gaaccagctccactgagatgtgtgagccgagagaccaacccggttgattcatttctccggaccagagatggacccggcgggcatcgttcttgctctc

SEQ ID NO: 70493 - DNA, 347 bp, Oryza sativa
cattggtattgcaaataatcaatacactgattccctaactataattgcaggttatcaacatgcatgcagaagaatatataatcaagaaattgacatgtctggatcaaggagaggtgggggatcaaagaccggatagctgaatcagtgatcgatcgatgcctataccaagaaacacgcaaagattagacaatgatccgcgagctaattatgggttgccctgattgtatactgccttactgtcactaatgcaactcgccacctttcagtggttgctggaaaattgcagtatcacctcgttattgtgcatgcatatgttagcttgcgtggtctctattgtggatggatgg

SEQ ID NO: 70494 - DNA, 473 bp, Oryza sativa
  unsure (1)..(473): unsure at all n locations
gcttcggcgagctgctcacgcgagagctgtacacacggctgcaattgtgctcgttacgtccgngctgacgacatcgtcgacttactccctagcagcagtaacggtcgcacacccggcatcgacgtcgacgctcaactactacgcgacgttgttcgacggcctgcagcggagcacgactgagcacgacggcgccggcggagcgcgtgctgctcgggatggagatcccgcacgtggtggcatgctatggggcggagcgggtggagcggcatgagtgggcgtgacagtggtcagcgcggatgaaggcagccgggctggagcgggtggggctgtgctacngcggcgccatggaggcgaggaagctttgccgaccaaactttgccgacctcatacgtgctctggaatgccgncgtgcgtcattgccgtcagcgtgccccgcgatgcgccgtcaccgtcgtcgacaccgtccccgccgt

SEQ ID NO: 70495 - DNA, 443 bp, Oryza sativa
  unsure (1)..(443): unsure at all n locations
agctagctcttccctgctgcgtctccattgatgaacggacaaagtttagctgttacctagatggagcaagagccatcgactatactgtatgccataatgacattgcttgaaagatcaatcacagcagctctccgttcgatgggctggtgtatgtaacgggaagctcttggagattgaacattgtcagagagatgttaatgctgccattatgtttatcatcctcctctctgtctattgagtcatctgtctgatgatagttcatccctcgcatttcttttttgggcgaattccctgctcatgagtaccatcttagtcatgaactatgtatctactctgaacgcacatcatactcttgctctgctcaagtattgctatttaaacatcttctagtacatgaacaatggaaaactaatcctacttctatctncatctctgaagcatgc

SEQ ID NO: 70496 - DNA, 396 bp, Oryza sativa
  unsure (1)..(396): unsure at all n locations
agcttcctttcatttttctgcaaatgcacaaaaaagtctagaataattgacacatacttttntagcattacacctatctgtgacatgtatgttcaaatcattatatttgaatcgtaacgaacagacgaaattatgacatattgttaatcgtaaaactgtcaaaaattcactttttgttgtacagctcacatatagcgaatttgaatataagacgttgtagatttgtgtaatactattaagagtacatgtcatatattttctagaatcttccgtgatattcggctggtaatgcgcacgggaagctcgtgcggataggatatgttctccattaacatacagctcaaagttaaaatagtgtcacgttctcagaaacacgctaccattattattgttgcc

SEQ ID NO: 70497 - DNA, 472 bp, Oryza sativa
  unsure (1)..(472): unsure at all n locations
ctaagctggtcatgttaattctaggcactgatgcacaaaaactaattatattactaacatctagatgtgcagttctccattgcacttatacgttgagtcgagagacttacatcctctgcgttggtcatgtacctcccattaaccctgaggaattcgcatgtgtaataactgcagaggacaccgcttttaagttgcttgtgacacttcatgacatacacatagaaggaactagttaaatattgcaagtaaaacaattgatatacattaagtgtgtggagtattactgggcagtatgtatgcactagtggtttctcccttgtttgcagtagttctccacctttaccttgtagtagttatacacattgtatggatttacagattcgcattaaggaggagatctaattataattcatgaaagttagacatgcatntatcagatcacttactatttgaagaatgttagaacattgac

SEQ ID NO: 70498 - DNA, 422 bp, Oryza sativa
  unsure (1)..(422): unsure at all n locations
tatgcattcgggcacctataattaaaggggcatgcacatgtattatattagngnncactagaatgcatctttgnttttacgagaaacttaatgcattagttcactataaaatattagttaaatntatttttttaactagaatgcatcttagtatggctggaacagacagccttgtctaaaaaggtcatacccctttctggagcttgtcctcaacagcggtggcaccaagaagaagcaagtctcgctcgatgctctcagcagccgcctcaactttttcatctctgtcagcacttacagatgttctggcagtgttgaaattctcactanatttcatgtactcattctcatccaagaaacggtacgcaagaaccaaggttcttagacctgagtcagaatactcatttatgtgccttttnagctct

SEQ ID NO: 70499 - DNA, 321 bp, Oryza sativa
  unsure (1)..(321): unsure at all n locations
gggaaagaaaaatagaaagaggaanggaaaataaaaaaggagagaaaaaggaaaaggaaagggaaaggaaaaaggaaggaaaagaaaagagaagagggaaaagggaaaagaaaagaaaaaagaataaatgagaaaaaaaagaaaaaggaaaagagaaaagaaaaggaaggagaaaaaaagagaaagggaaagaaagagaaggagaaaaggaaagaaaaagaaaaggaaaaaggaaaaataagagaagaaaggaagagaaaaagaggagaaagaaaaagaaagaaaagaaagaagaagaaaagaaaaaaaaaaggaaaaaaa

SEQ ID NO: 70500 - DNA, 139 bp, Oryza sativa
aaaaaaagaaaaagaaagaaggaaaaaaaaaaaaagaaaaaaaaaaaaaagaaaagagaaaaaaaaaaaaaacaaaaaaaaaacaaagaagaaaaaggagaaaaaaaaaaaaaaggaaaaaaaaaaaaaagaagaaaaa

SEQ ID NO: 70501 - DNA, 440 bp, Oryza sativa
  unsure (1)..(440): unsure at all n locations
agcttgggttcaatgccgcgaccttagngataattccttcaaatcatgttgaaccccaagctctntctctccttcacatggttgcccctaatccgcatctttagcgctagccatggtggccgataagctcgatctctactttcacgagggccacttataaagaaatagaagctggtataatgtgcaatttattctttggaaagataggaatagaaaaggaacaatatngaaatatatgtgctcgcaaatcccanaggaatctaaaaacatagatgcaatccaaatgaattcggctatccttaatgctatcnttcaaacaaccttgataattagaaaanaagaaaaaagtacaaatacgtcccgactatgacgacatatgaatacccctgaccacaaatacacatttatatctgaatatctatctggacgaaaaccccctc

SEQ ID NO: 70502 - DNA, 361 bp, Oryza sativa
  unsure (1)..(361): unsure at all n locations
ggagggtcggcacatcataacgtaagtgaaagaagatggacgttctattgccccggccgaagccgccaagaactatgtacgtcacagcggntgcgttgtgcgggataacgtgactgtcaatacggtgtactggcgaagaacaagggcacgcggagatcatgagagctttgtcccagattcggagaaagagatgctgtggaccacaatgctcgagacattcacccttcccacgggtacagaggacaaagtgaaaaggtggactctgaagaaaatggcagaatagtctcagagctttaagggagagctgtacaagaaatatattcttgaatgggcagacatccgactttaacacattcccata

SEQ ID NO: 70503 - DNA, 439 bp, Oryza sativa
agcttgtgcttcttgtattgccacgcgtattgaggaaacccaaacttccatggaacattggagcaaatgccccttgttcgtccacggtgttcttcatttcccaatgctttcgtgaggatgtcatcctcgcgttttggtgagcagacctcttgagaggcctgtctctcagcattcagttcgacctggggtacaattaggacgcgttatacgaagaacaagatatagcataatgaaacttattctatgtgttcaacttacgattttctggtacaccgcttgatcttcgggatttgggaacgaaagagttccgtctctattctttttcacccttgcccttgcccaattccttgctcgctggaccgggatatcaccaagcactggctgtgtgttagattccgctgcagcttcatcctccttgtcccattctgcctcgtttcct

SEQ ID NO: 70504 - DNA, 461 bp, Oryza sativa
  unsure (1)..(461): unsure at all n locations
tcggcgagtntcagcataaactacaaaaccaaactgttttattatctcaacggagcgcgtcgtgagctcaatgcactagtggaaatcaacttttcttttttttttcttttatttttttatattttttcttttttcagaacatgaaaataggcacacctccaagttacagctcaatcggagtagatatgtggcatatggatttttctgaaaccactataaacaaggtgcaggaacttgtgagctcgaacagacaattttgcaagccaaattttggaattttggattcgccaaacccaccgaagggttatcttcggtcaattcccattgactcggaaagaatttggacgtagaccaaaaccattcgaaatgttatcttcttagctttccatacatataaagaacgccccaatccgagcacgtatgcgacctangcgcccgttttagtgcagactggtcctgga

SEQ ID NO: 70505 - DNA, 459 bp, Oryza sativa
  unsure (1)..(459): unsure at all n locations
tattaccgccatagatcaaaaggttcgtggacactatttatatctataatggatggngtgtatctgattgtactgctgaagcacttaaggtaaatgtatattagttgttacattatntttctttagaaatttgagaaactttatttcctaatgaaaaatagaatatattatggaagtaaaactctttgattttttggtaaaaaaatatagttgtgccattctaattgcttcggggaaatattgattttgttatcttatgcctctagaagtgttgtacagatcaaaacaccaccctacgttcaaatagttaggtggctntgttttgtgttaattggatgactgagcggtctaaacgagccagttactaagaccaggccttcatagatgggcgagataggttagcaaaacatatagatcacttggttacaaacaagcccttctagattaacccttttacac

SEQ ID NO: 70506 - DNA, 367 bp, Oryza sativa
  unsure (1)..(367): unsure at all n locations
cccaagatgaagtggaagctngggccaaacanaaaaggagccacatgggcgttttataccatcttaatagtgaacactccaaataagctaaagcaggcttcattattaccaaacataccatgattatgtcagcctaatatcctagaatgaataaaatttagacatactaaattttttcttctaaaaaaatgatgttccatggaacataactgttattctaatggactgcataaatttaggggacatcatgtaaatctaggacaggcanatggatgtagacgtgagtgttgatagaaacccagacaacccatataatgagaaaagaacaatgcttacatggaagaaccctcccaacacatgtatatca

SEQ ID NO: 70507 - DNA, 438 bp, Oryza sativa
  unsure (1)..(438): unsure at all n locations
tttcttcagtttcgtcgcccttagctntatcgtcttcttagtctgtttgcgtgctagtttttggtgtttaggtttgtcgcttgtgggttagtcggcggtcgatatcatgtgtgagtggtatgacagcctttattatgagttgtgtgcctctttttcagtgttttaatcaagattaagataatggcacttaatttcataagaaagattagtttccgagccatctgttttcttcctttctcttatttctacctatccgctccagatggtgaagacaaggaatgatccccgtgactccagcgacgccagtggcagcgaagagcagaccgatggagctcatgtcagtagtgcatctggcagcagaccatctncaccgcccgaaaacccaacagtcactcaaatgatgacaatgatgatgcaacagatgcagcaacattacca

SEQ ID NO: 70508 - DNA, 210 bp, Oryza sativa
  unsure (1)..(210): unsure at all n locations
tgctcnttgtgtttgctggctgacatgaattgtcgttggtgcataggatngcggtatttccgcatctgttgatggaatgaagatgttaacccaatcatcctatttggcaaattactggatttggccattcaacattacttaaagaagaatgggggtggacctaaataccttatatttatggtaccctctttgattctttttgaaaatccc

SEQ ID NO: 70509 - DNA, 360 bp, Oryza sativa
  unsure (1)..(360): unsure at all n locations
atactgctccaccacacgtgtctatatcgcttncttccattccatcacctcgcattcattcccattagggaacttgaggggctccatctggcaactttcaccttggatatatttgcatccttgcttttcccagctcctcttcccctttccccttcttagagctgattctctcgattgattacctagtactactgcaattcacattgtcagctcttgcttgtcccaggtgcgtcctctatctgtgttcaatcttgttcttggcctgcagaatctatacaagctatgacagtgtgttgtatctaattcatcttttcttggagcaggaggatcagtctcttgctgagcaatggatcctgagtt

SEQ ID NO: 70510 - DNA, 221 bp, Oryza sativa
  unsure (1)..(221): unsure at all n locations
atgaaataaccctataaagtgcatctttggagtaccgtcanggaaagtgcttggctttatgggatcccataagggcatacanggcgaaccccgaagaaaatcaacgccatcctcaacatgaaaccgccgagttcctagaaagatgttcaaaagttaactggatgcatgtggtgctcagccagntcgtctagcgactccgcgagtgggggatgccctttttc

SEQ ID NO: 70511 - DNA, 483 bp, Oryza sativa
  unsure (1)..(483): unsure at all n locations
ctcaagctggagcctggtcttggcaatccgcgcatttgtgtgcgnctttctcgtatttgtttacttcaangaccctaaggatgatacttctcttcttcatgtagcacttgtattggttgatgagacggtaagataattactgctatacacacacttctatacagtaaaatatatcttactaaaccggcactgaattagtatggatattaattacaggaaggcagcattgcagctcagatattcccactagatgataaactctntaagcccctgttgtcggaaggaaagatttactacctgacacactatattgtgaggaattgtagcagatcctacaagccagtgagcaactctcttgctattgcattcacaagatggactgttgttgaggagtatgtgaatgcacccaccagctntccattctacacctactccctgaaatctttcaaccagctcagtgcgcttcttgacagcaaaagattc

SEQ ID NO: 70512 - DNA, 374 bp, Oryza sativa
  unsure (1)..(374): unsure at all n locations
agcttcgttctctattcatacctttgatgcccaatgtctttctgcttgctggcaaatatccctgatatctcttcctgacatcctgcatccaatatccataattagcaagacaaatgaactgcatgtgcccagggcagtctatctgtagttcagatttcagaacagaacacatttctagccacgcggatcaccaatgatgttcccagatattacagtagtatagtgatggtcagcactgagcacatgtaacctatctgagtcatggtcacaaatgcctatatatgttttctggtatgatccataatatacacgcacatgaatccatgactaanaaggtacgagcacttgacactcagtgattaatggtgaaataa

SEQ ID NO: 70513 - DNA, 476 bp, Oryza sativa
  unsure (1)..(476): unsure at all n locations
ctcaagcctatgctctaatggatcanaagttgcaacaagcattgctggatcatgaccattntgaaaataccattaagaatctaaaggtgcgtacattaattttctgttaagtatagtagtctcccatagtgaagttttaacaataatcttgtttttgcagtcagagttaaaaaggcgggaacgtgatcatagtattgctcagaaagaaatagatgatctgcaaaaacaagtgagtctttaagcatgacatctgcattttgttctttttgattgattcacagattaaattgtctatgtaaggaaaatagaaatgttaacctcttgcctactctctagatatttaagatctggtgcaacttgatgtgatactagttctcaccaacatcttttcaaggatgctattctaaaaggggtggagtccanttttggcacctaaatatttcttggactctaaatttacgctgaactaaaagatc

SEQ ID NO: 70514 - DNA, 87 bp, Oryza sativa
  unsure (1)..(87): unsure at all n locations
agctggctgttatctttgcttatggaatttcatactctcaacacgtacagatagatgtcgaacagtggntgggatctctttcaaccc

SEQ ID NO: 70515 - DNA, 422 bp, Oryza sativa
agcaaaaaccacatgtgccttgttagctaatgtaaaatacagatcaatcaccgaggtggatgttattattctcccgacttcatgagcacgattagaaatgctatgtgatcagatgggtaataattattataggaaaaatggagcatttgcatgcagttagcaaataccacagctagtacacttgttagaaacttaataccaaggcaacaccttctctgcatgcagatgaaccgccaataaaaaacaatcagtttgcagaccgaaacaaaacatcaaaaacctttcgagtacatgggatgcaatcacttctcaagttttcatctaaactctgaagttttcacctaaattctgaattatacagtttaatacattggacattccactgtgttgtctaatttgaactgaagaaatagcattacaaa

SEQ ID NO: 70516 - DNA, 209 bp, Oryza sativa
aaaaaagaaaaaaggaaaaaaaagaaagaaaaaagagaaagagaaaaaaggaaagagaaaaaaagaagaaagaaaggaaaagaaaaaaaagagagagaaaagaaagaaaaaaaaaaaaaaaaaaagaaagaaaagggggaaaaagaaaaaaggaaaaaaaaaaaaaaagaaaaaaagaaaaagaaaaaaaaaaaggaaaaagaaaaaaa

SEQ ID NO: 70517 - DNA, 438 bp, Oryza sativa
  unsure (1)..(438): unsure at all n locations
taaaactaagccttgggcacaagaccttcatggtttcatggatactgttccnatttatttacgatgacaaaaactcnaaacgcgcgcgttgtatcttacaggctctttgctgttgcgatgaccgtctccgcggtgatgtcatactcctggaagatcttttcagcaggagcacttgcaccgaacttgtcgatgccaatagccttgcctttgcttccgacgtacttctggcatccaagagtagaccctgcttcaaggctgactcttgcagcaacagcctcagggagaacactctccttgtactcagccgactgttcatcgaaaagctcccagcaaacaaatgacacgacacggacagtctttcccttcttcctcaactcatcagcagccttggcgacaatctctagttcagagccagtgctcatcacaatgaagccaggc

SEQ ID NO: 70518 - DNA, 327 bp, Oryza sativa
gacccaaagcgaccgagcagcacttgggtgcaagaggacaaacccagggggcgggcgcccagcccctccagcggaaacgcggccagcgacaagaacggccacacaaccctgcgcgccaggcgaaccaacaaaggcgacagggaaaacaaaacggcaccaccgcaaaaacccaccagcgacgaccagcgcaaagcacaaaaagccaaaaaaacgccgccgcaaaacgagaccgaggaaagaacatcagcacagaagcaccaaaagagagaaccgaagcccgcacacacccgcccagcgaacacacccacggaaaagggcaaagggacc

SEQ ID NO: 70519 - DNA, 239 bp, Oryza sativa
  unsure (1)..(239): unsure at all n locations
ctaatgacttgtgtcttttcgggtgccctagataagctacgtcaatgagctagatcgaacgaaggctatgtaggaggaaaaggatattgacatggtgttaaatgaatatatttaaacttcaattntctaataatgtatgaaaagagtaaacataatatgtgaaaatatatttatgataaatttagtaacatccttcttccatatcagtattttttacaatagagagtgaagtaattttc

SEQ ID NO: 70520 - DNA, 480 bp, Oryza sativa
  unsure (1)..(480): unsure at all n locations
acctataaaactcagctgatcagttcttgtgccaggaattttacaatgttgtctgggttannataaatttcctgttggttttcctacgagaacagtgctaactgctatggaaaatattccttcacgtatcctgtaaccattttgaatcatctgaatggtaggaaacgaanagttccctatcaacagtatttctatgaaaatcctttgagaatccctcaatccgaacaaccccttagggtttcatggtggaccttcaaaccgctcccgttattgtccttacatattgctatttaattaacttagagatgggaatcgaaataatataagtaaaactcttcatggtaataaaataaatctcttgtacagaagtcatacatctagaagatccattntacaatgcgttacaaaattatggacaagtcgtatagcttatattatatgcttcatgggtatatatatatatatatatatatactatat

SEQ ID NO: 70521 - DNA, 421 bp, Oryza sativa
gaaacgacgaccggtggaggcggatgcgatgacgcaaagccaccgagacagggaagacagcggggcgagggcactcgccaccgccggtttatggaagaaggccggcaccattgaccccttctggccagctgacgaggccgagtggcggtagcgtgagaggacgttgagagaaggagtaaaaaggaaggggccggcttcacggttttggttgcctagcacgaatcttaaaataatcgaatggtatagaatttacaagaatttgaggcacgtctttcaatcaaatgttgcgaacacaatcccatagaaaatgcccgagaaattagcgaccaaaggttctacacgttctattgatcctagagcttgagcaccattgggagcccgcacttgggctgaagcgtcacaagtcgagcggcgcgtgcac

SEQ ID NO: 70522 - DNA, 447 bp, Oryza sativa
  unsure (1)..(447): unsure at all n locations
cggacctagcaaactcagcttcataataggtatatctgtatgcagaaactttgtttttnttctacnttcgacaaagagcgcatgtagaaattagtttttttttcttttcagatcctccagaaatacctgtaagacattaggtatataactcactatagagatgtttgtcttataattaacactactatgatataacactaccacttaatactaagtagtagtagtaaaagatcttgaaggaaataccgctgacttgattaatgcggaattgacaaactgatttggtccagttggaacaggatcgagttgtgattttggcaggaactgaagtgacaaaaccatcgtgtttggaatgctcataggaatggaaacaaactccaggccggaattgatggccatccagagaatgcgagaaagccctcagcgagctgggcagagccgatttgt

SEQ ID NO: 70523 - DNA, 459 bp, Oryza sativa
  unsure (1)..(459): unsure at all n locations
cttctgcaacttagtatgacaggactcgagttatgtttctgcatgaacagntccatcgtatgcaatgttcaagctgattgttacctagctactgttgggccctgatgctgcttgggcatgctccaataaagggagtcagtatggggattacagggtactagttaaaaatgagtatgtctaccaatctccatgtcttcgaattatgtccatatatttccaaatctgttgcatatttccaaatctggtgctcgatctggcatagtatttcagagccaagttatacgctaatttgtattttgaaggccttatggcatcttcaatgttgacaatagaaggaagcccgactaaggtagatctcttaacttacggacctacatgattaaaaaaatgacacctacctttctctcatacatgtcgctcactctcttcacagttttaatgaaaacataaaaattggag

SEQ ID NO: 70524 - DNA, 344 bp, Oryza sativa
  unsure (1)..(344): unsure at all n locations
taatcctcttcgatcaatacatatntcggccctctcgaagcttcatatagtgcgaactgagcttggctattcgttgctgcactacgtcaacgtacggagaaacttccaagatgcagcatatgcaacatcgatcacgcggtggtcaagcattcaacgatcgggtcacatgcattatatatgcatatgcaagcatgctgcacgctatctgaatcgtcaagcgtaccgttgctttactctgctactgagacgacatgtgcgttcatgtatatatatacaaactaagttaaaggctgaccatggtcgatagcgggcaagataatggctcgattcggcggcacgccatg

SEQ ID NO: 70525 - DNA, 170 bp, Oryza sativa
  unsure (1)..(170): unsure at all n locations
tctcgttntccattcttctataatataanaagttaaagggcatctctatcgatctgcagattcattccagctgatccattcgtgaatacaaaatttccagaacaactgctntgctctgtatgaatgccttgctcgcattgtgnttctctattcagagatttcagaagtct

SEQ ID NO: 70526 - DNA, 359 bp, Oryza sativa
  unsure (1)..(359): unsure at all n locations
tggtccttgagaatacgtgtatattacaacacgctctcttcctgactctgatccaacctttacagatgaagctggtgctcgatgatatggcattctggcagtgatctttcaggtatgaagaccacactcttattatatcaaatcgtcctgagccaaagcatcagcccaatcagattatgaaatagaagccttggcaatactatacgtcttcaagaagcggacacactatgagctanggggataagtagggactatatcctatcagcagagtcgtacgaccatgatgatgcacccgttggatgaacgaatactcactatctgtcattgaactactgtatacgattacactatatctacaa

SEQ ID NO: 70527 - DNA, 423 bp, Oryza sativa
atcatgttcacatgtagaccattggagctcttgcatatggatttgtttggcccaacaacctataagagcattgcgggtaatagtcattggcctgtgattgctgaagattattctcactatacttgtgtattctctttgcatgaaaagtctattgttgccgaacttttcaaaaagtttgcaaaaagggcccaaaacgaatttagttgcactcttgtgaaaattagaagagacaatggttccgaaattaagaattccaatatcgacgactattgtgatgatcttggtatcaaacacgagcattccgctacctactcacctcaacataatggtgaatggacaggaataacgtacattgattgagagtcaaggactatgctagataatatggagtttccgatcctttaggcggaaccataacatcgc

SEQ ID NO: 70528 - DNA, 422 bp, Oryza sativa
  unsure (1)..(422): unsure at all n locations
ctgcanaagaagaaggtgacttanaggtggcggttggccatatgggtcggaggaagtcagcagggagtatctactcagcaagaaaggcagaagactcatattggtgtgatattataatcagtgattttgatgatggagacacatcaagtgactatgagggccgcaaaatgaagcggctgtctcagaacaggagttttaataagaagatgaagcaggaggttgcacctcaagatgaggcctctgctgattcacctgctgtgaaacaggcagatggaccggcagctctgatcttacattntagtaatgcagaagccatcccttctgtggatgacatcaatagtatattccgtatgcacgggccaatcatggagggtgcgactgagatcaacaagaaatcaaagatcgcaagagtagtggtttct

SEQ ID NO: 70529 - DNA, 222 bp, Oryza sativa
  unsure (1)..(222): unsure at all n locations
tcacananaccgaatgccacataagcagaagagagagtttcgtgtcttacccgaagcacactcaccagcacggtgtggccgatgaggctgtcgagcacagccgacttgccggcgccctgcacggaacaacaacaagccggatcgagtcatatcgggcggaggagagaaggggagctgccccgggcggctgcggcggctgctcccggggaagctaaacactta

SEQ ID NO: 70530 - DNA, 200 bp, Oryza sativa
  unsure (1)..(200): unsure at all n locations
gggatgggctngcccaccacctctgcctctctcatattgttgtctgctagcttgagctaggacaggctcgctggtcgccttcctcttcctcttcctgactcttccgccttcgcttaccttgcatagaggcgccgtgagctcgagcacggataggctcacccattggcttcctcaccggcacccctaaacaagctacgcgg

SEQ ID NO: 70531 - DNA, 462 bp, Oryza sativa
tactcagcttattgcactcttacgagctaaagagcaattgtttattcgacaccttcacgaacatacaagaaacaattagccttaccattgaatgatagctggggaagatcttccttgtcggaaacaagagtaacagttgtcttgcaatgcagttggtctccaacatgagtagatactttagcgtactttggtggaacctcatatccaagatcatacgtcatacgacaaagctcacttgtaaaaccatagttcccatatttctcagcttcctttagaataatgccttgctttccagagcttctcttttctcattaatctgattaatctttttgggcagatcagcccatatgtcatcatagcgtgccatcatattttccaacctctccttgtacggattcctctaaaacaagttgaaagacgaggaaaggaggatgagaaaagcttttgctaagagcaatggga

SEQ ID NO: 70532 - DNA, 344 bp, Oryza sativa
  unsure (1)..(344): unsure at all n locations
tcgagctacttaaagagtatgttgattgctttgcatgggaatatcatgagatgccaggtcttagccgtgagctcgttgagcatcggcttccaattaaaccaagttttaggccttatgagcaaccacctcgacgctgtaatcctttgctatatgaccgagtcaaagaggagactcgatcggtgttgaacgcatggtttattacgccatgtcgctatgtggagtgggtctctagcagagtcctattggataagaacgggagtggtaagagtggagctcgcatatatcttagagatctaaatacagctacttccaaagatgagtatnctatgcctatagccgacatg

SEQ ID NO: 70533 - DNA, 254 bp, Oryza sativa
  unsure (1)..(254): unsure at all n locations
tacanaagagaagagaanagctactagagccatactctaactcttccgaagacttccggactggtgatttctattctattcctattccaccagctagatactactaaactaaacttgagagaaatgagagagctcttgcttaaggtgtgtgagtcaagtgagaaagtgaggggcttatatagcctcccaatgaccgtgtgaacggtggaatggtcggaaattaccctcaaccgtcattgagagctaatccacat

SEQ ID NO: 70534 - DNA, 204 bp, Oryza sativa
aaagactctttccaagaaacacacaaaagccagagggttttagtggctctgaatatggtggagatgcttccctggatgcttcagcaatgaaccaaacatcaaaaagcaaatccattctaccatcattgaagaaacagatccttgcatttccggataaggttagctattactgagaatttgaagtgaatatttgttactatctgc

SEQ ID NO: 70535 - DNA, 330 bp, Oryza sativa
catccgtctggaactactgacgtttgctcgaatgcggtggcgagatactgccctgttagtgcagtgttctggctactatcaatgactcgctgagatcatgacagctgtctcacacattctcgtatagagaggctgaggaccactaggcttgtgacgttgaccctgcctgctggtactgaggacctactgtagacgtggactctgtacaatttgcgtaacaatgtctgagctccagggggatccgctcttcaggtctactgccgtgctgatcccaccttcactcattctcaaggtatggatactgagcgagtacttcatatgaaacggaac

SEQ ID NO: 70536 - DNA, 363 bp, Oryza sativa
  unsure (1)..(363): unsure at all n locations
ctcagcttttggcccaaataaaaaacaacctctgtatgtttttaatatgcgggtcatgaaatgctgaaattggctggtcaagcacatggattggtttgaacattcctttttaatgttagcctttagaactagtgggtttcatttgcgagaagattaaagtagcagaatggagatacacctttcttatatggttgagcaattgcactccacaaagnttatttattactatgcgcagataattaaatctaatgccagttggttggattttctgccattgtgctcatctgatcaagagctataaataatntgcctaatttggttcttagtctgtcagactgaatccgaacgtgttctatgtgaata

SEQ ID NO: 70537 - DNA, 515 bp, Oryza sativa
  unsure (1)..(515): unsure at all n locations
actcagcttctccctactatcgtcttcgacgacaagctctggcttcggtctcttctgtctcgtcgccaacgctcacaagacgacgcagtcgaagaagctcagcagagtggcgcgctcgctgcgtagcgagggcgaggctctatcggtggctcggcgctggcgtacatcgcattggagtggccgtggtgactcaaaagggtaacgtgttcgcgctcgggatcatgctgctggaggcggtgaccgtggcgcgggttgacgaggagaggggcagtgctgagagctggaggtgtaggcacaacacgtcttcaaggaggagcggctgtcgtcggaggtcgtcgacctgacactgcccagtgaggtgctcaccatgttccacttccatgccgacctcgattgcaccaattgagctcgacgccgacctgcgcccncgtaatgcgcgccgtcgccgagagcctcgactggattgactgctaatccggccatttctccatccccgtgagcaatctntcatccta

SEQ ID NO: 70538 - DNA, 447 bp, Oryza sativa
  unsure (1)..(447): unsure at all n locations
gcactcttacagatcatcatggcttgctatttagaaatacctagctattgactagttcgttggtgattaatttgttaatccgttcctggacaggcctgcagctacaacaccggaagatactttgtttacacccaagagagattaaccttttgtgtattgggttggtggttcatgcatgctagcagccctaagcaagaaaacgtgcaaaccggtatatagaaatgaagatgctcttatgggtgaatcatgagcacgtaggagatttaatatgatcaagtcaaccaaaagttgagcggagttgcagcaatattaccagntagtgcatcaatatattcggtcgattactgctgcttgacggcaatattttcttcaattactagatgaattcacatggtttgctgtgggaatacaataaaatatatcacgtgaatcttgtataatattatg

SEQ ID NO: 70539 - DNA, 370 bp, Oryza sativa
  unsure (1)..(370): unsure at all n locations
actatgctgcatatctcaaagatacaggtgcaaggtatatgcactctctctcatattaaataatctttggcacggtggcttaccttcccctgatcccacaaacactggttctccttgtcttgagcggttgaaagagagaacagcaattagagcaccaatcattcgatctttattcaactctcattccggaagtttcaaatgatnttggaaagaaaaccaagttcctcaaatgattcactcagtctctccaagtgtatcaaaatgaattaatcaccaaatattgcctctttgattcctactctagggtttgatatgtggaacatcgtagggatcatacatggcatacttgcattcacatttattactaagt

SEQ ID NO: 70540 - DNA, 360 bp, Oryza sativa
  unsure (1)..(360): unsure at all n locations
tcacanagcgaggttgagtccgcgccgaagaggcgcgaagattatattctcacaaaggcgctcggaaccaaagaacatcctggccgaactcggggaattggtagcgatgtgccctggaagcatggactccctcagtacagctcccaatacaggaaacggatagtctccaaggaagagagggacgctcgtttgaaggccgaacttaaggttgaggtcattcaagaactagaagctagcatgaatgcaagggtggaagaaagggttaacaaggtgctcgccgacatgaatataccccgagtcacaacacctgctgtgcaaccaactcctcgtgtacaacacgacgcgagtccgtcacagcat

SEQ ID NO: 70541 - DNA, 475 bp, Oryza sativa
  unsure (1)..(475): unsure at all n locations
ggccagattaccgatcgaggtggttggagtttgatttgtgattactataatggcctatatttatgtgaggatttgatccttctatgtggcatgaggtaaccctgngtcggcttgggaaaggctttgttgcgaacctccgataccgacgggtgttcagaataagttcgtatcttgtgggtaaagtgtactcctctgtagaggttaactaactgttcgaacagccgtgcccacggtcatgggcggatgtgaggtggttcccgttgcgtagagttgtttgcctgtgctttgntgaaaagttgtgtggtgtgggtatcgtaaccagaatcagcctatgtggcagatggatgacctgagtggtcagaaacgaatctgtgtgattcgggatgtctgcgggcatcatagactangcttcccgagtggaagcggattgttttgctgctgggcagctggactctgggagtccgagaaaatgaat

SEQ ID NO: 70542 - DNA, 350 bp, Oryza sativa
acgctgctgtcgcccggctctctggcttgataaccctaaccaacactgttcttaatcgcactttgtcataatctacccacgggcgcgcctgctgcagaactgttacaatatgtgcagaacggatcggcgaatacgtagacactgaccggcgcatctttcttaccgtcgaggaaccagagggatagtccatccggtccacattcacctccggctggagctaaatttcttatcgatagtgtgctactcatgatttaccttctcgttgacatgaaaccaaaatacggctaccatctgagtctagaatggtgaccccatatcctgaacttccagaaaccttaattctccggggc

SEQ ID NO: 70543 - DNA, 435 bp, Oryza sativa
  unsure (1)..(435): unsure at all n locations
tgngggtcggcacatcataacggaagtggaagaagatggacgttctattgccccggccgaagccgccaagaactatgtacgtcacagcggttgggttgtgcgggataacgtgcctgtcagtactgtgtactggcgaagaacaagggcacgcggagatcatgagagctttgtcccatattcggagaaagagatgctgtggaccacaatgctcgagacattcacccttcctgcgggtacagaggacaaagtgaaaaggtggactctgaagaanatggcagaacagtttcagagcttcaagggagatctgtaccagaagtatatactgaatgggcagacaccgaacttcgacacattcccaaagctaagggatcactgtgacgagttcgttgcatataagacaggtgaacaagggcaggcgatgatggaaagaaacaa

SEQ ID NO: 70544 - DNA, 335 bp, Oryza sativa
  unsure (1)..(335): unsure at all n locations
taactaccatcttgactctactgtntagagtttacttatttgtcctttctattctaatatgaagctcccgtctgaccctgttaagttttgagttaaaataaaaaagagatataactaatattcgtaatacccagaatacccatatgaaaccctatccatccaccgaaccctatccacacatttctctctctcgttcttgtgtgagttgcggcggcagcactgaaggggcagcggcagcgtgaagcaaaaccccgcgccgacgtctgctcgtggagggtggcagtggtgctcatcgtgcgtggtggcagtgctctgcatgcgtggcggtggtggga

SEQ ID NO: 70545 - DNA, 439 bp, Oryza sativa
  unsure (1)..(439): unsure at all n locations
tcagaagatgcaactttcagattctgccaagatgacacagcattatctcttcagattcagtggntaaaggagaatcactcaattcttcacatttccctcttgaggtgtctaagtatcagctcgaccgccaaaggctattggatgctggagagagatcaaagtccaattcagatgaaaatattgaggtgtgcagtctatcacgctggcttaaatcttcacccgcaggaaacacgaaccanatgtacgatgagaacaatcttatcgaagagggacatgcctttatgacttctgaggataatgtggatgtggacaatcatactccgaggttgtccaaggctcgggattgccactgtattccaaacacaagtagaaaatatggagaggtattatcactgactcatctagntgatttcttaagctgggcttatatgtaaattca

SEQ ID NO: 70546 - DNA, 443 bp, Oryza sativa
  unsure (1)..(443): unsure at all n locations
ctcagctgccactgaagtattcatggggatagtaatttttatttgatttctagatgngnggccgcatcgctgctatttattgttcagtctcgctcaaggaaagccttctccaagaaacttgcaatatctatttactgttcaatcttgctcggggaaaaccttctccaagaaacttataaatcgtctcgaatacaaattaggatcaacagctgatatcgaaagagggtcgaattttagtgatttgacagcatgctcaactcttttggacacattatactcttgtagtatgtcgatgataccaaggtataggacaacatcatactcttcaatggtgtccctgttttctacttctacgttcacgtcctcttgcactttccgagctcgagcctgcatattcacccctagctgaacacggaacctgaaaataacgaacaaatgagtca

SEQ ID NO: 70547 - DNA, 457 bp, Oryza sativa
  unsure (1)..(457): unsure at all n locations
acacataaaactcagctgcttcgtgcggaatttgctgcttattggtaagtatctgtgcacgctaactgttaactccgataattgataagaggtatgttgttggtacgttggttgatttaattatccttttccatttcagtagtccgcatacgcataggtacatcactgaacagtataagtagctcgtgtgtgatattccactatagacacacaaaatctgtgccanaattaggtacttagagttgattaccctggctttgcacttaatatactgagtttttttggtanaaagagtacatgatgattntataatggtgataggcaactacgttctgtagatacttatatgcaatcatgtaacattacatcttaatcagatgtaacatcagttgttatagttgttatgggacaatctgctaaggctgattctcttgaagntctaacaatggttatatct

SEQ ID NO: 70548 - DNA, 363 bp, Oryza sativa
  unsure (1)..(363): unsure at all n locations
ctcagcttgcttcgtgcggagaatatgctgcttattaggtaagtatctgtgctttcttactgctaactcngataattgataagaggtatgctggtggtacgttggctggtatagatattcttttccatttcagtagtccgcatacgccttagtacatcactggacacgataaggagcttgcgtgtgatattccactatagacacacaaaatctgtgccaaaattagggactagaagtgagtacccttggtttgcacttaatatactgatatttttctgtaaaaaaagagtacatgatgactttataatggtgataggcaactaagttctgtagatacttattttgtcatcatgttaacattac

SEQ ID NO: 70549 - DNA, 270 bp, Oryza sativa
tctcccgttcagcccaatggccgaacaggcagtggctcttattctctctccgagcgctagcggtgacgactgtgagcataacccgcgccgtcgagctcgtacttcaccgcccccctctcgtcgaagtcttatgcgggaggaggcgctcgacggggttgaaagatccgcgacttctccgcccacgagcgatggagaaggacggcgagacggtgagccatcgcttcctctctaccgcgatggtagcacgcccctaggcgcgctccaagctgc

SEQ ID NO: 70550 - DNA, 276 bp, Oryza sativa
  unsure (1)..(276): unsure at all n locations
gagagtgatgtgcatcggtgagagaatgcatgtgggcataactctgcagcacgtctaaagacagagatctcttatagagaaaacagaatgacggatagttcacatgaagagaacatgagatcaggacaagagaagattcccactgatggcagcaaccacgggacagtcgagccagatcttgtagatggactaccttcagataaacatgtaaatgttgcattcgtgcacaagacaactaccaacagagtatatactctcnangaatgtggatacaat

SEQ ID NO: 70551 - DNA, 300 bp, Oryza sativa
  unsure (1)..(300): unsure at all n locations
ngcactntcacccaacgttcgtactacatacgagctttatttagctggctcgtctgctcacgctcgcgaattgcgccgccacttgaagtaactctgactgcgtgaatccattgctataattgacattgacgtacatgctgctatgtacatccattgcgggatacactaacttagtgacaggactggtgagtgatgaacagagagcatgctagtatgacgaaatgatcgtctatgatgcttggacacacgaaacacctttgtgctccagatatgcgccttacggatcttatgagctgacaa

SEQ ID NO: 70552 - DNA, 384 bp, Oryza sativa
  unsure (1)..(384): unsure at all n locations
ntatgcaacagagatggtgccattacaatccgtctatgtcatttatgagtactctcgctccgccctgagaatgctgcggtcgtgtctcgcttgcccacgaagagtacgactctgtgaaagcccaactcacgccctctcaatccaactcacatgtcggcccacccacctgctgccgaggcgtgcgcgtacgtcgagtccaaacgcaagctgcgtntattgggctttctgcggcacgccttcccgtctttccgaccggcataaccagaacattcgcgcactcaacctgccctctctttgtctatctatatacatacgcacatcaaccagcttggcctccgcatgatctccntcaaatcacacacgcacctggaccttttctgatca

SEQ ID NO: 70553 - DNA, 454 bp, Oryza sativa
tgtgagcatatcacctataagctcaccacatctttccataactctattggtcgtcacgtgtaactatattatgagctctagaagatataattgatcatcaaaacgaattccacatatgtgccaggaagaacgattagcattatcttgtgttgcgttaattgtgagcccatgcattcacatttattcatgcttcacaaaagtgttagaagctttggatctcaattgatcattatagtaattgaattgaaaaaccctaggctacatgaaattctgcacattcggatgacttatatgcgataagtagatttgactaaataatatcttatatgctatagtgctaactgtaatattattaatgtattgagtggtatttggtcaacatgctgcacagttcaagaatgatagtctgtacagacacaaaacacttgtttcggtacaaaagtatctgactgga

SEQ ID NO: 70554 - DNA, 190 bp, Oryza sativa
acatcagctctgtgggtcgaacttatttgttataagtcgtcaaagtgcttgtggcgtacttgtgcctgtgctctagcgcttcgaccctcttcgcttctagagaacataacccgtggtgagttagcccctagctctgctggggtcattgcctcatcgccataaaaaagcataaacgggctaaacttggttg

SEQ ID NO: 70555 - DNA, 346 bp, Oryza sativa
agaacccctgaatgaaccttcggtagtatccggccaagcctagaaaactccgaatttcagtcacagatttgggtgctttccattccgtaacagcctgcactgtagcaggatccactacaacttcaccggctgagaatacgtggcctagaaaggcgacttcttttaaccagaactcacatttactaaactctgcgtataaattatgcttccgaagtttctcgagtaccaaccgcaagtgctccacatgctcttcctcgtctttggagtagattaagatatcatcgatgaatactactcacaatttgtccaagtgatccatgaacactttgttcataagattcataaa

SEQ ID NO: 70556 - DNA, 76 bp, Oryza sativa
acctgacgaccaccaggacgacttcagccatacacgttctgcagattcacttggtgactaccttcttgctcctgga

SEQ ID NO: 70557 - DNA, 307 bp, Oryza sativa
tagcgaggaagagatcgtccgccaggaggcgctccctgaactcttggaactggttctgccaccggagcagcgccgagccctccatctcagcgaagcgccgcacgatctcccccgtgacgcggccaccctccacagcggccgcgaggtcggacggcatgctctcgagcttcctccccagttgcgcgagcacgaacagcgcctccctccggttgtcgggcgcgccgccatccccctcgccatctgcgccgccattgatattattatcgtcgccatcgttatctccgccctcaccgtgggagaacgcgag

SEQ ID NO: 70558 - DNA, 395 bp, Oryza sativa
  unsure (1)..(395): unsure at all n locations
cggtggtgtcagctggcactctcaccccctccccaatgtttctgcgatagacgaacacaaaaccaatctcacaaattcacaacacagatcagatcaaagccgggtcaatgaaagttgatctgatttcaaaaaaaaaaaaanaaaagaatctcacaaattcagttactacatactgtattcaacaacaactaactaatcaagataaatacgtaatgaatactacctcatatatacattaaaggaaggaggtagcatatcaaaagttggattggtgacacatactctttgagcctgatctcgatgtacgggaacttggcggcgaagtgtccacgcagtccttatattgtggaccccgcggcgcagaggaatcgtccgggattgacggctgatccata

SEQ ID NO: 70559 - DNA, 499 bp, Oryza sativa
  unsure (1)..(499): unsure at all n locations
actcagctgagcattctggagcttaatctttactggtnttgttctttatcataaaataagctgaaagcagtgcaagcatgggcaaacaggttatttatcatggtaatcactctatttgaaaatattgattatgtagcttctagaagccaactgtntacatttaaacttctaaagtgtgaattgatcatccaacttgtaacagcacaagcatagttctgagtagacacgatattttggcaggcaaatagagttcctttaatcatgtacctcggcagtacataaattatctgggaaaagctcctcatagtatcagagaaaagttcagtgaaaacaatctaatgagagaaagttcattcgaattcaatttcaacattaaattcaatgtacagttgtacattgagagtttacccctgaatttctaacgagaaatggagatctctgtcaccaagatgtgagatgaccagaagtcactaatanattggagaagcctgtacttttg

SEQ ID NO: 70560 - DNA, 289 bp, Oryza sativa
agcagaactgagctgcaagataatttaacagctgatgagtattgtcaccttatggccgatgaaagggaggacttgcgttagtctagattaagagccctcgcgaaggttaccaaggataaagaacggtgtgctcggcattacaacaagaaggtagtacctaaagatatttccgaaggtgaacttgtattggaagtgattttgccgattgggactctggatagcaaattccgcatgtggtcgccgaattgggaaggaccatttccaattcataaagtggtgtctaaggagc

SEQ ID NO: 70561 - DNA, 486 bp, Oryza sativa
  unsure (1)..(486): unsure at all n locations
tctcanagccggtttcatcagagaggtactccatccagagtggctagccaacccagtcatggtacggaaggccaacgggaagtggagaatgtgtgtcgatttcaccacctcaacaaggcgtgtcccaaggatcactttcctcttcctcgaatagaccaactggtggactcaacagccggttgcgagttgttgagcttcctcgacgcttactccggttaccaccaaataagcatggcaaaagaggacgaggataagacagcattcatcacgccgttcggggtattctgctacgttaagatgccattcggactaataaccacaggaaacactttccagcgcacggtccaaggtgcacttagtgaccagctcggaaacaatgtcgaggcttacgtcgatgacattgttgtcaagaccaagacaagcgactcatttgatgacgatctgcgggaaacgttcgacaacctccgacgatatncgcttatgctc

SEQ ID NO: 70562 - DNA, 293 bp, Oryza sativa
  unsure (1)..(293): unsure at all n locations
ctcacagaaatagggttacaatcacgagctaagagctcttatcaccctcaagcgcctggaagcgcaaacctacagactctntcgaacgtaacgcatagtgtatgagaccatgatcgagccactttattttcaaccctatctctccgacttaaaaaaattttcaatcctaactatatgtgtctagggtcgtgagtacgaggtgaatttttattgaaagtagtactaattagagcagatcgaggaccatgaataacatgcagccctgctctagccttctgaatacgaagtatatg

SEQ ID NO: 70563 - DNA, 305 bp, Oryza sativa
ctcactagattatctgtgattactatcaataatacccatgcgttgcactgggtaatggcgggataactgcagcatgagcttaacaatgtaacaaagcacccgagcataatcataatcattggagatatgttcagtgacgaaaggtcatgtttgactctgaacagttaattttgcctacatgtgcgggacgtgaataacgtgtctaacactgaggatcaaatggttgtagtgttggacgaataggttgaagaacaatgtaattgtatttgcgcagaacgcgactgatgacaatctatgtgatgaat

SEQ ID NO: 70564 - DNA, 452 bp, Oryza sativa
  unsure (1)..(452): unsure at all n locations
tatattcttcacatgttgcacaactttatataagtgcaaccattcttttctaattatgaatctaggctgagcaagattctcatatgtacaactctaagtagcacctctgtgcaaactgtgcatacctgatcatttgcttgtcttatggtcctattgcaggcattatccggaagacaaggacagttatggagtgtttgcaccggttttgtanggattgcatagataaatccatgcgactagggtatggtctctgatattgttattgtctaaaatgctgtcagtgtcattttcagaaagttgagatgtaacatgactggagtttcaaaatccaaagagatacttcattcctatgataatctaagcaatgctgtgtttttgcagacataatgaatgcccagcatgccgcacccattgtgcaagtagacgttctttgagggatgatcctaattatg

SEQ ID NO: 70565 - DNA, 420 bp, Oryza sativa
  unsure (1)..(420): unsure at all n locations
tattntcagctntaattaactaaccacatcattggtcttctgttaataacaacaaaggggagtnggttatgattattcactttaatacaccangtgaattccttctgccatgcaggcagggttggacagaatacacgcgaaggaattaatatgcctggaacgggaaaaatgaaacatgtcaggttgactctgcanggtgagaacgacctgaaacatcagcttaatattggcgcattataacctggcgcacgcctgattactataaatctggcggagcaattaggtatgagtattacacctgtgcgtgaagcattantacgtcttggttcggtgaatgcgctttctgtcgcacctgcacaagcatntacaggttccggaagtggggaaacgtcaattatacgaaatcaatcggatccgcta

SEQ ID NO: 70566 - DNA, 490 bp, Oryza sativa
  unsure (1)..(490): unsure at all n locations
acacatagaaactcagcttcttaataaacactagaagccacataacctttgttttttactagccatgcattttaaatgcgctatcaaccactagctcccaattaatgtaagcatgaggatcatnaattccttcaaaataaggtagtgcatatttgatcttacctagaacaacgtcacttacctcatgttgatcactcctcatgtcgcgacgaagatatcgatgttgagcatgattatcgcgtattcccttgcttaatcctgccattggtagtcgaagacaagaaacatacacaataatatgcactctcttatcaacgactaagtagtggcagctaaattatcacacatactcaatgctttaaccaagctcttacaagatcttatcattgcaagcggaatggtgacatacaccgactcaacaagcaccgccaatgaagctggatgtatcatgcctggcaacactgctgtcggtgcatcaatctgggactct

SEQ ID NO: 70567 - DNA, 506 bp, Oryza sativa
  unsure (1)..(506): unsure at all n locations
tggtagacnttattaacgagtttatataccatttataccagctctattattntaaatgggaccaatctatgatatatatttatttaaatatgtttacacaataccatacattaactacactgaagtgctaactaaataggataggtaagtaatttaaaaactaagaactaattagcactagctaaaaaataggatgacctttgtatatactaataacaagcttaatgagaagcttgtgggtgctttgttaagttaacgagcgaaaagtacttcaacttggcttgacttactgaacaaggataataatgggctataagcaagctatatgcttatgtggaagagagataaagaanaacggatagtattagctctcatgagccagcttcacacaagctccaagaaatatgcattanattcagagttagagatagagagagaatggaanaaataaaagtaaccttatagctaacctattatacaangtagatctaatattgacttatact

SEQ ID NO: 70568 - DNA, 479 bp, Oryza sativa
  unsure (1)..(479): unsure at all n locations
tgcctctgtgaagcagtcctgtcgcattggagaacttcttatataacctggcgcgaattgtgttcatggcattctctatcattatcttcagtgtgctatactggcagcaaggcgacatcaggcacatgtatgtcaaccatcacttgatttaatggtttaatcacatcacatgactaaattatatttgcatttctaatgagtggcagagagcctagcctaggaaaatgcatgattgcattaattcatgttttgtgtttgcgtataaatgaccaacaaggtctgttcactattatgggatgcatgtatggcatcaccatcttcactggtattaacaacagccaatcagcgatgtcatttgtcgccgctgaacgctcttgtatgtacacggagaggtgtgctggaaggactattcttggcctactcctttggcagggcatctgataattactaccatncatatataacatgatttatgtctg

SEQ ID NO: 70569 - DNA, 159 bp, Oryza sativa
  unsure (1)..(159): unsure at all n locations
ctaagcttaancattgtaaacatcttacagtacgaatagcaaccaaacgcataccatggaatctcattctnccaccatctgaaacaataaaaatatggagacttaccaaatattaatcacagaaaagagaaaacaatataaacacaaaatgccaaaact

SEQ ID NO: 70570 - DNA, 287 bp, Oryza sativa
  unsure (1)..(287): unsure at all n locations
tatatacacgcaacaaccganaatgtatcaacccttgaaactgaatgtaaacttttttccctttctttctttgcactgcatgaactgaagacatcaaggctacatcaacccatatatatgtacataacaaattaaatcgatccagaanaaaaggaagtatgtgtagtgtatatgcttgtctccatatgtcgnggtcgcttgacctactctctcatgcctttcgctttggcatcgatcgagatggcatttgttcctgagattgcgtgacatgcaaagctgaaagttac

SEQ ID NO: 70571 - DNA, 500 bp, Oryza sativa
  unsure (1)..(500): unsure at all n locations
gaccttaaaactcaagctganangataccactgtgttatttaacacagaagtttgcaagaagctttcatctcttcgacatttagtggttttcatggtaactattaacacaattagtcaataatttcgttggaacagataaacttgctcaatatacagtggtttctcatcacttcattttttgcaggcaaagaatgtgagatccttcacagaagaagaagaaaaagcactttgtcacctcacatctctccatgtacttgattnttgttattgccctaatctcctatcactgcctaaaatggtgcattgcctttcttccctgaagcagttgtcaatcaaggcttgtccaggaattaaatcattgccagaaaatggcctcccagcttccttacacgagctctacgtgagcagttgcagtgcagaactaaaggagcagtgcangaagacaaanaatgttagaatgtgttatgttgatagaaaatgcagcanattcatagtatat

SEQ ID NO: 70572 - DNA, 457 bp, Oryza sativa
tactaagcttatcgagctcaataatcatggaactcacaagacattagattctatttatatctcgtgctgaatcaaccaggtcagaggtcatgtatgtacccataggaatcacgaatgcatgtaccagatcattccacttagccacatgattgaactaaattctattgcgctcactagcatccatcaatacccctcaccgagtagccaaaaatgataaaacggaagtaatggagatcatcccccttagccacatgattgaactgaattcgattttgcgctcactagcatgcaccgatatcccccccccctgcgagtagcccgaaataatggacaacggaagtgccattagcgagtctctcacctcgcgagcacacgcgagagcttcgtggccggacgagcgcgtagctccgactccggcgctgcacccggccgcggaacccccgcctcgagcgaacac

SEQ ID NO: 70573 - DNA, 394 bp, Oryza sativa
  unsure (1)..(394): unsure at all n locations
ttattccttntagtaaggtagcatgtctatctatcttctcttatgatctggngtgaggctgtgaggtactggacagggatgcttctcctgcttctgtgagaaagcatgattgggaccattaatttttttcagcttcaaatgaagcttggctgaatgtttttgtgcttaatttctgttgtggttgttgtatgttgagagataccgtttgctgctggtgcagtgatatattgttggagtctcaagtgaatgaatcttcttttttcaatagagttgtttttcacagttgtcagaaatgccactcgtaacaatacttacttagctgttgataaaaccatgtttgtccctgaatgttcttgtatgttgacagctgggccatggagatactctgctctac

SEQ ID NO: 70574 - DNA, 439 bp, Oryza sativa
  unsure (1)..(439): unsure at all n locations
tctctagttgcatacattcttgttgctttggtgaaactaaccgacgggttaaactcttgtcatttctaacccccgccgagttagcctgttcttgctccattgtgcagtatgaggaggcgactgtcttgtctgttcaaggggtcaggctctccatcaagtcgtcatgatgagtctagtactcgttcatcagccgatgtctcgatggaagatgccgacgctccgcgacaactcctgagcgacgctgaccttgaccttgtcagtgatcgagagagacaagcctactacatgctgagcgaccgggagtacgttcacacgcgagaatactcaccggaattgctganaaaatangtatggatgcttgaatttgttctatttggaaagctgtggtggcagagattgttgggtagatgacctggtctcgttgctactttgatttcta

SEQ ID NO: 70575 - DNA, 360 bp, Oryza sativa
  unsure (1)..(360): unsure at all n locations
tatgtctaagtacgaatgatattgtatttgtataatcaccgtcaatttcctatatgcaggtcattntcacggcacagttagaaagatgtgatgaagatggagagttactaaaagttacatgttgcaagttggagactacgattatgcaacttttttgccaactatggatggagattcacaaatagactacaataaatatggtctccttatgtcagntttgggtttcctttatccttggttggtgtgttctaagtggttagatctacactctnttctcgagcacttccttataataattggctgtagctctctttgagcaaaggccgagataatatattccattatcttaaaaaaaaatca

SEQ ID NO: 70576 - DNA, 463 bp, Oryza sativa
  unsure (1)..(463): unsure at all n locations
caagcctatccttactgagtgaccttcatcctacaccttgatttgtttgttaaataatttagctcactctggcaggcgggtggtggacaagttgaagaacatatgatggcaatgctcttnttttaatcttcttttatctgatggagaatattggccactctgggtgaagctatctttacagaatgggagtgcacccgtgaagattcaatttgagcctgctattacatatgatactgcgagaatgtgttttattctgcgtcaagttaattaaaccaattcattatgtctacatagcgaatataccgatactccactttaaattaatatgggatacctgcggacacgcacatgtgcatgcctatactgccatcttacaattctgtgaagttctgaaattatacagcatacggcctgcacaaaatatatagttaatggactcgcaagttatttctttgaacacccc

SEQ ID NO: 70577 - DNA, 379 bp, Oryza sativa
  unsure (1)..(379): unsure at all n locations
tggacagcgatggagaaccgaggaacgctccggctgttgtgtgtaacagcaangcgacgacgtcggctttctccggtctttcggctgccagggagagaatgggaatggattatagatgccctagagatactactcgagcgaggaattgcaccgaagctcacccgataacgatgaattgacgacgatagcccgcggtcggacttgatgaagagaggttcgatctcccgattgggagctcctcagcttgatgtccttggtgggtagcctactataaccttggcgacgctctgtgcgctaagtgttggtattgggcgcttctgacatcgagagaagcggaactttgtactcgttgtctatagtgcattatggtttcctattc

SEQ ID NO: 70578 - DNA, 254 bp, Oryza sativa
acccgacgtcgtactccatccaagcatgaatgaactgtatggtcggttcaagttgcgttatcggcccgccacttgaagtaactctgactgtgtcaatccattgtacgaaagtgtgttgtcgtgagcataagtgggtctagcaccatatgaatgaaaagaactatgtagacgagacaaacacaagtagtactgcagtagtaatagcaaaagtagtactgctttacaagtttgtaagccaaagaaacggtcacata

SEQ ID NO: 70579 - DNA, 274 bp, Oryza sativa
  unsure (1)..(274): unsure at all n locations
gcattctagagacactactggcatcaagaaccgagccctagcatactctcgggccaaaaggacaccggagttcgcccccgaaaccgagcccatacaataaccttgggtatgtactctgacggctcgtggtcacacacaggggcggtcgccgcggtggtgctcacttctctatggggcgtgccgattcngtatgctgcaagactgcagttcgacacaaccaacaacacttgaaaatacaaagctgtactgttgggcctaagaaaggcgaaagcat

SEQ ID NO: 70580 - DNA, 355 bp, Oryza sativa
  unsure (1)..(355): unsure at all n locations
ttatagtattaattgctatagtgggtactaactatataggattattgtttggctagcatattatgactcggaattaagagtatatttgcataggaagcatgagaggggatagtacatatgtttattccgggctcttattatctntttctgaattggttaattttgtcttttcattcttattgtttcaactgtgctattcctgttcataatctttattggatcacatgattcaaaaccatgtgatcatctctttatgcagttgctcgtacatttgcctaataggtctaccgcagaaggacaaattgctttcttcaatgcacactaccgtattgcattngtggaggccttggtggac

SEQ ID NO: 70581 - DNA, 410 bp, Oryza sativa
  unsure (1)..(410): unsure at all n locations
cgcaagtcggtcgccggcgtcgacctgccagtgcagccgctttcatgcgtttctgctactggaaggcccgccccggccgcgagcatgagctcacgccggagtccggcttcccgacgttcgccagctacggtgacacctgcatctactccacgccgttcatggagttcccaggcctgatcaatgtgtgcgcgcacggcggtgcgccgtgcgacccggataggcgggactggtgcgctggcggcgacgccctggcggacccngtggcgcggtggatcgacgagctcatgccctgtcacgtctacaccgncggtgggccggtcatccggcagtcgtgcatgtactccatgacccctgatgaggatntcatcatcgacttctttggtgcggagtttggaaaggatgtggttgtc

SEQ ID NO: 70582 - DNA, 315 bp, Oryza sativa
  unsure (1)..(315): unsure at all n locations
nggcatgatgatgaaattacttttacctacttactgtgttgatttctattgtatggcattaacttattatttttttcattccattttaatcctttttttgcaataattatgacatatcatgtcctgtcttgaaaatagtctcaatggacatgtctgaagctaaagttagatatagcaattttaattntatggcaaaaacagagacaataggatttcaacatgtttttaagaattctctatcanggaagtaatagtgggtttccttagtatgtagcatcgaagttgtttgaaatagatttcaagaatatttcttgt

SEQ ID NO: 70583 - DNA, 453 bp, Oryza sativa
  unsure (1)..(453): unsure at all n locations
tatattcactcgcagcatattcatcaccatattgcgtttcatgggaagttctcattcgacttgcgaaattgacacagtgaaagacgaaaacttaagtttaatactattagctctatcattttcgtgcatctatattctttaccaattatctagtgtgtgatatgtagaaatgtttactcctatttgcttatatgatttcatttttttttaattttaccatgggtgtatttcctccatgtcccattgattaacggaaaatatatgaagttgcaaggttggggaataaactangtgaaagatcctactacctaagcatatgcattggtgagaggctggtaggaatctatttgcccncacaaaccattgatggagctagtaaaaataaaattcatatgggctatcaattatgttagcagtgatcatgcattctataggtattcacacacacagctc

SEQ ID NO: 70584 - DNA, 452 bp, Oryza sativa
  unsure (1)..(452): unsure at all n locations
tctaatntgatctataggctagtttatataagatgtgggtttatgtacatcagttataaaacttactcctatctaattagcccaccattccaaattaccaaaacgcggattaatttgcttatgagaatctaacggattttcacctttcttcactcatttgcacttccataaaaaacctaacaagtctctcatgctcgcagattcacgaatgcattgagcatcccgtgtcaaatggagtaccagggtggaaggtaatatgcangctctgaagagagttgctctgccgtttctgaagaactgtcagtcattgtgttcctagagttctcgactaccattttgtctgagtaacaagggcctgcgtctagtattatggggagtgagaaaatagcaatccacttggaaacctggcggcaatgagtgaacagtagtcagtataatctaacctaccggga

SEQ ID NO: 70585 - DNA, 348 bp, Oryza sativa
tctaaggtgatctataggctagcgtatatatgatgttggtttatgtaccgcaactataagacttactcctatctaagtagcccaccattcctcattaccaagacgccgattaatttgcttatgataatctaacggattttcacctttcttgactcatttgcacttccataataaacctaacactgctctgatgctcgcagattcacaaatgcattgagcatcccgtgttagatggagtaccagtgtggaaggtaatatgcacgctctgaagagagttgctctggcgtttctgaacaactgtcagacattgagttcctagagttctcgactaccatactgtctgagtaa

SEQ ID NO: 70586 - DNA, 194 bp, Oryza sativa
catcaatctatgatacagactaccttgcaacactctaagcattcgtaacgtaagacgcgttgtgctatggggaaacatgttggtagaacttatcagctatggctgatatacatgataggagataggttgtgcctatgaatactctcaagctgttattgaatctactggagtacagtacactattgaccccacgc

SEQ ID NO: 70587 - DNA, 251 bp, Oryza sativa
tacggccttgaactcactgacttgcttggattgatccgggccctccgtgtttgcatgccctgctcgagggattggccattgccgctgccgatgcatacgacatcatgcttggagcccactggcgacgcggacgatgactcaccgcgctgtcatagacgctgccgccggtggccagtgacgtgagcaggttaccctgcgatggggaacatctatgctagcgatggacgacgacttggcgagtgacggcggag

SEQ ID NO: 70588 - DNA, 364 bp, Oryza sativa
ctcagcttttaaataggaaaaaaatgcacggctaaagcctcatttaatttggtacgagaatctcaccacaatagtcaaaattgcggaccccatggaaattctcccttttcttttcacccatacttatggcgataatttctatttcggtcctcttcacataacccttcctttctgccccttcatttggtcattttgtggaaccattttggacgaattgaaacgcaagctaagcctccctacagtacaggaccctaaatttcatatgctgggttactcttaattggctagttaggccaatataaatcatattttttttcttattgacctggttattgattcactcaaaattttgccaaacttcaat

SEQ ID NO: 70589 - DNA, 223 bp, Oryza sativa
tctctagatgttcttccacgctttgactgccttctgctgcgtgaacaatatactggtgcttatgtatacagtacataacctatcatatatcttcatcaaatcgtaatacaatcggatgctcggttcttccgccaacccgggccaaataactagagaactattaattacatttcaataactatgaaacgatcccttatatttaacacgccataatgagtttata

SEQ ID NO: 70590 - DNA, 399 bp, Oryza sativa
  unsure (1)..(399): unsure at all n locations
ntgagagccagtgggcgccatccgacgtaactgatgtatatcttattgagatggnggcgcacggtgttcttccggccaatgagatcatcgggtggcgtccagcatacggcaaaatgttttcaacccccgacatacacgaggtggttgtattctcccatctcttttacggcgggttttctcttccaacctcaaacttcttctgaggaattctggatttctatggtattaacctgcatcacctaaatcccaattccatagtccacattgccaacttcatccacgcttgcgaagcttttctagggattaagccgcatttcgctctattccgccgcatcttctttctcaagccccagccaaacaagagcaaaccatgtgttgttggggagccggtttcaactg

SEQ ID NO: 70591 - DNA, 349 bp, Oryza sativa
  unsure (1)..(349): unsure at all n locations
tgaaccatgacacattagtgcatactcgcaagaacttacttttattgtatggctgtaatgaatctagggcacaaaggatctcgatcactatcaacaagtccatactccacatctcacgggcatgatcaaacaagaagtcaagcgataaaagagaaactaaactaatagagtactcaccactttcaggccatcacctaatatcaaggtaggagtcaatgtatccagacccttgaaaacatgancaaactttgtaagatacataaatgaactgacaaacatttaaaatagaatgagcatgtgaaacattggtgttgcacgccataaatatgaacaaagtgcaagttctaaa

SEQ ID NO: 70592 - DNA, 517 bp, Oryza sativa
cggacacataaaactcagcttggtttctctaaggtagcactatgataggtcacttttatttctgagtcatacacaaacacctcgacgttgcattcctcttaatagtacggcattcctaaactcaaatgttaataagaagataattataccattaagaatgccttttttttcatctttcttttgttgtcttgagggacgccaatgccgataccgtttcaccatatattcttcaaatgattgatgcggttacttgtagcttcaaatggtctcgcacggtccatcatgacaaagccgtcactcgcccttcaccaccggatttggttcttcggcaccaagccccttgcttgctcttcaccgccgcatggtccatcgcgaccgaacatcgcttgcccttcaccgtcttgccataatagccacttcgtatcacacatcttcaagtatcttcactttgcattcttgggattgttagttgaatgatatcacttgagcatcacacctttgtatccttggacctatt

SEQ ID NO: 70593 - DNA, 459 bp, Oryza sativa
  unsure (1)..(459): unsure at all n locations
ttgcctacaacactctggtcttgtgacaatntgctatattttattatatccattattattttcacattgtggttacatgaaaaattagaaaggacacttctgctcctgtgccaaattgttaagcagggttctgtacttcgactaaaatttccaaaatttcaactcttttgggcctctggtgtgatataattcgtcctcgatttttttctggtttcaaataatgtttcaactcaatcaatgtctattgccattttagatattttccaaatgttctaaaagtttccgttaggaaaagtctatatattngcaaatctgtttatatccagagaagatttattcaagtttcaaaatttccagttcacaatttaaaaaaatttcattctatgggtccattggaacattcnttatttntgaaatttgggataaaaattanatcggattgagaatgcagcttgacat

SEQ ID NO: 70594 - DNA, 379 bp, Oryza sativa
tgcatctcgtgcagcgcggcgcacaggcggttctcttttagttgtctgctcgacagcggctagggtttcctcccgtggctcggccggttgcggcgagtttgcaccacgacagtgggtgcggaaggcggcgacgaactcgacggcgacggaggcaactcgggctccagcggtcggctgcggcgcacgggacgacgacggccggctccgaaggtggatggaattgagctgagtgccacgtcagttgaaaccgccgtccaaatcaccgaggagctttacgtgtcatgtttactatagcgaacttatcccttcccttgttgtatccgctcctttgtgtccctctctagggtttccacttccttcctgctcggattcccatgga

SEQ ID NO: 70595 - DNA, 307 bp, Oryza sativa
  unsure (1)..(307): unsure at all n locations
tagtagnccaaagcatccttccatataggttcttgcttggttatgatgataacgactgatatcagcatgggttgtacttgatccattggtccccagttttcttgaaatgtgtgaagcccttccgatctcaacgtattcttgatgagactctagagccttgctgttttctcattcttgaatatatcgttaattgttatgatgataattattatggctggatcatcattaacgaataaggatagctgaactattctaagcatcagtgtaatatatctgcagacagcatttagtctattcccaatttttc

SEQ ID NO: 70596 - DNA, 450 bp, Oryza sativa
  unsure (1)..(450): unsure at all n locations
cttggttccaatctagcaatanaatcccacgttctctgctccttatccagaagtctcttaacagccacatcaacggtataaacaaattgaggttctttcaaaatctgccatgttaaacatgatttctttagtcacaaagaaattgtgcaagtgataaactaatcagcatataaatgatataaacaattatcaacgcagtagaaccaacactgacacatgaatgcaacacaggtgaagcanattgcaatcggtataacacagagccttgtagaaaggaaaagtattacaattaacttttatatggcataactacaattgtataatcacgctaaaaaaccagtcactgaaataaggtaaagtccacataaacaaagatgtgtntaattcagaaaaatgcctacagaatcaaaaaaaaaatagtgcanagtcagaaacagagatgaaagatgt

SEQ ID NO: 70597 - DNA, 418 bp, Oryza sativa
  unsure (1)..(418): unsure at all n locations
agcttcttttcaccttgaaaggtcatggcatgttctgcacacaaattggagtgtgttccatcaaaaacacaatcatgatgtgccctaattcctagaagtattgtaatcattacatagaatggtatctcaaagaaattggtcacataacattattgtggagtactagattctttgaaggcgaatcggtaattttcgacaaggctagttagaacaatgttgtaattagaggaaaatacaactttnttattacctatattattgagggccaaaatgtgctaatgaatggtttctgccaacaagagctagtgaatggtttctataatgctcgtgccttggatgttgttaactattgccgtaaggtaaattatccggttgcaatatgatgttgttcaaatgattaatgcccatatgctaaaat

SEQ ID NO: 70598 - DNA, 406 bp, Oryza sativa
agcttcttcgtctgggcggttaccttcacgtgtgcgacacacccaaatgtgcgcaagtgatggacagccggcgtgactccattccagagctcatacggcgtcttgccatcaatgctcttggacgagcacctgttgagcagataaacagcagtattcactgcctccccccagaacatacctgtgagccccttagctttcagcatgcttcgcgccgtgctcaccaccgactgattccggcgttcgacgacgccgttctgctgcggcgagtatggagctgtcaactcgcgtcgcagcccgagctccgcgcagtactcggtgaagtgcccgaccgtgaactcgccttcacgatcagtccggagcgcccggagttggcgggcactcttgcgctcggcggctgcctgaacac

SEQ ID NO: 70599 - DNA, 418 bp, Oryza sativa
agcttgccatgacctttggaacctgcagattggaatcacactaatcagatcaaaacagagagacatgctagatcaaggataatctacatttgagttgagttgaaaatttggggatcaaagaaaggtatatacctggcatgaacgaactaacatattcacccaactttacatttcaagcacaatatctggaaactagaaaagttcatattcagtcagttgctccattgacaaaagtggcaaaagaaaaggttcaattcatgataggcaagtatgctacttacactctgaatcagttttgacccattttgcaccatcatcgtctagatcacgcagtgcatcctccaggcactcattgatttctgtctcatctggctttcagtccaaatgcctcttagcaactagcgtggaagaattttgc

SEQ ID NO: 70600 - DNA, 433 bp, Oryza sativa
  unsure (1)..(433): unsure at all n locations
agcttcattctgatcagactccaaagactcaaaanaaaacctgagatatatctcatccttggcagcgacgaaatggaaattatgcagccagtgccaaggccaaaaatgcccaaatagttggccttttcagcatgagcagcaagaggtgggcttaagcaatgcaaccaagtcgatgacttaacatgcacctaatcagcagtaggagcacagaagagtagcgtttaaaatgagctgggtttaatcancatgagaggcacgagggaagttagaatgttaatggntcaaatattaattctgacagtttatgtgttcttgaagatgtcgcttcactttaccaaagggccaagtagttagtgcatgaacagtatataagatatatgatgtaggtgataaggacagactaaccttggaattctcaagctatagtgtctac

SEQ ID NO: 70601 - DNA, 347 bp, Oryza sativa
  unsure (1)..(347): unsure at all n locations
agcttgttgctcgacctgacttgacttncgaacagacatgacgctggcggtttgtcctccaggtttgacaactataggaattggaggggcacggaggagaattatgaaaaaccgtttcccaaagaaaagccgataggcgaggggagacatttttcaaatatggttttcagaaagcttggtcttacggtatgaccattttgcttaacctacagtcaagttggctctgataccactttgtcacgcccagatatttatcccaaattttcagactattttgtgtattaaatccctgtccaggaccagccatggtacacaaaacgaccagctatatacagctcctcacgtaa

SEQ ID NO: 70602 - DNA, 389 bp, Oryza sativa
tagcttagtctcttttgacctcttcaataataacattactggacaggtgccttctgaaatatgtatgctaacaaatctgaggaatttgtacctacatttcaataacatgaatggtaccatcacagagaagcactttgcgcacctgacgagcttgaagtcgatatatttgtgttacaaacatttgaacattgtgatggatcctcaatgggtaccttccttcaaattagagaagtcttactatgcatctattactatgggtccctcattttctagatggcttctatcacacgttgatattgtcgcacttgctatgaatgatgctggcctaaatgacacattcccagactggttctttacaacatatttaaaggccactttgtttggatttc

SEQ ID NO: 70603 - DNA, 340 bp, Oryza sativa
  unsure (1)..(340): unsure at all n locations
agcttgtctaatcaatatggntatttaaccacacttactcaattattgcttttttacaataacactttctggcatcatagcaagtttctgtgcatattcatagaagggccatttacatttgcagaaaaactcgtacgtgtataatcacatcagggtaccctccaatgatacctagtgacttgagaatgtcaagattgtcagctgcactgcaagacgtaagcttactatacttagatggatattcagatgagatggccttggcagttgctaaacaggtaagttcgtttggagtgtgcaacattaatccattcatgtatcatgtaatgctttcaccatgtag

SEQ ID NO: 70604 - DNA, 423 bp, Oryza sativa
  unsure (1)..(423): unsure at all n locations
agcttcttccaaaaattngaagtaaactgactgcctcgatcagacactattttcttagggacgccatgcaaacacacaatccttgccatatacaattccgccaaccgacttccagaataagttgtctttactgggatgaaatgagccactttggtaagtctgtcgactatcacccaaatagagtaatggcctgatgacgttctgggtaaaccagtgatgaaatccataccgatttcctcccattttcattcaggaatcttcaaaggctgcaacaaaccggcgggtttctgatgttctgccttgactcgctgacaaacatcacatactgctacgtattctgcgatttcacgcttcatacttgcccaccaaaacctttccttgagatcctggtacattttggtactaccagggtgaatggagtat

SEQ ID NO: 70605 - DNA, 237 bp, Oryza sativa
  unsure (1)..(237): unsure at all n locations
cagcttacacatctcacgttgctgtntctttcttcaattattctagaagagctagctcagtgactcctgtttgtttccaaacttgcattggttttctttgaatgcatcataagcttacacagcctcaaaatttaggaccttatcgagcctataaaaacccataggctcattccatacgtgagacctactccccacctattaactagtgctctcctttcatacttaacatacatgtac

SEQ ID NO: 70606 - DNA, 419 bp, Oryza sativa
agcttgttatgttggttagacttataactatccactttgtaagataaagtgtttttttagagtgtagcttttccagctcttgataatggttagtagggaaccaaagtgttctgtttgggtctagaaaagttttgtttggtgtggagtgcaaccagcataaaccagcttgtttggtgcacccgactgtgaaagtgtgacttagcttcagagttcagaaagatgtgcgaccgtgattgccaggaggtttgcatggtttttgcaattgcttgagaaccgtatctaacgccctgtttatgagagctttattatgagaatcaactggtgagaatatgaaaacattgtgttctttgggctcttgacttactattatctaaattgtacaaccacatacttttataatctggatgaaaatttcaact

SEQ ID NO: 70607 - DNA, 423 bp, Oryza sativa
  unsure (1)..(423): unsure at all n locations
agcttgtaacaatcatgcgaggacacaaataaataaattgataatattaaaaagaaggttgaaagaccaatgcaatgtaagatatagtttcataagaaatgtttatttagtgaataaagattatatatgtaaaaaatgtactatttaggatcttaagatgtttttaattaatccgatgttgcattctaagtccgataagttgcctctctttgggggggaaagagagataagacagcgaagaagcgagtcaagttggctgctggttgaatacaggcgggcatgggcgacaacgatgcaaaacgaatatcttcaaaaccagtgaatgcaagggagcgattcccttccgtaatttattccgataatatctaacatctcgatccaagttactgtcattttttgttntttgagctatctaacgatcgc

SEQ ID NO: 70608 - DNA, 106 bp, Oryza sativa
  unsure (1)..(106): unsure at all n locations
agcccgnntatttatctggacgatcgactacaccgctctcgcaggtactcctcgagggggctgangttgctgtgctctgtgcttgagatggactctgtggtctcca

SEQ ID NO: 70609 - DNA, 416 bp, Oryza sativa
agcttcaccgctttgagtgatccacgatgtcggacttagtggaaaaaaacggggaaaatggaaatcaagatggagcgagcagcaagggaacttcaccacccaagggagctactataccttttgattacaacaaacttaccattccctctcacaacttcgtctccgtgccttccgggcgtgctcctcgatttgatgggacacattacgccgcttggaagcacaagatgaagttgcatctaatctctttgcatccaagtatttggaaagttgtttgtacaggtattgatgtacctcatgatgacatggagctcacttcggagcaagagcaactcatccaccgcaatgctcaagcttccaatgcaattctctccgcgttgagtccggaggaagtcaacaaaggttgatggacttgatga

SEQ ID NO: 70610 - DNA, 389 bp, Oryza sativa
  unsure (1)..(389): unsure at all n locations
tagcttgctatgacctttggaacctgcagattggaattacactaatcaaatcaaaaccgagagacatgcttgatcaaggataatncacatttgagttgagttgaaaattctgggatcaaagaaaggtatatacctggcatgaacgaactaacatattttcccaactttacatttcaagcacaatatctggaaacaagaacagttcatattcagtcagttgctccattgacaaaagtggcaaaagaaaaggttcaattcatgataggcaagaatgctacttacactctgaatcagttttgacccattttgcaccatcatcgtctagatcacgcagtgcattcttcaggcactcattgattcatgcttatctggacttcagtccaaatgcc

SEQ ID NO: 70611 - DNA, 417 bp, Oryza sativa
  unsure (1)..(417): unsure at all n locations
agcttcttggtggggcccgccggctccgctcaactgataggtgtcagtttagaaaaaaaggcatctataatttattataggtgctggtttttaatattaaagggtctggttttttttaaaaaaacaacacaaaatagaataggtgccagtttttatctaaaaccgacacctataataaattaaaggtgccgcgtctttgtgatttcaacccgcggaggtgggaaaaggcctatatgtgccggttttagcactactggcacttatagtggtgacacctattngatgttttgtagtaatgagtgcttcttctgccttgagtagtacagattcaatgccttatccataagctgcttcttggntctcttactaacatactctttctgcaattggtttatgacaatagcctttaagtcactc

SEQ ID NO: 70612 - DNA, 321 bp, Oryza sativa
agcttgttttactccgacaagaattactgtgacgcatctgaaaaaccactggtctattgctcacaggacaagaaatttgtataaataccttgcatgagtgcattgtaacaagctcacagcaggtgaaaactactcccttccgtgcagatcataacgccgttctgaccttgatcaaaatctaaattgcttgaagattcgattaagtatgtacacaaaaatagatacaatctcaacccacgacaaatatattaccaaaacataatcaattattgactttatgaaactacattagatattgcaaatatcactatatttgttcac

SEQ ID NO: 70613 - DNA, 407 bp, Oryza sativa
  unsure (1)..(407): unsure at all n locations
tatcttctttacattcagattcacagcagacttggcgtaccgatcatcagcgtatgggtgctggcagatccggagcacgcgacctgngattgtgagtgccatttgcccttctcggagatctggagcaggagatgggtaagcaggatcacaaggaagaagagcctcatggttgcggcagcgcatcctgtgcatacagggatgctcttcttcgtccacgggccacggcaagaacctattcacagtggatgtgaaagcaagaaggatgattatgtgcacagatcttcatgccacacactgcaacccctcctacttctttcattcatggccgctgaaccagcctctgaatacagaacaacatgacacatctgcaaattcatcttgtatgggcgttncatgaatcccttaat

SEQ ID NO: 70614 - DNA, 417 bp, Oryza sativa
agcttttctatacgggtacacgcattgcagcctttcaggggttttttatctttaatttatatacacgtatcatatgcacgatacatatatagtcaacattatgaggcccggcctaaagacaaacacgaatactagcatgcgaaaatggttttcacgcaccgacaggctgaaaattaaaggatatatagaccggataaaatcagccacagtgttggaataatcatgattatttagtggtatctaatccctctgttttagaacgtaagatgtttagcttttaatctgaagtcaaatttatataagaaaagtagtaattaacatggtttagaccaaccaaatattttataaacatatatttaatagtagggttaataaaattaatttgctatagtggatgtaattatattttctaataat

SEQ ID NO: 70615 - DNA, 430 bp, Oryza sativa
  unsure (1)..(430): unsure at all n locations
agctttactataacaacacttgctcatgatgtttattagagcatataccgaagaaccaagatagaatggcatctcaaaagaaaagcactacaactgaacgatgtctacttgtatacaaccatcttgcagttaatgccattttgtataggtgtatcatcacttattagaattattgcataagcatctcgatgtttttgttcaccagaatctcatgatgagagaacaacataggcggacatcatacacaaaagaggcacctaggaaaaattccaaaacgactntatttatattttaattaatattgtgggaatgaaatgaactgccactgtttcgccaatcgtaatagtagttttgttttgtgtaccaagctcttggtagggtcaactgaattatattccaagcatcataaagtaatagaaaatagtgaata

SEQ ID NO: 70616 - DNA, 432 bp, Oryza sativa
  unsure (1)..(432): unsure at all n locations
tagctttgaaaatttggagcctanatagctcatcaggcagtggaatgtagatcagctgatcgagacgccctggcctaagcaaggccggatctatgatgacaggcctgtttgtagccccaataatgaaaacagtcttcttggcattcatgccatccatctctgtcaacagctgattcagcaccctatcagctgcacctccagcatcacccacactgcttcctctctgcaacagggcaaggaaatcttcaagtaacggaatatatggtaaaaataaacaagagtggatgtgtggaaggcaagtagacctgagtagcaattgagtctagctcgtcgaaaaagagcacacattgcgcatactggcgggccttgtcaaatatctcacgaacattagcttcactctctccaaaccacatggtgagcaactctggggcc

SEQ ID NO: 70617 - DNA, 419 bp, Oryza sativa
  unsure (1)..(419): unsure at all n locations
agctttggactttggaccagatgatgatgattcatctctacctctgcacaaaatcagaaccattacaaatgaaaatcaaatatggtcccagcaataaaatgaataatatgtctaaatactgtgttaaatttgttcatggtaataccgtaatggttgaaaagttataactatcagtaacagttcaaggtatgtaagcaaagatacttagaaaatcataagaaagtaagattcagaaactagtgacagaccttttccctaaaacagattggtcaaggcaacaagtatctccactgacatcatcaatcccaagtctgcaataattacaaagtaagcgccaagtgaataacagttgatgggaacaaanattattcaagcaaggtatagctgctcagtaggcaacacaagaattctgcatacat

SEQ ID NO: 70618 - DNA, 364 bp, Oryza sativa
agcttatgaccatgcgagcgaaaatgatcaaatgcaccacactccaagcaacgattcggttctcctcttttcctggtcctaacattgttcatagctcgagaaaaattgttagataacaaaaccaagtcctccttctcgaactgttcgagttgatcatcggacatggcattaaattaagcaagaacagaagactctgatgaagaagcaccaacatccacagaagtcaaggaagaaaccaaagcactggacttagaattaactgtacgagcaagaatattcatctcatgagtgttcaatattgtgtaaagcgaattcaaagtcaaagtagacattgttaacagacttctgaatagatgtactttca

SEQ ID NO: 70619 - DNA, 363 bp, Oryza sativa
  unsure (1)..(363): unsure at all n locations
agctttctatgctacaactgacttgtgggacctttgcctgaccgcaattgatctttatcattgaccggggtgagcccgagacgtaatgggtggactcaagaagttacacccatagctcactgcttctcatccaaccagagttgcgcacgtattcacgcagcaacagtacacgtcactgttataataatccgatgtggacaacgcgaggagcgcccactaaccatcgccttaaataggttcgatttcaaacgggagcagctctgcgtcgagtggacactattagcatctctacttaaagtgtgggatcaatatattcaacatctgtatcaatattttnttttaataatagaatgagtaacatcc

SEQ ID NO: 70620 - DNA, 422 bp, Oryza sativa
agctttatgaatagtctacgtatgtggtggcccattatggaagaacatcgtggtatgtaatatatgtaatatggctgccatgtactccatttatgtaagaacttgttggatggatgtaatagtaactaagaacttgtttgtccttaatttagaaacctctgtgcttgcttgccagaactttggaaaatctgtaaacataagatcatcttagttagaaatctggttataagctcctgttaatatgaaccaacatttatcttgttggaactaacttctctagtgtcaatgtaactaactatctaagctttcatagacccacaactgagtagaacttgccactcacccgcgaaataaaagatccaaatgttttatggtagcacgtctgtcatacaacatataagagaatattatctgctgtcaat

SEQ ID NO: 70621 - DNA, 409 bp, Oryza sativa
  unsure (1)..(409): unsure at all n locations
agcttctacttatacttcacttacttataaagctcgttgattgaagtctgtgttgtagctagtttcaaatatgtagtttgttattatctcaattcttctctttcaactaagtacaaatatgtggcaactaatattagctttctttcaactattttttttccaaatttctactagcatttaagtgagaaataaactactccctccgtttcaaaatgtttgacaccgttgactttttagcacatgtttgaccgttcgtcttattaaaaaaaatgtaaaatatgtaaaactatgtgtgtacatgaaagtatatttaacaatgaatcaaatgatatganaagaataaatgattacttanattttttaataagatgaatggtcaacacgtattaaaaattaatggtgaaaacat

SEQ ID NO: 70622 - DNA, 410 bp, Oryza sativa
tatcttgtatcttaacaagtgcatgcatggtgcgatgcagatgaaggctcgtcacgctaaacgatcattcagtttaataccatttggctgtttgcctgtatggcatgatgtttgttccctatttaaataagtttgagtttgtatgctgaactacaactctacaagccatatatgcgtgtttcatgctttctggctgcttatcactttatgtatgtcgtttgaagtcatgttctctctgtgttgtattgatgaaaagcctcaaaggcagctatggatatggtttgcatatttctcacctatgtttatgaatataggagcgagctgttttctagataatcaaagtggccatcatatattggtgctttgtcctgtttctgtacctcttgatatatgtgtggaaaaatctaatt

SEQ ID NO: 70623 - DNA, 413 bp, Oryza sativa
  unsure (1)..(413): unsure at all n locations
agcttctcgttcttgccttaccaggaacccggtttgtccgaccccgccccggcgttcccaactattggcatgcgaggtttccctgaaccgactagttacttagccagggtgtcccattccaccttgtggttgcactttgattatgttcgatgagtttcccacaggaatcggaccttatatgcgaatacgggacagtgccacataggcacaacccccgcatcgcgagttttcacaaatcattttattttcaaacacaccgacaccacatgtcgggttttgaaggcttcacaaacccatttcccaagtcttcgacaaacaacggtgtatgtgggatatttggtatccgcgctcagagagcacgaataccgatgaccacnaaggtggagcgacacgaaatcanggagtacgaccta

SEQ ID NO: 70624 - DNA, 399 bp, Oryza sativa
  unsure (1)..(399): unsure at all n locations
agcttgcattanacacctaaattcccgtgacttgctgagtacgaaagtactcaccctcgctctatataaatatatatagttcctccgccgtgaagttgaagatgaagtaaagtgaagattacggtttcgtactggttcctaaccgtcgtctgtggtgttgggtggtagttcattggatccgctgctgctgttgatgttggagtttccttgctcgtgccgtcgggtgcattctcgggcttttctgagctgcaacctaagttaagataaataaggtctttacttattttaaggattgcaatgattaatattgtcaccaggggtaccagcgctatgttctgggactggtctgagatcgtggtttcgtaggaaccgttccggccgttatcctactacacgctc

SEQ ID NO: 70625 - DNA, 422 bp, Oryza sativa
agcttacattagagaaaagaagagctactagagccatacccgaactcttccgaaggcttccggacttcgatttctactctattcctattccactagcttgagaacactaaactaacttgagagaatacgagagagctcttgcttgaggtgtgtgagtgaagtgaggataagagctcattttataggcacgtaatgacggttagaaaggtcggtaataccctccaactgtcattggggatcaatcctagccgtccatcaaaaccctgcattcattggctccacgggaggtttggccgaacccaatggttctcccgaaccatgggtcgggctggcctggcccaaaatcggcaagtcgtctcctcttttgctctcatacgcagactagtgtaatttggcccagttcatcgtgtctattctgagtt

SEQ ID NO: 70626 - DNA, 327 bp, Oryza sativa
agcttctttataactatattgctatatcactcatcatattttaccaaggcagtggtatatcactcggatcaatgtatttggaggatcacaccgcatatgcatatattgattccaggtcccttggttgattacaattatcaaaaccattcggttggttggataattaattccttgctatatgcttggtttggtcaataaccaccttggccggggctacacctcataagggcctcttaccggggccactgacttattttctcaccctcacagtcttcagatttggtaaaatacttggagaccatacaaagatgattgagcactcgcttt

SEQ ID NO: 70627 - DNA, 428 bp, Oryza sativa
  unsure (1)..(428): unsure at all n locations
agctttttttatgttaacccgataaccaatcatcttggctgagtagtaaaaatacgtatcaccagtgagtcagcaaaggctcgccattgatgagtgatgatggatggcttaaaagctcaagtgctgcagaatacttggctcaaggatagcattgaggactggtcatgtactatgagacaacagagacaaaaactcttcctacgcctataaagagagagaggagaccttttctaccattcataatcaatgatatatataggtcatcgattgcatgtcctgtcacgcaaagaattcaaaacaaattatcctaactaccaacagtgccttccaagaatccagatacagaggagccgctgcacctcacacatgaacaatgatttttctctctatctccttttcatttnctcattcaagagagagagagagag

SEQ ID NO: 70628 - DNA, 425 bp, Oryza sativa
  unsure (1)..(425): unsure at all n locations
agcttgatatgctggacttgagggacaatgagttggatggggagctcccagagctgcctacagcattggtaacaatcctactcagcaaaaactcactcaaaggcgaaatccctgagcagtttggtcagttgaaccgacttcaacacctcgatctctcattcaactttctcgtggggaagcctcctgaaaagctcttcgctcttccaagcatcagctatctcaacctagctgcgaatatgctcagtggatcattttctactagnttaacatgcagcagtacccttggctttgtggatttgtctacaaaccaactcacaggtgacctgcctgtctgtcttaatgttaatgtcaataacagggtagttaagtctgatggtaattgcttcagtgacgaccctgaacaccancatgatactaagtattgt

SEQ ID NO: 70629 - DNA, 351 bp, Oryza sativa
agcttgtgttctggcccatctcgtagcagcccaaacgtgttcaaccgacgcagcaagtttcaggatacttgacacgcaagattaacggacgtacggctccgactccgagagccaggcgagaatccgatttgattgctgaactgatgtcagattcctaatcaaacaacaaagaagttaacatagattcggacaagcatctttccccataaaagtctttcttgtcttagttacaggggattcgcttgctatcgatatggctcgtgcgagcgcgggaaaacgtgatatgatgaatcatccgggacatggtggtgatgtgcccgttgcctagcggcggcggtgcgtcgaacccgc

SEQ ID NO: 70630 - DNA, 417 bp, Oryza sativa
agcttgtctgtagtcttagggacgagcgagtgatttccaagagacgagcctctgcccccggccgaactcacgagaaggggggtctcacgactcctcgctattgaggatctttcctcgatagtatcgatggtgttgatgtcctcatcactttaaattcgatgcatcgagcttggatggcttggataacgtatcaattatcccacattctctcttttttttttctcatagtacaatctatttgtatttgtaactcataggtactaaatctaggaagacaactagagtgttagaaaagatatatcaagccaaataaactgtaatattacttgtgagctgataaaatagcgattaaccaatttttcattatatctgtaggtagattaaaatagattcctatatctctactatataaaattg

SEQ ID NO: 70631 - DNA, 254 bp, Oryza sativa
caaaaaagagacgccaagaggggccaccacccccccccacacagaagaaggcccagaacaaacaccaaccaacagccgacacgacaacaaacacagcaaagaagagcggagaagcacaacccggggaccacagggaaaacacccaaccccagcaaaaagaagcaaaagcgcccgaaagaaaaaaacgggaaaacaaagccagacaaaaaacacccaaccaggggaggggacggcacgacaaaaggaaacgcaaa

SEQ ID NO: 70632 - DNA, 251 bp, Oryza sativa
ttgggtcatccttgggaacatgataaagatgctacacaccctggggagagtaataaatacacttttgtgcgttatggaaagaaaaatactttgctacctttgacccctgctgaaaatgccaagaaggatgtacttggaacaaatatatgaataatggtggatttgtatatagagctaaccgtctatgcattccagctgggtccgctcgccttttcttgggatatgaagcgcatggaggagggttgacagga

SEQ ID NO: 70633 - DNA, 412 bp, Oryza sativa
  unsure (1)..(412): unsure at all n locations
agcttgttctacttgngtntcatctgagacagggtttttgtcggggtacctgatttcgttgatcgtcttgtagatcaacaccatatcatgccaacgatgttaaactgtgccaaaaacctggagaatacgtcgatgctacttaacatcgtactaccatgcaatacctttctgctttgattggtacattgccatctaaaagaattagctgtttttacttctagggaattctgcttgcccgagtgcttgcatggaccttttctctgtatttttttggtctttgggttgattcttgcatttgaatttcttgcgcgtgtttaatactcttatgtttgtttatttattttttatccattgaaataacatgaatgtagcgcgttgtgtgctattaatcaaccggagaagtatgcaatag

SEQ ID NO: 70634 - DNA, 148 bp, Oryza sativa
agcttgtctctgagatagagagagatagccgagccggtatagagagagaatctggcatagtcctattgatatttttataaaaatattgttgagtgaactaccacatatgacgagaaacactccggattgagtctgggggagggggggg

SEQ ID NO: 70635 - DNA, 202 bp, Oryza sativa
taaattaaaattaataataaaataaataaaaaaaataaaataacaaaaataaatataaagaaaattcaaaaaaatataataaaaataatacatataaatataaataatataaaaattatttaaataataaaaaaaaattaattaatataataaataatattaatattaatacaaaaacaaaaaaataatatataaaaaataa

SEQ ID NO: 70636 - DNA, 331 bp, Oryza sativa
  unsure (1)..(331): unsure at all n locations
catttatcttaaaattatgttaatgacctgtntcacagaaacccaaagatgaaataactggcgtggttcaattgagtgtgacaagtatctgtacacctaatcaatatttcttaatatctcgtgacagaaactgcaaaattagcacgatttccggggtgctgatgttcaaaattaacgagtcaagaaaaatgttcaatcgtatcaataattgctccctgcgtcatgaacaatagcgaacactgtccaaacgggtcacttgtcgctagcatacataccattttagtagaggtggagtatgaaatattgcacttattttctgacatggtaagtg

SEQ ID NO: 70637 - DNA, 327 bp, Oryza sativa
cagacccacatttatcatcgccatgacgctattcctttatgaaactcatgcacgtgtcgaccgtgtgccaccgtttcgctcatcacttccacgactatgggccgcattgaaggagcgataaggcttcccgtcctattacctagccccgccacattacctcttccctagacacttcatttggggaggaaattacggagccatcgtttccaaacgacatatttgctaatgaaaattaatttgtgaataacacttttatatacgtattcttagcgatctaaaagtaaaggttgcaaaaaaaaacttcgatgagaaaatttcaaatcaact

SEQ ID NO: 70638 - DNA, 426 bp, Oryza sativa
agctttctttacttcataatataaatcatacacggaaaccacgtgattggaggaagctccacgcagaatatgttaaccaatacaataaagtttggcaaagcatggttgatgaggagcaacattttgaccaagccagttttgccacaatatcgtcattggtttcaacagtatgggaatgacactggtttttggatgcttggtccgctcaaagtttgcgggaacccatcccttatccactggataacttcgattggaccggttacatgcccagtggtccacctttctcccgaatggtatactaacatttctttacttgttcttttttacttgccataattcactttataacacttctttcttcttaaaatgcttatttaggctctacgttctatcaaacaagttgcgtggggaattaaatgtgctatg

SEQ ID NO: 70639 - DNA, 426 bp, Oryza sativa
agctttctcttctgaatccatggctggaaaacctgatgcaaaacgcagaacctaacagtcaaaatctagagacaagagtttccaatctatgccatcgtttcaggaggctcaagtgtccttaaacataattgtgcttacctgataaaggcaataggcaagcacaagcgagaatgatacgataagtgccagcaagacagctaggcgctgtccgtggtgggtcttcaacattttggggaattgagcaatgataaagggaataacagaaatccccatgatccgagctgcatagctggtttggacatcagttgaaataccagtgcctgcaaaagaaaatttgtgcatcttacattcaatatatacagaaccagtaggtcaaagcagtgtaaaggtaagggtaacataatggtggcttgtggttttaacatg

SEQ ID NO: 70640 - DNA, 420 bp, Oryza sativa
  unsure (1)..(420): unsure at all n locations
agctntttatctcacttttcctccacatcttggtgaccgagtacaggtacattcgcatgctggtgttcactcattgcttgttaagctcactcaagtagtagtttgtaactgatgtacatttctaactttgctttttttatcttttgcccgatgaactctctgtttagatggaaggagattgaaggaggggaagtattgcgcatctcagagattatgtttccacaaggctatcacatccaactaattcctcgtacttaacatacctatcttatatattccaggaccgtaataaaaaaaatgtgtgaatccaacactttgttgcacatcttattgcaactgtaatatcatcctgtatgtatgtgagtatgtcgtcagtttgcatgagtcacgatatattatgggagtaaatatgcatgaact

SEQ ID NO: 70641 - DNA, 275 bp, Oryza sativa
tactacagatagtaccccttctaaatgaatggctacggactagggaggtgagggagatagttaccggcgtatctgctataaataaatgaagagtccctaaatatgtgacaagcgctaaaatggctaggatatatgcatctaattaaccttacatagtaattactatatggacgggtgaagagagatatagatgagtattcgattgcatcataggagtacaagcaacgctccatcgttctgtcgctagccacgagcacacgaaccacacctgtact

SEQ ID NO: 70642 - DNA, 407 bp, Oryza sativa
agcttagcaagtgtgagttctggttgtccgaagtcaaattcttggggcacgtgatatctgctaaaggagttgctgtggaccccgaaacagtgaccgccgtcaccgattggaagcaacccaagacagtcactcaaattcgcagcttcttaaggttggcaaggtactaccggagattcatcgagaacttctccaaaatcgctcgtcccatgacacagatgttgaagaaagaagagaaatttgtgtggagcccgcaatgcgagaaggcgtttcatactctcaaggaaaagctggtttcctcgccagtgttaatcctgccggatactcgcaaggacttcatggtgtattgtgatgcttcgcgccatggattggggtgcgtgctcatgcaggacggtcatgttggagcctat

SEQ ID NO: 70643 - DNA, 322 bp, Oryza sativa
aaaaaccggagaaaaaaagggggcaaaaaactaaataaatccaccccgggcaaggaggttgggggaaaaaccccccccaaagaaaaaaaaaaacgcagcgcggcacccggaagagaaccccacgcccgaaaaccacaccccaaaggggaacacaaccccgggcgcaaaaagaaaacccgacggaggaaaggcagggcacccaaaccagagcccagacgacccggggggacccgcccagaaacccgggcacccaaaaaagacgagaccgaaagaccggcacccaaaaaacgggccgcaaacaaaggacccccccgggaaccaa

SEQ ID NO: 70644 - DNA, 397 bp, Oryza sativa
tatgttgtctggcttgatatctctatgcaagatgtaccggtggcattcttcatggaggtatagaagagcattggcgatatcctttattattatgaacctaatatacatatatataaaagaatttaataagtggtaccatatatatatatataaatatatatatatatatatatatatataaagcatgcgtgtgtgtatattagttagttacctcgttgtccattcgagtactccctcgtgtaggccgttagcaaaggttgccattgctcaccagctcatacacaaggaaaagcttattctttttgtcatgccttcaccagaatatgaaatcaacaatgttgaacctatattgcctgcaccagccaatgagcctgacaagattcttgtgctcacccca

SEQ ID NO: 70645 - DNA, 262 bp, Oryza sativa
  unsure (1)..(262): unsure at all n locations
aaaaccccccggggaggntaacagaacaaataaaaaccgaaaaacggaaaaaaccccataaacgcaaaccagggaacggagaacccacccacaaacacaaaaaccaacaacaacaggaacaaaacacacaaaaggacccaaaaaaaccacaaaacaaaaaaacgcgacccaaacacaaagcaacaccgaaaggaagccaacaacacaaagcaaaaaagcagacaaagagcgcaaccaacacaaaacgacaaaaaaacaaaag

SEQ ID NO: 70646 - DNA, 425 bp, Oryza sativa
agctatgatgtgctatgagtcgctatattttctttgtacactctaaatcaggtaaacctaacctttttctcactgtcaaaatatgattttcaggtaaacctaacctttaccttaatacaagtgttctttgtttttattttgagggattaagtgaatcttggtgaaaaaaaaatgaaggatctggattctttttgaagggtcatttgatgatctatgttgttccacgggtgattttacttcatgcttgattgttaactatccctgccatatctaattatctatgtctatgtagatgtgatctcattcttcttatgcatgagcattaacgaggtttactctctatgtagattataaagtattatcggctgaaaatatttgtgtatcgccttgaatgtttagcttggtattgttaataggatgtacat

SEQ ID NO: 70647 - DNA, 395 bp, Oryza sativa
  unsure (1)..(395): unsure at all n locations
agcttcatcacctttcttgctcacacgttcttgctgctgccggtgattgtggcatatctcccaatgtgtacgtctcaaattatttcatgaaagaagcaatctttcatacatggagtgaggagatatatgggttcgggatctcaggatcttacacaacgctgagtgcccaagntttttatattccagatccatctaagttaagggtgaaaaagggtcgacgccaaactagacgcatcagaaatgatatggatgagtcagaagcaggtgggaggactatacgctgcancaagtgtgatctgcgcggccatacttacaagaaatgcccgaagaatgcagaatttccaagcggcgcagatgctattccatctggacaggcaagtgatggtatgcgacca

SEQ ID NO: 70648 - DNA, 413 bp, Oryza sativa
agcttccccatggtttagcagcctaagaacatattagtctcaattgtttttgtactgttcgatgcacgagatgtcatgctttttaaatatttggtttgcagatctcattggatagtgaaataacagggtgattacaacgggtaaagtctctgtgtatctccggtttttatccaatctggtatttgtttgtgctgacgaaattcctgtccggttcttcagagtgctgaactgcagtaaaatgtctctattgtgacttgtattgatgtctactactcttctatacaaaaatagcaataccaacattgtaaaagaagtaccttctctattttgtcatcgtgaatagatatcatgtatgcaattgtcaggagaaataattgagcttgccctatttaatgcccaatgatctgaatgat

SEQ ID NO: 70649 - DNA, 329 bp, Oryza sativa
tttggaaaaagaccacattttttttttgattgcaactttcctctcctcggaacgggaagattcaaaccttttttttttttcccctatgttggttgttcttttctttttgttttcactttttttgtttaatgttttgattactatctcttctttttgtataacttattgctttaatttctttattcttccttttttttcatattatttttctcctgttttttctaactacttttaattttggttttttacaattaaatttcctttttttttgtatttcactttattaagctttattgttttttttttttccaacatttttcttatttttt

SEQ ID NO: 70650 - DNA, 426 bp, Oryza sativa
  unsure (1)..(426): unsure at all n locations
cagcttgtattgagatcttaaccagccacagntgtgttactgtgcgtctgcacaccctgcaagcaagcatgagtaataatactactaccatgcttgggctagtgatcttattactaaaatgttgaggtaattacacagcctttgagtcataggcctgtggattactgattgttaataccatgcttatatattatcctccttattgtgcactttctgttacagtctgcttggacaaactcccaaggattgcatgtaccttcacaatgattgtctgaataatgtaattagggagctactactatacgtacgcagcttagctgcagctcactcgatgtgagaagtaatctcttggttaagaccgacctatggcttaaattcctcggcagactgcatggatctttataacaaacttgataattacttgag

SEQ ID NO: 70651 - DNA, 255 bp, Oryza sativa
aagaagcagagaaaaacgaggcaagcaggaagggggagcgacaaggacaagggacacggggaccagagagaacacggcaaagaagcagccagagaaggagagaaaagaaagaccgcaagaaaaaaccaaaaaagaagggccagagaagccagcccaaaaacggggagaaaccggggacaaaaaaaggcccgagaggaacgaccaaaagcggaaaaaggacgaaaaacgacggagacgggacgcaaaacaggaaca

SEQ ID NO: 70652 - DNA, 423 bp, Oryza sativa
tgcttctattatatgccaccattctaccttctttttttaaaagatgctggttgaggctgatgctaccatctacggacaaatgacatgttatgcttcaatatattagacgcagacacatacaattattgattatatataatagtgatacaggaatggcgtgacgtacatatatattactatgactgttactgacaaagcggactgacccatgacccccttattctgcacactgaaccaacgcagcttcctcaattgctctcctattgtaacatcacctgctattaatatgaccaaaccagctagcttgaggtgcacctgtggtgtgcgattctggaggacatattgatgctctatgtgttgtggctcagtatatatttatatcgaatatattgcacgcatagagaatatgtcccttatgacaaa

SEQ ID NO: 70653 - DNA, 424 bp, Oryza sativa
agcttccatctccttttgttttccttttgaaagctaatgagccaaggttgagatatacaagcttcaatcgagctgtaccattagaccaactctttatttttcaggaagaagcttaaacaagaagatcaaagaaataaagagtcattctacataacgcgcatatactactagacctgtacactctatatcactattctgtgactaaggaacaaactcaaaatgtgccacacacaaccaccaaagcaccaccaaggctacaacacgacaaacatataatatgtgaattgctcaaattcatgtacatatctgtattgcaaaaagaaaaaggaagaagataactgaatcgaacctgttgctgcctcctgtaagctggcgcttgctgatgctgctgagggcgtcagctactactgtccctcctgtactc

SEQ ID NO: 70654 - DNA, 356 bp, Oryza sativa
agcttatcttacttctcctgtgatccttgaataatgtggtcaactcaaccttatccctgtaaaatattaagcaacaggcaggctcacattacttaatttgattaatcattatacttgtgaaggtctaatgaccttatttttgtaagatgtttaagtgagactactccatggtgtcagatggtttaacctgcttctgcttggatcctactgatagagttgtgatgcttcatgccctgctacttacttaagtgttcttttgtgcttgacaaaatggcaagttggccatgcaatctcttttgcccaaaacatggatatttaattgcatatatcattcaaagacaccccctttctctgtc

SEQ ID NO: 70655 - DNA, 414 bp, Oryza sativa
agcttaatctatggtggagattttcgtatgttgaactcatgggattttggcttttaagtttcttttggcaagaatctttgtatgcacaagatctacatggtgcttttggctgggtccggagtatatattgtggaaggaatgaattgggatgattatgcaatatgtatagagtttggggaatggtatcatgtctttttgtggatgatgatggcttattatgtggaaaagaatgcaataagttattgatatttatgtggaaaacaaccatgctcgaataccttggtattcttatctgttgccatagattgttcaacttccatgggaagattatcttggccatcacgggatttctcctcgcgataatctagtaacctctcctcatgatgagggatatcttggagtttaacccttttt

SEQ ID NO: 70656 - DNA, 227 bp, Oryza sativa
  unsure (1)..(227): unsure at all n locations
atgtgttcttattgactgatgacagtnttctggtatagtaagcgccaataactgttgtctgggtttcaagaaatgtgctaacagcttgccctgcgttaccttataaattcttcatggcttctcttgcatgtggcatgcattttgggtataattataaacaaaaatataacgagtgagaattgcaccaaaatatcttaagtgctgtgttctattctaaaaataaatta

SEQ ID NO: 70657 - DNA, 339 bp, Oryza sativa
gagcttatacttctcctctgcagtgcgcatagcgcgcaagcctgaccttattgaccttgggtgtcactgtggcaccaacactggagggccatgtcctgtgacacgcacagccgagaggaggatgccgaaaagtactccaaggccaacgcccacaaggcctcccgcattagcgcccaaggtcaccaaagttgagctcgcatgccggctccctcgcctccctcttcttcttcacagtcgcccttggccagcgaagatatgggggtagccagcgagctcgtccgcgggaagtgacaactgcggcgggaggtagtgtatatgggggcttcaatggtccgtgat

SEQ ID NO: 70658 - DNA, 386 bp, Oryza sativa
  unsure (1)..(386): unsure at all n locations
agcttactggtgcacaggtaattgcatttgttctcttctgtttaagtaatgatatagacattccccaggttgacccattggcatttaatttggtacttggttgatgcttgacatgaatattccgtatctaacatgctgatcattataatataagactatctgttgaatcaccaattttgtatataatatgtgaggtggtttagttgcagtagctatcttgtgtggagtcaacttgttatgtggtatatcaagacctgaaatgtagagcattagtaacaattatagagaaagaggtacacaacttgtatgatatattaaggtttggaacaccgtcagnngtgcctgtctccttttttgtctttggaattcctaaaatgtgcccatga

SEQ ID NO: 70659 - DNA, 420 bp, Oryza sativa
  unsure (1)..(420): unsure at all n locations
agcttgtgggccctcgattttatgcaccggaaaccccatatgtnttacaataccattccctggaccagtaaatggtacacacatggcacagttgtatatcaaaagctgacatcattatacaggttaaactatacattaataatacaaggataacccaaatgggacccacatagaccgaacatggtcatatacattacaaaataccaaaagaagtagatgatataacggaagcgaagcagcggcggtccaacgtactccataggcattgactggtgaacctatgtcccgacttcaccgtcttcaatatctcttcatcaacattgttcccgtatggacgactccactcctttctaaagattaagttaacaagggtgataccaacctactcagcaaccactactacggatgatttaatgacac

SEQ ID NO: 70660 - DNA, 405 bp, Oryza sativa
  unsure (1)..(405): unsure at all n locations
agcttaattctcttgatcatcaccttcgctgaaatactcctcttctgatgaatgaatgntgcaagaatgagcatatgacatactcaacaagccacacagcaaatatgcaagtgcacaggataacaaaggatggcataatatagctcatttgaataaacaacatttgataaatactaaagagaatagtaaaacaggtgtataattaatcaatattaaataaacaccatacaacacacccgtgttgcatatgcccaacctcatttgaacaaccaaccctggttgaacaaactcaacctccaaaccaggaatataccattccaaaccacgagtcacattaattaacacaattaccatttaatgtatagtatgagactaatcactgaaaacattgctcaactcacccat

SEQ ID NO: 70661 - DNA, 376 bp, Oryza sativa
  unsure (1)..(376): unsure at all n locations
tttcttgnttctgacttatagactattattgtacctgccattatagttttatatttgaacttggaatgtagtattccaaataactttgggggtgtttagatccaacagtgtaaaattattgcgtggtatatcgggtattatataaggtgtcgcatggggtgttccggcactaataataaaactaattgcagtattcgtcagtaaaccgcgagactaatttattaaacttaattaatccatcattagcaaatgtttactgtagcaccacattgtcaaatcatggagcaattatgtttaaaagattcgtctcacaaattattccgaatctcgacaattagatatctttagcttataattaatactctcaacctttgat

SEQ ID NO: 70662 - DNA, 413 bp, Oryza sativa
tatcttgttcatctttgacaatcttatctggaaccatggcatgtgcaccaaaagcaggatcctaaagaacagagttatttgccaaacaacatttcctgcttactgcaaagaagtaattgacatctgattaatcagcatgatttttgtttcctgcgaggcaacaagtaaatatgttcaccgcaaaggcgtgacatactcattcgaagtaactatactcatttgaagtgatattcatgaaaacttctctaagctcagcatccgaaatattagtttatttctcagtttagtaggatgtcattgccttttcgcctgggatactgtcaccatgtcaaaagaagagggaggactgggcatacgagatctcaaagctcacaacctgtcgctactaatgaaacttgcaagcagctgctatc

SEQ ID NO: 70663 - DNA, 366 bp, Oryza sativa
agcttttgtctatgtggttggcggcatcccggacccgcgcgcgcgcatcgtcctcggtcccgggagggaactcctccagcgccatccatggggagaagccggggtccctggcctggtaactcgctaacacgagttccaccgctccttgggcgaggtccctcgaggatgacttgatgggcttctcgagctcctcggggagttggtggacagcccacgccatcctcctaaggtgcggggcgaggccttccagattggtggagcgcgaaattgtctggcctttccagaggcccgcttcccgaccggcgcgattcatccgggagactgcattccaaagcatgccgggccctatctcacccgacaagcgga

SEQ ID NO: 70664 - DNA, 384 bp, Oryza sativa
  unsure (1)..(384): unsure at all n locations
tacgtctcttggtttggcctcttctactgggcctctcatctcctttctttatcttgcctacctttttgctggagctgggtgagagtttggtgggtatctcatcttgttcgtccctagcatgttgatgtctggtaccaccattcatttgatgatctttctcttctttccttcttgcatcttcacttcagctggtccagtggaagcatcagaagccaatgagtcgtaatctccatcatccgttgcatggcctttgtttctttccctctgcgcctctcattgctaaatccgctgccatcttctacgttactttcttcactgacaattgctctcacgtcatcactatgtgtgggggatgccangtacatcngtcacccggatcattac

SEQ ID NO: 70665 - DNA, 407 bp, Oryza sativa
cattaccgcccggaccaagcacgcgcagcactatcttttctgccgccacggaaatagattcgcaaaaaaaggggggtatcaactgaaaaggaatgggtggagacaaagattatacaggttcaggccttcttattcaacaagtaataccctactcctgctccgagatgaatcacgccgagtattctaattgagtggatgatttggagaaaatcaacaacgcatatatgcccctataggcacccggaccccccttatatatgggaaggagtccgcgtacaaaagataatctatatccctaacggaatatgcagatacagataaaatacagtcgtaacccactaagtcacacagggataccttgatgtgcatgttgagaaacaaacccgagatacacataagatattcta

SEQ ID NO: 70666 - DNA, 422 bp, Oryza sativa
  unsure (1)..(422): unsure at all n locations
agcttattataatgtgtttcacgcaaccttagatacctcaggtgaaccaaattatctatattatcaatattttgactgctgcaatctcctaaatccaagacacgcaaaactcgaaagcccgaaaggggcatcttcaaatcaataccttgccaaagtgacctcacatgggaaaatctctcggntgcatcangtattgtaatatcatccttgctgttttgtagggataaccggtagatccttttccgtagatcagacaccgaacactgaccattcaaaatggcaacaaaattttcttcaattgataagccggcgataaattccagtatggtatcatgcacacgacaagcttgcgcctcaacatgcacatcaatgcatatcggttggatcaagtttctattaatgagttcatcaaagtaactctc

SEQ ID NO: 70667 - DNA, 400 bp, Oryza sativa
agcttgctattatcttgtatagcaccagctagcagtagcaattgatcaaaatacgggacctaacgatatgcgaattgaaatgaaagatcgatcttcagaaaacgttggcaatcgatcacgcacagatcgaattcgtcgatctttttcaggcttgggtgccactactacagataaggattaagtgccggttgggaaacctccttagtgcctggtttttcaaccggcataatggaggcggcactgatttaaaaataaaaaaggtgccgatttcttagaaccggctccttgttcttgacgaataaaaaaaaagctggctttatcgcagattcttctctcccattcgcatgaacagaacgaacacatcacacgatttctaaatttggcattattcatttcacag

SEQ ID NO: 70668 - DNA, 145 bp, Oryza sativa
  unsure (1)..(145): unsure at all n locations
ctgtccacagcggcgacgactttcccgcgaagagtggcaaccacngaagggtggctgggcttcacttctcacctgcgaacccaatggagtcaactgcgacccataaccgcggctatagcgggtgcttgctgccgctggaagcaca

SEQ ID NO: 70669 - DNA, 422 bp, Oryza sativa
agcttattttcatggagtaactattcactgcagctattgtcatgaagctaaccacaacaaaaaagggtgtgagctgatgaagaaaggaataaggcctaataacaagataagaagaaatgtagttgaagccacagaagagccttcagtcatgcctcaggttattaaaactctacatttcagattatgttgtgttaatcccttgaactaaccacatgggtgttacaggaattaatgggaccacaagcaggtggctcatcactattagctgaggtgaatgacaatatgttggatcatatgctgcaggaggtattttcttgttaaggtttagatcactttattcagatgttaacacatgtggcatttgtaccataactgtccttctttataaacccgtttaacattcagttgctactcagctctga

SEQ ID NO: 70670 - DNA, 198 bp, Oryza sativa
aaaaacccccccccccacaacaaaaaaaacaaccaacaccaacaaaacaaaacacacccaaaaaaaaaaacaccacaacaaacaacagaaaaacaacaagacccaaacaaaaaaaaccaaaaaaaaaaccaaaaaaacaaaccaacccaaaaaaaaacaaacacacaagaaacacaacaaaaaaaacacaccaaaaaa

SEQ ID NO: 70671 - DNA, 418 bp, Oryza sativa
  unsure (1)..(418): unsure at all n locations
agcttgttctccagatattntcaccccctgctcatatataattgtagatatatatccatgtatgagtctagctacatgtatatataaagtacatttcattcattaatcgatgacatctataaatataaaccagtatattgatttgaatggtaaaattacattcatatacatatctatatatgcaagtaactttaccattcaacatataatacaattttgttttcatatatatatattgagtatatatatagttgtggccaaggtgtaacaggctgaatggctagcacaaacttaaccacacatatacaacctaaataataccatattatgatattttcttttaaaaggaatgatatttcatagtggaaattntagtatctcttgggatctaattggtctaaggtagcaagaggtatct

SEQ ID NO: 70672 - DNA, 377 bp, Oryza sativa
agctttgtattgacatgcgggcgtggagctaggcaacgcgagaggcacagtgaaaaagtcagacagatccgcgtgagctagacggcgaagcccccagatccgatcgaggcgagctgagtccttgggggcgtggggcgtggggagataccttgtcgaggcggtctaacgtgatctcgtcgcggcggcgcgaccatatcgcggatgaggaggaagaagaactggagttggatgagcatgatgaggaggagcacggcgccgccgccgccgcattctcgagcatgggcggcggcatgtgggcggcggtgggggcggtggttggtcaaggctgttgtgctccatcggaggcgatggatctgactgcgccgctagcctagatg

SEQ ID NO: 70673 - DNA, 369 bp, Oryza sativa
agcttgcctacgccgatcactgtagtaagaatgggaccagaccgacctgaatgaagagcaatgacaccactactaactactacgacactagcctaaaggaaaagaatcgaattatagatcgaatggcaagttaagcgtcgctttcagagaaaggaatacctcacatttctgcttctggtagaacaaaagttacctgcttcaacacctgctccgggggtaagagtcagaccggtagcctaagtaccaaagttctctgatgctaattaaccgcgcttacctttgaaaagagcaactgaatctgtcatgtcagtgtctgaaatgagaccacgaccacagtggacaccgaggattcaacttcttgattcttta

SEQ ID NO: 70674 - DNA, 385 bp, Oryza sativa
  unsure (1)..(385): unsure at all n locations
agctttctgtagatcccaggctgctgccgctaccgctgctgcttcttcttgggagcacgtcgccatcggaggtggctaaataacgcantgaggaggaggaggaggaagaggatgagctgcttgcgggtgaagcgaggttggtcgggccccggaagagcgccacctccgccattgcttttcttccacctttatttctcttctcttggctctaatcctccgctaatgatgcgctataatctggtggggatttctcgcgatttctttcttcggattggtggagtgggccaagaaatgatggattcctctcctggtggtggagttcttggtggcgaattgctccaattcagggtcgatttctatcgatttctcccttggattcttgctt

SEQ ID NO: 70675 - DNA, 302 bp, Oryza sativa
  unsure (1)..(302): unsure at all n locations
tcctctgctttagtgctgctgttaattctaccttcttcggtctgatctttctttttctctcctttcccttggagtgtggagcgactagtgatcactgatcagggctatgttactatgtacaagagttctattgaagcttaactgatgttctcttgaactagcgctttgtttaccactatcattttgaacgcttcgtcatctaggtggtcattagtactaccttccgttttaatagatgacgccggtgactcntcttacatgtttgaccattcgcgttatttaataaacttacgtaattataa

SEQ ID NO: 70676 - DNA, 435 bp, Oryza sativa
  unsure (1)..(435): unsure at all n locations
agcttgttcgacattctaatcctggcaactgcatgcattgaaattaatcaatatattagtatcataaatatcaagagctgtctagtacatagtatagagacttacatcctccgcgttagtcctgtaccgtccattaaccctaaggaattcgcacgcataatacccgcaaaggaccgttcctcgcggttgcttgtgacacttcaggacatatcatagaaaaaagtagttaaaatttgcaattagtgaaacaattggaatacataaagtgagtggagtattaccggccaatangtacatactagtagcttctcccgtgttcaagtctgttctccacccttgaacttgtagtattggtatgcactgtatggatgtcgtaccgtttcagagaacgangatatttatctgtaatacattcatatacaaatgcaagagtca

SEQ ID NO: 70677 - DNA, 437 bp, Oryza sativa
agctttgtattggttatcattgtatggtactcgcacgttgatatgctcaaacacgctccacaatcatggcgatgccctgaccgacaccgatgcacatggtgcacaatgcgtaacgaccgttacgccgatgcagctcatggctggcagccagtgccaagcgggcaccactcattctcaacggatggactaaggcgatagcgcctccgctggggttaacatgtggggcatcatcatgcagccccaattcgcgtagtacacccaacgcctgggccgcgaacgcttcgttcagttcaatcacgtccatatcgtgaatactcagcccttgcgcgtccagcacccggcgagttgcaggcaccggacacaagcccatcaggcgcggttccaccccagccggtggcatggctacgatactcgcccgcggtgtcagtcttgcgctg

SEQ ID NO: 70678 - DNA, 361 bp, Oryza sativa
cagcatgcaacttgttttgttattttgaaaggtacgataggaaagaattaacgaacaagtcgatatctacctaattataaaaaaatacacagaagtatggatcgaacaggcaattgttttcattttcatttgaaaggattactactataaataaaaaaccacatagataaattctttgaattataatggccataatgaaaagaacaaggttatatgaaaactgaagatgtcactaagaataagatttttatatgtgagttttcaaaagagcgattctaacccacaataatttatgaagaacgaattggaacgaaagtcaaaatgttgcttctacattgtgaagcttataacttatgatcat

SEQ ID NO: 70679 - DNA, 318 bp, Oryza sativa
gttcgctatggcaatcactacgtcagcgactctggcggctcgggacatgacctcgattatactgtacatggagatcatatgtacctccatggccttgtaggtccacagctacctgatcactttactaatctgacggatggcgcttctgaccatgatgaatgccctcgccaggaacaacacgtggccgacagaatcatgcaaggcggagatgaaactcatgcgtaacgcgagcaagacttccaggatgccgacccggcagagcacgtgacagcggctagaacaagtgaccatccagctgtgatcgcgtcacaggcagcg

SEQ ID NO: 70680 - DNA, 454 bp, Oryza sativa
  unsure (1)..(454): unsure at all n locations
agcttcagtttcccatcataagaatatacaagttcatcttctccaacaaccgggtatccaaattttttgtgtataaggtcattaaaagcattctggtcccacaacgtatcatcagataagagtaagtctttccaatcttttgccagcctcttagctggttcagtgggtcgccaatggaaaataccgatattgtatgcaccagtaactgtgcataagaaagggggggggaaggcaatatgttaggttcaaatagtaactgcaattgatggtaaacagaacaaaaaatcttattatacaggtaaacagggaaaaaaaatattatacaggcaaacagaanatattggagcagattttttaaaacatcagaanaatacagtaacaagaacattagttcacatcaggttctaattctctaggatatgctattgctgatacatattggaagctatattct

SEQ ID NO: 70681 - DNA, 417 bp, Oryza sativa
  unsure (1)..(417): unsure at all n locations
agctatgtgaccccaaccgctaaattgcagctgctcagaggctaaacaatatagctccatctttgaaaacttaaacagtttaactggtgtggtacgtgttggagcctgaatctattttccaacatccttcctatttcacattataagatcttttagattttgaatagattcattcatacatccatatgtgctacatatatatgtttaacttcatatgtatgttagaaaatttagacaagagataaaaataccataacgtttataacatganacggagggactatatgttctggtaccgtcagccaccactaatgtcacagtttagaatatntgatccgctgactatacattatntcttttagctaatgtgtctatccatgtaattaggcccataatcctattatcaactattaaaag

SEQ ID NO: 70682 - DNA, 389 bp, Oryza sativa
  unsure (1)..(389): unsure at all n locations
agcttctcttgccatgaagaagagatcatatgccgatgacactgaaaaaagaccgctctgggatggcttccatctgatttcgtcttcatcatgattgagagtgatctgttgcaaagtatcccacaactgaaaatattgccccatagcttcagtagatagcgagccctgcaggttccttacccatctattgttggtcatggcttgggccaccgtcagtctcgaccgtcccacaaatgagaaaaggattggccattgccaagagatgctttcttcgttcagccagttatcagtccagaactttgtgttcttaccatctccaatatcaataaaacacactacctccgtcccaanatgtaaacattcttagctatgaatcttgacacatacga

SEQ ID NO: 70683 - DNA, 280 bp, Oryza sativa
aagagcaacgcaacaaaatggaccgaagaagaaaggcagctcagatcagctttcctcaggggaacaatcagaagcctcgcctcatgaccggacagctaggtgggccttccaccctgatcgtctgtcagcaccgtccctatcacccgagtaacttcgacaacgactacaacggtggcagtcacaacaacagtgatcagcacaaccacaagtcgactgccccacactaatggcaccagctcagtcagatccgccagctgtgtcagttcagtcagaacaaccc

SEQ ID NO: 70684 - DNA, 403 bp, Oryza sativa
  unsure (1)..(403): unsure at all n locations
agcttctgtgcttcatcaggtgtttctttgaccgccataatatttctttcaaactcctcgccctatctctctgcgaatttacaagttgcatgacaatcaaatttgtttattgtagaatcttctgccatcaccataatatatgcatggatcacctcacaacatcaccaccaattcaccataacacatggaaaagtacaggatcaactttatcatatagagaagtatatgctactgtacacaatgtgcatactacatacactacattcactgctacaatttcttgaaactaaccaagcttaagttgtctgtacattngagtctcatttagaaattcattaccagtccaattcattggctcttatttgcccttaagctcatatttattcgttgaatgatcgtaata

SEQ ID NO: 70685 - DNA, 397 bp, Oryza sativa
  unsure (1)..(397): unsure at all n locations
agcttagttacttctatttccatgtcttgntatatcgcaaaatctaaatggactcccaagttaatcatttaagtatatatatataccacaaaatatatttgcagacgattaatgttcatatataaggatgattcaccttttgaatggtctgtgcacaaagaaaataaaccgagttacccggaatgcttaaaaggcccaaacaacacgcttgaacatatatcaatgatatactaaaagtgcactaagcaccatctaaagtcaattagatggtaacatagtttaaagcaaatacacggaagatcatttaacttgcttggattaatttagcacatattctacaaaaatcatgaagtaatcggattttctctaactaaagccattggattntctatgcatt

SEQ ID NO: 70686 - DNA, 304 bp, Oryza sativa
agctttcacacggattttaattattctaggcataatttaaaggatatattttatggtcgttttgggacgtgacaagagctttgattatcctgtggagcatgataaccgtctcacgcgggctgctttcaagggtatgggcaatgcttggaagaacttcaagactaagctaatcggcgagttcgtctacaaccaggcgaatccagatccaagagagaaatttccttggatcacggcacaagtctgggaggaattccatgcgaagaagtcgacccccgagtatagagctagaagcgaggcatatcgc

SEQ ID NO: 70687 - DNA, 208 bp, Oryza sativa
ttcggcaatcagctagtcccgggatgcttagagtcacctgatgcatgccagcttaatgaacatatggtcctacctgacctacatatcattccctgcggacagattaacaccttcgacattctacctcttctgagaacccaaatacaagaggccccgaacgacatctaccaaattcaagaggtgaatgaacgtctagctgcaagacttg

SEQ ID NO: 70688 - DNA, 426 bp, Oryza sativa
  unsure (1)..(426): unsure at all n locations
agcttttgagttgagactggagtgaagatggaatatgatgtacgctcatgatgtacttggggtgatgacatctaaatttttactctaacgtcatgtttgaaacatgtggttctaagggcattcccgtctttcttaagaatttatctctcccatttagccaaatatatcctatagcaaattatcatattcaggatatctttcattaatgacaccgttttttatgtctgtccacaaataacacaaattttgagtatccttgagcaaaatttacctttatattatanggtcgcttgattttttcttagtcaattntaatttagttgaccaagtttatagaanaatagaacaacatcccaaataccacatttatttcattaaatatattttggtaatatatttattttgtggtgaaaacgctcgtataat

SEQ ID NO: 70689 - DNA, 273 bp, Oryza sativa
agcttgtttcttttgtgatgcgccacttgctcttcaagacgcaccagaacgtccgctgtcccatcaatcgggaggagctcacgcagatctttaccaagaactaccgccagcgcgtgcttccggcactagtcatcaacgatgccggtgacaggctcgccgccacatttgggtactagatgatggagctacagaggacacgcgccccgtacacccgatctggtcgtctcgtccaacagcagggtgacttaccttctgctcttattccctccttga

SEQ ID NO: 70690 - DNA, 336 bp, Oryza sativa
  unsure (1)..(336): unsure at all n locations
agcttgccgtcatggtcatcttcccctaccctgatccatcttgtttttgcccactagacgccgccgctgccgtccgttgctccgaccaccaggtcgcgtttgccacctccccttccgctccggccgccgtcgctcaccagtaaggaccccactttgtttttctctctcgtcgttcaatgccgctcgtgaacgtgcgccgccgctcatcgttgttgcgccttgcaccgtcgccgtgtgccgccgcttatccgcactgccaccgtgctcgccatggctggccgagccgatctcgagcccgacaacgctagtgcgccgtccaatcgngccttatggcag

SEQ ID NO: 70691 - DNA, 454 bp, Oryza sativa
  unsure (1)..(454): unsure at all n locations
agcttgcttgtactatggctgattgcaccaccctctactatggtggctcatgcaatgctattggggagaagggcaacatctcatatgctttcaacagctactatcagctgcggaaacaggacgcccagagctgtgatttcgatggacttggcatgatcacttaccttgacccatccatcggtgactgccgctttcttgttggtatagatgacagtagaacatctacaatctattcttcaggtgactgttctcggaggcgctttggattgtggatcttggcgttcttggtaattgggttccttcagattgnggtttatttgtgattntggttgtcgagagtcgactntaaacagctcccttgggcacacttcccatgtncttgtgaagtagcttcgtcaattggtggcttctagatgtaggaaaggggggacactgctagatgtacatgatcact

SEQ ID NO: 70692 - DNA, 360 bp, Oryza sativa
  unsure (1)..(360): unsure at all n locations
caatcactcgacccggatctctaagcacctgccgcatgcagcttgttaagaccgctcttggcatgacgctgacgctagctccaagatcgcacaaggcctggtcgaattgttgtgccctaatcgagcaagtgatcatgggacacctctgatctttcttcttctcccggagcctgtggagtacgacgttgctgcattgttctgtcagcttcaccaccttccgttgtgggagcggtctcttgttgntgagtatgtccttgagataacgggtgtatgtcggcatttgcatatcgtccaacaatggcatgttgatgtgaatcttttggagtacttcaacaaaacgagcaaactgctcgtctactg

SEQ ID NO: 70693 - DNA, 312 bp, Oryza sativa
  unsure (1)..(312): unsure at all n locations
ttttaaaatttaattaaacaatatatatacttatctctaatatgtccaaatataaaggcatgctcattttggtttcgctttccactccataaaattaataatggcttattttactttttcgaattcaatacgttggatgtgttgctctaaactttgctaattttaatgagttttaagtagataacaatgtaaacatggtttgttgtaaagttgactgactatcgcgcacnacataatgatgataatattatagctatacaatataaaaatgattattattttttnagaaaatatatatgacgttttctttaa

SEQ ID NO: 70694 - DNA, 301 bp, Oryza sativa
agcttatctccccatcgaccttgatccctgttatttttggtagaactatccagaggttgcctcaatttgttaccgctagcgcagcccacactgaaacactggcagctccaaaataacatgccagggtgacatgcaataaattcaatacctaaacataagcaacagaacaaatagtctgactgaagaaaaaagaacagatatccaagtccgtggatttaaatatttaattacgaagggtgtttatgctaaacagctacaccttccatcccaaaacttatgttgggattttgggggggggggg

SEQ ID NO: 70695 - DNA, 446 bp, Oryza sativa
  unsure (1)..(446): unsure at all n locations
agcttatattatttactactgcctaccaaccttgtgaacacaacaggccataaaaaaaatacatcttaggaacttcctaccaaagcagtcaattgcactagagcgatgttcttgaatgatacagtccaaattattgtccatgcggtacagctaaacaaggcattatataatatataacacacggagttggtgtacacataataagagcaaactctgatgaacagagatggatgcttttttagtttgctattaaacacaaaagggggcagaagtgcacgcagcacatagtaaatttaagaagcacaagagtgaaatggatacaacctactaagaaaatgtgtatacctgttctactgtagcacgatcagccttctctgtgttccttggtttaccaattgccgtctcccttatgctgttccttatcgcagncgtcactgaatttgaca

SEQ ID NO: 70696 - DNA, 242 bp, Oryza sativa
agcttcagccttttgtgcaacagtcggtggtcactcgcactaatcgcaagctttcttttcgtttttatgggccctttcacgtattggccaaagtggggactatggcttaccgtcttgcattgctagattccagtttaattcatcccgtggttcacgtcttccaactcaagaaggctttggctccagtggaacgggtgcagcctcattgacctgttttgccgaatgatgaacgtgtcgatatt

SEQ ID NO: 70697 - DNA, 266 bp, Oryza sativa
atcactcgacccggaccttaagtcaccgcagcatgcacctgtattcttttagaacccccggcttgctcttgagaaaagttcgaaccggcgatactggtgaccatctagagttaataaacaaatatatacttactctatatgcgaatataaagcatgctattttgtttcgcttcactcctaaattaataaggttattttactttttcgatttagtaacgttgagtgttgccttaaacttgctaatttaatgggtttaagcaaataac

SEQ ID NO: 70698 - DNA, 329 bp, Oryza sativa
  unsure (1)..(329): unsure at all n locations
ctttctgtgattctgctacggtagcgatataatggctatctgaaaccttttaataatttggcctttgaggtatataccacgggggaagccacatgctaggtttcctcttttcgagacagaatgcttgaaatgggcatggtttgtggaaattgatgatgtttaccggaaggtgctgacttattctgccccagacagggattgtagctctaatttntttgaaggcgagaagattaacctcattcgaagtgtgacattcctttctcattacaaccagtacttacaaagtgtttgacttgaaaaactacactttgttgtatacaatatctgat

SEQ ID NO: 70699 - DNA, 277 bp, Oryza sativa
gagctttatttttattaatgtctggatgtcacgcacgaccaaagaacaacctcctcctcattacctctgttcaggttctggactcttgctaaactgtcggtatggtatactggtattgaccatgagcaccggttctcctcttaaatatttcacccgctctgaccaacttgcattcaacataatacggatcaagtgaccctgaccgccacagggaggctgatatgatctgcaaacccaacatgacttgatacccacacacacaggttatccattttga

SEQ ID NO: 70700 - DNA, 439 bp, Oryza sativa
  unsure (1)..(439): unsure at all n locations
agcttgacgcgcggtgaaattgagcaaatcaatccagaactagttntttttttttttttgtttctgcattgcatagaaaagttaccagtgaactgaaactggtcttaaaaatttacatctatgctatcacaagaacctattgggagttgttccccagagataagacattgacactccatccatcttccatcacaatctccaacaccacaaggttatctcgctctttaactggatgatgaagcctatggtccaaacacttctgtgagctgaagctgagcttgcatgtcaaacagaaccggtcttttaaatgttcttgattataactcgagtttacgagtttttgcactgtctgccagctccggccccgttgtaccttcgcaacctatatgggagagaaatcaagaactcacaaaattaaatctggactcttttgtagcac

SEQ ID NO: 70701 - DNA, 130 bp, Oryza sativa
actggcgatactgtgatttgtgaaccctaactaatactttctccgctttacaatataaatgattctaccatttctcacatttatattgatgttagtgaatctacatagatatacgagactttttattgtc

SEQ ID NO: 70702 - DNA, 441 bp, Oryza sativa
  unsure (1)..(441): unsure at all n locations
agcttgccattaatgggcgtttccattggtcgtgagacgcggacttgccccggttttgtagtggacctgggaaagtgggaaccatacacgcaaaagacaaattgttcctttttcatttggagcgtggagaactggaaatacaaacgtcctggataagggcactgggattattttccttggttttgctaaagcctaaaagtctactataattttgccttgaatgtatgggtttatatgccatgttagaagtactataccataataacaagaactcctcgattatttctattgagggcccctctggtttttattatatatcttatgtgtacttttcaaaccggaatacaatgcagtttttataaaatcttcggtttcttcaatactccttctatccacaagagcttgatagcctcttcaatntctttagtactctctctacat

SEQ ID NO: 70703 - DNA, 312 bp, Oryza sativa
  unsure (1)..(312): unsure at all n locations
catgccaagtgcacgaagatgatcatagtatgtcaatgaatgctctttgggaactttccagtactctgaaatctgctgccatcttcgtctgagtatgcagttctggtcattgatgtgggctgaacaagtttgtgtctccggcaggttatcaatgccttcaactggctcttgtctttgctctgggtcatcatctggattcctaattgcatccggtctttcctcttggctatttgctgtgttgagaatggggtcttgcctctnctcttgttcatcatctacctgcagaagtggattccctttttagtttggctt

SEQ ID NO: 70704 - DNA, 416 bp, Oryza sativa
  unsure (1)..(416): unsure at all n locations
agctttagccagctcaggcgaggcccacgcgcgtgcaaggatattcagaacaagttcagttaactttttatgttttcgtctgaattcagatccgcgcgacggaatcagaatttctcggtcaccccgcatgtgtatcatatggttgggcgacgcgagcacgcagatctaatgacattctctgttgcattatcttattcgttcaaagagacattgcaagactgacactattaaagaaagagagaanagaataggaggaaatggaaaaggaggaagaggtggagagtaactaaatgttaaccatatatcccctctatgatacgatgtctgtggcatgcaggctaatactataatcaagcgtgattaattaattagtagtattgctcgccttgataantttttggtgtaatctgatcgtc

SEQ ID NO: 70705 - DNA, 433 bp, Oryza sativa
  unsure (1)..(433): unsure at all n locations
acaagctcctatagcatggtatgatatgcttaagaactttttgcttgcgaaagggtttataatgggaaagggtgacaaaacgctttttgttcttaagcatagtgataatcaactttttggtcagaattatgttgatgatatcatctttggttgttcatctcacgctttggttgtggagtttgctgagactatgcacagggaatttgagatgagcatgatgggtgagttatcgtactttttgggattgcaaattaagcaaacaccttcaggtacttttgtgcatcaaacgaagtatacgaaggatcttttgagacggttcaagatggagaatngcaagccaattttaaacaccatttggttctacagctatcgtggatcctgatgaagatggtgaagctgctgatcaaaaggaatatagaagtatgattggatc

SEQ ID NO: 70706 - DNA, 375 bp, Oryza sativa
atcttcagccttataggcattcttgagtcttttgcaggttctactggcctgagtataaactttcacaaatcttgcatgatcccaataaatatagccgaggagaaatctgaaattcctgcttaaactttcggatgcaccataggaaccctcccattcacttatcgagggttgcctataggaaccacaaagcccaaaattgtagattttgcccctctaattgacagaatggaaaaaagaatgcctgcaatcactatgtttcttaaccaacgacagagaactactttgtgtaactcaatactttcttctctgcaaccttctcatgtgcactctcagctacccaaaagtgattaacacattaccggacaaaaacactgc

SEQ ID NO: 70707 - DNA, 328 bp, Oryza sativa
agcttgtcctcttagctcacgctctcttgtggccagcctccccataatccatgtgaaatggtcattgattctatgcactttttcatcatgccattgtgcctaaccatttcgtctggacagctgatggctatggtctttacttcggcgtgcatgtgcttttagcttgaagaacctggaatttgcatccacttcacgaatcgttgatacaccggaagctagtctttctctttggaatatgacgtagctagtccggcactcgacacttagagccgaactcatcacgctctgctcgaaaagacatgtcattccttggcatctcagctgctta

SEQ ID NO: 70708 - DNA, 366 bp, Oryza sativa
cagcttattggttctactttcacatggggttagtcccatgtcaaaaattcctaccgagctaccgggattctgccaaacaagccacgtacctcatccaatccgaatctgatttggggtttggaccctgtaatcgtgtcgtgggcttaacccaacggggtgtgcgccctaacgccaccctaagatggccctaatcatatttattcagtagccgtcatcatttagagtccggttttgcttagattaatctggcaagaacagtttccccgatagatcaatttgtggaaccccaaattcgagtgaataatcattcatatgccattctggtgcaatctatcgtggtcttgcttgtggtcttcgattcgcatg

SEQ ID NO: 70709 - DNA, 451 bp, Oryza sativa
  unsure (1)..(451): unsure at all n locations
agcttgcaacatgggatccggatgtgccttgttaattggcaggtctagccgtcttctgcgtgcaaatgtcaaacctaatttgataatgccaaagcaccgatgtccacactagagatgtttccatgcatgtctcgctattttgttttttatcttatggatttaattntaatttaccaagttgttaagtcagcctgctggtcatgccgatcatgatcgataatcctcacagctagaaggttttaagtgatttttggagtattccttttggtcgttgtgtttggcacttcatcagaattcctgaattntgaggtcaataatttgaatntaagacaatacttcactaatttcagttaaagatacattntcaatattaaaatttgtataattgatttcaaatggtaaaaaatggtcaaacttgttattataagccatgctatatgtaagagcatct

SEQ ID NO: 70710 - DNA, 410 bp, Oryza sativa
  unsure (1)..(410): unsure at all n locations
agcttgtttgttgntgatgcatgaggcaacgtacatggcgagcaccaaggttgcgatgaagaggagatccagcgtcaagaggaatgggaaaatggcgagcaatcttaccctttgagttaccggtgagttcttcacctttgttgctcagtatcttagagctgctgacaacgtgttagaaaactaaaagtagaaacagtgattcatgaatntgcccatattctcgttgatcttaaggtctctttataaatagggagattacaaacctagttaattctaggcattagtgtaatacatcaattcttattctaaaggtagcaataaggttgattcatttccttgcaataaggttgattaatggatntaaccattgctattacaatggatttaaaaccatgatggctgcattgact

SEQ ID NO: 70711 - DNA, 391 bp, Oryza sativa
agcttgtatgttgtgaataaagaaatttccacagtattgggcatacgccatgcgcacactgttttaacagatgtgcttaagtccctagaagacacatggttccaccacacctagaaatatatggcatatgtggtataaaatccgagtaaataaactcataaaggatttactaaccgcctagaaaatgaccaaaatatataatcagcctaagccataatattggtcaataaaagtgcacacttacgtggcaaaaagcaatgatattgtatccaatcaattgctttatgaatccaaacaacgccttgacttatataaaaaaattcagcgggcagctatatatagcattactgtttggcaccttttataatgcattgtaccaactcctaaaaag

SEQ ID NO: 70712 - DNA, 322 bp, Oryza sativa
  unsure (1)..(322): unsure at all n locations
ctgcagctcacctcttatgactttgcaagagatgttgttgaatacataaaccatggcagcatccgaagcccttttgcaagccggctgcactaaattttattgacaaaatttgctacagaaaatccagattttgtggcctttcctgtatgatacttagaaaacttgtggttgttgggcacccgaaaaactgataattaattatgggataccgcgaccatggcttaattatttctctccaacgaagatgaaatgggcagatgtttgtggcaccgtggacgtctgcaccgtaccaaatttattgtttggagaagtgatangggat

SEQ ID NO: 70713 - DNA, 278 bp, Oryza sativa
ttccgtgtgagctccgctctttctttcggcgtgaaccatcctcactgtgtcttctgtgtttgggggaggacttggtgaactgggagtttgcagatgaagagagactgacgtcctcatcccaggaatgccaaggcatggcttctgtgcacggcggtgtgcgtgcgacacaccgtgagggcgtgcctgcgaccggcgcggtgcacggccggagtttggtggctcggtgcatgagcgcaatgctgcgtggcacagttcgacactactcggcgcacgcaatg

SEQ ID NO: 70714 - DNA, 442 bp, Oryza sativa
  unsure (1)..(442): unsure at all n locations
agcttaacttgtaaagatgtcacatcatcatccactaacaattattatatttaaacatcatgcaaagcatgttatattatctactccgtatacttttataatttattaaattttggagctttaaatgcaagcatgttaaatcatcatccgatataattcacataatatttcaataaatatcttcatcatttttataatatcttatgtacctatatagttcatcctaacttagttaatgtaatttctttcttctctcaataagccataacacatcaattgttntaatttcttagatgattatctatggttcaaattatctccttcgtttcaagttataggacgttntgacctttncaaattgactaagtttatagataaatataataatatttataatactaaattagtttcatcanatcaataattgaatatattttcataa

SEQ ID NO: 70715 - DNA, 436 bp, Oryza sativa
  unsure (1)..(436): unsure at all n locations
agcttttgaaacaaatgagaaggccagatcccacatgcaggttggatctgtttctactttctagcaagtaccatagcctcaaaaattcgttgagagacctaactaagctcagaagaactgtttgtctagtctaagctaaaattcaaaagcttaattgggctatctgaaaacattcaactactatgtgcaattaaatccttattgaaaaatcgaagtgaagtttattggtctttcttctgtgtaggcattcattgacaagttccgttacaatgcaaagagagcatcacttgttcaatcaagaatcaaggtgactntgcttgctcacatcccccatcacttcattgaatttctgcaatccaaatattacctttgctattggttcacttaagagtcgtccagtgataactctagtctgtgccttaatatttatttatct

SEQ ID NO: 70716 - DNA, 277 bp, Oryza sativa
actccaccggaccttaagcaccgagcagagcttttatattaacaatctctaacaccgctgatattaaaatacggcaccactctaaaacaaccggaagcaacgggcttgggggacaaccctggtgcccaccacccattgaaacaaccccccgacacaaaaacagtggagttgcattgcaacacccccaaaagctcaaacaaagaggggaacagagacacccaaaaaaagcactcctccaaaaaaaattattttgtctaacacatactttcgctattaa

SEQ ID NO: 70717 - DNA, 381 bp, Oryza sativa
  unsure (1)..(381): unsure at all n locations
agcttgtgctctggatctcaacgagctcgtagtggtgctagagtcgacgagactcgacaaggacaatggcgatgtggaagagcaagaaatcggtagcagcaccggagtcaattggtgttggaacatcaatcgaagcaatgacaccactgcatgatcgatctagaggtcaccaccgccattgagctcctggccacattcccctaccacggtgctatgtccattggcactgaggttccatggttagcaccatagcacttggaactcggtctgccatctcggacccagtgtcatagagacaattaggttgctgagatgttggactntagtgtcacaattcaactttgaaataagtttttagcaggggttattctcaaaataagc

SEQ ID NO: 70718 - DNA, 404 bp, Oryza sativa
  unsure (1)..(404): unsure at all n locations
agcttggatgtcttccgacgtggctgatccccacgggctgggtgatccgggttagtaatgtcgtgtgggtaaagtgtaccccctctgcagaggttaacaaactgttcgaacagccgtgcccacagtcatgggcggatgtgaggtgattcctaacgtagttttgtttgactactgcttgtgaaattgctgttgtgaaaaggggattcgatgtttgaaaaatcagcagctgacgggatcagctatgcccgggtggccgtttgaaaagttgttggcccgggtggccgtttgaaaagctgttggccgggtgccaatcttngttcaattctaaagattgatgcattacacatactccgaccggacgagacgcactgtctcatccgtgtcgtttgagaagcactcactta

SEQ ID NO: 70719 - DNA, 423 bp, Oryza sativa
  unsure (1)..(423): unsure at all n locations
agcttatctagtagtacctaattaatgtgctttcagtattttaaggtgattgcattccatgcttatctctggtggttgtttaagtagcttagcataagtaattgcaatggagtaattagtataatgagccaggagtactttattatatgactgctcagtcagtttcacataaaaaaaggagttctcaaaaagtcgagtgtctattnttatttcaaacttctagtttcatcttgagactgttaatatggctgtctctttctatggattttcagcaatacaattgtcaggataattgtgttagctatgttcatccttttggtgtcatagatcanaatttcctttctggaagtagattagtcatattcatcctttgatttcgtcctacaaagtgttacccaaacaggagaattgatctttataaca

SEQ ID NO: 70720 - DNA, 392 bp, Oryza sativa
  unsure (1)..(392): unsure at all n locations
agcttggcgcacacgaaagaggacgagggcttaagaagacacgcgcgccccgtacctggcgcgccagatgacagagcgtggggctcctcaccgggagaccgcgcaggcccccctttgccggttcggccggaggcgctaagtgaggttcttcgccctcgatctgaggaacgtcagcgggagaggaagtgcacaagacacgggcgacataaacaggttcgggccgctgagaagcgtaacaccctactcctgtgttctggtggatctgtgcgtgaaggaatacagagacccggagagcgagagtgagttcaggctctagaaccccttncccagagtcccaacccnctttcttctaggcctgggcctcctttntatctggtcaggggtcaccacat

SEQ ID NO: 70721 - DNA, 429 bp, Oryza sativa
  unsure (1)..(429): unsure at all n locations
agcttaaagccatgaatcccttttatgcatatctggatctggatcctgcagaacaaacatataagatgagtagtatctgatataaatataatactcgagaaaaaatcaagtattttaaaatatttataaatatgtatttctcctcttgtcaattntgatttccccgagcagatgactcattacgtttaaacgctctgcccaactagtcatagccaccaagcactgggagtcagcctaagcacttcccaaacatgcatatgagtgacatgagttcgtcattaatggaacanagtttcacggatcggagtttactactcgggtacttttgcaattattaagagcaganaataaatttatctcatctctatgcttcttgattattccgaataatacttagcaccttgcgttactcggtccatccaacgagcc

SEQ ID NO: 70722 - DNA, 443 bp, Oryza sativa
  unsure (1)..(443): unsure at all n locations
agcttttgcggcatcgccaccataataagagtaggaaatgtctcgactcccttgtcaactatggaaggagaggaatgcccatgtccttgatgatgttctatctcaagtgctgatggtggtggagcagattgtggaagaagggaggcaatgggtggcgacaactgccaatccagttggagagttgttaggcacatagcttagttatgtttagtgtagtttcttcctctctcggtctcagcttaggagctctgttgggtgatcgtctaggcgtgtcactttttttctaatatattaacatgcaagaggtcatagcttaggagctntgctggttgatcgtctcggcgtgtcacttttttttctaatatattaatatgcaaagntnttnntacgcgtagcatatatatatatatatatatatatatatatatatatatatatatata

SEQ ID NO: 70723 - DNA, 435 bp, Oryza sativa
  unsure (1)..(435): unsure at all n locations
agcttatctgagccaacaatatagagaatgggaaatttattgcatctaagtttctcattccaaagatcctcccaaaaaaaagactaaggttcatgttctcaccgtactctgtgcaatccctttaaagatatcacctatggatataacatccttccaccagaaagagcttttgttcattcccaaatggggtggctntgtagtataataagagttccatatatgatacacctatgaaaggtctgcactcctatagaatttggccaagtgctctatcaacaaggcaatgttntggattctcacgttaattatatctaacctacatttctcctttggcctacagactagctcccaagaatcaagtgactttctggtagaattagcgttattacccctccatagtaaattctttcttgcagtaccaatagccttgatcac

SEQ ID NO: 70724 - DNA, 425 bp, Oryza sativa
  unsure (1)..(425): unsure at all n locations
agctttaccaattcttattggtggcgatttcaatattttgcgcagtcctgatgaaaaaaataatgataactttgatggccttttctttttaatgtaattattgatggcctgagtctcagagagcttgcaatgtctggaagaaactttacttgggcaaataatttagcacatcctacttatgagaaattagatagagttttaatgtcgacggagtgggaacatagttttccgctgtcctcagtatttgctctaaatagagacatttctgatcatactcctttacttttaaatacaaattcctcatcaccgtgtattggtcaacaaaanttcaagtttgaattacgttggctgctacnggactggtttgtagatatggtaaaggatatctggtcttccgttgatgaaggtacacccctttagagcgt

SEQ ID NO: 70725 - DNA, 423 bp, Oryza sativa
  unsure (1)..(423): unsure at all n locations
agcctggcattaaaattctcatctaagagtatattgcctggcttaatatctctgtgcaggatatatggcttgcagtcgtgatgtaagtagaataaaaccgaaccaatattcttggctattttgtacctgatcatcgatcggatataattaattagctagatatattgaaaatagtaacatatttgtcaatagagtctcactacgttgctctctacagttattagaaagcaatcagaaccgtttatctcatttgattgaattagtaatgaattgtcaataatgtgttgcatacctcgtaggccatgatcatactgctgctacctcgctctcgtgcaagtactcgtagaggttgccattnttcatcaattcgtagacaagaaaaaagctctttgttctccatgtacagcaccagccgcacatgaa

SEQ ID NO: 70726 - DNA, 273 bp, Oryza sativa
agcttgatctatctgtagtatgggcaagcgatacctgacacgggccgtgatgtggaacccctgcctcggctgaccaccacgccggtgtctgcgcctgcccggctaccgcggccggccttgcggcgcggagtccgcccctacccttggcaccgggtacgcaccctgtccctgtacccacatggccatcggtcgagtcaccacagcgtacccctccacggacggctagaattggcgtccacccgcgacaacaagcaccttgccccctgtgggggg

SEQ ID NO: 70727 - DNA, 340 bp, Oryza sativa
  unsure (1)..(340): unsure at all n locations
agcttagcataaacttttaagaaatcaaaaacttcgcaagaatcatcaagcacagcataaatacaccagtattgtacaaattgagcctccatgtattacattcaaactcagtcagaatcagtcctttcatcatcagagtcttcattactcggctggaggtcgttgttgcgaaattgctctacaacatcgctcgcaattttgtcagccgcattntgcgcactgctgataagatcaagggcagcttcttcacttgtcccgtctgcaaatccatcaatggtgtcgacttcaattctcgggtacaaagatgttgtcatcgtcaaggccatgccagctcccatac

SEQ ID NO: 70728 - DNA, 225 bp, Oryza sativa
actcgaccggatcttgagcccctctgctgcatcttttatatctccacaaatccatattggaatgctctgatcgttttaaatatatcttattagtcatctaacacaacatattaaatggctctcttctctattaatctatccctgatagcttacccttaatatcatcatgaccaacttcacctctttattcttagaagccatgactaggctgtccctgacgcactg

SEQ ID NO: 70729 - DNA, 356 bp, Oryza sativa
  unsure (1)..(356): unsure at all n locations
agcttctattctatgttgaagaagaagaagaagaagaagaagaagaagccgctattagtttaaggtgtttgctatggagaagatgaagtgtatgtagaagaagaagaagaagcttgaagcttacaaggtgtgtttgatagctatggagaagagaagaacgggtcaagaagaggagtagtgtgtttatgctagctttataggtgacaacaacaactcgatcaacaaggtcggtttcttgtgtaaattgaagaagaaaattataccgcatgcngttaattatggggatcaattaagctagcaggcgtttgcttgtgtaccgaggtgaattaccgacataatttaatgtgtcatntgac

SEQ ID NO: 70730 - DNA, 315 bp, Oryza sativa
  unsure (1)..(315): unsure at all n locations
agcttagcaagtgctgtttttaagtggttataacatgtcataattttcatgttttaattgactttagttataaataaataaattagtagagcataactatctaaattctgattaatcagcagtatcacacataatcgtttaacagatatagctatcttagccctcacctcttgaacaggcttctagccctntttcacaatgctgcattatactaaaatgtatcaaattcagatatagctatcttgtccgcgctcagaagataaggcttacagttcacgtgactgttcaaaatggcttctcttatatgaacatata

SEQ ID NO: 70731 - DNA, 399 bp, Oryza sativa
tgctgcaagcttttatatttaaccaagtgggtgctcgtgataagggtctatctagcctatcccgttaacgtattacgaacgcgataactcaaccatgtaagattggctgaaacaccgatgctatctctattatcaatcatgaaacatgctacatcttatggtgctacgaattacttagatgagtcgacttaagtgatgctgcattaaccatagagagaaacatacaatctataccagccgatgacaaccttttcaagatggtatgatatctatataatctagatcgacgtcagtatctaattctatcagctgtactcgaggatatacgctacctgataaaggtcagcagcctgatcgatctatattatatagcatgtatgataactcgacgaattacat

SEQ ID NO: 70732 - DNA, 450 bp, Oryza sativa
  unsure (1)..(450): unsure at all n locations
agcctgccaagtatgtatgcctatatctacttattaattattntgtttagtaaaaatttagtcatgccacacacgatagaatataaaggataaaatccatcgtgaaagcgcccgcttgcttctctcttctctggtctctctcacaaatagctactctctccggggtgataatacttatctttttagacaaggacacggtctctaaaaagtaactttgacaactattttctattataatatatatatagaaatattaacaaatatatgattntattaaagtactttttaaactaatctacacatatggtcttcatattttaagataaatatnttagaaattatntttaatcaaagattntaatgtttgactttacccttgttcaaaacgactaatattatcagtccgaagtgagtagcagatatggacttattgcatatgcccgaaacatg

SEQ ID NO: 70733 - DNA, 442 bp, Oryza sativa
agctttcctatagcatcgccatggtcatcctgctcctgctcgtatttcgtatacgcccttgcctccttcgactccacctttcagcatatgtgaagcgctgatgattaattcacttttggcttttgaattttgttattcacacgcctatgcacgcgtacctgtggtctctttatatatacactgattgatttgcttgccggttagtaataaatacactccatctctaacctctgcttccctcctatttctctcttctttttacatatagcagtgtcagataaaattttgggataatgaattttaaacagctaaaacttcaaaattatactccctccatcatataatatagcatattttagctacgtatctggataagtgtgtacaggttcaaaagctaacaatggtatttttgagatggggagtatgtctcattttatctatc

SEQ ID NO: 70734 - DNA, 426 bp, Oryza sativa
agcttcgatctcttatcagatggtgtttggataatatgcgagacaccccctcccttacctagattgacgagtagtttgatgattagttcgttgtatcttttggatgaaccttatttggactgcgtatgtatgcagtcgattgcatcatgattcatgtaccatttgtgaaactctgtgatgttatttatgatatctattgttggtggattataaatgagtttattccaccatgcttgcaaaacaaagttcatatcaacataactcccttaatgggataaagccataggagctagttagaaaattaggatacttactccatcaacctacacagatggcaagccgacgttgggcaacaaccagcaatgacgaaactcagacacccgacttaaccactcttgccggagttatgggcacccacactcaact

SEQ ID NO: 70735 - DNA, 348 bp, Oryza sativa
  unsure (1)..(348): unsure at all n locations
agcttcatgttgatacccttgaagatatccatgtcatccacaccgagcaacacagtcttcccctcaaattgctgctgcagctcggagaccctccattccctgtcgggcaagctcagaaccgtcttcaattgacccatatgaactcccactggcatgattttgatcccaacggtacgcccaaagtaatccaacccaatgtatccacgctttgactggtattcaattnccagcatcctactacaacaagagaggaaatgtctggcatagtcaaaagtgtggaatccaataaggtcacaattgagcagcgcctttatgatctcctcgcgaacagggagggtccggtagatc

SEQ ID NO: 70736 - DNA, 414 bp, Oryza sativa
  unsure (1)..(414): unsure at all n locations
agcttgacattactgaccactgggtctagtaccagggggtaccgccccgggtggaccactctgtcacgatgatccgagcggtcaaacttgattgcaatctctgaccatcgaagatattggggcgtgtcgggctgaacagcattgatcttccgttcagtcaacttctgcttccgtttagactcataagccagggggccgccgaagatatggttgagctccttgcggtgatcttgaaaacctgccggggtgtcgccgtcgtctttcttccttgacgtgctttgttcttcgtcggagttcttccgtgcagtcttggtgtattgatccgcgaattgcttgtagacgaaacaatctttggccacgtggttggagttaggatggtgcgggcattgngagttcatgatcttgtccaacgtg

SEQ ID NO: 70737 - DNA, 424 bp, Oryza sativa
  unsure (1)..(424): unsure at all n locations
agctttgtgtatgatttacggaggatgaaatttctcaggcaattttccaaattgggcccctgaaatcacctggtccagatggctttccagccaggttctatcagcgcaactggggcacaattaaagctgatataatcggtgcagttcgccgtttcttccaaactggactgatgcctgaaggggtcaatgatacggccattgttcttatccctaagaaggaacaaccagtagatttgcgagactttcggccgataagcttatgtaatgttgtctacaaagtggtatccaaatgcctggttaacagattgagaccgatcctagatgatcttgtntctgtggaacaaagtgcctttgtgcacggaagaatgataactgacaacgctctcttagcctctgaatgtttccatgctatgcaaaagaacaa

SEQ ID NO: 70738 - DNA, 446 bp, Oryza sativa
agcttcaccaacatatttggataattcaacatccacggcactcctgcacccataacaaaaggtgcagaacataaattgactagcaaggcaatgtggagttcaagaaatttggggaaaagaatagcataattatggtacctgaaatcttcaatgtatgctgaaggaagctcctcatcagcagctggcctcaattttgtacatttcttttaacatgtaaaacaaaaaacatggtgacttaaattaaagcagacacatcatgtttcaaatgaacaaagaagactatagacatttcaaaaacaaatacttaacccaacatctcaatctaacccggtgttagagaatgaaagccattgtctagaggtaacacaagttaatacacaatggattgggcagaaacctgtatactagttactgaacttaatacagctgctgtggatgactatttg

SEQ ID NO: 70739 - DNA, 440 bp, Oryza sativa
agcttgtgtctgaatattactcagctctccatctcataatctctcgattcacaatttgtggtagagaaatcacgcacgaggagttaattgagaagacattatctacatttcatccaattaaccttcatctacatcggcaatacagggctgcaagatatgagaagtactatgacctgctatggacattaagagaggctgaagctcacaaactgttgctcatgaaaggtcagtataatgacccaccaaccggtgcatcaacgagtaggacgaactggttacgagctagaggtcaagggcgaggtggaaaccgactgcgaagaggaaagtacaatggaagaaaataaatcacatttgtggttgtagctcaacacaggatgctgacagatgaggtcattgaggacaccaaaccgtgataacatatttgcctgaacttctatggt

SEQ ID NO: 70740 - DNA, 343 bp, Oryza sativa
agcttgcgactttattaatcgatgagtacgccctgctgggctggcgcgccatgctgactgaagtcaatctgtcaccgaaaccaggcctcgtggatcgcattaactgcggtgcgcacaaagatatggcgctggaagatttccaccgcagcgcgctggcgattcaaggctggctaccccgtttcattgaatttggtgcctgtagtgcggaaatggcaccagaagcggtactccacggattacgcccaattggtatggcttgcgaaggtgatatgttccgcgccactgcgggcgtaaacacgcataaaggcagcattttttctttatggctgctatgtgcggcaat

SEQ ID NO: 70741 - DNA, 386 bp, Oryza sativa
  unsure (1)..(386): unsure at all n locations
agcttctatgcgcgtgatctcattgtcgccggactgcgcttgccctgcggcctccgttcaacggagaacgccgactgtcctgccgtcactgcggtgcgcctgcttcgcagaagtccgtggcccgtacgtcccgccgtcgccgtggtgcgccgccctccgaaatgagatgtttaccgggacgtactgtgctccacagatacatattctttgtccttactagctaggttataaagatcctcccaaatggtagttcgtgtggtatgatctggttgctagctagagttgcctcagtgcgactctccggtcattaatgatgatnttatttggaaagtgcagaagaatgtgatcttttagtaaactcaatgtataaaccgcttatcctatgt

SEQ ID NO: 70742 - DNA, 449 bp, Oryza sativa
  unsure (1)..(449): unsure at all n locations
agcttatcttccgaagaggcctcaccgaccaagcggcgtcagctcgcgccgcgtncgtcgcgggtgagtctcggcgtcagctcgcgccgcgtctgtcgcgggtcctctgcgccggccctcgccttctcttcagggcggccgcgttcgccttcctcagctgcttctgcctctgcttcgcctcctctcccgccgtgcggccccgcgcgccgcggtcttcgacgccagctcgcccccccgttctctgctcgccaacggcgcggcggcgtcctgatacaaaccntgctggggccctggtcgttgctacatcggaaccaacctgcggcttgctttgagcacttcttcgtcgattatcactgagtgctgccccttatcngacaagttcatngtgcacatcatctgatcatcaagcttcactggtatgctcctagaacctacatctcagaccctat

SEQ ID NO: 70743 - DNA, 406 bp, Oryza sativa
  unsure (1)..(406): unsure at all n locations
agcttatttatattactactagtccattaatccgaattaggtggataatcccgagaaaaagaaacacggttggataaacatcaaactcagagctgagaggcctatggattatggagctccatgtacaaattattttggtgatggctacatggatctactattcactatgccagcagccgaccaaaatatctgaaagcatccttaggagtctcgagatatatactccatctctccaataccaaaaatcagagtatttggtgatgtctggattcatatctagaatctatctctcttatgagacagaataagtatgttccaacatcatctatagtactcatgtgtcatacaaagtttccatcatatgagactgagtgtataaatgcangattgatattactgttggacc

SEQ ID NO: 70744 - DNA, 423 bp, Oryza sativa
  unsure (1)..(423): unsure at all n locations
agctttcacacggagtttaattattctaggcataatttaaaggatatattttagggtcgttntgggacgtgacaagagctttgattatcctgtggagcatgataaccgtctcaggcgggctgctttcaaggttatgggcaatgcttggaagaacttcaagactaagctaatcggcgagttcgtctacaaccaggcgaatccagatccaagagagaaatttccttggatcacggcacaagtctgggaggaattccatgcgaagaagtcgacccccgagtatagagctagaagcgaggcatatcgcttgctctagatcaagaaccagcatccgcaccggcttggcaccgccggatatgccggtaatgaagaggaatggcagcgtgaggatgaagaagcggangaatcgtgcacaccgctcgtgtt

SEQ ID NO: 70745 - DNA, 282 bp, Oryza sativa
  unsure (1)..(282): unsure at all n locations
tcactcgacccggatcttaagtcactgcagctgcagcttaacttcttctcttgtcttctatgagcccaccaacccgagttgtgctcaagatcttatgcatggatcaaatgggaacttgactgcatggaattgaaataattgaactggttacctacatacagaatcgtgggtcgcttgaatanttgactgttggcaaaagttagcgtgaaaatgacgaatcctaaatctctgactgatctgaattgattgggtctattgtctatgtacactggatttacctca

SEQ ID NO: 70746 - DNA, 447 bp, Oryza sativa
  unsure (1)..(447): unsure at all n locations
agcttgtcgcgcgaatcacgaagtgatattntgccacgaatgcacccaacacactccaatatgtccaaaaatcatgttctggtgctttttgaactttttcattccggtctaaaacatcgcacccacctatggcaatattggcattaattcacaaaagttcgccgcgcgaatcacgaagtgattttttgccacgaacgcacccaacacactccaatacgtccaaaaatcatgttttggtgcttttagaactttctcattccggtgaaaaacatcgcacccacgtgtgccaatatatggcaatattggcaataattgacaaaagttcgccgcgcgaatcacgaagtgatctttgccacgaatgcacccacacactcaatatgttcaaaatatgtntggtgcttttgaatttttattcggtaaaacatgcaccacctatgcatattggca

SEQ ID NO: 70747 - DNA, 426 bp, Oryza sativa
agctcgtgatgctatgagatgaaccatcaggtaaggaaacatcggatgtacttgaagctgagctcaaaagtgaactaagtattatcaggggagctaacagtgaataccaacacaatatacattctcttcaaaacgaaaatgaggatctcacaaggagaaatcagcttatggagaaggagcttgacctgaagactagccaaaaccaagatgaagataccaataaacaggtgagccatttaaatataatcaactgtggaaatctctatgcctgtagagaaccagttttaaaacagggttaagtacatcaaatgtgataaactcaatcagctgctttcttattggtctacggtaatgatgctaatgaaaatggagattctccagctaatgacgtcccagagccttagtcaaagatccaattactggaaa

SEQ ID NO: 70748 - DNA, 461 bp, Oryza sativa
  unsure (1)..(461): unsure at all n locations
agctttctaataaatattggaaacttatagaagagagaattaagaaaaagcttagtagttggaaagccaagcatttatctgttggtggtaggctggtgttgattaattctgttctttcaagtttagccatgtttatgatatctttttttaggtgccgaaaggggttcttcgtaaaattgattattatagatcgcggctttttttggcaaggggatgaccataagacaaaatacaggctcactacgtggaatgttgtttgtcaacctaaggaccaagggggtcttgggattcataatttggagatacaaaataaatgtcttttaagtaaatgattgtttaagttaattaatgacgaacgggtttggcatgatctattgaagagaanatatctttataataaatctataacccaagttgacacgaaacaagatgaattcccattttcgtctagtgtatgaatg

SEQ ID NO: 70749 - DNA, 350 bp, Oryza sativa
agcgtggaggtctccctacgttgctgatctccaccggctgggtgatccgggttagtaatgtcctgtgggtaaagtgtaccccctctgcagaggttaacaaactgttcgaacagtcgtgcccacggtcatgggcggatgtgacgtgattcctagcgtagtttcgtttgactactgccttgtgaaattgctgttgtgaaaaggtgatccatgtttggaaaaccctcagctgatgggatcagctaggcccggctggtcgtttgaaaactgttggcactgtgccagtcttgatcatttctaatgactgatacattgcatatactgcgaccggacgagacgcactgtctcattcg

SEQ ID NO: 70750 - DNA, 421 bp, Oryza sativa
  unsure (1)..(421): unsure at all n locations
agctttaccctaatcccgttcttgggtctattcatatgagataaaaattctaccgtctcccaaggcagtttcacccgaagggaacacttcttcaacagataaaggttctctttacctgctgcatgcaaggtggactacgagaacttactgaagagcatctctcctatagggtccttagcgtagaatttaaactcacataagcagaacaggtcgagcaaggaaagcttaataaaactactatattaccacaaaatagaatacatatggttttccttttcgggaaccccgagggatgatgatacaaacaaggtttgcttaccttacacaatttatattgcactccttgcttcaatatactagcaagggcgaactcttaataaatntctactactaaagcttagagagtggcttctgagactct

SEQ ID NO: 70751 - DNA, 421 bp, Oryza sativa
  unsure (1)..(421): unsure at all n locations
agctttaacaactaagagcacccgcaatggtaaagtagggtgctctctataaaacatgtacatctcagcaatagactagattaatagtaaaccacctcaatagtatgtctacataggtatctatagctctctcatgcattggctcgtttntctctatagactatctctaagctagtagatagctttgctctctctcttcatttaatatcttccaagtaggaaaatatgctgacatggatctcttgtagatagcttatagataaccattgtgggtgccctaattaaggggagtacttaattacgagtactactcaaaagctggcaaaggtagtacgtaccacgtattagctaattctttctttccctaaaccagcgaatagtcttacactctctctgtacatcatacattctctttcctgaa

SEQ ID NO: 70752 - DNA, 463 bp, Oryza sativa
  unsure (1)..(463): unsure at all n locations
agcttcggctctagctgcatcacttntggaactgaagctagtctaatcaaacaatnttagctctataaaaaagaaatagccgagttgactagagtaacctaaaaaaataaattagatgtgtgagtggagttcgggccgctatatagaactcatctccttagtgatcgctccctgtttttttagccacttcaccatatcattactgtgaattatttgccccatgcctctaaaacaaatttttcttcatatggcattgcttaaaccactttctttaagttatttaatttatggttattctcaaaaagtatttaatctatcactacgattaattaattagatgatctgataaataatctatttcaaacacataagactgctgatatgaggtaaccattatttgaagtagagttcatccatcanatntaattctacatcttgatgtctatacatacacgcatatgtg

SEQ ID NO: 70753 - DNA, 413 bp, Oryza sativa
  unsure (1)..(413): unsure at all n locations
agcttctgtgttcatctactacaccgaccttaacaaggcatgtcctaaggatccttaccccctgcctcgcatagatcagatcgtcgactccactgcggggtgcgaccttttgtgttttctagatgcatactctggttaccatcagattcgcatggctagggaggatgaggaaaaaactgcgttcattacccccgtaggaacctattgttatacatcaatgcccttcgggttaaagaatgcaggtcctacttttcagcgtactactcgaatttctttgggtagccaaataggacgtaatattgaggcgtatgtcgatgacttggttgaaaaacgccaaccaagagccttactctcagattagcgggacttttgaacctacgctcgccgctanactgaccccgatagtgcgtgtt

SEQ ID NO: 70754 - DNA, 299 bp, Oryza sativa
  unsure (1)..(299): unsure at all n locations
agcttgtactgtatacaagtagtacacagcaatcttgctccagctaccacaatgtaattagctccactggttaattatatacttcattttncttctctcttcacatctcatcatgattatgttgtagtatgcgttcacttgtngatcttagatgaagaaattacgaagatgaaacattacgaaatacgatatttaacaacatctcagctcagnttgatacacacttagagcaggtgctatagcagttattagcccgctattaacatattttaataagatacaagatgagagagaagagc

SEQ ID NO: 70755 - DNA, 421 bp, Oryza sativa
  unsure (1)..(421): unsure at all n locations
agctatgtctcatgttntacaatcctacatttgcatatacaagtcactttagtgcaaggctaactggtgggcagatcatcttgtgctaacttaacccccgctcgagtatgctttgtgctcttgctcttttccagtcatgaagagatggctctcctgtctgttcaagggatccggctcagaatctagccgccatcaagatgagtcaagtgatcggtcatccgccgacgtgtcgatggaggatacggacgcagtaccgcaactctagagaactccaataagtccaaacatcatgtcttggtgctctctgaactttgtcgtacagctggaaaacatcgcacccacatgtgccaatatatgccaatattagcattaattgacaaaaatccgccgcgcgagtcactgagtgatctcttgacacgga

SEQ ID NO: 70756 - DNA, 464 bp, Oryza sativa
  unsure (1)..(464): unsure at all n locations
agcttcaaagcacagaacgtgctctgaaagttgccgaggtgagatatgtttgatgactattaatgcatttacatatgatgattctatgatgaatttgattccatacatgatttttcatgtttgtaggaggaactgatgaggctgcatttggaagcaacaactaagtcaaaacagctgacagaggtaaagataccttgatagtacgatagtagagctgctagtataatcctttcagtcatctaaacttgatgcatattagtatcaataatgtgaagacaatgatcctacattacagttatgatcttattgngctaaactaaacttccaagttaaatgatcagctggtggagctgatcagcgataacataacatgaccaagagatacatgccttgtagatgcacagtccttttctttgtctccagcatttgctgcatttcanattacaatatgtgtctatcattct

SEQ ID NO: 70757 - DNA, 441 bp, Oryza sativa
  unsure (1)..(441): unsure at all n locations
agcttatggaacggcgcttactgtgatgaacagaaggtcaactcgacttattttcaaacaaaatatataaaatttatgttgctccatcttaaagaacccagtcatcatcaaagtacgagtaaaagggctaaagaaacagtgtgccgtcaccggtattgagtactgagaagatggaacaccaaatcgttcaatgatagatgagcttgcctcaagtaatcaaatgtgctccgaagctagctagacaagcaaagcaaaaattaaccatactaaccagccgtaattaanaaggcatatgctattgtattaatggaatcagccactctctagcaatccctattggctaatgtctacatgaatcactgactctcaactangaattaattattaggaanacagccaaaacagatacttgagtcctaccgtaggatcgaacacgagtag

SEQ ID NO: 70758 - DNA, 395 bp, Oryza sativa
agcttataaatattcttccattatactaaatagcattagatccaatgtcatacggcgtatactatgaaagatatggcctcagttttgctcaaaaatatgcatcaattataatcctttgcatgaagggataaaaagaggaaatcatctactatgaggaaaaagcatccccaagaaaatacaacacgtgtagttcatctgttcttatcataaaatagaacaagtgtagttcatctgttcttatccataaagaagagagcaagtgctcgaaattagagcagtagcaacagcatggccatataatattagcaataagagcagtagcatggccatataacagcagtaggggtatatatgccacaggggcagcaacagcagggggagaatcacataaacag

SEQ ID NO: 70759 - DNA, 463 bp, Oryza sativa
  unsure (1)..(463): unsure at all n locations
agcttcanaaccagataaatggataggtgaaatttcatcacattagaataaacaattcattggcgtattacacaacacttggagtatggaagcagaatagtcaaacacgttaacaatgcaattntaacacatttataatccaaatgtatataagatacaagagtgcggaaaagagattagatcaagtgaaatttgaatgtcaaagtaaaagctccagaagtacctcaagattggtactgacagcaatcatatgtttcgcaacagcatcaggtctgaatcaacacatttaggatcagtctcaccataataatgggactatgggcaaagggtgttcaggtgctaatatactaacccaagagaagagacaatccactccttgagaagtcgagcatttaacattgnttcagcttgtgtgaaggctttgaganaccacaactgcaagttttcacataacattaaaacc

SEQ ID NO: 70760 - DNA, 387 bp, Oryza sativa
agcttttaggttgaactggtcggtgcatataacctaataatagacttgtgaaataaggtgacgtagatcactgtctccaactcccttgtcttcgcaatcgtacatacgcctacatctaaaaaggatatgaatatttagaacaatgatatcctgtagattaagttacaatggctcacacatcctattgtggtggccttaccctgtgctcgacgagccctgagattgttgggtgagggtgatggccccttgctggcatgttccagctgccgagagcgcttgggtgacagccgggacgctctgtggggcgagcagaagcggtggtggctgcgcccactctctggtcacgatactggtccctgtgcagcgtcggcgggcagtagtgagcat

SEQ ID NO: 70761 - DNA, 473 bp, Oryza sativa
  unsure (1)..(473): unsure at all n locations
agctttgttcagataagacctcttggaatatctgatgcaattccgtcgattcagagaatgaccaagttccatgtggtaatgtaagcattaatttccattatgcaacgataaataaagatttttctctaatttctacgtgtatattgacctgattaactatacatccagagaatggaagaaaaatgcagcatactgtcagttactatgttgaagtgtaaccttcaacagaaatatgataaatgaacaatgtttcagaatgtgaacacgttccaacagaaactcatgatccagcagaaggggaaaccaaatccacaagttgagaccttatgatcaacaaataatgcangatgtgatagatcatgccagaacagatgcatgttctttcagacatccataccaatgaaccacanaaacatctgttcggaaataacggacanacctgatactcttctttcatatattctgtcaacata

SEQ ID NO: 70762 - DNA, 435 bp, Oryza sativa
  unsure (1)..(435): unsure at all n locations
agctntaatcacagtcaaactcaatgaaaatatgatgaaatattgtcaaattggatttggtgttgagcttattaagggaaaaaagaacaaatattgcttggctgtttctttntcagttaggccgtatagtatttcgtttcttttctttttctcgttgacattaggcaactaaagaaaatactgcatagtttgatgagatttgagtcttcaccggtaaccagcaacacgttgcgatcttcttatttcaggatctcaagatgctgaagtcgcagctgtactctgcagcagagtatttcgaactagcctacacgcangaagatgacaaacaggagtacgtgatgtaccgattctttctttctttntntctgcactagatcatcaagcanaaccccagctgctgctagaataattatctcanaatgtgtacgaacaata

SEQ ID NO: 70763 - DNA, 319 bp, Oryza sativa
cagcttgcatgccaactaacaatgcgtgtagcatatgccgctgtaatctggggctgaaattatagcactcacagggctatcgtgtgtggacagcaaccaaagaactgttcattggcgccggtgatatgaagtattcatcgacgcaatcactcaatttcgacccttccattcatcaaattttgcagaagactcccttattttctctttttcagagcgccggcctatacttgaattctttttcatcttcacataagatatatcaggatctagagggcccttacataagaatacatagatagtgaacttacatttacggact

SEQ ID NO: 70764 - DNA, 378 bp, Oryza sativa
agcttgcccgcatgtacaccgaacacgcacttatcggggttcagctttatgcgggtggagcggagactctcgaaagtttccgccagatctgaaagtaaagtttctcggtcgcgcgtcttcacaaccaagtcatcgacataagcctcaacattacgtcctatttggctacccaaagaaattcgagtagtacgttgaaaagtaggacctgcattctttaacccgaatggcattgtcgtataacaataagttcctatgggggtaatgaatgcagttttttcctcatcctccctagccatgcgaatctgatggtaaccagagtatgcatctagaaaacacaaaaggtcgcaccccgctgtggagtcgacaatctgatctatg

SEQ ID NO: 70765 - DNA, 479 bp, Oryza sativa
  unsure (1)..(479): unsure at all n locations
agctttgccgacaatggtgcgtgcggcagcatggtttccgcatatcccacaatgtatgtctttcagcaattgcctcccttcctctaaagatacgcagcgttgcagaatccctgaagggcttttcttgtacaactcagcttcatgcataacgtaaagtttgctccgccttgaaatccgctcggcttcatctttgtcttgtgggagttcttgagaagtcaaaaatcgtatgaagggctctcgccaatcggcttcaaccagagctacgtcatgagtgcccgcaatttgggtagtatccttgtgaggtacggtcggcgtataaaggtgttcgacgaanacatcagagggcgccacctcgcgcttggatccannagtggcaagtctgtcggcggcttcattgttgtgtcgaagaacatgactaagctcgagtccatcgaacttgtcttncaatttgcgtacctctcgtcgatatgccatcatat

SEQ ID NO: 70766 - DNA, 479 bp, Oryza sativa
  unsure (1)..(479): unsure at all n locations
agcttgctcatcacgcaaattttctccgcacaacaattagtgccacttcccttcgtcccttaaaaaaagaatttaatatcggatgtgattgtaacatattctagtactatgtatctgcacatatttatatttatatttgtagtaatacgatgtgtcatatccagtactagattaactttttactgaacggaggaagtattatacatgccaaatatgcatataggacactccataatttttattctagattcactgctaaacaccagctaaatagatgatgcaaaacaaccagatcaaccagtgaataaggtaatcacttctttaccacacaaaactcggactacataatacacatctacaatgaatgcacaccgtacttgagtaaattaatactgttcaacgaacaatnccaaatctctcccanacaccaaacaagacagcagatcgaggaccgccccattatttaacagctctcatat

SEQ ID NO: 70767 - DNA, 467 bp, Oryza sativa
  unsure (1)..(467): unsure at all n locations
tgcaagcttggagatataaaccataacatggtgagaagaagtgagagaaataacaatcttctcttatatcttgtgaatgaggctgtaaagctaaatgccaattataaacttaacggctaagctatctcttataacgttaagctataaaggtttatgaccttatttatcgttatattgtggtacgtacccgatgtatgctnttagcatactttaaaaagtatcaagacgcatctgattctctattatacaatatgatacttctaaatactcgataactcgagaaaccaaagatcttagagtaaaacttatatatcacgcacacatgctctaatctaacacaacgacgctctaacaatatatatatgacctaccgaaccacatctacgcactaacgatatgagctacncagccacatncagaccaggcgaaaataacaccactacatgcacctatgcacgtcggtacac

SEQ ID NO: 70768 - DNA, 457 bp, Oryza sativa
  unsure (1)..(457): unsure at all n locations
agcttctcaacattctattctcgcgacacatgaacccacagtataagttcaaaatgctgctntattgtgttaccatcgttaaagactagcttcgcgagagtagttttaccggagccgcctaanncnntgactgaaacaatttttatgttntgttgaatactagactctgtcagcttagatatcacccaattcttctctttgtccctcccaaatattgatgtctcgtccatgatagtccaatgaggcacctcccctgttaaatatgtgattcgaattttgggcccacaatatattcggattccctatgtttgtaatcatctcctctatagtgattattgccggtcggcgcccgtgggtttttcccgcaagggttttccacgtaaaattcgtgtctccgttgtgcatctattntcataacaagtggtatcagagcattggagatcgatttacacgtcac

SEQ ID NO: 70769 - DNA, 353 bp, Oryza sativa
  unsure (1)..(353): unsure at all n locations
agcttgtagaatttcntctaagttctatgcgaataggtcccgaagcttctcgccacaaaaacagaattttgcaagaggaatttggcgattttaaatttgatgaacccggcaaagcgggggagaatcggatgtaactttttttgtagatgtccgtggatatattataagcctaatttcgagtccgtatgaaaaaagatatgactgttttaaggaaggtcactcgaatcagggttctatttcctttctagtggcggcaggatacaaggcaactcacaaaagctatcggcaatagatcaaacacaaatagaaagtgatttggtgggtgactgcgacngcggtgactgtggtgatga

SEQ ID NO: 70770 - DNA, 406 bp, Oryza sativa
  unsure (1)..(406): unsure at all n locations
agcttagacaggccatagttntagtagatagtgtttggttcctgctacaaccctagtttatgtaacttttagccacttgacccacatgttattttctctattctctttgcttaactctatctaaacttagtttgtaattntgtttgtcacaaagtgtggcaagactaaacttagctatcttagtaaaaaaatgtatgacaaatattaattctcaagcaaacataccctaagtttcgtgggaggaaaataaactaaaactacaccttagccttcttcccacaacttactgtgtctattactaacaactaaacaacttgctcaaacctatctgtcaaacttgtgacaaaatgagacaacatttgctagcatcaatatgcccnctanatcgatcaaatggtactcaaaa

SEQ ID NO: 70771 - DNA, 272 bp, Oryza sativa
agcttactatgaatattatcatccaacgagcataactggacaactcggtatgggcctactcacaaactgtctattctttgtcgacaaaatcctatgccgaagagaaatctcatcaaccatgatgatggatctgttgctcaacatgcaatgaccctctctgggcaatattgacaacatacaactggcaacatatagaagcaaaaactttgactggtggtggagcgattgtaagctgcatctatataaccactgctgttcaatgtctatgacag

SEQ ID NO: 70772 - DNA, 461 bp, Oryza sativa
  unsure (1)..(461): unsure at all n locations
agcaagcttgcacgcttatatattaaacgaagattttctatgcggtgtagcacgcgtcacaaaggcaaatgggagtttgggagagagttacgaatcagatcgtaaggtggtgtttggatccatagacttaactttagtatatgtatttagatactaatttagagtatttaatatatactacttacaaaactaactacataaatgaaagctaatntgcgagacaaattttctaagtctaattgatctatcattagagaatgtttactgtagcatcacatacgctaatcatgtattaattaggctcaatagattcctctctagaattactccaagattatggatgggttttattaatagtctacgtttaatatctataattagtggtcaaacatccgatgtgatagtgacttcacaaatttacttccatctaaacaaggtctaatggctatgggattgactga

SEQ ID NO: 70773 - DNA, 411 bp, Oryza sativa
  unsure (1)..(411): unsure at all n locations
agctntgcctatctagtgatctcttcaacgtaacgacgttgttgccaccgcatgctataagcgtagcaaaagaatatacacttcactcggagttggtgatcgtcgtggttaggataggattttcgagtggttctcgaggcttgtttgtaatttgcaaattgcaaccctggggttcacgatgtgattgtgtcaagtggagtgacagaaatggattgatttgggcgtgttcttcccaactctcatcttctcttcctcttgctgtttggaagtacttgcaaactcacgctntgttcatttcaccaatcattttttttcttcttcagagaactcatttcgtatnttcgttcacgcctgaagataaaaacggacgagagatgcatatggaattcagtgacaacaacaatgtattgg

SEQ ID NO: 70774 - DNA, 471 bp, Oryza sativa
  unsure (1)..(471): unsure at all n locations
agctcgtttcatgaatcttatatctgtcatactaagtagttggttcacttagctatacactgtcgtatnggctctggtgcagtaagtgcccataatatatgttatgacactctgcaatctctctcaaacgaatatgcagaacaattattcttataatgcagagtatgattgggagattcaagatgccttatggacatggttggcacacatgcatttcatcaagtttttgtacctggagaacatttgggagattttgtacacgagtttatcccatcgtgatataagcaaatgctagctagcatgtactagctagtatggcgtctctatagtctgtagacttcagccctacttctttgattactcatcattctttcttgatcaagacattataaaccttgtatgagatatattatttgcatgtgtggatgcatggatgccattgatacttctgcagctttatgatagtttata

SEQ ID NO: 70775 - DNA, 394 bp, Oryza sativa
  unsure (1)..(394): unsure at all n locations
agctgttagccgccgttggagctctctcttttggccctacgaatgaaataagcgtgaaatagcagtaagcggtggtggtgaggaagtcagtcaggttagaatagaactagccgacgctctgctttttcaaagataggatccctatgcttctgggaaggtatgccacaccccgtctccacacgcaaaagtaaagccggcaatgggtatttttaggtctctgccgtaaggaattggatgtcaagacgacgatagagatttgagctgtaaacacaagaagtaaatgacaaattgngagttggggttccttaacttaagttgacggtggaacccctttgaacaccccgcctaaatgggaaggaagctctagaaaatgagctcgcagttcctcaataat

SEQ ID NO: 70776 - DNA, 404 bp, Oryza sativa
agcttatgctcatatctttatgatacaaagataatcatttcggtagaggcagctgaactggttcttgtaccaaaatgaacgtacatatgaatgacagaatctttaagagaataaggagttcaagtcttccacattgaatgattatggagattcatcacgagcagtcaactgagagatactccttgtcccttcagaattggaagcacacaacagtcgttgtccttgcacattgagatgctcaattgttcattgtctcgtttacagacgagagatggtaatcactaatcagatctagcctgctcattattctactggtaatgcagtgatgaaatgtgttcttaaaatggtgagctcagtcaggcctgtgcactactacaataataatgcaactagaacggaatact

SEQ ID NO: 70777 - DNA, 295 bp, Oryza sativa
  unsure (1)..(295): unsure at all n locations
agcttacctcaccttgcacagaaggtaactctgcacgagcaaaggtttgcagaggcttagaagaaattcaagaaaatcaatcatgtgtatccttacatgtatggttctgatgaagaggacgataccaaagtagcagcagccgagtgggtcagaagcaaaaaggttgtgccatgcccatgggtgaggagttctggaaaagaggaatgatttgactttgatatcaccaaggctgataagaattntgacttgttacttctggagaaacagattcaacttcctgctggtcatattatac

SEQ ID NO: 70778 - DNA, 433 bp, Oryza sativa
  unsure (1)..(433): unsure at all n locations
agcttcagcataaacataccaccacactacaaccttcaggccacttcccttttcttaccttttcccccttaactgatataaaaaaaatcatagcataaaaaaactcacaagagaaattaacctcactgcaagaaagagatattccccaggaaaaaagatagagaggccttgcttagatccaaaaaattntagccaaaaacatcatatcaaatatttggacacatgcatcaaacattaaatgtgggaaaaaatcaattgcacagtttgcatataaattacgagacgaatcttttgagcctaattacgccataatttgacaatgtgatgctacaataaatatttgttaatgacagattaattaaacttaacaaatntgtcttgcagtttatagacggaatatgtaatntgttntggtattagctcatcatcaatg

SEQ ID NO: 70779 - DNA, 466 bp, Oryza sativa
  unsure (1)..(466): unsure at all n locations
agcttnttggacaaagtcaaccgtgcatcanatagttatgaccggagggagtagcttgtgtagtggaggcttgccattcaatcacagaggatattttggtttgactcaatgttcagatatataccagctacgcgataatgatccaccattgtgggattaataaaacaatataaatatgctatttcatcgaaatttcagatgtaattatatttaaaatggtactataatgagagaaaatatgatatagataaatgagtttataatacaacatggcttaagaatttataattcatgcttggaacaatntatatcaattccggtcaatatactagccagaattcgactggaacaacttgaatanaaggtacagtatntggctcgccggaaccncctattntccctgtcattctatccaatagcagaatggaantgataagcttgtggagagagcttaatgaagtcctat

SEQ ID NO: 70780 - DNA, 402 bp, Oryza sativa
  unsure (1)..(402): unsure at all n locations
agctngcttgcttatgccctctntgtttagacttataagccaacttataagtcaaaaagtctaaaccaaaacaaacaagcagcttttttatttggctcttttaagccataagccactctaacactattaaggccttctttgtttaggcttataagccaacttctaagtcgaaaagtctaagcctaaacaaacaagcagcttttccgtttggcttttttgaagccataagccactctaacactattaagccaaaagctaggttgaagaagctnttttggcttatgtgaggtagatgtatgactcaactactaaacttangacattaaatccaccggcttataaatcatntaagccaataagctgacttaaaagtctagcccaataagcctaagcctaaacaaa

SEQ ID NO: 70781 - DNA, 328 bp, Oryza sativa
  unsure (1)..(328): unsure at all n locations
ctgtccaagatcttattttcttcctttaatccagaaagataatcaattcagtttgagaaaaatngaaaaatgccatcaatgagatacaggagttacaaaatacagacgtacgggagaatgacatgaggtgcctagacccacatgtcaatgacacatacgatggtattctccaactccgagattttgagatggtccaagcaaattggcctcattcagttttatcagagtgatctagacggtatttcttacaacactgtgaaatactagacatgtacctggcagatctcaatttgtttcattaactcttggttcttgttctgcatgtcat

SEQ ID NO: 70782 - DNA, 411 bp, Oryza sativa
  unsure (1)..(411): unsure at all n locations
agcttggagagttgtggnggtgaaccgacgatccagctgagaccacaccatatgaccgaggcaaattagcatgataaactgaagatggtgtcacatgctgtgccgtcgtaagcaaaattggtgctgagggtgatgcagtactggatgaagaaggatcagagtaacggctccaaacatacggcaaattctgacggagcgctgcactgccatgacttgtaagtgatggactccccagcagaacatttccatggtgctgtgagcctgacaagtagctgaaccgatcgtcgtattgcaatcgatctccagataatgcattggccatggngaatgagtggctcanattctgtggggcagtgtacctgatatgtgattgacttgngcttgcagaanttgctgaaacattgtgcacac

SEQ ID NO: 70783 - DNA, 260 bp, Oryza sativa
agctactaatataatgttgccatgagagaatctccactatgattagaatcactaactatttgtaccatgtcttatggacatagtggtgttagcagttaccatatcactgggcttcgtgtcacgggatgaatttaggatacaaccgatctaaacgcttagggcagaacggggggaaatggccacaaacatttaatgtgcgagcattgacataaaataatgccgtatgtgatataaaaagaactgcaaatttgtctcactct

SEQ ID NO: 70784 - DNA, 417 bp, Oryza sativa
  unsure (1)..(417): unsure at all n locations
gcttggaaaacctaacttatctagcatanttcgtgcagtagaagctccccaacttatccagaatttataatatcttaaactcccaacttatctacattntaagaagttggcttcaaaccaattgcattaagctccccccaacaggcttgtcantttttgttctctctaacaatctagattttcaactaaattattttcaactaaattctattaccaaaatctcaaaatataaaggattttgaccatgtgtagtttaaaaatataagaaaatttgaactatatagttacaatatttttggacttgggtcaataatggcaagtttatggaacttccgacagctgtacttctaccaacaacaaaagctccttctaaacagttggtttttatcgattctaanaagctgtaattatagaatt

SEQ ID NO: 70785 - DNA, 116 bp, Oryza sativa
atgaaaacgtgctgatcatgcctattaagtacccacactggatggacattgaactgaacgctatgagtgtcggtgacatgctatcatgaatatcatcactccaggtatgaggatga

SEQ ID NO: 70786 - DNA, 416 bp, Oryza sativa
  unsure (1)..(416): unsure at all n locations
agtctgttagtaatatgttaatttactttaacacttgattaattcctatttaatatattcagtctatattgatatcttagtataaagtagtatcggagtagtagccgatacgcgttaaatctacaacatcggctatgctatgaacatatataatctttatattaaagtacttttagacataagtgatttatactgtctcggcaagctggtccgatctatccgaatcacttggtttaaacatatttcgatttatagattatatactgttaatatctacagtcgatcgactagatttaactttctttttgctttatatatcattgccgatctaattcacgttacatcggctagcttacaaacgatacgtcatcggcatgtggccgatcgactatcgtntatggatttaactatggttc

SEQ ID NO: 70787 - DNA, 382 bp, Oryza sativa
  unsure (1)..(382): unsure at all n locations
agcttctcttactgaatggngggaaagattgagcaagaatgagtaccaccacagtactcagcaagtcacaccgggagatgcatgattaatgcaaggtgtacaaggagtaataataatagggttaggttttgcagtaaacatcatttgaaagacacttagttgctcaaagctattntgtaaacacgatcctaaagctacacaatattattaatcaaggctgtgaaccctcacgaacctgccttaacccaaggcctacaatgattcggaccgaactggcaactcgacctgngtcccagctcgtcccaagccaacccaggcctaccattccatattntagttgttaagaaaattttaagaattaaaccactaacttgtgtacatt

SEQ ID NO: 70788 - DNA, 150 bp, Oryza sativa
agcctggagtgctgtgtgggtggtggtggtggtggtggaacattctgttgcgccggattctagatgtggtggaggaaagcagccatcatgttggcctgctgggcaacgatttgggtgaagatggcgttggtgtcacggggccgtggtggt

SEQ ID NO: 70789 - DNA, 470 bp, Oryza sativa
  unsure (1)..(470): unsure at all n locations
agcttaagaggtataaatccatacgcgtcgtatgtataatatcgtgaccgctgtcgtgcatctgtagttggtgcagagatcggaagttactttcattatcttacaaaagatatgtatatagtggcaaacattggagagcttaactagttaaaacttgatgacgcttgtcttttgttgacaaaaactcacaatgtaggattccaaaggacatgatgcatatagtcccaacttcaattctgcatagccttgaagggatgcctgngctggattggcagaggcttctgaagctccaatgcagtgatggatccttcttgttctccccttcagctactgcttatgctctcatgcagaccggtgacaagaaatgcttcgcgtacatcgacaggatcattaagaaattcgacgganggcggtaaagaatcgtggcatttcactgaccaatggttcggaaatctggttggtacagtgac

SEQ ID NO: 70790 - DNA, 474 bp, Oryza sativa
  unsure (1)..(474): unsure at all n locations
agcttcttaatggcccctatggtgacggaggtcactgctgaagcactcgctcgggaggaggtttgctggttatattgagtgatgatcctggactctgctgccgaggtcgctgcaatgattggctctaccgctgaggccaagaggcatccactctgccgcccaggccgctacactgcccctgtatgatgggctgcgttgccttgctgacgaccacaatgttcccattctcttatttatgaatcaccaccctcaaggccattcttccacccccccccaggtatttatcctatcgatctcttcgttataatggcaaatttgatgacacgctacagtacaatgtgctctgaattgatggggctatgccggataantagctntaccactggtaagttgcttgcagttccggttctgaacagctttgtgtctactctntcctacagaccacagattgatagcaccaccattactatgctg

SEQ ID NO: 70791 - DNA, 453 bp, Oryza sativa
  unsure (1)..(453): unsure at all n locations
agctttaaatcatatatcattatgtagagccactatcaatatgaagatatatatctccactggatctaaacacctccatcaggaaacacaaaaactacatccaactagatgacatcatcattttttccttaccacgacataggcatgtgcaatgtaagaccgagatccggtacgctgctgaaactgaactttttcacggttcagttggtttttggcacatttgtcctgcatatgacagaattataaccaggagaaatacttactatggcaagtaatcgagctgaaagtcaccgtagagctccagtcttcccgtctctagtgctccttgattccttactctgcatacatcacagtgtgcaagtcttcagttcagaagagtctacaatgcatattcaatcctacacacatgatcctatgtatccttanattaacanacattgatatcgagtctta

SEQ ID NO: 70792 - DNA, 438 bp, Oryza sativa
  unsure (1)..(438): unsure at all n locations
agctttgttcaatgtgttgagacgaatgcccccacttcgaacttaagcctgtaattgtaaagaaggcacgggtttgctatataaggattgagaatggggtttttgattggataatgtgtgtgtgcccaagttgttaagtattaaaaagtttcatgttataaaacaattatgagaaagttgtcatctcgagttaccaaggattgctttggttggtgtattgtttatctgatgttatctcgagttaccaaggtatttcctgaaccttntatcaacaaatcactgcattaactctgtaaaatanggaaatgctgaacatctagtctaactttgcatttacaaggcagagtatagttgccctgactgtccaacanggaaaacanaattgcttctangagcattggccgtatttatgatgcttaagttattctattatatttg

SEQ ID NO: 70793 - DNA, 409 bp, Oryza sativa
  unsure (1)..(409): unsure at all n locations
agctntagcttcatgtgtgagttgtacaaactagattntgatattggtgagcaatatttttccttgtttgttttgatgtaccagtgttttctttgtttcattttcggacgaatttctaatattttcatgggtaatttattgttttgtaggccctttcctccctgaatgttcgaagactagtaatacctgccatacctgaattgcaaaatacctggactactgtttttggttttaaacctgttgaaccttccaagagacaaaaaatcaagtctctgaatatcttgattatccatggcactggtcttctagaagaagcggtgcttgcaacaggcactattaaccaagagaacactactggtacaggctaccataccannatatcatgagaatattcctttgattctcttgt

SEQ ID NO: 70794 - DNA, 373 bp, Oryza sativa
  unsure (1)..(373): unsure at all n locations
tctgggtgtgtatttcttcttaattaaaaataccacctagttccttctaggttggtcaagtttttacagggaaaagaaaacagtttttcaagtccagtactaaatggtggtagaaccacaaggggcaaacattgccccctactttgcgtgatcccatcttccgcaaatgcaatacatgaataacttcttccttataatcatcttctagaatagatngtatataacacatgtnnttgtttgatatctgatttaatgtcaaatgctagatangcatatntaaaagaacaataaaatgtgtacaggtattatagccaccatcatgtggctgagcactgcttgtntggattcactcctgtataagataatctttgat

SEQ ID NO: 70795 - DNA, 389 bp, Oryza sativa
  unsure (1)..(389): unsure at all n locations
agcttgcatcacctcataagtcataacaatattgcaatttatagaaacagcatgtaatcgtcgatttttctttacatcgctttagtatatactccctccgtccttaaatataaggatagtgtcaagtcaaacattttcaattttgactattaatagaacaaaataaaaaagatcaatcctgtaaaattgatgttcctagatttatcactaaacaaactatcataatatacaactctntttatttaaaacgttntaattttatagatattgttagtaaagacgttatcgaagccgaaaaatgcttataanttgggacgggacggaggtagtacgtngcagaatggtagtagtagattaggcagaattttgcatcgttgggagtaccttga

SEQ ID NO: 70796 - DNA, 455 bp, Oryza sativa
  unsure (1)..(455): unsure at all n locations
agcttgctgttntaacgtgatgttgagtatgccgataggggtttttggctggtaatgctcatcagtatcaacttcttcgatctcctgtttaagtcatcacacaagcaaaaagtctcattaaaatgaacatactcacaaaatactaattcaaccagttgaagcacatgcgtctgatacacttgtagataatgacattgaattagctcatatcctctccattagcacacctattaaactcatgtctaactctttcaatttcctattggcattagcactactgtaactcaaaataatgtacaaatatgtaacaatactaatcatgaggtaaggacatgaacatctcagcatgaaatatattgttcttagaaaaatgatattaaatataaatgaaatatgaaaggttccaatgatgtatggaaactgcaactgaattaatgcatccagagagaatcaat

SEQ ID NO: 70797 - DNA, 446 bp, Oryza sativa
  unsure (1)..(446): unsure at all n locations
agcttgcagtctattgtgcnaagtanagagcccaatggagagaatccattgaatcccgggaaatgctttcctcctagcctttcgtaccacgtggggtcacgtactaagcaagccaaaggcaagaagagtaagaatcagaagagaaaagcgtcgatgcgaactgaagaagaagtacgtaagatggctattagcagcaccgaatggcctcccgcagggataactattcctagacgtcaaagaggaaataccttccgaggtgcacgacagttgacccagcacctcctaagccatggtggcagagtatctgatagtgaagggtcagatcaagtctcctcggatgatgaagatgagtctccccgacatctcggtgaggaagagatggaatcaaaggcatgcacccgttgtggagaaattggcacattgctgcangtgtctcacactctgcc

SEQ ID NO: 70798 - DNA, 299 bp, Oryza sativa
  unsure (1)..(299): unsure at all n locations
tctctagcaccacgatgatgcgatcgcggcggaggcggacaccgcgcactgtggagccgaaggagagctccccgatacaccggctctggtggtcgtcccagatcatcacctctgtaagcgggtagtgaggggcgtctacgccgccgacgagggccagtatgttacaccggaacagcatcttcacgacgccgattccttctcctccaccgccgacgccgttgtcccccgcggccccgaggtcccggcggaagatctcgcngaatggatcgcagttgtagatgcggaagcccgacttggtc

SEQ ID NO: 70799 - DNA, 400 bp, Oryza sativa
  unsure (1)..(400): unsure at all n locations
agcttgttactcctctcagaggcaacaattgaatggttgtatagtatatatattatgattntctggactgttgtaggattaactattcccagacagaacacattattattgatcaaagtttaggttccaaatctattgggcaagaagaacaatgttgaaaatactcgatacttccctattatatatgtgtatcacagatggaagtctcaagaacaccatcatttctaaaaaaacaaacaggaatattggtcaataaacataatagatgaatcaatatatataaacttaaggtaaataaacagtaattaattcaagaatnttgagatcatactattattactgaaattgtgaacccaggtcagataatattggtaatgaanatcaaaggagacagtgacct

SEQ ID NO: 70800 - DNA, 429 bp, Oryza sativa
  unsure (1)..(429): unsure at all n locations
agcttatttgatctatctccccagagtgtcaaactgaaggagacatgaggaatataaaggcagctatatgaatggggaagatggtgaaaatgtggattgtttgactggcttggatgcaattttgacataacacaagctcacctgttcgatgaccatatggctctaagcttataatatggtaggccgcaagatgaaaataccaccaaaaccaaatttggcaggtaatttgctagttntgagatttgagtattgaggtttgggagtcgtgggtgaaaaaaaagactctggatgacttgatgtaaacgaaattatcgaacttcaactatagtgccaaatgcagttacttgggattaaaaggacatatatgccaaatttacccaaattaagggtcagaacacgatataatctatctcagtctcacatttcaat

SEQ ID NO: 70801 - DNA, 480 bp, Oryza sativa
  unsure (1)..(480): unsure at all n locations
agcttacagttgtatggttgggatccacaattctggtgatcagcttcttagctccagtagaaaaccaagagggacaggtaaactgagcttcagagatctgtgatcgataagagagtaagataaaataattggcattcacaaaacctgtgtgttttgtatagatattgtatgtattacctttttataaagagcaatgatgttgtcatcctcaaatggtaaaaacccagcaagcagaacataaaggattacccctcaagaccagatatctgcagctgccccatcatagcctctgttctcaatcacctacaggaacagatcaaacactatgttagagatgttaatgtagtgccaatgtgcaatcaacatgtgtaatactaatctactatgacaaganaaaaaagattacctctggagcaacataattatgagttccacatgtcgtgtgcagcanaccgtcagcctgtatacgtgaattcaata

SEQ ID NO: 70802 - DNA, 449 bp, Oryza sativa
  unsure (1)..(449): unsure at all n locations
agcttgataatgttattatgcatcatttgcgattggatgatcacttcatttgtgaaatcatcctttcgagcttcatttacttcgattgacgtcttcactgcaaccgtagtattgtcttcaagagtctctttgtacaccttaccaaagcttccttgaccaagaacttctgaattattctttgtgattttctttagctcatctttggtgaaaatcttgatattgtccactttctgtagcactgaaccaccattctttttgaaatattcattcatttttcgcttttggtgcatcactagcgtgaaaagaacaacaacaattatgaaggaaaatcccanagtgaatgcctacgaaagttaaaaaacttattatcatccccgcanaanaaatacttattagcagacataacanatccatatatgaagtccagtattatnttttaatagaaatac

SEQ ID NO: 70803 - DNA, 416 bp, Oryza sativa
agctttgcaattataaaacatgtgtaagcgctagcctggaaaagacatgaaggctgcgccgttgacatgccgaccccacatgttaacaaaaaggaccgcggtagaccgagtacacatagacggtccacgggtcgatggaagcggatcccgtgtgtcaaccgaggcgagtggccgacaaacggactccactatgcaccacacgggttgcacacgtggaaaccacgcggctaccgagcgggcacactaacacggacactacacggtcaccacccgcacacgtgaacgactaccgacaccggtacacgggtaccggggtcgacgaccgcacaacgggtacggtgcgacaccgtaaggacgatgactgtgcatcgagggagagggaaccttaccaccacgcgacgaggcgtgggagcgac

SEQ ID NO: 70804 - DNA, 427 bp, Oryza sativa
  unsure (1)..(427): unsure at all n locations
agcttggtgggtgtttggttgtatccacagtgtggcaagattctcttcgaacaaattgggtcccacatgttaatgactaanaaagtgaggcaagatttccttaggcttagtaagctgtagtggctaagaatttgatcatcttccctttggcaaagtgtagctatttttgttggcaagtgatgacaaagtgtggctatgaaccaaacagcagataagaatgcaaatggcggctgctaactggctcanaagaatcatttcaatttatttggacagcagccctaagtggtcgcccataataataagacatgcgtagatggttgccttgtaccgccacctagaaaatatgtatatatttacgcggacagtcgtatgacgatgaccacccatgtagacaacattttttaggtcgtgcactcttaaatgctca

SEQ ID NO: 70805 - DNA, 390 bp, Oryza sativa
agcttgtgcaaaagtctgccgtatagacttacggtatcttagagtttgttagagataagagttctgtgcgacatggacatattttgtaatctcgggtataaatagaccctgagccctatgtaaaaaactagcacacgttcaaatacaatctgtgcgcatcgccacccttttactttcgtgttgtttcgacgagttcttgctttcgagctgagctacatcgatttcgatcttcaattagaggtaaaacttgttatggcggcttgcgtgctcgggattagtgcttccatctttatgatgctctaatcttcgttatgtaatgtgtcaagttatcatatactctatataatcttcagcaatattgctatcgaacattcaatcggctaacatcta

SEQ ID NO: 70806 - DNA, 384 bp, Oryza sativa
  unsure (1)..(384): unsure at all n locations
agctntatgaaaactacatagacaaacacttgtacagtagcatattgtatatttgtgcgaagtacaaaatccaattacttcaatatattatcacatcacgcaatcaaatacgagcgatatcacacaaaatacgagagatagttgagtgttcaacagacaaacagagattntcttggaccaacaagactccatttaaggggtgaaagcaaaaggacacgatcatgggccgtcagtggcagagaccggatgaagggaggcgtgggtcggtagaaggcagcanggaaacgtaaatgtggcaatcgacgaagcatggaacagagtggacagcacaaccggacagaccacaggactacaggagagagctgaaactgctatatgagcatg

SEQ ID NO: 70807 - DNA, 404 bp, Oryza sativa
  unsure (1)..(404): unsure at all n locations
agctngtaaattcccctattattntatgtaaagaaatcccctctggagccttgttcaactgtatgcaatcaagatccagattgttacctgtatcaatcaatcgatctatggcttgataaagtctaaacataccggttttcgaatcattagttttcacttcaagaatatattttatctatgacaaanaaaattcatcatggatcactgaacatcctcacagaaatttgtccgtgacgattctacttaccatcatctattgagcgtcacagattaaatctgccgatgttttcttcgaaatcatcatggatcagtacaatctattacattttttaaccgtcataaaatgtttntgggctcgtgtagtccagccaggcccgaccttacgtcacatattggtgccacat

SEQ ID NO: 70808 - DNA, 444 bp, Oryza sativa
  unsure (1)..(444): unsure at all n locations
agcttagcattgtattcttcaaggcgagctaagagctcaatcttctcanattatagttggtcaatggtagatttgattggctctttggcaagatgatccagcttgattntttcagcatgtacaagctgccgattggcttggattgttgcctctatgtctttcttctctcgccgatcagctagactttgtcttgctttctctagcttgagttgatgttgttcaaggtatatagctggggtaaggacgtttgatacgtcatatgggattgaggttcggattgtcttgaatcttgcccgaatagaaccgcagtcggtcaccaagctgtctaatgatgcctctagacgatgacagatgtcttcgagacttcttctaacatcttcatatagaggagctanggatctgctggtggtgtcttcttccacctcgtcgcagtagtccttgatg

SEQ ID NO: 70809 - DNA, 456 bp, Oryza sativa
  unsure (1)..(456): unsure at all n locations
gcgctactggtggtgtatgaggaggacgccatcgagtaacatcgctagattagattggatcacgctctgataccatgtgaggattttggcaggaaacaatcgcatgtttcgatcagtgcgttgcttacgcgttaatatatggtgagaatagccctcaccgtggcgattaaagaagtccacgagatcggcaacaaccgcgccaactcgggagagaaaccagcatgtgataacaaatataaaggaagagataatatctaatcctatcttatcacaactaaactgatcattatcacatgcatggagatagaaacagactcaactaatcaactaacacgcggtggggctgcggctgtgagatgcagaagcattagcggcgtcgccgattcctccggtttagcanggctgatttattggagtgggccgaaagtgaggctgtctcgcttcactctgtactct

SEQ ID NO: 70810 - DNA, 287 bp, Oryza sativa
  unsure (1)..(287): unsure at all n locations
gagcttaacgagcttctttcttatatctacccttgcaaagcaagcacatggcctgctttgctgtcggagactggtctctccccggaggcggccaccggagcgccgttggtgtcactggcatatgccgaagtgcacgtgatagcatcctcatcgagctgtcgagaattacactgtcttcaagactacacaatccaatttaaatccttcaagaacatgaattgagctacatgtatgagattgaacacaaaagtagaagcgtactgctgttacacaaaangctactacta

SEQ ID NO: 70811 - DNA, 341 bp, Oryza sativa
agctttttagcatgactagcaatgtcatcaacttttacctcattgacggtgacttggggtgtaaagccggtgttggcggctattaaatgccaattttatgccgcccatacctacataaaacataagttctaacacatccaacatagtggtaggggttaatattgacagattccacgagtgttggtgtatatttggatgcgggtaataaactgctagagtggggagcacatctagacttaaatagagaagaactacatcaatataagaattgggctcacaacttcatcgaaacattagaaattgagcccaactaatatagaaatggaccgagggagcagata

SEQ ID NO: 70812 - DNA, 447 bp, Oryza sativa
  unsure (1)..(447): unsure at all n locations
agcttgttcgacgttctaatcttggcaactgcatgcattgaagttaatcaatatattagtatcataaatatgtgaagctgtctagtacatagtatagagacttacatcctccgcgttaatcttgtacctcccattaaccctaagaaattcacacacataatacccgcaaaggaccattcctcgcggttacttgtgactcttcaggacatatcatagaaaagaatagttaaaatctgcaattagtaaaacaattggaaaacattaagtgagtggagtattaccggccaaaagggacgtgctagcagcttctcccttgttcgggtctattctccacccttgaacttgtagtattggtacgcatttgatggatgtccgtaccgttcacattaagganggatatnntattatatacattcatataaaaatggcagagtcataatcacttac

SEQ ID NO: 70813 - DNA, 398 bp, Oryza sativa
  unsure (1)..(398): unsure at all n locations
gactggatcattatactgtcattaactatgtttgccgtgaggcccgtataactagagcattcagtttgtcatcccattcgcagatgctacgggtcttggatcttagagacgcactattcactatcacactcaatgatgtcaacaatatagtgttcttgtgccactcgaaatacctacgcattgcaagatacactactgcagcatattattactcactttcaaaatccataggaagactggatggtctgcagacattggacttggattctacgaacattataacactggccactcacattactaagcttcggagtctccggagccttagatgcatgaagcaatatgattgttcatcttcacaccacgtcaactgacacatngtgcctgccgatgatatt

SEQ ID NO: 70814 - DNA, 448 bp, Oryza sativa
  unsure (1)..(448): unsure at all n locations
agcttccgctatctctctcttggacgaaaaccacattcatttcggttacatgtcatctacacgtcactataattngccatctcatcacagccttggagatcatgtgggctaccatttcaactgaagaatatttaagtactaataaagacagcaatgaagaaggcataaccatattatattgaagtatgacaattcactcatcacatccacacagcaacagcttttcaatctcacttcgattcaatggtcatcccaaattgcaagtctcaggctctgagcagaacaaatgccaatacaaaggccaaaaaatcaacttcagttcaagaaaactcacatggataaggatcaagaaattccacacacaaaccagcaacacaactactaggtagcannggtacacaagaaaaatatcactagatatttgagacagtaacattcttagatagat

SEQ ID NO: 70815 - DNA, 433 bp, Oryza sativa
  unsure (1)..(433): unsure at all n locations
agctngcgccacttgtttgggatgttatggcaaaagggtgcctagacaacatttccaaggagagaagcgacggaagcactgccatcgccgcccgtcaaggtctcaaagagaaccgagactaggctttcacccggccgacccgctagagggatgagacggcacgacaacgccctcagaagggggagtgacgctcgaaacgccaccgttgccggcccgaccaaggcctggctgggttttcactggccgtccgccgnctgcctatccaccgctgacacatcattactccaccaccatctaaacctcttccagtgcgtgggcaccactgcattggngccaccctcccacacacacacacctctcgccgtgttgcacctgtcgtgcctcaacgtgatgcaccagcatgcacctcgccggcctatgccgaccacacctt

SEQ ID NO: 70816 - DNA, 468 bp, Oryza sativa
  unsure (1)..(468): unsure at all n locations
agcttgttgaacctatgagctacctgatatcaatgcccacttccatcactcttcaataacccaagtatggggcaactccaaccttgtcttggctgcatgtggtatgggactatttgcatttgacgcctttaaggaggacggtcaacaaacttacagctttgaccgtggagccactcttggagtaagagaggctattggctctgatgatttgtactgccctacattcgattactcgtcatcaaaggttcttcttgtctcaagagaccgtccagcacaatggaggtatctgtcatagctatctatgtatcgtgtgcatcatgtgatcgacatgtaatatatttgtactatgtttaatgcttagcttatntagtcatctgtagtgccaagcatcttgctttcactgtattagcagaaatgattgggttcttcccttcagtaaatatatctattcatgttatttacccatgg

SEQ ID NO: 70817 - DNA, 301 bp, Oryza sativa
  unsure (1)..(301): unsure at all n locations
ctgcaacagatccactggcgctggagaccatangcttgcgcctncgccgtcgtagccaagcagcacctacatgttgcgttcgccttcttctgcatcacaatcgcaagaccctacctctgccgccgtactgctagtgcctcatccgagccatctcaatccgccggggctggcgccgcccccgccgacctgtcgtatccatgacatcacgggaggtcgcanggagggagagatggatggagcgtggatggaggggaaatgactcatcgccgtcgacggataaatgaaggtcgtgaggagaggg

SEQ ID NO: 70818 - DNA, 353 bp, Oryza sativa
  unsure (1)..(353): unsure at all n locations
agcttagctagtgtgagttctggntgtccgaagtcaaattcttagggcacgtgatatctgctaaaggagttgctgtggatcccgaaacagtgaccgccgtcaccgattggaagcaacccaagacagtcactcaagttcgcagtttcttaggtttggcaggatactaccggagattcatcgagaacttctccagaatcgctcgacccatgacacagttgttgaagaaagaagagaaatttgtgtggagcccgcaatgcgagaaggcgtntcacactctcaaggaagagctggtttcctcgccagtggtaatcttgccggatactcgcaaggacttcatggtgtattgtgatgct

SEQ ID NO: 70819 - DNA, 339 bp, Oryza sativa
  unsure (1)..(339): unsure at all n locations
agctctgtacnttttttagaatactcttctgtagacatttatggtattgaaatacttttcgagtatatgaatgcctactttacattatgttcatgttatactggatataccgctaacttatctgggagatgctttggtgcgggtataatttttgcttatgcaattactctatgtcatgacgatgatattagagtagtatctggtagtttagacgtggtgtctagattacgggatatcattatttanggttatatgctgcggatgagaggtgggccgctgatggtgacagctcantacgggtattcctccgtgcctgtatatgaatcccaagtaattttc

SEQ ID NO: 70820 - DNA, 447 bp, Oryza sativa
  unsure (1)..(447): unsure at all n locations
agcttaatactgtctggtacgtagatgaacataataacaatacttacttatttgggagtcttgggactgcaccataaccatagagatgggaatgtgcaaccgaatgtacttcttaacataacaggccatatcacaatgaatctgtgtttgctgctcacataaatatttcattacctatttattgcccatttcgccttgtattgtatctaaaccacggttctgcccttttcattatatagctagactatgatgcttccaaacttcgttcctatcatggaagcatttcttgctcaaatgatggtgtcatgcttctgaggaccatgtttttgctgctactaatttatncattttacgcccccaatttacatatcaacgtttccacctcttaatatatggcacttgttctattaatattatgtaacatggcatagtctgtatttatatgac

SEQ ID NO: 70821 - DNA, 445 bp, Oryza sativa
agcttcacaacgctccttctgaacgaatgtgtcgcaagtgtgaacgagaatgacattatcaagatcatgaggatgccagtccaccctggagtgcttgcaaccagcgatgagtatgttggttgaacatagttgaagtaaggccccagtgtggcctcgaacttgtcccttggacatgataccaatcttgggaagtcgcacgttacatgagcaagagtatgagtagccgctccaattgcaatcgtcagtgcgataacctgatatggtgatcagaacaaagaggtcaggctgtgtaatcctggaaatggcaaagagttccacacgtgtaccttgtggaagttatgttatcatatatggtacgacttgctgaatgctgtgatcggaccttgtagtgtgttcgccaccggaggagataccgcatgtcagttgatgttcgcaccctttgtat

SEQ ID NO: 70822 - DNA, 300 bp, Oryza sativa
  unsure (1)..(300): unsure at all n locations
agctgngtttctctaaggtagcactatgataggtcactttgagcaccgagacatacacaaacacctcgacgttgcatccctcttaatagtacggcattcctaaactcaaatgtacataagaagataattatactattaggaatgcctttttttttatctttctttcattgtcttgagggagaccaatgccgataccgtttcaccatatattcttcaaatgattgatgcggttacttgtagcttcaaatagtccctcatggtccatcatgacaaagccgtcactcgcccttcaccaccgga

SEQ ID NO: 70823 - DNA, 245 bp, Oryza sativa
  unsure (1)..(245): unsure at all n locations
gctttgacattctatacttaaancacgactgactgtgtatcattgtgacccggatgactaacatgcactccgtaaatgaattgtcgtggacatactgcgtaaagaacactacgtctacgccatgattatattttgattgattacaacgcagggaataacatgggatgtaccccttccgatggttacaaagatatattgaatataggggaccctctggagtgattggctctattgaactaccccat

SEQ ID NO: 70824 - DNA, 212 bp, Oryza sativa
ggatcaaataccctggagaacatttgatccgaggaatggtttggattcaatcttctgagcgagacatgactaagaagtggaccggcaaatctagactgtgactgatctaacagttgtagcagatacgagcaaataacttcataacatgatagcgtagatgaatagcggatgtcggctttagctgatcattagaatacattctattcatactg

SEQ ID NO: 70825 - DNA, 413 bp, Oryza sativa
agcttagcattctattatgagaataccatcaaatcatcaacttgtcttctctcgatatgtaagtgatatctgcacacgaacgaccacgaacggatttggatgcatgtgaacaacgttgggacgtcgtacctgaagccggcggtggagctgacgctggaggagacgtcgagtttgatggcgaccaacttcgagtcatgctttcacatgagccagctggcgtaccctctcctaaggcctctgggagggggaacatcatcaacatctcttctgcggctacctccctcgcgttgccttccctttccgtctactcggcagccaaaggttgattgatgacacccggcccactatactattttttctttagcaatgaaagatataatgatcttagtcatagagagttccatacacatata

SEQ ID NO: 70826 - DNA, 460 bp, Oryza sativa
  unsure (1)..(460): unsure at all n locations
agcttattagatgctgctntgttagttagctagctagcttcccctttggccacatcgaccttacgtggactatccaacggtcatgctgctgacgttggaccaaaccattacatctccatctctctctctctctctctctctttcaatttctctatctcattttttctctctcaatttctctatgtttcttgggtagtatattccttgtccatctccgaaattagctgacaagtggcgtgcaagtacatgctatttgttgtaggataaacactngatagctntccaaagtcaaaaaaaaaaattgcatcaagagctatagctagatgccgtgatcaggggagagttttcaactattagacctaattntcagggttaggtagtagagtgagattgctagctagtaagagaataatccacttatggtcanaagcttantcccgtgttaanggtatncttggca

SEQ ID NO: 70827 - DNA, 319 bp, Oryza sativa
  unsure (1)..(319): unsure at all n locations
agcttggctacttgtgtttgatcctaaaatgaaaaccanggttgacgaaaacacaaagttgtcgttaggacctatgactatattccataaggagaagagcttcatggcaagagtaatgcaccgtgcccatagcccatagttccagcttccacctaagaaaaaggtgatgaagacacacataaaagtacaggccatccaatgcagagtatcttcgaaatggggaggattggtgaggagtaacaagcgtggttctcttttcgggtgtgaggaaaccgggactttaataggatgcacaaaacttgcaaagacacgggactca

SEQ ID NO: 70828 - DNA, 299 bp, Oryza sativa
agcttctataagaaaaatcacaaaactacatggtatcagagctgggtcaccggcgacctcgccgacgcgaaccctagtcggcggcggcgctgtgaccagatgggttctgcggcgacgtcgacagctgaagcggagcggcgacgtctgacagcggatgcggagcggcagtgttgaccgcggaggcggcgactgctgctgcagatgttctcgacgcgagcagcgtgaaggaggatcatggcgcacgctcgctggttgagctgcgcaaggatttggtgcagcacaagctgtatggagcacag

SEQ ID NO: 70829 - DNA, 207 bp, Oryza sativa
cactcgacccggatcttaagcaccgcagctgcagcttatttatactcaaggaagataacctggtaggctatgaccatgaaaagacatatattacaacacattaacattattatcattaactggaaagctaccatcatcatataataacaatctttggtcatactgatatataggcgcatatcaaacctctatactctattttgcctg

SEQ ID NO: 70830 - DNA, 400 bp, Oryza sativa
  unsure (1)..(400): unsure at all n locations
agcttctctctctcacatcaaccccattccccatcatctcttctctcccattcctagctaactaagctatccctctaatcctcatcaagatcatttcaaaaagcccacttttgatgatgattagctagctatctatagagataagcccncatttccattctaagttagttcttccattacatgcactaatcactttcttgatgaagtcataacctcagatagattggaaggattctatttctccccctcagatccaagaaagatccacccaaagaatccaagccaaaaacaaaggagatatcagatctttgccctagcttgcttgattgattgagagagagagagagaaagatagcaatccatcatccatgtacatggactgaaccctaggaggagcact

SEQ ID NO: 70831 - DNA, 427 bp, Oryza sativa
gatctttatattatatcatttgtacagctacggtgctatcgcagacagataattttctactgctagatcggcagtaataaagcgtcagtagatccaatgaagcaacgaaattgagggacaaccatgtgggatcactgtaggaccaacgcgaatacccaaaccctagaaaggaaatattcacaacgtggcagccatctcaacgaattatccgaacctccctaccaaactaacatctcctaattagataaagagaaacgctgaaatctcatcaaacaaaccccgagatcacgatcagagagcacccagatcaccgtcgtatatctgcggaaccgctccaaccaattcactcaattctgctcggaaacacgaatcgctgttcaattcttacctggagtgagtcagctcgagcgaattcaaccgcgagtcg

SEQ ID NO: 70832 - DNA, 449 bp, Oryza sativa
  unsure (1)..(449): unsure at all n locations
agcttctacagnttcgcaagcattgacgcgagagatatggctcgtacttgtagttgtatgagaccactgctttgccccgatggtacaaaagctgtgttttgtgtttagtttaaggtgtaaagttttattaacatcgaatatacggatatatatttaaagtattaaatatagtctaataataaaataaattatagaatccgcatataaaccgcgagacgaatntattaagactaattaaatatgtcatattaaatatttattatagcactatattattaaatgatggtgcaattaggcttacnagattcatctcgtaattntacacgtaatctgtgaattaattgttttttcgtctatagntaatactctatgtatctatacatctcgatgtgacattgtgtaaaatttaacanggatntaaatatggacaaagtacaaacatgtatcac

SEQ ID NO: 70833 - DNA, 396 bp, Oryza sativa
  unsure (1)..(396): unsure at all n locations
agcttatcacttatcatttnctctctcctttccccctgtctttgttaatgctgcatatcgaaattgcatcttgatattggctctttgacaactgtggagtagaatgtcaagacaagggcagctcatctgttgaagtatcctaatgcgaagatgctatggatcggtgaccctacatatctcagcactgcgacatggcagaggtacattaatataacaaacgccagttgtgtaacttcagatcagtatatcaagaacagagctaaatttctaattgagaaaagaaattctgcattgcatggcacacaactcttatggttcaatgtaaatgattcagtcaggctctgcatcttcctatagttcatttntataaacaaacaatgtcctttgatgggtcta

SEQ ID NO: 70834 - DNA, 399 bp, Oryza sativa
  unsure (1)..(399): unsure at all n locations
agcttatcataacacatattggtggactnttgtcctaattcttggctgtgtgaaaatgtttgtttcaatcctgcttatgtattttgcttgtaagttcaaagttactcttaattagcacgggaaccttgctgntatctatactgctgctgtcagcagaggagttatgaaatttttcaagcccgggcaaactcaaatatacctaatatttgctacaatatttctaactntaatcctttgaaaacaaaataaaaattcaatggtgtatttgacggcgagcctgtgcggctgcctgtgcatgccaggtggtggctccgccactggttgctgtgtactagatggtggttatggaccgttatagaaaagctatctaatgntaacatgcttttccatattattaaa

SEQ ID NO: 70835 - DNA, 443 bp, Oryza sativa
  unsure (1)..(443): unsure at all n locations
agcctattntaagtttacactacgtatcttatgtgcaataaaaatgaaaccccttctggttcatattataaatcgtttgattcttttaataaatttcattcaactaaaagaagtntgacttaaaaaaaataaacgacttataatatgggagtagtgaattttaccccaacagtagaccgcgagggatagctgttactgtgaggatgaacgacagatgtgacttttatagacacatatatactcttgcatagtcgacgctaggtttttctttctggaaaaacatatatgcggnttctttcgaaggatatagaattatgcataaacaaggctagcttatggtgaattgcatttctatcatangtaccagatacctcaataataatacttgtctcgcaaaaaaataaaaataaaataattactgccattggcaaactatcataaaa

SEQ ID NO: 70836 - DNA, 371 bp, Oryza sativa
agcttcaattatcatctgaccaatcatacaagacccgaaaaaagatgtgtgtcgctcatcacagtctataatcaagtgggtctccaataaatgcaattcacagcaataataactgacggctatagaacaaattctcttacatctcaagaaaccagggcatagagctatcacctttagaacgtgcagactgcagctcctgcattcaaaatgacaagtgcatatctctgtaaccacaaaccactgtcaccaaagactatgcttgctgtttgaccatgacaaccactgaatatttgaaccattcattggccacttgccttacctcaaataactcgcacaaaaaacaaggtccttttcaacagaaatgatcacta

SEQ ID NO: 70837 - DNA, 412 bp, Oryza sativa
  unsure (1)..(412): unsure at all n locations
agcttgagctgaattataagaggctctattgtactatattgtatactagaataggaagagagtagagtagaagaagtcggaagaattccggagttgtcgggaatcttctctcatttcttttattctggttattactctgaattcaatataatattcttcctgagtaatttagatttatcttgtgagaattatctcttggttagttcctaaatagcatacatcttgtgagaattatctcttggcactagagtagttattaattgcgtagacgcggtgtctgggtaattaatttctagtggttgctgcgtatcccacagttcgattgaagtangtgtagaggtggtgacagccctcaagagcacttaagtcctctctgtccaggtacatactatagcgacatctgggaatagcg

SEQ ID NO: 70838 - DNA, 463 bp, Oryza sativa
  unsure (1)..(463): unsure at all n locations
agctttcttgggcattatgcctcattntgctctgttccgccgaattttcttcctcaagccccaaccaaacaagagcaaaccatgcgtagttggaggggctggatttcaactgagaggaaccttgagccaaaagtatttttctatgcccttcaagacctcaaacaaaggatggcacgccaactggttctatgtccaaaatcctgagcctgctcttcccgagtactcctgccttcccccagtataccaagacacttggaactcacttgctatgggagatgaagccgcccaagctctataactaatggaacgcatgctgaatctcaaggagcaaggtttgcatggagagcaaatcactcggcacttcatcaagagccgactatctccaatcaaggaaagatcccgtacagcttttgagtttgatggaaagcatgatccaaaccgcgaagacccagattctttggac

SEQ ID NO: 70839 - DNA, 433 bp, Oryza sativa
  unsure (1)..(433): unsure at all n locations
agcttgactagatatcgttcanacttcaaaacatcatatatttatgaccatatgagttgcatagatcaaataaaaatatttgaacgggtctgatattaaaatattttaagctttacatgaaacgtgatcaaaacaacgtggttttgtgtctggagggacacgtggtaatgtaatgtgggctaattgtggtctgttgctacttgcaggactagagacttgtagtacctaaatgctacaaagaatactacagtttcgtgacacaacggaatgctactgtagtacctccgaatatttgacgccattgactnttntaaatatatttgaccattcatcttattcaaaaacttttgtgaaatatgtaanactatatatatatacataanaatatatttaacaataaatcanatgatagaannaaaataataattactta

SEQ ID NO: 70840 - DNA, 417 bp, Oryza sativa
  unsure (1)..(417): unsure at all n locations
agacttgattgaagtgttatcagaaacagctgcataagtagctattgtcggattacagagtgagggctcaaagacttggagttctttttttaaggtaaaacaaatctatgctttaaaacaaaatcagtctttagtatcaactatgcagacattnttacaagagaatttggcaattaagagcacttctagcttgcttttctcaaagagtatgtattctctttaattggcagaaattcaactttcattcacgtatcgngattntatcctctattattgatacagtctccaatattgtgtgatccanactacttggtattgcacattctaagcattcacttggtatttcataaatcatggctgactctatcttatgtgctatgacagagctgtatgacaaagtaacaccaaatcatgaat

SEQ ID NO: 70841 - DNA, 409 bp, Oryza sativa
  unsure (1)..(409): unsure at all n locations
agcttatntcttaatancgtattatagtntacattnttcttataaatatataattcagaaaatagaaggtatccgaaaatacatattaatacagagtccatgagtaaatctgcagatctggaggtgaccttatcaaggcaaatttcagtttttgtgtaagttactgctaaacacggaaggaaaaagttaagcccccactatttattcctcctccacaatccatccatccatccatccaaccccagctatataaagctcggcgcagcggagggaggggtaattatattttantggttgctgcgtattccacagttcgattgatgtaagtgtagacgtggtgacatccctcaagatcacttaattctctctgtccagttcatactatagcgacatctgtgaatagcggatt

SEQ ID NO: 70842 - DNA, 441 bp, Oryza sativa
  unsure (1)..(441): unsure at all n locations
agctttttgaccagttaatacatgggttgcaaacccatatctttattgaaatttataaatggagactcccatttctggcatgggctcatggagatcaaaaacatctttctgaaattctgctccaaggtgataggcaatggtgaaaagacacttttctgggaggacagctggatagggggcaaaccttttaatgaacaattccccaacctttacaacatcactntgacaaaacatataactgtggcaaaactgaaacaaaaagggataaattgcatcaagtttacgagagacctgagtggagggagattgagagattggcacaaaatttgtactagttggggtgatgtgcaattaaaagataactgcaataacaaactacgatggaattaactaatgatggaaccgtgaactctntctacatagctttgaagctacaacaag

SEQ ID NO: 70843 - DNA, 456 bp, Oryza sativa
  unsure (1)..(456): unsure at all n locations
atcttggtgatgttttttcctcacttagagcattntaatctgatcaaattgtgtgaagataggttgagtagagcactcgatttgagtaggagtttgtcagctcgagtgactacagtttcagcttgtgcaacatttggtagaatgtcaatttaaggggtgaaacggtgtctgactggactgtttttggactgcttggaggaactcatagatcatcatttatgccaagttttgtgccaattgcttctgtagtttaggagatatttgctaaaaactgaataggacaaaatttgctacttctactacttngtgttgntatacttctggttagttgttacgggtgatgttgatgataccaagatacttgatgatatagctactgttgtgatgtgtctctagatgtnttagagaagactctatttttatccatttgtgatgcgcggatcgcaatacgttttc

SEQ ID NO: 70844 - DNA, 399 bp, Oryza sativa
tctgaggtcgacgcaccatgactgcctggaggactccatatgctgatcactgctgtctccttatacatgggtgatgctgaatggatggggctctgacccagcaacagtcggactcacacgcgtctttgttcttgcatcacctgtgaagagaatggccatacgaagcacatttaaaagttctgtctataggacggaacctcatgctacagaaaacaaaaggcgagtgcaacagccacacagaaattgcaggatagtttgacttcacataatgaaagaaatctctctccatactattgtgccttcattgttaatagagttaagtaacaaaaactacttttctataatagtatattaaataattaaaaagttcagtccaacataataattaatataaaaaga

SEQ ID NO: 70845 - DNA, 378 bp, Oryza sativa
  unsure (1)..(378): unsure at all n locations
agcttgcccgcatgtacaccaaacgcacacttatcggggttcagctntatgcgggcggagcggaggttctcaaaagtttccgctagatctgaaaagaaagtttcttggttgcgccgttttacaaccaaatcatcaacataagcctcaacattacgtcctatttggctacccaaagaaattcgagtagtacgttgaaaagtaggacctgcattctttaacccgaagggcattgatgtataacaatatgttcctacagaggtaatgaacgcagntttttcctcatcctccctagccatgcgaatctgatggtaaccagagtatgcgtctagaatacgacaaatgtcgcaccccgcagtggagtcgacggtctgatctatg

SEQ ID NO: 70846 - DNA, 455 bp, Oryza sativa
  unsure (1)..(455): unsure at all n locations
agcttttcatatcaactgtagcagtgacgtagaggtgagagaaaacaccagcgagcctaatcgactatattagagcaagtttaatagtagagctcactacttactgttagtcaatgttaaacctaacatgtatagtagattggctataagggtatctttattttcttcatcctctctctttctctcaccatgaatttaatacatatttcttggagtttgtatgcagttagctcttgcatgagagccaacactccccactntnttntatctctctcttccacataagtatatagcttgcttatagcccactattatccttgctcttatcgacgctttgtgtgctcctatgcagatgagcaactcactgccaatcaagtcaggagtgataatatattgtgacaagaanaaatagtactntatagaatagtacatagatcgagcacttnctaagttat

SEQ ID NO: 70847 - DNA, 403 bp, Oryza sativa
  unsure (1)..(403): unsure at all n locations
agcttccttctttccctccggtgtcagctcttatatactccctccgttntaaaatgtttgacaccattgactttntagtatgtgtttgaccattcgtcttattaaaaaaaaattaagtaattatttattcttttcatatcatttgattcattgttaaatatactttcatgtgcacatatatttttacatatttcataaatttttttgaattagacgaacggtcaaacatgtacttaaaaagtcaacggtgtcaaacgtcttgaaacggagggagtacaagctcatactgtagtacagtatgagggtagcgagagtgtgaatgttggagactgtgggagtagcttcaacgtactcgtagtattatacgaattgaacggaaggcctagagtacatactgtcagta

SEQ ID NO: 70848 - DNA, 437 bp, Oryza sativa
  unsure (1)..(437): unsure at all n locations
agcttatccattgttattcgaatgatattttcaagaccaacctcggatggcttattgtccaccatgataaaaaaaaaaacgtcacaactcgggtcccactgggcgtgccaaaagcgcgttgatgcgaaaaacacacactggcctgngagatctgtttaactccaatgcaggtcctaaatcttactcttgggttcaaaggcgtgctagctgatttgatcctacaatcaacaatcagaaaaaaaaaaggaaaacaaggttaaatccataaacgatagccgatcgcctaatggccgatgacatatcgttaatcattgagccgatgtcactagtgttagatcggcaatgaagaataaagcaacataatggttaatctactcgatcggctgtagatatcaacgatatataatcttcttctcgaatatatttgagcaagtatt

SEQ ID NO: 70849 - DNA, 363 bp, Oryza sativa
agcttgcatgcgtgctgtaatctacacgctccccgctgctgaacggagaagagtgagttcactttttggccaaagatataccccatcaacgcgatggactccactaaacctgaaaatatgtgtcatgtggtttcaccatttcagcaagtttacctttggttttaagcatgccaaacacctgaacttttgttacaggtgttgttctgcccatcttttctgggtgttatacacttgtactggtaacatcactagctgccgtcaaaagatttaataatctcggccaaatcaattcaggaagtaagtacaagctcgcaaagggaatggcagtacgtagccactagccagtatgaggagagtctactt

SEQ ID NO: 70850 - DNA, 371 bp, Oryza sativa
agcttcacctgcaaatctctctataaatacatggcaaaaccatcaacctatctagcacataacaacttacacatgggcctcatgcacgcactcctccccttagcagcagcagcattgctgctccttgccgcgccgccgccggcgacggccgacgaccatgggcggatcccatgtgattcatggttattcacgtgaatgcccatagaattttaccaaaaaaatatatatatatatagggatgttatgcatatatacgtaaaaagttagaggaaagtgcagcatgtatagcccaaatgataaaaagcccacttattagcagcagcccgtaaattcctccccaccttgccccagcgaataagcccactgctact

SEQ ID NO: 70851 - DNA, 508 bp, Oryza sativa
  unsure (1)..(508): unsure at all n locations
caattcagctcgacccgggatcctctcagtcacctgcggcatgctatcttttttctgacctcgttgcccgcgtgccctcttctgtccaacggatggttgactaccactagcctcctcctcctgtgtcccctccacatccctntacacgtgcccctgctggttcccctccgcatacctctccatgttgccttcctcgttcaagtactggcttggatcctcgttcccctcttcttcattccaatactggctgcttccctccgcgattgtatcgtacaatatatgtacctcatcgcggtcagccatctgttgatacaagacacatctgctaagtcacgagacattcatgtattaacaatctaagtcatgtatgctaagtgtgaatgtcggacattagaaccctacacaaccttacgtgctaagtctatatacaaatcgtgatataagctaagtctatgtgacgtatattatacaaccctagcttgtatactattatatactaagtctatta

SEQ ID NO: 70852 - DNA, 441 bp, Oryza sativa
agcttgtggtgaaccggactgttactaatgtgggagaagcaaattcaagctacaccgtggaaattgatatgcctatggaggtgatgacaagtgtgtcaccaacaaagctagaattcaccaagatgaaggagaagaaaacattttcattaagcttaagttgggatattagcaaaactaaccatgccgagggaagcttcaagtgggtatctgagaagcatgttgtgaggagccccattgcaattttttagtgttactttgtaaacacagggtgttcctatgatatgagtgtgctactattcatatgaatgaaataataaatttccagacaataccattatactcttgtgtacaggtattgtaaagattcaagacataactatgggccatggatatgtcattcaataacagaaacctaatggtagtatcttattaagaattatg

SEQ ID NO: 70853 - DNA, 269 bp, Oryza sativa
aaaaaaaacagcggatttaataacatcaactgccatataggctcgttgtcattatgttaataaaaaagtggttcagtggtatgttaacgaattggtcgattactaaaactagactttctcaatttagagacttatgagcagaagaaaagatggaaaaattccaccatctccgcaaaagagatgtggcaatcttgaagatgaaaatatctaccttgcaaagatatctcggcgggatcaaatatatgacgaggttgcctgacattgtgatc

SEQ ID NO: 70854 - DNA, 449 bp, Oryza sativa
  unsure (1)..(449): unsure at all n locations
agcttgagagagttctaaagaagctgcttgatgtgtgtgttgaaatggaggataagagcgccttttatagcttcctaatgatgattgtgacggttggaatggtcggaaataccctccaaccatcattgggggctaatccacaccgttcatgtaaagccctggatcggatggcgctgagcatgattcggtcgaaccggcctgcccaaccagcgtatgttttggctggcggcttccgctcttgctcccatatgtagacttgtgaatnttggcccaattggttgtgtcatttctgagtttttggcccattcattgataagtctgattctcaacatcgtccgattgattgatcactctgttcgatgtcaattctcctcaattntatgtatattctcctgcagaaggtagcaatccagtactagtggaatatttattattctaacacaaatatg

SEQ ID NO: 70855 - DNA, 436 bp, Oryza sativa
  unsure (1)..(436): unsure at all n locations
atcttgtctcctaatatgggtagtgatgaagagttgcaagaataagatagcttaacagaaatccattaataacaactagtataagttaccttcgcccatgacaactgcccgtctttctccagcagtagcttgaagaagtgtgttaacgtcataagaagtgtacggtccatcggttaatctcccacgcctgcaatgcagctagtattgggtcataaaaatgtatccgctgtgagccatgataaggatttatgtgcacaataccttatgatggtgaaaggtatgcctgagttctggacaaagtcctctgccatcttcttgtacttaagcacaccatacagattcatgatactgaanaatgcatagcatgagtgaaggttaaaattgtgacgcaatagaagttgatgaagcagacactagacttaatgaactanaattc

SEQ ID NO: 70856 - DNA, 457 bp, Oryza sativa
agcttggtgcctctgcccatgtttggtcaagaatatcaacgtctactctgtagccttgcttgtatccaagagattctatgggacccccatttggactggctgaccacctacaacatcagcattatacggctttgagtaataacctcagcaatatatgagcaacaacatcatgaaagaaaaactatgacgcagtgaataacattaagaaagcggcagagtctactatatttaaaaattaatgaaaatataaagacaaacagtagtcaacagacaagagataagtttactactgcctactggtaagcattccaatactactagtaagtaacagctacagtccataactgaaagcaaaatagcaaatgcccaaagctgcagaacatatatatgtactactgtgcacagaattgacttatataataaatcagttgaacacagaaggaattgatgatgtgga

SEQ ID NO: 70857 - DNA, 418 bp, Oryza sativa
  unsure (1)..(418): unsure at all n locations
agctttgatcaatgtgtgttgtgtaatgaatattgttcttgtgttgagtaaacaacgggactctacatccattatgttatttattttgttattgaatggggctctgctgatgtatttttattctcatcaaggattcatgcagttcatgagtacacatggaggacccacagaaattcctatacttgattctgttatttctaatgctgtagttcctggatctgatatatcaacagttntaagtcgtgaagaccgtgaagatatttcattgctattnttggaggttagagagttttgactcgatgttcgtccttttgcttgttacaattcagtgcatatgttatagtttttaagacactatacagtaaacctcctcgattaactactgcaatcacttcctgncattgtgttgggttgatct

SEQ ID NO: 70858 - DNA, 474 bp, Oryza sativa
  unsure (1)..(474): unsure at all n locations
agcttggacatcatcctatggatggattggctggctaagcacaaaggacagatagattgtgccgaanagtccatcaccttgcaaggacctggaggaaagcaagtccgctttacccctaacacccctaccgcaagtcggtctatcctaacctgtttgcaagtcacctccttggagtcggtgcccatagtctgtgaatatcccgacgtatttccggaagaattaacaagaatgccaccagaccgagagattgagttcgccatataactggcaccaggcacagctccaattgcaaaaagaccctaccgaatggccgctaatgagttatcagaagttaaaagacaaatcgaataactggaaagtaaaggttatgtgcgacctagctcatccncttggggagccccagtgcttctggtaagaanaacgatggctctgagagaatggtgattgactatagagccctgaatgaagaactat

SEQ ID NO: 70859 - DNA, 316 bp, Oryza sativa
tagcttagtcatattactattaattaacttaaaaatatataacggcttatgatataaaactaagagagtgatatatatcgcagacccctcgctgattatgatctgatcatggactaccttacgttgggcgatgtacaactcgctctgcaatattatcttttgaatgaggacagcacacggaatgttctttttacttgtactttggctcattttgcttggaatgtaagtgccatcgagctgaatatatttttggaatgtcactgtccgtatctatgtctctgggatggtatgagagctatcaatacaaaaatgaaat

SEQ ID NO: 70860 - DNA, 412 bp, Oryza sativa
  unsure (1)..(412): unsure at all n locations
agcttgtgagccatatattgttggtttgtggaggtcgttntcgaaaataaaatggtttgccgagagggtgatgtcatcgctggatactgacattnttcagatgaaatagtctccacttgcataatgttcttacatcaatggctgaataccttcataatttatgataattataaaatagtataaataaataaattaactattataaagtttaaaacaatctaaacattntttctaaaagatntagtagtatgtgcgtaaagctcgtttacaaaaatcataactgaaagcgtgtgtacttgcatattcatcggttaagcataaaaaaaaaacatggctgcgcatcaagtaccattttntttcttggcaataattgtacttgagtgttagtatgctccaatcattgttcatgagt

SEQ ID NO: 70861 - DNA, 424 bp, Oryza sativa
  unsure (1)..(424): unsure at all n locations
agctcttgatgaatcggaagatgaagatgagagcaaaggtaagcaagttgttgatctagcttttattgctcgtaatgcaagttctgatgttgatgaatctgatgatgataatgaagaaaagcttagttatgatcaattagaatatactgcttacaaatttggtaagaaacttcaaacatgttctattgttcttgatgagaaggatcatactattgagattcttaatgctgaaattgctagattaaaatctttgattcctaatgacgataattgtcaatcttgtgaagntntattntctgaaattaatgctttgcgagatgtcaattctgttaattgcaaaaaattggaatttgagattaataaatctaataaagtggaatcttcttttgctcttggatntgctntacatgcnntcgtgtgtgat

SEQ ID NO: 70862 - DNA, 441 bp, Oryza sativa
  unsure (1)..(441): unsure at all n locations
agcttaagaatgtgtgttgactaccgagctttaaatgaagtaactattaagaacaaatatcacttgccaaggatcaacgatctatttgatcaattaaaaggagctagtgtattctctaaaatagatcttcgatcggggtatcatcaattgaaaatcagacaagaagatatatcaaagactgcctttgtgacaaggtatggattatatgagtttacaattatagcatttggactaacaaatgctccggcttattttatgaatctattgacagaaaactaatcttctctccaacgctgatgttaccaaatttgattggtaacagaatctcatgaacaatatatttatnggagtattggaccagtttgttgtcgtgtttattgacgacattcttatatacaccaaanatgaagaagaacatanataatatctccgattggtact

SEQ ID NO: 70863 - DNA, 449 bp, Oryza sativa
  unsure (1)..(449): unsure at all n locations
agctttgaagatgaagaagatggaggttgaagatgatggacctgaaggcggagaaagaggtcatcgctggaaaagctgtggcgccggcggagaagccaacaccgaatccggtggaggtggagatatatccattatacatgtgtcatgtgtattcgacttctgtgctgcctgctcaagctggtatcatctgtgctgcttgataaataaatttgcttatggttagcactggataggaaaactttctgtctatcagtaatatcagtcaggattcatgagttntttggcccattgttgttgtccttccttggtgttaatttgcgggtaatggagtaaacaaggatgtatttgtcagtgagaagttagggcctttggtagcaatcaatttgcctgtctagtgactggaatttcagctggtattgatgggtagtagccatggttctttctttggt

SEQ ID NO: 70864 - DNA, 434 bp, Oryza sativa
  unsure (1)..(434): unsure at all n locations
agcttatataatgtacaagaggaaatttttgctggtctccaattttctcggctgagagcgcaatcttcaaaccatgtcaccttgatttggcactgtcctcgtctcaagtggcaccattgcataattctcaagcccgcacaggatcggccgtcctactactggcacaagcttcacactcatggtggagctcgtcaaattctccacaatgtatgtccacttgaacgcggtgaaccctcccacttgcttgaaaatgtcaatcctcgtcacgttcttcccggcaagcataacgtcgaacaccctctgcccagctgagccgatgccagcatcgatctccgcgaaatgcaaccagaccatgtangacatcctggtgtcgaccggcatgaagtactcgatctcgttggaagcatcgccgccggtggtgatcgccgacgtgt

SEQ ID NO: 70865 - DNA, 417 bp, Oryza sativa
  unsure (1)..(417): unsure at all n locations
agcttgcaatgcagctactgccattccatgagatttctctgtgtttccctcgtctagaatcaaaccatggaaatagtatgctgcagcctgaaaaaaagtgcacattagttttgagacgtacaattgcaacttgaagtaatttaacatcaggaaaataaaggttaaaccaacttacacacctttgcttcaacatacttacacttaacaaacaataaatgctttttcccccatccatcggataccggaatttctggaatgctctcctgaatttgatgccaatatttgaccatctcgcaagctaagcgccgttttaccgctagagtggcctttgggctatcaattgccagaccaagttgcatgtcgactccctataggtcanagattaccgatggctcaggacatgatatncaaattact

SEQ ID NO: 70866 - DNA, 417 bp, Oryza sativa
tgcttgtgactcgatcgaagttcgagagttgaaagatatgtgcaaagacatcaattctaatggccacttcgcaatccgtccgcttgcttcgcgattatgaagtatatcctcgagtggaaacgatgtgaccaccatgaccgagtgactttgagaatagtgagataatttcctatcggtaattaagacaccatataataacttttgaacctgaggataccttatcttggagtcggctgaaaccccgctaacaaaatagattggtcgttggactttttgaatatggccttactcttcacgctcgacaaccaggaccgtactcacaacctgagatgtcgccgacatatataacagtagcggctcttgtggatgtggcgaggccaaaactggtggagtggtgagaaacttcttgaagtcttc

SEQ ID NO: 70867 - DNA, 411 bp, Oryza sativa
  unsure (1)..(411): unsure at all n locations
agcttgttantaatatgctaatttactttaacacttgattaattcctatataatatattcagtctatattgatatcttagtataaagtagtatcggagtaatagccgatacgcgttaaatctacaacatcggctatgctatgaacatatataatctttatattaaagtacttttagacataagtgatttatactgtctcggcaagctggtccgatctatccgaatcacttggtttaaacatatttcgatttatagattatatactgttaatatctacagtcgatcgactagatttaactctctttttggcttatatatcattgccgatctaattcacgttacatcggctagcttacaaacgatacgtcttcggcatgtggccgatcgactatcagttatggatntaactat

SEQ ID NO: 70868 - DNA, 473 bp, Oryza sativa
  unsure (1)..(473): unsure at all n locations
agcttaaagctagatatgtgccatcttctaatagctcaatcattcactgaacctgttgatagattatataacttgtgattgactcctcaatcacctttggcatggccatgcacttccataatctacaacatcgaggggcctagagatatctctccataggaggggtaaatcccatcttgattatttatatcacactacatgtttcatagcatatctganaactacttttatagctacccatttacggagtagcgtttaatagtccttaagtaagctactacacatgttgagaaccatgataatctcaggtctaaggattcaacaccaacactaaatgagatcactgatgacacatgtccttaataatatggctcttgtagtgtctcatgttgggtctatccaacaacatgttcaccaacatgtgtccacattattaatttggtatctctataccatgatccatgagacatgat

SEQ ID NO: 70869 - DNA, 416 bp, Oryza sativa
  unsure (1)..(416): unsure at all n locations
agcttgcttgccaccacgctagtgctactatctctttgcccaaattatcgttcgtgatacatgagtatctccggcgatctctctatcccacattcccactctataatttagcaaattttctaaaattaaggttgctttctttgtgtgtgtgtgtgtaactattcgtgacgccgtatccaagcagccaaacaacccaactagtctctctctgtgacactccctatatttgntcttactttntggtttgctctgaaaagatagagttgaatggtgagctattacatataatatcaganaaatatataaatgtangagagtgacgtttatggagcttgttggagatgctctatctagtatatataagttgcaatagctagaattagatatttccatacatggaatcataccaaccatct

SEQ ID NO: 70870 - DNA, 427 bp, Oryza sativa
cagcttgtatcctgtttgtctaaaccgtaccaccagattgtgcggctctcatgcattagagaatatctaatgaaaatgttgtgggacggtgcacatatgaagcacatgcattaagtttgtgtctagttaattatgcctgagttaggacatttacattattcaacctttcattcgatagagaaaatattgtgttcgcatggaaaatgagactatgagaggggtggctgccatcaaagacaagaaaagcgataataagtcgtaaagatttcaataaacaagccacttattcacgcgatgcgtgatttttaattccgtataagaacttgtatacggtctattagtttacagaagggtgtatcacgatgttatctatctacaaagtatatattggtctagcttactatagatttagttatagaaatcacta

SEQ ID NO: 70871 - DNA, 467 bp, Oryza sativa
  unsure (1)..(467): unsure at all n locations
agcttatagtagacttattgctcactattatacttgctcttaggctgtgttcttttcccctctttcccaacacactttcctcgtttttcgtgcgcacgcttttcaaattgctaaacgaagcattttttgcaaaagtttctctatatgaaagttgcttttaaaaaatcatattaatctatttttcaagttttttaggctaatacttaattaatcacaatataatcgtgtgctttggtttccccaaccttgccttccgaacgcagtcttaataattaatcatcatacaacggttatctgcacaatctatataagtaatgggcagagtacatgtaatctcttcttttttgaaagntaatggccactgaacatctaaagcccaacatgcaaacatagtatttattagcacttcgtaaatccccttttttgacgatatggacccttttgataaactatttcgaaactagccc

SEQ ID NO: 70872 - DNA, 420 bp, Oryza sativa
  unsure (1)..(420): unsure at all n locations
agcttatcaaccttgaagcacacatgtagatgaaaatatattaaccgtggcatgtgacaatcacattgtgtgtaggcatggatctaggaaaaaatatttggggtgggggcactaaacatactatattagtacaccaacataagctcaagctcattatgtcttatactacaccaacattatagtttaaaacaatttcatatgaaaacattaaggaataatgaanagtacattatgagcgagagaaaaataaaggagctccacttgttccaaggggtatggggcatgtgcccnctaatctccacactaaaatttgcattaattgcgtggattcatgatctgatcatataccggatcaagatgacaatcatgaagatggcaatagggaacatattcaagaaaatggaagagtatatgataatc

SEQ ID NO: 70873 - DNA, 464 bp, Oryza sativa
  unsure (1)..(464): unsure at all n locations
agcttgacatgtattaagccacatcattaaaaaataatagcctttagatccctctcatgttntaatctcaatcatccatctgccatatgcatttatagcccataaagtataattattgctataaaacttaatgtgcattgaaccatgacaactacaaactaattaatagccactggatcactctcatgtttgatacataaccatccgtgtgtcatttagaattacaatttcacatcaactactacaagatattgtccatttagatattacgagtacacgatttatacagtgttttctttaaggtnttataagtatttctaaattctccgctgcaactaagcgggtatctactagtttaattggatgtgaatcctgatgagcatatgaattggtgaaggcctagtatgtggccgataggagtctatataacggtttcctactctagaaaggtatagaaatcttac

SEQ ID NO: 70874 - DNA, 459 bp, Oryza sativa
  unsure (1)..(459): unsure at all n locations
agcttattactgcattnttgtgccttctggttggattcaatctgaaatgtggctagagtagtttattactcctatgttgcttgatcattaaaaaaagtactcggctaacattgggatcatctctaaactaaattccattgtccgtaatttacgtagtaggctagtagttgtagctgaattcattgattagctctcatatctgttcctgtctatctgatgtacacagttcattgccatttgtaaacatcaatactttgcctagataacacaccacaactacacttcttctaatcgggacaactaagcaaagccaccctttttggtcaaagtcatgtattgcctatcattatgtgatggcataattacatgaacctaacccactgattatcctatgatgttagccatggaaggagaacactgaccaggaatgcgatacaacagtactagatatcagcaagt

SEQ ID NO: 70875 - DNA, 313 bp, Oryza sativa
taatggagcaatcaattcatcagctaacgagtcatctccaggagtcattatcttcatcctcgctctagagcaaggcaaatgctacattctgagcgaccactctggccctcaactgatgccacggtctactacatgtgtctcaagtatcaagtacacgatttaatccacatgtgtgagagctcagagttatcaaccaatcaattcagatgtgatgaaggggacaataacgtgtactctcctccaaagcctaaattgttgtcacgagctcaccactgtcatgccgtcgttgtcttcgtccaggtcagctgtcatt

SEQ ID NO: 70876 - DNA, 464 bp, Oryza sativa
  unsure (1)..(464): unsure at all n locations
agcttatggcttatataggctcanactcgtaatcataatgaaccgtgtcgcgaccattttttagtaagttaatttaacgagccagctcatgatcgagctactcattagtacaaaagtcactatatattntcatatttagagcttcttaagttgtgagtacttacactacacaatgacccacgttcaccgtccgtccattgtgtagacaaaagtcatgtttggcaactaagaaagtatcggcaaagcctgtgccaacagaattttcagcagtcggtgttgcagcccttttatatgtttgcctacacataatttgttccataatttagtcttttttccaactgactnttgttagcanaagtggaccatggtgtagtggtagtnctttaatttactagcanactaactatttggatttagtgaatattnntactagtatggggntatatatactaacatatgataaa

SEQ ID NO: 70877 - DNA, 452 bp, Oryza sativa
  unsure (1)..(452): unsure at all n locations
agcttcagcatatggttgggctctggattaacatcctttcattgctattctgttgcagaattttggacgtgtcatgatggcccttgcagtagatgtctctcgttttgaaggagtgccgatggcccctccagacccaattctcggggtttcagaagcatttaaggcagatcaaaatgatctgaagctcaaccttggtgttggtgcctatagaacagaagagttacagccttatgtcctcaatgtggtcaagaaggtaagtctaataatacctatcatttccttaatataactcagttcttgttgtgacacactattcttacacgtggtaagctgaaactcttatgttggagaaaggagaaaacaaggagggtatggtgtatttccttcanattcaagtagctggattataaagaatatttctggagtttctgtattctgttctgaaggtgatg

SEQ ID NO: 70878 - DNA, 359 bp, Oryza sativa
agctttcatgatatgtgcagatatggtggattcaactgacgggtgattcatcgagcattcacccgagattctccgagaatgtttcgattcagattcagtgttgctatctcgattggatcatgcaattgttcacgagataaaaacaccttggagaatgctggtttgtgtcattgtgtgcagtaatacagactgccaaaaacttatttttccttggacagagcagacaaattccgtccgtcttgaatttttgtattgacgctgttgctaccaaactctatagaatctttcaaacctaacaaagcttctgaatagagccactcaactgcaatggtgttgctgatattcgtattctggttctt

SEQ ID NO: 70879 - DNA, 321 bp, Oryza sativa
  unsure (1)..(321): unsure at all n locations
agcctacatttttttttatttgtttgngcctgaactgatctggnaaggattgggacagaaaaattatgctatggacgtgatctggcgagggagccatctgggagggaatctgacagaaaaattaggcgatgcagattcgatctgggaggaaattggataaaaaaacaaccgtgcactataaggggatgacgatagaaatatcttggtaagacatcttgaatttttataatagatacagatcgttacagatatagcttagcttaacgctatgagaagtgcatacatgaaagatctctacagtaaagataatgtttgcaatgt

SEQ ID NO: 70880 - DNA, 372 bp, Oryza sativa
  unsure (1)..(372): unsure at all n locations
gagcgttagcttattatattgtttgtttangcacgctccacaagtgtaagatatgcagtacataaacgattacagatttacaggtatgatagcatcacgttattctgctatgtaatatcttcattcatgtgcccacttggctttctggatctgctaacctgattgcgtatttgcagtttggtctttatcctctgttcatcaagaccacttgaatgagaggctcaccattttctacttgatactgaggtgcggaattgtgaccgcagattacataatacacagattgcattactcctagtagtacaagtaccaacgagttactatggacttgcctatacgtatacgtatctcattacactcatacgcatatca

SEQ ID NO: 70881 - DNA, 458 bp, Oryza sativa
agcttgtcaatttcatcatcattatctgatagataaacctttgccttccttttgcgtttgcctttaccattacgttgcgccttatcagtttttgttcctattggacgtttaatatcttcaggactgttatgagtggacatttgctccatcacttccacttcatcatccatctttggtttgtttggcttctcaagttcctccaagtaagcatgccactttggttggtcacgaagaatgttccaacaatgcagaaatgaaaatgggccttccttgtaatctgcttgatatgttgcttcagccttttccctgagttgcatatcattctgtccactaacatatatggatgtaacctctttataacacaacagatacgaccaacatttttcttaattctatgaaaacggactctgatttgttttcttgccttgtcctgttttggagtgggctatatactcaca

SEQ ID NO: 70882 - DNA, 446 bp, Oryza sativa
  unsure (1)..(446): unsure at all n locations
agcttcttgagatatgggctagtgaaaattatcttccaactaaattgaaagataattgtgactgggatctttgcattcaaaacaaaagaagacagtcttggcatatggatagaaagaggaggtccatcattccaaaaagagcatgaaactccatctcctattaaacatctggcaatgcctccaatgaaatctatcaaattgcaaacatccttccaccgaaaagaccccttgagggtggataagtgaggcactccgtttctataataagaggatcaaataagattgacccggngcaaattcttgctatcatagaacttgtctagatactttagaaggaggttctggattgtaagattgataaccccaagaacccnctttgtcttatgtttgcataccttgtcccanacagccaatgacttcttattggaatngacatcataacctct

SEQ ID NO: 70883 - DNA, 455 bp, Oryza sativa
  unsure (1)..(455): unsure at all n locations
agctngagtgtgtgatatttcaactgccactacctattagttgatatgagcgtgcatattcatttgtatgtttcttgtttgctactaaccatggtaggattgagcaagcagaaacaagatggtcatgctcaacattgacttcttcaccatcaacgagatatatcgacttctttacgcattgtatatgaggtacatgataatgatcttgcaagggtaggatctaatttgccagtgattgtaagtatgattccgccgcttatgttaattatgagctagcaggagacaaacaacttgatgagtatgatttctctaatgctgaaatggttaaggctgctagtaataagtgtaccggttctacgtctttttggtggtatactgttggccataagcttgaagggatgaatgccaaacaatgatgaggananaaattgtgtntcatattataacgtactctc

SEQ ID NO: 70884 - DNA, 406 bp, Oryza sativa
  unsure (1)..(406): unsure at all n locations
atctttgtgtttttgntggttcatccaacactcgtccaactgaattatcaaacagccaataagcaacagattacaatttacacatggaaccatatagttttaaattttcatatggcgatagcaatggtgttgctgctgctcacttgatcagtgaagtgaatcagtgatcatcgcagtgattctgttgagattatagacatataatgatttaatctattccataaataaatcatgacattacagatgaaaactagcatgaacgcatcattagatctacacatgttaactacacagtataacatgaacagatcaaatatgcgcaacatattgaacacgtaccgaggtgacggaaagaccggctgcttggtcgaaacttttcgcaggtgtctacgaatgcacgaaacac

SEQ ID NO: 70885 - DNA, 280 bp, Oryza sativa
agcttgcatatcatggatctacactgaaaaattattaaccaataattcttacaagcacactgaaaattaatcaggcttatgagctcctctaatcccctacagctacaagctactgatcgaatcgaactatgggtggtgattcttttggttcccattcgattcgaattcgtttcagtagaaccagttggatccggcgtacttcgccggcggttgctgcatggcgccgccgtattccacggcgccccctcctgtcacgttgaaatttgaactgaacctgaac

SEQ ID NO: 70886 - DNA, 457 bp, Oryza sativa
  unsure (1)..(457): unsure at all n locations
tctctagacagcctgcaagcatgctagcttggacgtgtgtgtgatacagaacgactgacacttcgtatatacaggcgtgtatgacgcttacacaatgcgaattcgtacaaatgcccatctaccgccatcaggagatgaccacgaccgtgcacgccataccccaggctctacagatgagattatgattcatccgaaccaatgngttatctctaacctgagctgggcccacctgcactggacttcaggccatctactcccctgcgcctgctttatccatttgtcggagtttggcgctgactgtctgatatttcgatgaatgtcacaacccatccttgtgtggatacatgtttcttctgactatagtctgatactcctttcatcttgacggtgtatcatctgcatgcgattatacaccagcgcttgtggcatatgtgatgataagcacctatcactatgc

SEQ ID NO: 70887 - DNA, 423 bp, Oryza sativa
  unsure (1)..(423): unsure at all n locations
agcttcaatgtaatgtctgttgttttgcaattgattntatttgatctcttttctgaaaacaactaagtgagtgcttctcatacgacacggatgagacagtgcgtctcgtccggtcggagtatgtgcaatgtatcaatcttttgaattgatcaagattggcacccggccaacaattttcaaacggccacccgggccaacaactttcaaacggcctcccgggcctatctgatcccatcagctgcagattttccaaacatcgatcccctttccacaacagcaatttcacaagcagtagtcaaacaaaactatgctaggaatcacctcacatccgcccatgaccgtgggcacggctgttcgaacagtttgtttacctctgcagatggggtacactttacccacacgacattacttacccggatcacc

SEQ ID NO: 70888 - DNA, 468 bp, Oryza sativa
  unsure (1)..(468): unsure at all n locations
gagcttatcagtttgcactattgcagcagctgtagctaccgtatgtactgctgcgcaatgctgcatgcatgcatggccggccttctccatctttaccgccgccgctacagtgtatatgcctctgctgtttcttggctagctagtttgccgcgccgntgttcttctgaaatctctgataaaagtgtagtaacgaattagagcaggtagaatagcatgctataaatcagctgcaaacatattntaaggagataaatgatgagagagaagagcagtgagctacagatttgtagccagctgtagcacggactctaagacgcagtgtgtatatgacaggtgggaccagntattaatagtgtaatatgtaactattggatgaatgagctattaaatgggctatagatgaattcgagctatanngtggctatactattaaataaacttgctcttaacgagagtactcaatgcatg

SEQ ID NO: 70889 - DNA, 408 bp, Oryza sativa
  unsure (1)..(408): unsure at all n locations
agctttcttctccgccggcgccgacgctacgcctccttggccatcgcgaggagcccgtncgccgccgctacctactnctncgncagtgccgctgctacgcgtactccaccgacgccgccgctctcttcaccgcctccgtgaggagcccgtccgtcgctgctacagcctcccctacgccggcgccgncgcgaggagccccgcctaccggctgccgctgctcctcctcatccgtcgccgctgctccgtcatgatagtgcaacgccggatcggagggagagaaggagagaggagaggctgactagtgggtcccacaccagtttctccccttcgttgccatgttggcatgctacatngggcaaagtagcanatgttaagatgggatctcttaagaaggggtaaaaaaaatat

SEQ ID NO: 70890 - DNA, 452 bp, Oryza sativa
agcttaagaatttgtcacaatggtggctagccatactttgtggctaaaggtctgtttggttcccggccaaacattgccacgcctaagcttaagaatttgtcacaatggtggctagccatactttgtggctaaattagactgtttggtttgcaactaaggtgtggcaaaaatattttgggtgctgtttggattgatgccacaaatgtttggcaaaaatctgtggtagatgtttggattgcaaccacatcttgataaatacacccagtggtaagattaccctcctcacaaagcaatcacatttcagcagcaaaatgtatataagtagattggaattaaagtgcacatatattgaaatattagtccagctaaagataacactccagtaacactagttgagctattacaataatatcagcaaccatccaactaaaactatgtcaatgacattttct

SEQ ID NO: 70891 - DNA, 471 bp, Oryza sativa
  unsure (1)..(471): unsure at all n locations
agcttaaatttcatttcttgtcctatctggcataagacaattgttaactgtgaagtgtgtatagatgtttaaccttgtggttaccatgtctcatcaaattttaatataacaggaatgggaattagagggtgcttattagtacatcagtttaggcagatggtcgaagtacccgaattcgaagacgatggacagaatgcaatgtgttcgttggactgaacgatttgtcattttcaagcctacggaatggcgagttagctggctatattcggcatcgacagcttgtcctgtggtctacacgattactcgtagcatctctctcccaacacagagtcacacgtctgattttttttttataacagtcacacgtctgattgatccctattcatgagcanggagtagctatttntaagataatgaaatactgtntcattcattcatagagatgacatatctcacttatccaatgcacat

SEQ ID NO: 70892 - DNA, 285 bp, Oryza sativa
  unsure (1)..(285): unsure at all n locations
tgcatatttcatgtcaaactaaaatatattacactagcactacggttctaactttttgcagagaatgatcataaatgaaggagaagtgacagctaaacatacgatcaatcattcagacgctgtcaagaaacaaacttatggataaatgggctgagaacaccatattcacacgatccaacaagcccagaattcacaagtctgcggagaggagcaaactgggaggccacctgccatgaactgagccagcccatggttcggccgatccatccgtancaccgatggatg

SEQ ID NO: 70893 - DNA, 434 bp, Oryza sativa
gagccttaagacgattgcctatatgacggattaaaaatcaaagcacatggttggggtgaagatcgaaccatttacccgcaagcagcttgcctcccacacgcgtttctcactcagctattataatttttgagacttattagtatcactagcaccacatgctatttacattggaattacaccttacatacatttataagtatactctaatacagtggtatatttgcagctcgatctgatagatcctttgggattctctattaaatgataagcagacaatcttcatatgctacggattacatgtcttgcatgcagtgagaaggtaagtacactcctgttgtgcatctttcttgatatagcactatggcagagtatttgcatgtggcagaagcatcatcggacgaacagtgctcttgtttccccggttctatcgtcac

SEQ ID NO: 70894 - DNA, 450 bp, Oryza sativa
agcctataattgtgttcttgaattgatccatgacaagccatccgataagactacaatgcttcggccaacctagtatgccattgccgaagataatcagaaatcttcctcttaatgagcttgatcaaactcttgttagatgcctcggcttgcccattagcttgtgcataatatggcgaagaattcaataatttgatacccatgctatcggcaaattgaacaaactcatcggtacatgaagatcgagccctgatcggttgttatggtctgatgaataccaaactggtaaataatatgctcttgaacgaattgtatagcatcccctgaatcaactatcttcaaagaaatcgtttctacccacttggaaagtaatcggttgcaccaatataaactatgtcccttgcttgaaagtggataatcataccgatcatatcaattccccaacctctgaat

SEQ ID NO: 70895 - DNA, 385 bp, Oryza sativa
agctttgactataactgtcttgggatcaccactccacaggcatcctcgacggcacggacgaagcctactcctcggagaaaccttcatctgaagcatactcgtactctggggttgggaaaagtagagcaagactgagtactacccactgtactcagcaagtcataccggaataagggtatgatgcagggaattatcacaaaagagctagagtgtttcatttgcataaagcgagcatttataaacagaagttgaaagattaaacagttgtaataattaattaatattaactatccactgtccaacgctatcccacgttgcggcaggcccaaccatccacctaaactatccaatttcaaaagattacactatggcgagactaatcacg

SEQ ID NO: 70896 - DNA, 464 bp, Oryza sativa
  unsure (1)..(464): unsure at all n locations
agcttcattttatctaccagagggaggatntctcatttgctctttnttctggtggcctcgagaatgtaagaccaaaagaaaaaaaaagattcttctgaacttctctttctatatttattttttggaaggaaaaaacatacatttttcttttcatattctcatgactgaagataattcactcctttaatagccaaagctggttgctgtctcaaacaagatcgcatttgcgaatccgaaggcgcctgtttacccacgtttagctcaagggaagtcttggaatgaagtaagtttcccaaccaatctggaattaacatgaatgttcaagttattcagctagtcttttctaagtggaccaatggagcaagagtgtagctttcatcatacaagattgatgtctataanaaattcanaaaaaaggtgactgaattagtactgtggtagatgacagtaactttgacaagtgg

SEQ ID NO: 70897 - DNA, 419 bp, Oryza sativa
  unsure (1)..(419): unsure at all n locations
agcttgatctgtttgtgcactgactttgatttgtttgtgagctgaatttttctctttctttttttttctgttaaatggtgtctttctttcttcttctcgtttctgttttttttttccttccagcgagggaactttctttagttatatgaagcataaaggactaaagagtggctcttcagtactccaatttttcaatttgttgatgcatattgtcctacatttaccttttaatttagtaatgtcatgccccattttatacatcgacgatgcttcaagacaatggttgtctgaaatttgtaatgaacctgtatgctaagcactgctcagttaagtaggctnttcatacatagtctaaccaaacgccgtaatgcatatggacaatgtagccaaacacanttaagtggctttggacatgtaaa

SEQ ID NO: 70898 - DNA, 466 bp, Oryza sativa
  unsure (1)..(466): unsure at all n locations
agctntactgtttgacaccttntaagatgcattgtaccaactcctaaaaagttgagtaactgcggtataaaaggattttaaggtattgggcacttgatcacgcgcactttggcctaagcgaaaagtgcctaagtccctaaaagaacgtgacaggccacacctgataatatgggctgcagacatattatgcctatgccaaaaaatatgccttcgacaccctttaaaggatgacgcatgtaacatgctcctgagtaataaatcttccgggtaatatagaccaggtgtagctcatatgaacagtttctgatctgagtgattatcccttatgagatactccaaaatatatataataattgaatcccgactggcgcaagtattcggttgatagcccttacgggggaataataattggccagtctttgagcatagaanatagacccatgatcnatgaatcatgtngcatata

SEQ ID NO: 70899 - DNA, 455 bp, Oryza sativa
  unsure (1)..(455): unsure at all n locations
agcttcngcttatatgacaagacattggatgcaaagctcataagagtatcggccatatcaaaaggatcagtattcatgggacacgatagaatgtcaaggaaagtattggaagactgcagatcagcagctaacaagttacatcatgctgtaatttttgggtcgccacaaaaaacctttggattacaccaaaacatcattacccttgtaatctattttttcgtattatgcaaactaacagattaccagtgtcatgtagatggttgcagtgaccagaacaacaggcgcactatatgcaaccatcattgatcacggcaatgaggggaaataaacatgtttgcactagtgaattgcacaatcttctatagaacagaagtacagaagcaatgtgtcctgagcaatcaaataaccaaagaacanggctagtgcattntgtcttccangtgatcaatctttta

SEQ ID NO: 70900 - DNA, 389 bp, Oryza sativa
agcttgatggtcggcacatcataacggaagtggacgaagacggccgacctagtgcctctgtagaagccgccaagaactatgtacgtcacagcggttaggttgtgcgggataacgtgcctgtcagtacagtgtactggtgcagaacaagggcacgcggagatcatgagagatttgtcccagattcggagaaagagatgctgtggaccacaatgctcgagacattcacccttcccgcgggtacagaggacaaagtgaaaacgtggactctgaagaatatggcagaacagtttcagagcttcaagggagatctgtatcagatatatatcatgaaggggcagacaccgaacttcgacacattcccaaagctaatggatcactgggacgagttc

SEQ ID NO: 70901 - DNA, 368 bp, Oryza sativa
  unsure (1)..(368): unsure at all n locations
agcttattgtattatcaaggtagaacaatctatattctatcatgaaattttagttaactgtttaataaaaaaggtgaccacagttaacctactttctacagttatcttttaaccttaatatggacctgagttctcgctgcatgtagtgcaaaaattccctgtaaccaaaagtatgaagtggatacgatcaagaaaaggctcttcacgaatataatttggcaaggaaggatatatangatgcaacagcataagttgttgtaggtaatctgtaagcttggtgcagcaccacatatgatattttagtntagaggggaattgcaatcttttntatgaataggcttatcaccttagagctgaaaaatctggga

SEQ ID NO: 70902 - DNA, 302 bp, Oryza sativa
agcttattgtattagcaaggtagaacaatctatattctatctgaaattcttagttaactgtttaataaaaaagttgaccacaggtaacctactttctacagttatcttttagccttaatatggacctgagttctcgctgcaggtagtgcaaaaattccctgtaaccaaaagtatgaagtggatacgatcaagacaaggctcttcacgaaaataatttggcaaggtaaggatatataggatgcaacagcaaagtttggtgtagttcatttgtaagcttgttgcatcaccacaaatgatatttt

SEQ ID NO: 70903 - DNA, 411 bp, Oryza sativa
agcttgttgatgtcaatctccctgatgacgtcgagatctatggcctcataagcaaccttcttcctcaagtagtaatagagcaattcctcgtccgtcggatggaaccggaaacccggtggcacggccagcggcgcgccattaagatgcattttttttttcactctgagaaatacccacaaattcacaatgcatcagataactcatgcatttagcaagtttacttaaccttaattcagtaaagaaacttacaagtccttatataagtttctaactggacaggataaagtgtatatgcatgcaaatctataccttggaaaggcacacaaacagcttcttttgcttggtttttctcagcttggaagcaacaggtagctaagctagagacaggaaagatagccaagatgggagtga

SEQ ID NO: 70904 - DNA, 369 bp, Oryza sativa
  unsure (1)..(369): unsure at all n locations
agcgttggactatgngttcgaagatgatcaacagcacctnccaagaaagtactgcgacggccctaccttcaccattaacgaagtgtcaattgctatatatgttaattggcgagtgtcaatgcctgacaaacactattacttatttgtccgtgtaggatcgaaacacaagaactaagccaaccagatgggggcgaatggttggtatgcctaaaaacccatactttgtgcggaattaagagttactctcanattcgatggattggcggctaaccgaaggtgttgcgccggtctgaccgcctacaagccatcggtctgaccgagattggaactcctgtcggaccaccaagatcacctgccgcgcctgaagtc

SEQ ID NO: 70905 - DNA, 474 bp, Oryza sativa
  unsure (1)..(474): unsure at all n locations
agcttaaacgcttgtacaatctgtatgggaagaatatctntttcatgtacatagcccatgagctttccctgagatctagttattttatttcctctaattgtttttactcagtacatgcaattgcgcctgtcaataaagatgaattaaagactcaacattaataatagacccaccacttaagttcatttgctttcactgtcatgtctttgaagcaacctaagtacaagaacaagtgtgaggtgatattgcattcacaatatacacccgcataccaacatcacccatgtttgtgctacaacatgatgcttgcacattcacgagacgagacgtagcatccatgacacaacgggtgctcgtctccacattcactatacaatgagtagcatgtttantcctctctcactaaatattgagggtgaagactcttgtcatgaactgtacctgaaattaatactaacttgtaatatgagcttg

SEQ ID NO: 70906 - DNA, 424 bp, Oryza sativa
agctttcctgactctgttctgaccacacaaacttcttttccttcttgagtagttgagtcatgggtcgggctatcttacagaacccctcgataaaccttcggtagtatccagccaagcctagaaaactctgaatttcggtcaccgacttgggtgctttccattccgtaacggcctccacttttgtatggtccactgctactccaccggctgagattacgtgacccagaatagcgacttcttttaaccagaactcacacttgctgaattgtgcatataacttatgcttccgaagattctcgagtaccaatcgcaagtgttccgcatgttcttcctcatctttggagtagattagaatatcatcgatgaataccaccacgaaattttccaagtagtccatgaacactttgttcataagattcataaa

SEQ ID NO: 70907 - DNA, 425 bp, Oryza sativa
  unsure (1)..(425): unsure at all n locations
agcttctccttccaatccctcggtgtggcaccgggcgtagcgctgtgaaacgagcttgatgctgaccttgcccatcaccggataggagagaagcagggggaactgttgcgccagcctccgaagagggctaagtgagggtgcacagtgctgctagagctataggaaagcctgctggccactggtaagaagctgatcgagctagaggcggcggccatgggatagatgggagaggagcgcagcacgagcacaaggagaggcgaagcggcgagcctgacttctgtcattntatntgtgtggcctgaggaggtgttactgttcttccgggtgtaatgggcattttccggcggatnttaatccgataacagcccatccaagcagtcctttccagcccgtccagtataaactcatggaccggtattgtacac

SEQ ID NO: 70908 - DNA, 397 bp, Oryza sativa
  unsure (1)..(397): unsure at all n locations
tctccagcctntttgacagccctactcggaatgcttgcccatcaatgaaacctcattccactcctagttatgtgacaagagggaaaccttaccgagctctcaacggcgatgtttcaataccattgctactctcgcaacatggactatctggaaggagcgaaataacanggtgttcaaccagaagcacagaatctggacagaagtggcaagggcaatggcggaagatgcaacgctgtggcggctcgccaatactgccataccggccacgcctttatagcgctcangtcgcaacattgtatcgcgagattanggtttaatgttcttgggtgacttcctataatcccgtctcctgctgtgttttcccttaacctgtacagaacttttactctcttaatac

SEQ ID NO: 70909 - DNA, 442 bp, Oryza sativa
agcttcttctcatcattctaccactgtatcagctcctttacaacccactggctttctgccgtctagaagttctgctccttcaagtcactttctagcttacatgttaagctcaacactaatcagaacttgctgataatttaaccatagtcattatcattctttgtgctcgaatttatggccttacattattttttatgacccgtccattgttttctaggcattcgacaaccttccttcaccacaagatttggagctgctctgaatattgaaactctagttgccgctgcagaaagaagagatacaccgattgaagtttgtttaattttggtgtaaaccgtgaatgcagcaatagccacacttctatactattaaaccgggttggggcctgactgactatagaatgtagtgaaccttaatccttacgagaaatagccatttactg

SEQ ID NO: 70910 - DNA, 448 bp, Oryza sativa
  unsure (1)..(448): unsure at all n locations
agcttgtatcttgatgatgttataagtactagtagtttagtagtatgcaaagtaatttttaatagagcgctgtaattcttaatgacatttgtgcttaacaatgtctcttcctgtttccagagttctgcacttggatttttacttgcccaaaagcacttcacgaatccactcgtagctgttccatctgctgtcagtgttgtatgcatggcggtacgtttcatttctattntctcctaatgctacaagcatgcacatcaatagcaaataccatctcatatttatataatgagtgctggagttcgtgaatgtctaatttaaggcgttctattgtaacagcttggagggagtgctctcgcagtattctggaggaacagantggcttcagcaaatgacatagacgatttcaaggaatgaaacaccaacacccttcagtttctagtcattacct

SEQ ID NO: 70911 - DNA, 422 bp, Oryza sativa
  unsure (1)..(422): unsure at all n locations
agcttgccaatgaatccttctnttttcatcgtcgtcaccccaccaataatgtgatatagcatctgtcatccctttgcagattnttttggggatcttaaacaccatcatcgcataagttggcacggcttgngcaatggatttgattaaaacctccttaccacccatgcttaacaatttctccttccatccactaactctctgaacaattctatcaataagatgtcgaaaacaatcgcttctatctgctcccactaaagaaggcagacccaagtatttatcattgagagactcagtcataatattcaaagattcacatacctccaacttcatatccggctntgtattcctagagaagaaaatactagatttgcttgcacttaagaattgacctgagttctgcaatatctgtctaataagttcct

SEQ ID NO: 70912 - DNA, 402 bp, Oryza sativa
  unsure (1)..(402): unsure at all n locations
agcttcgtgggtgagatatacatgggatctttctttatcttttgatacgtgcatgtacatatcccacgccaaactaatactccctcaccttactaaataatccctccatatacttttaatagttatatttccaaatgtaaaaaaattatttttgatagccatatttcaattcaacaacctatcatcttaatgactttctcggatntaatacgtgattggctatatggacatcgagaaatataaatattaatgaatcgtttgtctacgaagaatgactagtagcatgcttaaatagatgataagtagaattacttatccttagtctgtatgccaagatgaaatatgactatcataaatagatggagggagtatnntgacaccgtgacttaatttttagacata

SEQ ID NO: 70913 - DNA, 353 bp, Oryza sativa
  unsure (1)..(353): unsure at all n locations
catactgaagtcccttcagagagccagtccaagaaacagaaggaaaaaacaagagatttccctgccttatttctcctgatcctgtacagggacagcgtgccttgacatccaaccaactcgatccattccattgcataataacccattntaattccatcacctgtgctgctgtttcagctctcagcctctgaatggaggggttagggtatagctgcaggctctgaagcangttatgtgctcaacagagacaggaggccacaaaatgacaccaaagttcagatagagttaaaggctcatggaccaatttgttgcgacagtgagtgccactgttcagtagaggatggtgatacaag

SEQ ID NO: 70914 - DNA, 375 bp, Oryza sativa
  unsure (1)..(375): unsure at all n locations
agcttgccctcttgtacaccaaacgcacacttatcggggttcaactttatgcgggcggagcggaagttctcaaaagtntccgctagatctgaaagtaaagtttcttggttgcgcgtttttacaaccaaatcatcaacataagcctcaacattacgtcctatttggctacccaaagaaattcgagtagtacgttgaaaagtaggacctgcattctttaacccgaaaggcattgatgtataacaataggttcctacaggggtaatgaacgcattttnttcctcatacttcctagccatgcgaatctgatggaaccagagtatgcgtctagaagacacataatgtcgcaccccgcagtggagtcgacggtctgatcta

SEQ ID NO: 70915 - DNA, 312 bp, Oryza sativa
  unsure (1)..(312): unsure at all n locations
agcgagcaagcgtgcccttgttggttctacctcccggatcggcgagacgtagcccctcctgttcaaatacaacttgttggtcgacgccgctcgactgggcctcctggaaagtgcggaagacctgaccgactccagccggaagaactagaaggaggcgatagtgacagtcgcgccccctttcttgtccagntacgatggatgtcagagacatcccgccgcgagcgagacgaacccgagccctaagccaaacactccgtcctttggctggccgctgaagacgggctccaccggcggtagtctctcgtctcgtct

SEQ ID NO: 70916 - DNA, 385 bp, Oryza sativa
agcttggaagtgtgtgtatgaagtgaagacgtgaagcccttatatagaggtaggtatgacggttatactatgtgaattgtcagaaatgccccgcaaccgccatcaggagatgattaggaccgtccataccaaaacctaagatcaacggcaattaccagggttcagccaaaccaggggggtcggccgaacctgcgctgggccctcctggcctggcctttggtccgtggactccctggaccttcctctatctatttcttggagttttgggttgaattactgatgttttgatgaagttcataaccctccttgtatggatacataattctcctcactttagtctgaattttctcccaacttcacggtttatcatctgcatataaatata

SEQ ID NO: 70917 - DNA, 419 bp, Oryza sativa
  unsure (1)..(419): unsure at all n locations
agctttcattatcttaagagttaaataaatttgccagtttcattgaccgtccctgattggattttggcaaccatgtctcctgctttttttggcttccctgaaaaaaggtgtttcttggtaatacaatcaaatttgatctgcatgcatgcgtaattgaaattaatcaacatgttggaacaaaacttaccaatgttcaagtttctgtctatttctctcgtaccccttctgagggtagtatttacatatttatactangttacatacaaaggaagttacaaatctacccctatcactgtagttacctcgaggtggctgataagtgggctggccaacggctcgggggtccattcgcctgaccgggagacagctgcgcccattaagggggccggtatggtgccatcatagtagtagcttttacc

SEQ ID NO: 70918 - DNA, 409 bp, Oryza sativa
  unsure (1)..(409): unsure at all n locations
agcttgaaaaattaacaggttaatttcaaaagaataccaccaaacctcgcataactaaacatcaatgtgacttgcaagttgcaaataatcatactccatgtgcttgtcccactattgagacaattgtgagttggtgacctatcanggacaagagccttaatatagctgattagccacaccaacaagatggatgacatcgatagcaatacacgagattaaacaaccatttccacaacttggaagtaattaagaaccaattgtactcatcagcttcttcccttgacaggccaagaattcttccagaaagccttagttgaagcagtagtatggaactggtatctcaactggtcagcttcaaagtcaactgccggtgagtggcctatgaaatggccaaacctttagaaaaccg

SEQ ID NO: 70919 - DNA, 308 bp, Oryza sativa
agcttctctggttcttggtctctgcccgacgcatcgaggccaaccccgagaagatacgagctatagagcggatgcgcccccccagcaagcttatggatgtgcaatgcgtcaccggttgcatggccgccctaagtcggttcatatcaaggctgggagagaaggcgctaccattatttaagctcctcaaacgctccgggccgtttacctggaccgaggaagctgaacgtgccctcactcagttgaaagcgtatctcagctcttccccagttctggtcgcccccgagccagatgaacccttgctactctac

SEQ ID NO: 70920 - DNA, 411 bp, Oryza sativa
  unsure (1)..(411): unsure at all n locations
agcttaacatgcatagaattacatcacacccacaaaataggagtcattggatcatttccatgtttcatcacaaccatccaatatatattaagtatttgcatttactatttctcattagttactagataactcgatattcattataccagttagtatagcgatcattgttattaaaaaagcatccaagaagtcatgtcatttgtcatcaacacataataaatggtatacactattcacaatcaaattgtaaaaaaaaaaacactgaaccatggaaaataatcattatacactattcacgatatcccctcgttagttaaagtccgtaagttcggaggtggatgtcatctaagaaatcataaaananaaagataaattcaacttgtacaagaaacgaaaataataaaatttagt

SEQ ID NO: 70921 - DNA, 364 bp, Oryza sativa
agcttctttgattaataaccttactcgaagaacttgtgttcgttcaaagcacaccatcttattagatccgcttgagactattaatttactgccatttgcaacacaacatttgcaaactgagtacaacctctttcacacaccctcattgatgtctctgggtagttcgatgacgattaatatcactttgccaccagtggcattgttttgatgcttgattacaccagaatctctaagagtctccatgcttgcatcttcaagaacattctcactgaaacacacaatctgagagaaatgattactgaccctttcatcattacaagcatgcgcaattaaggtggtcttcccaacttttccgggccaatga

SEQ ID NO: 70922 - DNA, 266 bp, Oryza sativa
agctttatttcttcccattctcacagaagtggtagaagatggacctcctatagccccgttccaacctccccataactatatacgtcacaatcccttggcttgtgccggataacgatccactctttactgggaacctgccaataacaagggctcctgcgatatcatgaaaactctgccccatattccgagaaagaaatgctgtcgaccacatagcttcacacatcacccttactgcggtatacaggacaaagtggaaaggcgactct

SEQ ID NO: 70923 - DNA, 320 bp, Oryza sativa
agcttgttgtcccatgcaatgctgatgcttatcagagtgcttctctcccatcacaaagagtttttatgactgaactgactcagataatgacccagctcgccgcttttctcagttctagtggagcgccatttgtggtcaatatatacccttttctcagtctttatcaaagctctgactttccacaagattatgccttcttcgagggatctactcacccggttgtagatggtcctaacacatactacaatgcttttgatggcaactttgacacattagttgctgcgctgggtaaaattggatatggacagctaccgattgca

SEQ ID NO: 70924 - DNA, 424 bp, Oryza sativa
agcttcaccttctttgatggtggtcacagacaccacctgcatgcaagacccaacaatgcatgtgcatcactgtttgttaattgttcatcattaattattgcattacatgcattgttcaaacacgtgaaacacacttagcctgcgttctttcaaaagagattggggagagattgggtagattgtcactcgttttccgcgcgcacgctttccaaactactaaacgatgtattttttgcaaaaaaaaattctatatgaaattgttttaaaaaatcatattagtccatttttaaaatttaaaatagttaatacttaattaatcatgcgctaatggctcatctccgtttgcgtatcttcccaattctctcaatcttcctctcctcaaacacaagcttattttagtataaataaataacgggattacagt

SEQ ID NO: 70925 - DNA, 370 bp, Oryza sativa
gcgagcttgccacatattatttgtgatcgacgcccaatgactgactggaggactccataagctgaacactgctgcctcctaatacaagggtgacgctcgaaggatggggctctgacccagcaacactcggactcacacgcgtctttgttcttgcatcacctgtgaagagaatggccatacgaagcaaatctaaaagttttgtctataggacggaacctcatgctacttaaaacaaaaggcgagcgccacagccacacacaaattgcaggataagttgacttcacataatgaaagaaatctctctccatactattgcgccttcattggtaatagagttaagtaacagaaactacttttctataatagtata

SEQ ID NO: 70926 - DNA, 369 bp, Oryza sativa
  unsure (1)..(369): unsure at all n locations
agctttcattcttatttatgangggatcactcgtggtccacggtcagcacacaagtggaacatcaaagtgtgatgcaacctgaggccctttgtattttttgaagacattgttctgtcacgctaaaggtagtatttatctttatcgcctaagtttttgtatctaaattcatatatattagttctggatcactggtcactaatgttgctgaccatcacttaaattggacatatacttataaagataaaagaatctactgttcttgtcccatatgatggtattcttcgggcgaatatacacatccattcgcctcaaagataaccttgccgccatgttctatgacgaacngatatgtgaattgtgatatgaac

SEQ ID NO: 70927 - DNA, 379 bp, Oryza sativa
  unsure (1)..(379): unsure at all n locations
agcttgaatcaaagtatgaaggaccatacatcatcaaacacaagtccaggacgggatcttttcgcctagcgacactcgaaagtgaggagttcgaccattcctggaacgccgcctccctcaagcgcttctatgtctagaatggctggcacccaaatcgccaacttgtaaaaatgtacatattgtcatgtaagcctttcggcaagaaaaaaaaagagcaacaaagagaagagaaaaagaaaaaaaaactggatgtagggctattatccaccatggaggcctgaaccagtataaaatctctgtctcctccgccttctttntatttcttttcgtgtgattgataatttgtggaaaaaccccaaggcaaacgcctgatcagcga

SEQ ID NO: 70928 - DNA, 409 bp, Oryza sativa
  unsure (1)..(409): unsure at all n locations
agcttgttttgtnttgcttgaaagtcaatagttcagaccaaatcagtagtggtttgaagaggacaaactttcaaccaaaatatggaggaataaaggatgtttttccaggtgtttattcagaaggtggagtgcgagctctctatcgtggagtaagtatgtatatccgactcatatatgtctaaatggctattcaatcaccataaaactctctcttgaactgaaaacgtccgatgtatatattcctgcttcacttttgacgagtatcaattttttcagtaccttcattactgtagtaattttgctgctgaggactcttatctatatgtgttcaggtccaacgctcatgggaatacttccttatgctggtcttaaattctacatataccaaagactgaaggccatgtacctg

SEQ ID NO: 70929 - DNA, 420 bp, Oryza sativa
agctttgatgtgtgttcacttgtcaacgaaaattaatgccaagcgtgatggatatccttgtagaccgtataggctgagtagttaccgttgcgaatgtgtctgctcacaaacattgaaaacatacactcaaacactactactaaaataaaccaaatttttacatccatcaggacatggaaattttatttttattcttttttcaaacggagggtgtgctctggacggccgctgcaagagcctccctatttccgtgagcagtctggacttaattatcgtgatgtacgtggaattgaactctttaaaaaatgcgtgtgggttatctacactcagttatattcgaattaaaagcttttggaagtcaagcattcaaaattacagattctgtacaggtgagaatgcgagtcatcatgcagtcatcta

SEQ ID NO: 70930 - DNA, 415 bp, Oryza sativa
agcttgatctatgttgccattggacatcccgatccacacaagaccagttcataccatgtaatggtcatccatgcatcagccatcatggtcgattctagtaacactttcaatcccacaaatcacttccgcaaatcatagacaaacaaatctacactaggagaatcatctcacattcacccgtgatcgtgggcattgacgtgtaacatactagaattttcaaggtaaaatttttgcgaaaatatttaaagtcattgttcttcgttctttcgaattggagcctcccaatccatatacttcttttgttccctctgagattccaccttccgcataacttcgttaagatttctctcccaaccaaattcgagatatccaaacaaaattctcaaaatcatcagaagagctcgtgtttatttta

SEQ ID NO: 70931 - DNA, 416 bp, Oryza sativa
agcttatgcctgacggtactattgaaaaatacaaagctcggcttgttgctaaaggctatactcagaaagaaagcgaagatttctttgacacttactcacctgttgctagattgaccacaattcgtgtgctactttccctagcagcctcacatggtcttctcgttcatcaaatggacgttaagacagcttttcttaatggagagctggatgaggagatctatatggatcaacctgatgggtttgtacttgaaggtcaagaaagcaaagtgtgcaaattgttgaagtctttgtatggtctgaaacaagctcctaagcaatggcatgagaaatttgacagaacattgacatctgcaagctctgcagtcaatgaggcagataaatgtgtgtactatcgtcatggtgagggtgagggagtt

SEQ ID NO: 70932 - DNA, 399 bp, Oryza sativa
agctttattctcatgagaaacagagatcaaggtcaggcaaaagcagcaagcaatcttgatgcacatacaaacagacattgttgcaattctttccccgatagctgccaatcttgccagacatcttctctgctaatgaagagggttggatactccttggtggtacagttgcgcgctgatatggtccacgtgctgcaagactgtacccatggttgtattttagttgcttcaaaagatacaagaagatcatgatctggctgaagcaagagaccatcttgtcccatatcaagaacatgcattctgatccgagtctatatgcttctacctgtaaagatatttattctccttgcaattaggtcacagttcgcgccataccctttaatcatgaataacgatgcccta

SEQ ID NO: 70933 - DNA, 371 bp, Oryza sativa
  unsure (1)..(371): unsure at all n locations
gcctcatactttggtcggttgagaaaaaatttctgtgggtgggtctaatgagctcctggctgggaaaaaaatattctaaaaaaaataattaaaaaaaaagttgtgcctctcttctcaacactagagagagcccgcnataaaaaaaaaaaacataaaagagggttctgcgagcacaccacaccattcccccctttgcaccacctttcaccaccgggtcttgttttcagtgctgtttgggtttggggtttgtggcgtcctttgtggttagggtcgcgtctctactttgactagcctaggaccaacactggacactatacccttgagcgatattcaatttgctttgctaacgaggttctagtttctcttgacat

SEQ ID NO: 70934 - DNA, 422 bp, Oryza sativa
agcttaagtacccgcactgttacttgtaagccagctattaaggctagcaatgccaggagagattttctcagaccctcaaaagtgtaaatcatgttgtaaaggaatatttctagatgtatgtttagatggtccttaccttaccatgagttgtacagaaaaatcttttaaaccaaaatggttaatggtgtaataagataggtgatgatctcagaccctcaaaagtgtaaatcatgttgtaaaggaatattatagatgcatgtttaggtggtccttaccttaccaggagttgtacagaaaaatcttttaaaccaaaatggttaatggtgtaataagataggtgatgatctcagaccctcaaaagtgtaaatcatgttgtaaaggaatattatagatgcatgtttagatggtcctttaccttacca

SEQ ID NO: 70935 - DNA, 422 bp, Oryza sativa
agcgtggagatccacattatgtcgaatcaaaaatttggaagcattttttttgtcaaatcatgggagagaagagttccgcacttgaattttcaattacgaaagagtgatcaagattacatgaccctatagtcggaaggttacagtgattgaagggggaagggggaaaaacgcctcctaattaaacaaagcccctgtttaggccagcttaagattctcatgaacaactggtcgcttctaaaaatctgaaaaaaaaatgggtttcctaccgttttggttatagttcacgtgatgggctggatatgcatgccaaatgaattattgtttaacaaaaaagaagcaagttgtctagcaaaagaaaaggcattggaggcacatatgtatgggtcatagcttcatcttctgttagacgaggtcacacatat

SEQ ID NO: 70936 - DNA, 315 bp, Oryza sativa
agcttgtgacgaataatccacttcccggtgaccaggttaacaccgcgggggcgaggaacgaggctccatgtgtcattggcgagcagtgcatcaaactcagcttgcatagcagcacgccaattgggatctgacaaagcttcacggacagagcgaggcacgggggacaggggcgccgcgtggagattgagaccatccacgggctgcgccatgccagccttgccacgtgtgcgcatagagtgcgcgttgtccaccggggcgatggagaccggccgggtggccagtgtacgcccagtggccgcggtactactggcagct

SEQ ID NO: 70937 - DNA, 414 bp, Oryza sativa
agcttggcgatctctcagtggaggaggccactctgctgtggaggttcaaggatgatgtgaatgacatgaaggagaagatgagagatctggttgctgtgatgcaagatgctgacgataaggtgcgccaagtaggaaaagatggagcagtggcacggcggtggctctccaaagttaagtccgtcgcctacgacgttgaggacgtgctggatgaattcgatgctgctcagctcatcaggaaccatcaatccaaggtacttccacatattgtcgtgttagaataaatgttatatgcttcaactctacggatcagctgctgcacatgtgtgattttctttgtggaacttttgtgcatcataccagcccgattaatctctaaaattaaagaggaaattcatcttttccactaccatgcca

SEQ ID NO: 70938 - DNA, 401 bp, Oryza sativa
  unsure (1)..(401): unsure at all n locations
agcttgatgggccggaaaggcttcttcagcccttgcgggggcgaactggacatggcgaagccgtccttcttcgagctggatgccaggggcgaactggtcatggcgaagtcgttcttattcggcaggtactcacgtgacccttcgcctcgcatcatccttggttcataaccttcgccaccggtttcggcagatttggtcgaagggcctcatgacattcgccaacaagcccctcactggccagggtgagagtggagcttcngccgagaccgtgcaaaccatgtggtatggtatgtggcgccccctttcgtccgatgctcctgtcgaaacctacactgttcctgcaaataaaatattcttacttttaccaggcggaagggaacagtattgggctttcctttgat

SEQ ID NO: 70939 - DNA, 407 bp, Oryza sativa
agcttgttgatgtcaatctccctgatgacgtcgagatctatggcctcataagcaaccttcttcctcaagtagtagtaaagcaattcctcgtccgtcggatggaaccggaaacccggtggcacggccagcggcgcgccattaggatgcattttttttttcactctgagaaatacccacaaattcacaatgcatcagaaaactcatgcatttagcaagtttacttaaccttaattcagtaaagaaacttacaagtccttatataagtttctaactggacaggataaagtgtatatgcatgcaaatctataccttggaaaggcacacaaacagcttcttttgcttgggttttctcagcttggaagcaacaggtagctaagctagagacaggaaagaaagccaagatggga

SEQ ID NO: 70940 - DNA, 418 bp, Oryza sativa
agcttcacctaaagtctttttcaagggggaaggcaagagtagtactgcattccgacagattacaggttatggataaccaagtttataattattaatagtacaaatggacaacatatcctacatacacaagctttttgcgtacgtatcgtacacaccgattaatggatttcaccattttttaaaaaaattgtacatgagtaacaatcttaactcaaaagtcattatattttagccgtaagaaaaaaaaaagttgaaatttctaacaattttaagagtgaaattctatcaaagagttaaatattagaaagttgataggctaattcaaaaggtattataagaaatcttacgaagaaagtttctatagacgatgtaccacttagaaactgggaaaacgtgcccatgaataagttgactccct

SEQ ID NO: 70941 - DNA, 381 bp, Oryza sativa
  unsure (1)..(381): unsure at all n locations
agctttagttatcatattatcgattcattagctgatgtacattttaatctacctacgtcagacctccagccaacatatgcttaaaccttcagacctgcatctaccactatatcagtattggtcaattggttcaatgttttgattattcctatcatccttgttagttgcaagattgaactaacgggcacaccctgaaccgattnttagaaattgcactagagttcggcggatctctcagaccttcgtgtgttggacaaaattntgtggcaacatattttggcacgcccaatggaaccattatattcaagccaacgtgttgaagaanaagccgatgctaacaacatgatcccagtcacaatagagaatttgaaggatgaactg

SEQ ID NO: 70942 - DNA, 318 bp, Oryza sativa
agcttgggtttctgttgcaaagcactaccgtacttccacatgtctaatgggtaaagcttagctcgtggctcactctagccataaacaaaagtacacggattggagatggatgaagtccggtgtcgatcgacattcttcagggcaaatgaaggctacacgagctgcggtccggtagtcgagatgtcatatggcagaagagtggtgccctgctgctaagggctcaattctgcctgcctgtccagggtatcccggccagaagtgagattgggtcaggactcttgactatggctacgatgggctggaaactatgtcacgtct

SEQ ID NO: 70943 - DNA, 405 bp, Oryza sativa
  unsure (1)..(405): unsure at all n locations
tagcttgttccttgtggatgagattttgggcgtccagagtactgtaaatctctctcacatgacctggtatgaacaatttctacatatttatcttattactatccgattatcctacagattcatccggttccgagagcatcgattccatacttctttagataaaacaacgagattttatccccatgtaaacaacatggatggttttcttgttgcgaatgtaacaccaatgctaaacttcatggtgaaatatctaatctattaaataggatgggtgatcaagtgcttatttcattattaagatgtgctgaatgtattgaactctattatgaaaaagttaatcttctttgcttancttggacataccatctgattaaggtacttactttgacgcagctttaaaaattg

SEQ ID NO: 70944 - DNA, 96 bp, Oryza sativa
agctttaattgcaattattacttccaaaagtgcataatacatgagtatatatcaaactggaataaaaggtgaatgcacgatatttgaccctgttga

SEQ ID NO: 70945 - DNA, 338 bp, Oryza sativa
  unsure (1)..(338): unsure at all n locations
agcttcatctgttatgtggttcagctaacgggaaccatatgaatatatgtgatgcaaaacctgctacgcgtgcctgcgagattacaccggcgccgacgtgattgacgatccgaaattgtcacgtgcgtgacacagcagcggcaccgtcaggttgcgactaatcagagccgactcgcagcagcaggtggcaacgattggagccaatttaaatttccagtcctacacgaattcaacgcgcatactactactgctgctggaaattccactgctggtatggtaaaacgaccaatcgagttcgcgctccatccgatgattactntcccgatcgacgcgggcgc

SEQ ID NO: 70946 - DNA, 397 bp, Oryza sativa
  unsure (1)..(397): unsure at all n locations
agcttatatatntgagaggtctttgtattcagcattgctatctctgaacataactattgagtctagtatctgaatgttttcattcttagcattgcgccaaacctgtggtttttgtttcaatatactgggatgaaaacctacaatagatatcgttactatctttgcagataacgggatgaaaaccagtatgagaagatgataaattaaacaattatttatttaccatatcttgttttgagagcaagataatagtggactacatgtcaactataagcttatgtgaaagagagaacaataagaagtgctggctcttatgtcagagttagctatatacattgtttaagatatttacattaaattatagtaagaaaaagagagagtcaagaacaaaaagaac

SEQ ID NO: 70947 - DNA, 102 bp, Oryza sativa
agcttacctcatctttctcataaagtaactctgcaccagcaaaggtttgcataggcttataataaattccagaaaatcaatcatgtgtcttcttacctgtat

SEQ ID NO: 70948 - DNA, 418 bp, Oryza sativa
agcttattattgctatgcagttgcaagctggtgaataacccatggaaggacaacatcaacctctgctcaatcctggacatgcatcgtccaacagcaaagtggtcgccgctgccggagaaaaccaagatcgtcaaggtgcccgaccaagtgaagtccgccatcgtcgccaagctcaagagcagcaaggggagcctgcagctgaccaaagcatgcacggcgtctctgcatctgcagggcagcgacagccagctgctctgggaggatgtgacagccacaaccgacgtcctcctggtgtgccacatcgccaccaccatccttgaggtgaagtatccaaatccaagtacaactgcaagctcaagctctgacagcagcaacaagggttgtgccactcacctgtcaagctactgcgcctacctgg

SEQ ID NO: 70949 - DNA, 416 bp, Oryza sativa
  unsure (1)..(416): unsure at all n locations
tttgatccagctgcaccgactggacaagtgaagttacagccggattaaagtaagcggcttaattgtctgctcaagtgatataatgctccaatgcacatgttgatatgtcatgctaacatattccgtagtcgtctcgtcatgccggatatcacctctatgtcatgttggcttccagggttagtaatgttaaagtgtccataaagttataattttgggataatcttctttgctggttttatagcaaattgaaatacgccatatatattacagcaactcgataggtcacaantttttgggaaaattcttatcacaacatcacatttgataaagatttgctggactctaatcatgtggaaattcatacaactttctagtcacctaaaaatgcacgtagcaagtatacccctatataatgt

SEQ ID NO: 70950 - DNA, 389 bp, Oryza sativa
agcttgtgagtggctagaaaaccctagaacatgaaagaactgaagtggaatggccaaagggtgacctatggacaaaatccatatatataatggctaggtgacgtcatctagccgttactcacaagattgaactggaaacctgctaggaggttccgggcaaaagtgccaggaacttccgggcagcacttaagaaaaatctagctaaacttcggtgcccggaagttccggccagaaccttcgggtagccctctctgtcccggggagaaaataaactctggtgtccagaggttccggccagaacctccggataggcctctctgtcccggggaaaatcattttcaagaaaaaaaaagatagttccaaaaacctttagactcatggatatgact

SEQ ID NO: 70951 - DNA, 413 bp, Oryza sativa
agctttctattctatagtgggtctctaggttcaacatttgcataaagctaattttattgagcaattaatgagtaaaataagcaaggacaagtaaatctagcatcattttaatttatggacagcaagtatataattctgaaatgtataagcaaatgagcccaaacggcactctcatcatcaaccatggactaccaaagtccataccaacatggcacaacatgccaacaccaccatcaaacataatcccatccataataatccacatttgatgctaacatgagtgagatacacatcaagcaatgtccataaccgaggacgcggctattcgaatagattatactctgatcagaggtgtccaactggacccacacgaaatgaacaaagttcaaatgctacgcaccccgtcaagtgcg

SEQ ID NO: 70952 - DNA, 404 bp, Oryza sativa
  unsure (1)..(404): unsure at all n locations
agcttgttgttggatatgtattcagagagccaacttgccctaagctgctgtgtgtcatgattggtgatggtgttcagattttgggcatggcaatagtaacaattattttctccacacttgggttcatgtctccagcatcaagaggaatgcttctcactgggatgatcattctctatcttttccttggtattgcagctggatatgtcagtgtgcggctgtggaagactattaaaggcacatctgaaaggtggagatcagtgtcctggttaactgcctgcttcttccctggtgtcttgttcatggtccttactgtcttaaacttcgtcttatggggaagcaagagcactggagctttacctatctcactnattttcgcccttttagctatgtggttctgcatatct

SEQ ID NO: 70953 - DNA, 385 bp, Oryza sativa
agctttatgtattactacatagacaaacacttgtacagtagcatattgtatatttgtgcgaagtacaaaatccaattacttcaatatattatcacatcacgcaatcaaatacgagcgatatcacacaaaatacgagagatagttgagtgttcaacagacaaacagagattttcttggaccaacaagactccatttaatgggtgaaagcaaaaggacacgatcatgggccgtcagtggcagagaccggattgaaggaggcgtgggtcggtagaaggcagcaaggaaacgtaaatgtggcaatcgacgaaacacggaacagagtggacagcacaaccggacagaccacaggactacaggagagagctgatacttgtatatgagcatg

SEQ ID NO: 70954 - DNA, 280 bp, Oryza sativa
agcttgtgtgtatctgattatatatatccaaaggtcatagtatataattcccttcgatgaaatcgatatttaaatggacccatactgtgtgctcattgagcattattagtcttgttcaagttatacggtatcacattctgtgacgcaagtgctgttatcaagtcatgcaagtgcaagttggccactgaacagactggactaattggcagcagaagcagtggagtaagaccagccaagtagcaacgatccatcactatggagcaaattggccttggttggg

SEQ ID NO: 70955 - DNA, 394 bp, Oryza sativa
agcttagcacgtgcgtaacaaaaatctgcgacggaaaaaaccggattaacaaaatacaaggaagctctaaaaaaaagagagcaagcttctaacaagcctgcaacggaaaaaacatcgaaaaaaaattccaatcgaccataaacaacaggaaaccttatagatttttttattatatatataattatcggtaggtataggtagatataaacatgggagaaatagaacagattggaagcataataaattgcatcctccattacgtgtgcttttttattaagaactaaaaaaaatacccgtgcgttgcaacgggtgaaagattatttcttacaaaatcataagctgcaattagaaatctgatcgtctcaagttaacatgcgagtatgtctatttaaag

SEQ ID NO: 70956 - DNA, 51 bp, Oryza sativa
gagctcgacccgtgatcctctcagtcacctgcagcatgcttcctggtgttt

SEQ ID NO: 70957 - DNA, 413 bp, Oryza sativa
agcttgtcgtctgtcctgctctccacccttccccatcccaacattccttcgccctcctccctgccgcctaacatctctacccgatctcccgctgctcttaccttgctttgttcctagctgatggctcctgagtatgcatcgagcttaagatcctggatctgcacaacagcagcctcattctgcctcaccaccacacccatcgtgtaggagtccaacgtgttccttaattctgcagcaacagcagctactgcgacactggagacatgctctggaccaaggtgtggaaccagttttggccagtggatttcggttggaatatgttgctgacttttactagtttattttgattattggtctgcaattcgataatgttcactatttactctttcatgaattgattctgagtcctaaat

SEQ ID NO: 70958 - DNA, 375 bp, Oryza sativa
agcttgctttattattattttgtcgctcaaacttttccatgaaacattagaagtaactatctgtatcacaatggaaaagaacaatccatgaatggcttatgctgctcatttgatacaaaggacaactgagacatggttagagaacaattcgtcaagctatttattcaactcaattttggaagcacagtggaatatccaagtattaaatcccataaagcaaacatatgtttgctgccatcttctttttgaacgcttcaagctgctacacctagagttcaagtttattgttgtaacaaagcaaccgagttgtatatctcgataaaaaattgcgaaaccagattacagcacttgtgcacgactcacctttttttttct

SEQ ID NO: 70959 - DNA, 424 bp, Oryza sativa
agcttgctcttgtgttttgctggctgacatgaattgtcgctggtgcagaggtttgggttatttccgtatctgttgatggaatgaaaatgtttagcccaatcagtctattttgtcaaattgactgaatttggacattcaaagattactaagagaagagtgggggtgtacttaattactttatatttacggtaccatcttgaattcttttgagaagtccagatggaattgaaccattgagttgatttcctgtcaaatctctaaagaagccatatgcccataaattatatacatatgtcagttacaaatgatgctatgcaataaagtaaaatttgacaggagttgccaaacttacaatactgccaacgaaggcaactgtgaaagtgcatctggaatcgaacctgtcaaatcgttgtttgacagatcc

SEQ ID NO: 70960 - DNA, 411 bp, Oryza sativa
agctttcatctgaattctgtaaaattacaaagttcttatgccaacaaattacattgcatgtaatcttgatcgatcttctcaaggaatgataatgatgcaaataagacataagaagcaggcctcgtgaactgaagtcatagaattagcatgcacttcatctggtgatacttttctaggaataggtgcatgatcactactactaggtacttatgtttgttagcttattagttgcagccaacatttgaattttgaaacttaattttagagtcaatattgtttttttttatcatagcctactttgcagcattggcttttaaaccacgaataatacatatacagaagttccacccatattttttttggtgcatcgttcatatttctatggcttatgagctgtagctcaaccaatca

SEQ ID NO: 70961 - DNA, 419 bp, Oryza sativa
agcttgcaagttgtgcttcctggacttgtggataggacaccaggacttggcgacctcggaagctgtcctcgtcggctcgcagtccttgtcggaaggacaaggctcggccgcgctaggaatcttctcgggctcgcatgacgtcgatgttccgttctccgccacggcgggaggatccttcgacatgggaccgtccgggtttataaccacggcgttctcgtttccggttattgatgaaccagtcgagattggcaccgtggtgtaaaccgggaagacgatttcgccgacttgagtctacaccagcattgttgaagcaaggattccttggatggagccggtgttgactctgttgtcgacgaagctcgatgtcatagtagtagaaccttgagcaccaagtccctctacctggtgcgccactgtcg

SEQ ID NO: 70962 - DNA, 411 bp, Oryza sativa
agcttgtttataaccctgtctttaacccaagaattgctggccatgcaattattctccaatttgcctgtgctagcacacctatgctcatatggcatgttctttatctgcaaccaaaaagggacagtaaacatccaaaccattattcagttgcgaaacattaaatgacaaagaagtaaaacaaaagagctacatacctgccaagttctaccatctggcaacctataagcatggatcctccatttgcacttctttgccttgcaataagctctgtatcttgtggcctcaaagtatggcactgcaagctcaacctctttcaggacagcatattgtctcatacacctcttataacaaattacatgctaaaaagtaacaccaacttctatccttggatagctacatcagttatatgga

SEQ ID NO: 70963 - DNA, 222 bp, Oryza sativa
ataaacactgcaagtaacactcgaccattctatgctaagtcttattacgcttgggaaaagactggtgaaactaggtttaaccacataaaccaacatctttactgtgaatacctctatcatatgccttgttgctgtggtggcttgcataatactgcctgtactcactcttgctgttgaaaatttcaatcagtggatggcaatgaactctatgatgatccctat

SEQ ID NO: 70964 - DNA, 418 bp, Oryza sativa
  unsure (1)..(418): unsure at all n locations
agctttactactgaaacaagagccagaagagaaattttgccatatttacttcaccgtaaccattgccataattaaatggatcattcaaaaaggaacattttgtgtatcagactacaccactacatgctaacaacattgtatatttaatacttttgcatgttactagttcaatcatgagacatgcatctgtacgaccataataatcacagtaaaatttctacatctaatggttcattcctgacgaaaagacacaggcattatggaactcctagagaataggcataaacttgcgagaatccatacccattaatatggttgcagtaactggagatctgattggttacaagataaccctccaaacgtgacggctcangaatcggcttgaaaatgggattggatgggtcttcttctagcaatg

SEQ ID NO: 70965 - DNA, 425 bp, Oryza sativa
  unsure (1)..(425): unsure at all n locations
ggcgaatcactcgacccggatctctaatcacctgcagcatgcaagcttttttttatgtgcttggctctgggttggttctgagatgattcacttgatggagctgccaaatcccgatccattgactgggcgcccacagcatgggggacgtgatcgtcatacctgtatggcgatcaaagatgtgttgaagttaaaagaaatctttgacaaagccggtactaatgaatttttactttattatctgttgcttatacagtgcactagcaacaactgataaagagtaaatgccctgtttctctgcttagtgtcttcatagccttattaaaaaaccactgatctttacagtaaaacctactaagacagcaagctattttttttctgatgtggtaaattgaaagcctgccctgttnggagaatttatagatgtc

SEQ ID NO: 70966 - DNA, 422 bp, Oryza sativa
agcttatattttctcatggacgtgatccctgcgaaatccttgcgccctgaaaccgattggaacgaaagcctcgtggcaaggatcaaatcttcggagaaacgagctgatctggtatacaagttggctgaggtccatctttccctgatctatgactacttgtacaccaagtttggaggcttctcgggtatggtgctgctgcattgtgtgctgctactgcttcggccagccatgtttgtcctaacctctatagctgtatccttgtttgtcggtgctcacgttgaccaaaaggcactacactggtcaaggtcacctgtgacgggcccaaaccctcacctttgacgggtttgggcttggtcagtgatcaatggtcactggtgagtccagtcacctttgacgggtgggcggtcgtcagtggtgacatc

SEQ ID NO: 70967 - DNA, 408 bp, Oryza sativa
tatctttatctgatttccttgccgagtggaccgagtgccaagaagacatgcccgaggaaaagatggaatattggactatgcattttgatgggtcgaagaggcttacaagcactggagctggggttgttttaatctccccgactggagaaagaatgagctacgtattgtggataaaattttctgcgtcccataacgtggcggaatacgaagcgctactccatggactaaagattgcaatatctctaggtattcgccgactaatcgtccgtggagactcttagtttgttgtcaatcaagtcatgaaagagtggtcatgcctagatgataatatgaccgcttatcgacaagaggtacgcaagttgggaaataaatttgatggactcgagctcacccatgtgctcgacataa

SEQ ID NO: 70968 - DNA, 415 bp, Oryza sativa
agcttcatctattagtgggttgtgaaacaaaatagggcagtttatctagtaacactattggctcatacgcaatggaatgttagaacaagggaacttgttctttcatggcaatctgtcaaggaaagtctgctgcagctattggcacatatgttgtaatcggtgcaagtgctgaagtgctattacttattggctctcttatagacaatgacaagataatgctactccctgaaaaccttcttgatgcaagggctgctaaaaactttatcttaccttggccaccacccccatcaaatctggaaatgctatatattgagatctgatgggattcctgaatatcatcgactagatatgtaagccactgcattgggagctttgatagtatgtcatcattccataagtgtccttggtgccatgt

SEQ ID NO: 70969 - DNA, 307 bp, Oryza sativa
  unsure (1)..(307): unsure at all n locations
agcttcatggtttgtctccgttcgcctctctcccatcggagcacgttgatcttgacggttcctggcgcgaccaatgcgtgcgcgagaagttagacgccatgaattcngttctcttctctgctttgnttttttttttggctcctgttttgcaattggtgtgttgcggaggtgtcagtttctgaatttgtataaaccaaatgccctcttcttattctttttgctgttcctgatgcaatctgcccgtcttccttacgtattgatcaagtagaacggcgcctcgttctcttctcgaattttaaagcgtttc

SEQ ID NO: 70970 - DNA, 416 bp, Oryza sativa
  unsure (1)..(416): unsure at all n locations
agcttcaagacattaacatgcactgattttttgccaggccggcgatgcaacgtcagccaactttattaggattgagaacaggcaccgagaacatgagctccaccgtgctgcaaaaaaaaaaactttatgagcatgtatttctttacattgttaacattagaacgaacaaattctcatgactggcaactttatgagcatgtatttctttacattgttaatatctaagcaccaaagcaattcaaaagaacatatctaagagaatattacaaaatgtttttagcaaacgcgtttcgagtaaaactctcattacaaaaacagacaaaaacaatcggtntgcaatacattatcatggatgtttcctaacatttataactaacaaacaagaaaacaattgtattggacaaggatngattatc

SEQ ID NO: 70971 - DNA, 427 bp, Oryza sativa
  unsure (1)..(427): unsure at all n locations
agctttngataaaatggtatatgaaaaatgactcttgaacaaatctattctcctgttagttcttaacacataaatttacattgcaacattacagattccactaaattgcaacatttgcaagaatggcaagaaatgtactcaccttgcttctggatggacgcttttgcactgatacacctgatattcatcatgagtatcttggttcagtttctgtataagagaataaggtggtgcaggcagagatttaagacatcaactgctgaaagcaagcattcatatcatgaacagaagaacacagacaaaaagctgggtataacatatcaagcaagcaaagtttgttgcctgcttaacttancaagtcatactctgaagatagtnagtttgttgttacaaagaagcataagtgactgcaaatatccagcatttg

SEQ ID NO: 70972 - DNA, 392 bp, Oryza sativa
cagcttggaagtctttctacgtggctgatcttcacaggctgggtgatcccggttaataatgtcgtgtgggtaaagggtaccccctttgcaaagggtaacaaactgttcgaacaatcgtgcccaccgtcattggcggatgtgaagggaatcctagccgtatttccgttgactacttgcttgtgaaaatgctgttgtgaaaaggggatcgatgtttggaaaacccgcagctgatgggatcaactatgcccgggtggccgtttgaaagttgttagccgggtgccagtcttgatcatttctaagactgatacattgcatatactccgaccggacgagacgcactgtctcatccgtgtcgtttgagaagcactcacttagttgttctcagaaaagag

SEQ ID NO: 70973 - DNA, 427 bp, Oryza sativa
agcttccgtatatgctagccagagatttcatgaaaaccgtttataaactaacaaaaaaatgatgaactcttaaataaatctcatgaaaaaaaaattaaaatttagttttaattttttttaaaacttgatcgaaaaatcaaggggttttgtgttttccaactggtccgagttgtctgaattttacaaattttggaccggatttcactggaattgtaaacatgtgtgactgtcttagcagcagcagcagcagcatatgattcgcgtcttgcatgcaccggctgccatggtcgaagctgaaacggagggatgaggaggcgaatggcgataagcgttgttggattggaccccgggcgtttcatcaacgagcaatgaaggggctgaaaacgaatctcatctgtcaccaatgaatagtgccagtgaaatgtgg

SEQ ID NO: 70974 - DNA, 407 bp, Oryza sativa
agcttcttttttcttggtctctgcccgaggcattgaggccaaccctgagaagatactggctatatagcggatgcgcccccccagcaaacttaaggatgtgcaatgtgtcaccggttgcatggccgccctaagtcggttcatatcgaggctgggagagaaagcgttacccttgtttaagcttctcaaacgctccggaccgtttacctggacggaggaagccgaaaatgccctcacccagttgaaggcgtatctaagctctcccccagttctggtcgccccggagccagacgagcccttgttactctacttagcggcgaccccgcaagtagttagtgcggcattggttgtggagcgcgatgagacaattctcatttcacgcttccccaccctgtgccaacttggcccgg

SEQ ID NO: 70975 - DNA, 362 bp, Oryza sativa
  unsure (1)..(362): unsure at all n locations
agcttgaactctgtggaatacaaaagaagggaaaaagaggtactangtaagtatccaaaatccaaaccattaaacctctttcataatataaacaatactgttcataataaatgtttgtatttcttgcgaagtatggatactgcatgtattgtgttttgcatatgaatacaccgtcaatttcgatgctcttgcagatctagttcaattttttgggggtcatgtttggattgttatagaaacatttatatttcaaaattattttgcgactgncatctanagtgctagaacacaaccagttctactgagcaataatgcaattcataatttgaattcaattcatcanatccaaatgattgggtcat

SEQ ID NO: 70976 - DNA, 385 bp, Oryza sativa
  unsure (1)..(385): unsure at all n locations
agcttagtgcattatgttattntctgaaatgtttcagatcttgtagaaacaagttatgcttgtttgtgtgtatatagagtatgtagatcgatctccattgctgctgctttctctggaataaggattatgctgtgtttaggtaggattaggaggagacaaagaggggcgtgatgctgatctagctggtcagctcctggcttccaattgataaagagatcatgtaatatattctgcttggatgatcgttcagcttaatgttagttccaacttccaagttgatcagattcctggtgtcgtgtcgaaccaagctgctgggagttcgtttgccttgtcaattgttgcttgataagaaattctctgaaagttaattaaagagttgcttcat

SEQ ID NO: 70977 - DNA, 423 bp, Oryza sativa
  unsure (1)..(423): unsure at all n locations
agcttcgtctactatagcgtcaaccccggtatcaaccaaagagtttctacttcaacaatgctggtgtggactcaagtcggcgaaattgtcttcccggtctacaccacggtaccaatctcgactggtccatcaatgaccggaaacgagaacaccgtggttacaaccctggatggctccatatcgaaggatcctcccgcagaagtggagaacggaacatcaacgacatccgagcccgagaaggatcctaatgcggctaaatcttgtccctccgacgagaatcacgagctgacaaggacaacttccgaggcaacaaggtcctggtgtcctattcacaaaaccagaanacacacctttgcagcttgctgggtttctcttgacgtacaagccaagatccatgcctgcaaagagcgtggaattcaacgg

SEQ ID NO: 70978 - DNA, 419 bp, Oryza sativa
  unsure (1)..(419): unsure at all n locations
agctntgagatcatgccatgcatctcaatattatttttagatatatataatcatcactatgaacttaatgctagatcattaaaaatagtaatgctctaatgcacctaattcattagcttgtgcatcagtgctgataattaagcaacttgctgagccgattaaagaagctgagttccgtacatatgtgttggtttagtgagctagctgcagactgtttgcagcaatcatgctgttcaaactttgatagtaatattgttgtcgcacccaacaatattatgctgcaagtggcctttctgggacctaatttaagagagattccttctgaatttctgataatttgtacaggtcaaagatgtgcgggtgaacacttcttacaagtcaaagatggtccacccactcacccacaattcaggtacatg

SEQ ID NO: 70979 - DNA, 241 bp, Oryza sativa
gagcttaattattataattcgcaaatctccatataacagcattaaacttcggatgatcatatcctggtcatacgagctccgaatcgacccgttcaagtctcctaatgcttgttataacctaaagaaccctgtgctttgtttttatgtattgctattgcttctttataagcttgtagctttgcttgtgtgcttcgcgtagctttcgtcggttcggagggttccaaagcgtggttcgtggtcg

SEQ ID NO: 70980 - DNA, 284 bp, Oryza sativa
  unsure (1)..(284): unsure at all n locations
agctagcatatgaattggcgtcgttaancacctgaagaatgtgagaagactacatggttgtccttcatatggtaccgcacatttagagcgacttgattatgtgccaataattcaactgtatgctgaaatccctggttctgaattccactagcaacaaattgcacataatggttttcagccaccacatcatttttgtcaatgaacatgcgtaacattggatattagagtaatgaaatataaacactctttataccagaatcaagtttgactttgtactgccaaaa

SEQ ID NO: 70981 - DNA, 217 bp, Oryza sativa
agctcatcgtctgtattgtgccatcaacatcgtccttcagccgagcagccctcggcgccacagagctcatcagcccactgcacaaactccatggagggctgctcacgatccgtcatccgtgttaccacaagcccttcaatcgtgggatgggaccgtggaagtggggaggtggtggtgattggtgaaaaatgatgactcaaagctctaaagttaatga

SEQ ID NO: 70982 - DNA, 418 bp, Oryza sativa
  unsure (1)..(418): unsure at all n locations
agcttcatatgcatagtattctaccagaaagtatcgacctgctnttctttgactcctgcaacaaaccatacattaaactgttcatacgttgtggcagctttagataggtgataacttttttggctatgatctgacatatgactcagaaaatacaggaacaagtgtggcaggcagaaatcagaggggtcactcactggttgctgggagttcatcaagcaagtcagttgcacgagttcacagcctagataaccttatctctatcatccagttaagagaggtgatttcactatcgcaagtcagttttcaaagatggaattcaaaatattttaatattccatttctgattattctctatatttcttaccagccacccatcactgtgaagccatcagaaaaccagcctgcacaggatgcaaca

SEQ ID NO: 70983 - DNA, 381 bp, Oryza sativa
agcgtagatgttgtttgtgttgttatctacactcaccttgctctgtattaaatgtgcatggctgtcacccagacatcttgaaatacattgcatttgacttaatttcatctaattgaatacttagatgaaagactttatctatgtgttaccgattgtgcctttttccacaggatacaagcctcctgaacttatcgtcttgattgggcgctccgtaataccaagctcgtgtatcctggtttaatctagcgcccgggcatactacgatgccagatctacattctgctcattccctacaggtgcattctccacctgtcttctcgccctaccagcatgggcaatgggctgctggaaatcctatctaccatggcttaaacactgtgc

SEQ ID NO: 70984 - DNA, 383 bp, Oryza sativa
agcttttattctaaagacattgaaggctctcgattgataaaacttgagctccaacttgatacatatattgatgatatgagagaggatgatagattaaaaggcctaaacaacattgatgagctctctatattaagcttgttgaaacaaagaagcaaaagctcttgagttttgactagtattgtaatatccttgcgtcaaaaaaagtactgtaatatctcaattatctgaagactctatgtatgtttgaacaaattacatcttcatttaagaaagaatatacttatttggtattttctactaactggattgaaccctttaaagttatatcccaattggttaacccatttatatcgaatataatggatgcatccggattttttttt

SEQ ID NO: 70985 - DNA, 410 bp, Oryza sativa
  unsure (1)..(410): unsure at all n locations
agcttgctcatgcttcgtaaaattattgtctctgccactgattcaaatacatgcatatattaataataaggctagggaaaaaaaaaggactgatagatattgnggaaagttcttcgcgttctacactacgaggcagttcaaggcgtcgactatcacatcttttggtctccctcatccagaccatgcttctgcatgctgcacaaccatgtgtcagttatttatttttaaaaggaaaaagtcaagtaccccctaaattntagatagaaatccgtgtggagataatggataccccatacccacatggcatgtatatccgactagatatgggggtaccatatatggatacaatatctttagtaaagaactcggttgtttcctaacttgtgatgaaatatccgaagattctagtc

SEQ ID NO: 70986 - DNA, 411 bp, Oryza sativa
agcttggatataatcccgtcctgccgtcctgtgagttgtgttgtgcgaagggtactgtcacgatatccccctttgcagtgccttggtggtacttctgggcatgacaacatgtgcggaatcgtgtcttgtgggtacagtggtacatctctggccagaataaaactattcgaatagccgtgcccgcggttatgggcggtttgagtaatgtttttcgtaattaatctcacacctgtcacaaataattattgatgcaataactggtaataatttattttgctcctggtttggagttagatctgtacagtcgggtatggttgttcacgatggttgggcctgatcatcataggtgtgctgttcatagttgattataatttgtaatcaagtactctattgctgtactactcttaactc

SEQ ID NO: 70987 - DNA, 411 bp, Oryza sativa
agcttgatcttgtcatttctgatcagtctagctgcgggcattttgaatctgttgggactgtcttggacatgtgcaggcaaccaaacaagtatccaattgcatgcaaagatgcaagtcaggccgatacaaccaaccgaacatgtcctatattcatgtgttttaatccttctttttttgacatagaattctttcctattccctcgattttcctgtactatatttttccaatcctgtgttccaaacaagcactaaaacctttaagaagagagcagtcaattatatccaaattgtgtagtgaacttgatgaaatttgttgcacctccatgaaactgtctatcagtagcttgatttgtaagttggttatgtgttattcagtagatcaaatgccgtcccatcttgagtaacaatagt

SEQ ID NO: 70988 - DNA, 413 bp, Oryza sativa
tatcttgtcatcgataaaagacataagtgacgggccatagattaatctcaatcgagcctagtttagcgcccatcgctgatgtgtctcctccgtgatgggcttacatcttgggcttgacaaagattatagaggtaatctcaatcgggcctgaacgtgtgcccgtctgtcacgccccgattttcgttcaggattaaaaatcatcaaataatgcattttctagaaattaaataaaagttaaaccaatttaatcaagtgaattattgatggaattaaaaatttcctttaagaatcatggccggaaatcattttgtaatattctctgtgccctaatatattctctgaaatttccgtgaattttctgagctcatgaaataattctaatagcacaaagttcgctacatccaataaaatga

SEQ ID NO: 70989 - DNA, 393 bp, Oryza sativa
  unsure (1)..(393): unsure at all n locations
tatctttgtctaacactnctntagggcataatgctgacactagcttcaacgtcgtatagggcctggtccaatttctgtatcccgacgagcaagtgatcgtgtgacacctcgaatctttcttattatttaggatcttgtagagtatggcattgttgcattctttcgtcagcttgaccacttcagttgttggaggtggcctctctgtattgaggatatccttaagatataatgcataagtgggcacttgcatagcatccagcagtggcacttgaatgtggatattctggatcacctcaatgaaacgagcgaactgctcgtccaccgacgagttcctgtacctttgtaggaatggtagcaacctcgtgtctcagcactcttgtggcacaattcctt

SEQ ID NO: 70990 - DNA, 412 bp, Oryza sativa
  unsure (1)..(412): unsure at all n locations
agcttatggaccaaaanataagtgtcatgtcaatttttagaattttgtgaccaaatttagatattattgtaattattatatggtaatttaaagatagaagtttgtccttagaagacaatttaattttcatttatctccacgacatgggttagaatggaccatatgagccgaaatataatttttgtgcaattttttttatactattagatacacacttagtttgcttttgaattaatttacataacattgtataaatttatttaacatatagaaaataataaaccagttccaaaattcatgaaacttctacaaaacaacttgtatgttgtttatcacatataaaaaatgtattggtgtatataagataattatttttgtgtgttacttcacaatagtacaataaaataaatag

SEQ ID NO: 70991 - DNA, 204 bp, Oryza sativa
agcttggatgttatatctagctcaaggagggaatttgatcggagaggctttagggttggagtctggttttggattccggaattatgcgatatttgtgctttaaggttggagtctggttttggattccggaattacgcgatatttgtggctatggtttctggagtgaaatccgaatagaaggattcgaacttccagattattttg

SEQ ID NO: 70992 - DNA, 128 bp, Oryza sativa
agcttttcctgtttatcccaatggccgagcaagcaaaggtgcgcaacctctctccgagtgttagcggtgacgacagggagccaaacccaccccgtcgagctcgtacttcaccgcccccttcgcgccaa

SEQ ID NO: 70993 - DNA, 234 bp, Oryza sativa
agcttgcttaattaatataatcgtgttactagaaaagcatggaccgtttcaaatcttagttaagtatttttctgaccagatttggcctgtctccactgcatgcactagacatgccggaatcgtcgccggaagcccagcatctatgcacagtgaaaacgtcaaggcgaaggtttttggagtacatctcatcgtcagtggggagtggaaagcagagatggggcgagggctttggga

SEQ ID NO: 70994 - DNA, 424 bp, Oryza sativa
  unsure (1)..(424): unsure at all n locations
agctntagagtcattatagaatgagtattcagatattgcctgttgtaagttattgtccaaatcctcaattgctgggtctgtaacaacattatgtggcgatttcaagttcctagcatcacactgatcagcacagacatgtcagcatgaagaaagtattaccttgtttttattaatttttagaagacaagaaacattntgctagcatgaatgcataaaatcgactagaaattgttgatattattgacttgtgaacttgtggtttattcgttcaacagttcaactaatgttgggtgagatttatctagaagttgaaatgcataagttcaattcaaaaggatggtacacaagacagagtagcaaagcagtgaaatgtccctaacaattctcataacgttgtacgatattggcaggtgaataaacttgt

SEQ ID NO: 70995 - DNA, 387 bp, Oryza sativa
  unsure (1)..(387): unsure at all n locations
ttcttgtttctggcattggcacgattatcaaagatcacgcgaagtatgcaaatgttatggtgatgattctgacccctcaaatgatggtaaaatggttacccttcaaggtagtagatgaattcatatctgtataaattaacattcgcaaccaaaaaatatttatgaaatatatagataaaacaaataaatgtgtttttttatggattgacacagtgttttccagctgatgtggtacgaaagatagaggatgcagatgctgcggcagatgatgcacgggaaaaagttgattgctcactatattattccataaatcgcaaggccgataaacttgaagaactctctagacttaaagcaggagcgctccgtanactcaagtctttggtttgt

SEQ ID NO: 70996 - DNA, 261 bp, Oryza sativa
aaaaaccataatccgccctgaaagcaaatgcaaaaaagagcccatgtgtatattatcacgcggaaacatatatgactattcagctgaacccgcagtgtgccggaaccacccctgctgaaagatggtactgtggagtatgggacccgcattcttcaccaaaacaccatgcaagaggccataacaaacgaaaaaaaaactgatggtagacactatactgaaccgatcactgcatccggcgagctgtacaccgagccaaccaaa

SEQ ID NO: 70997 - DNA, 417 bp, Oryza sativa
agcttgtgatttattttttgatgcagcaagtcaaggaaaaagcttcttaattgttggtaccaaaaaaagagcagcggatttagtagcatcagctgcaataaaggctcgttgtcattatgttaataaaaagtggttcagtggtatgttaacgaattggtcgattactaaaactagactttctcaatttagagacttaagagcagaagaaaagatggaaaaattccaccatctcccaaaaagagatgtggcaatcttgaagagaaaattatctaccttgcaaagatatctcggcgggatcaaatatatgacgaggttgcctgacattgtgatcgtcctcgatcagcaaaaagagtatatagctcttcgggaatggtgccatttggggattcctactatttctttagccgatacaaattg

SEQ ID NO: 70998 - DNA, 390 bp, Oryza sativa
  unsure (1)..(390): unsure at all n locations
agcttgggtggagaagatttcgccctcttgctccttttcgcagaaagggggaggtgcggcctgctgtcaacctccataccgtcgtcccaaaaatcagtatcatactgtaattggagatcttcatctctttgttcaacggcaggagggagagatacaacagtttgatggggatgcgtcggcggcggacgagaacttggcgctggccttggagttatattgatctcaatgttgtgcttgggccattgaataaaggtcccacgtgcagccccaaaggtcagaatctcgtcattaggtgggtgtgggatagtgtagccaacccaatcgggcttcactaagtccacctgaactntggcattgccggcttgctgctgcgccccatgcactcgggtc

SEQ ID NO: 70999 - DNA, 415 bp, Oryza sativa
agcttaactaggggtgaaactaatcacggtgaatctggtcgaccgcccataaccgcgggcacggctattcgaatagttttactctgatcagaggtgtacaactgtacccacaagacacagccccacgacacgttcccgtgcgccgacatgccaccacgacataccggaaagaggccgtgacaggacccttcgcataaccccctctaaccgatcgcaccacaccttaaggttcgcccccgtccccagcaggcaacgggcagccccctttcgtgccgcggtgaatccggaagccgatcaaccggacaccccggccgacccaactccatcacgcccaccctcgcctgagtacgtctgctagagaaaagctacactacaagctcagcccgttgccacgctggcttgtgtaagtacgata

SEQ ID NO: 71000 - DNA, 414 bp, Oryza sativa
  unsure (1)..(414): unsure at all n locations
agcttgctgctttaagttcaagtcattcgatttagtgtcaaggctgtacagattttgtgccactagacagccttgtgggctctccggcaaaaggtcttcggaagcctgaatcgccgctgcacttttacaggagatgttcccatcactttccacaactttctgttcatactgtacctcttctggaggcaaatcttctgaggaacttgttggcgcaatatcttggaaatcagatccacaagtctttgaagcacgtggaatggaaagcacctcaagtttagttgacatttcattatcgttattcaccaaaattagtggactttcacatgcaccatctgtgctatcattntttattttatccattgggattagtggatctgatgccttcaccacacacgtgtctttagaacaaacaac

SEQ ID NO: 71001 - DNA, 371 bp, Oryza sativa
  unsure (1)..(371): unsure at all n locations
agctttgagctcttgaacctgagacagaatgagtcaatgtctgtgaagaatatcagttgatacaaaggagatgacagccagattattcaacggaacaccacgatattattgggctgcatttttcattcttgttggggtactgtacagtgcttatttgaaggctgaaagtgaggtgctgtgattgtatggctgatccattaaaaagcacatgtttatataagtttggataaacatattgacagcccaattcggtagcttgtttgattcatcctgttggtaatcaacctgtagtttcaaatataaaatctcgcttcgtcactcttcatcaccttggccagttggcangggcatttgcatgctattaatgatta

SEQ ID NO: 71002 - DNA, 331 bp, Oryza sativa
tgcaagcttggtccatctttgaaagacaatgatgtgtgctatcttataatcactggtaagtgacttgacttatatttttcttgtcaaacaaggtaatactggcgctttcttatatagctgatcaaaccttttgcagcaccaactgatccttctgagcaagggaaatcgccagttccgaactctataatgcatatttctattgtgtcttcgcctaaccctgtttataacaattcattattttctgacctttctggcagctccagtttctgttctataccccatcatattaaataattgatgcctgatccttttactgggctgtagactatga

SEQ ID NO: 71003 - DNA, 393 bp, Oryza sativa
  unsure (1)..(393): unsure at all n locations
agcttgatggcatactcaatgcttcaaccaattttaagaagaaaggccagggaaaggcaaatgaagactgctttgtgtgtggcaagtctgggcattgggcccaggactgtcctgagcgcaaaaaaaggaaatctgccaacatggttattagcgagggcggagaaacatcggngtaaaggaaaatattacctacagttctctctgttnttcactcacctgattggtgggttgatactggtgctaatattcatgtatgtgatgacgggagaggttcctccttgttgatgggaaacgggtcgcttgcggctgttcatggtgttggtaccgtcgatctgaagtttacttcgggaaagaccgtgcaactgaagaacgtgcagcatgtcgcttcaacaa

SEQ ID NO: 71004 - DNA, 442 bp, Oryza sativa
  unsure (1)..(442): unsure at all n locations
ttcactgtggctgttaatntggtccctgaaatgctcgtgttctgtctatgcttgttggttatcacttaccttaaatggatgaaatgaaatatcattgctatttcttagagagttatcaacatgatatggctttatattcttggtatgattcattacctcatgagccagcagcatttcctcatttgtgtccaccattgactgaagtggggaacatgcttttatacaatcagctggaggttcatcattaaattgatgaccaagagatgcttcttctctatactctacacaatccgaggctatagaagttccagattcagcatatgatatacaatttgcagttatttcgtcctgttcgtgtgcttcttgtagagattgtgcacagggcctgcagccatatgctaacaataaaccacattttacatagtcaccttgttatccacat

SEQ ID NO: 71005 - DNA, 407 bp, Oryza sativa
  unsure (1)..(407): unsure at all n locations
agctatgctggatagtttataaacattcataaagtcaatntcttttcttctaatgctttcgcttgttcaattaaggtctctctgtgatgtgcattggaagatatgtgattggacttctctaattggatatgctgcttgtgcaggcgactgttcggaaggacatgtgtgggatttctaattgaatatggagtacatcaccaaagagaacaaactntgcttcaggcctccttgtgatttgggttctacgtgtccttttggtgtttgtcttgttgcgttcatcttcagacatgtggcgaaatctagattgcaaatgttcttgtcttgggactctagaattctggtctagagtatatctctgtacggtgtcctttcgtggctctgatgctttgtcaaagactaaatttgtt

SEQ ID NO: 71006 - DNA, 365 bp, Oryza sativa
  unsure (1)..(365): unsure at all n locations
tgaaacggagggagtacataacaatagatttgcactgtgacgaactatgaacagctatcttgttactgtcatctaaaaaacactgataaagctccaacacgatgtgtatattagtgtatctgaagaagcttccgattcatatgtgtactctcttgtgatagatatcaactatcacggaatctgctaatagtaaatcaaccatctgaactagtatntatctgaaaaccatctgaactatccacggtcctgatctttgcataatgcccaccgttctgtcgctaccaatgatagcgaaaagttgtgcgtaacactgacaactccaaaacacgcgagtacaaaatgggcgttaacccactcgcataaat

SEQ ID NO: 71007 - DNA, 412 bp, Oryza sativa
  unsure (1)..(412): unsure at all n locations
agctntgtacatgggcccggccctcgagataagtggggcccaaggcccatcaccatgtgggcttggcctgcagctaaaacgcctatatcagcggctttctagggttccactcggcgccgccgtgtgggtagacacgcgggcgaggttggttggcttgttctttcgttgatgtgttcttggttttgagttctcttctcggttttctctttagcgttcttgctgggatttgatgcaggcattgagacattgatgaactcatgagtcttagcgtatgatgtttttgtcctgttggaacatggatttccaagcttggatgccgcgagactcgcacagaaaanagtgttgccatcacctccctctctctgcttgagcacacgagaatggagtcgaataacagcacaacatgtcccat

SEQ ID NO: 71008 - DNA, 356 bp, Oryza sativa
  unsure (1)..(356): unsure at all n locations
gtctcttggccaggggactatagaacaactcacgaactcttgtttgtgttccctacatgtaccctgaattattttcttgtaaatgccatgctaccctgtgcttaggacttttccccttcttttgctcccttttggtgtgctatgaatcnttactaataatacactgctatcaactactccttctgtttcgtattataagtcgtgtgactttttctatagtcaaactttgttaagttgaccaaatgtatataaagtattaattcaaatatcaaatagtttcattaaatctaacattgaatatatttcgataatatgtttgtgttgtagttgaaaatactactatatttctctataaa

SEQ ID NO: 71009 - DNA, 413 bp, Oryza sativa
agcttctacagtttctctagcattgacgcgagagatatggctcgtacttgtagttgtatgagaccactgctttgccccgatggtacaaaagctgtgttttgtgtttagtttagggtgtaaagttttagtaacatcgaatatacggatatatatttaaagtattaaatatagtctaataataaaataaattatagaatccgcatataaaccgcgagacgaatttattaagactaattaaatatgtcatattaaatatttattatagcactatattattaaatgatggtgcaattaggcttaaaagattcatctcgtaattttacacgtaatctgtgtaattaattgttttttcgtctatagttaatactctatgtatctatacattcgatgtgacattgtgtaaaattttaaca

SEQ ID NO: 71010 - DNA, 249 bp, Oryza sativa
caatcagcagcgtaaaggtgtctgacatgatgagaaggcactcatcaactatatcaaatgcctattcagtgctacatgggccagatgtaagataaggttcctaggattggtttgagcacataaacacatcaattcatgcccatcggtcagcttaagtagtcaaaaaccattcagcacagcactcatgttgtgcatgccaccaggcaaacacccatgtagatattgcacaatatggattaatcatgtacc

SEQ ID NO: 71011 - DNA, 412 bp, Oryza sativa
agcttggggacagtcttcgactagcttggttgcggcgacggcggtgacctatctccgagacagcttcctgtatacggacgattcgaatgggagggcggagtggtatgaaatgaagaaattcatggttccggtggcaaaaacttaaagacttacgaattgaatggtaatctcttaaaagtcagcgtattggatggtaaataatgaaatttctccaactctgacaaaataatatacgaccaaaataagttctaaagaatagtgaaacaaccacggatattgcagaaggcacatttatctcctacctctgtatatacataaatatattgcagaatgcatccagagttagctaacagtccatgctcttgttggcagtgccaacaggagagaaagaatgtatgcagccagcacggga

SEQ ID NO: 71012 - DNA, 392 bp, Oryza sativa
tcaccatctcgccaaaagagagtgatggagaattcaagtggaacttgtaatttaatgttattcatgtccatttactgaaataatcttatgtggattcgtttcgaaattcggatgaatttcaacctaatgagtgtctatatattcaagtcatggaatctttgctttttcctatgaaagatgagaatttgtccgggcaggaagaagcatcgcctagaacaagcaaaaccgctgtgagctatttcttggtggcaaccggagaggttcagtctttttgtgcactgtgattagctcttcaaaaataaactaaactaaaatgctctagtgtagtactcccccgtcccaaaatataaggtactatgatcagatggagcacatcatagcactgcgaatct

SEQ ID NO: 71013 - DNA, 482 bp, Oryza sativa
  unsure (1)..(482): unsure at all n locations
acctataaaactcaagctgaagtatgtagttcagatccatcagagaacaatacctcctcttctatctatgagatcganggatggagggtcaatacccttctgattgatcaccacaaaatctttattattttcagcacaaacctgaaattcatgaaacaatatgaaggagtttctggaagtgtacagaaaaaatgcactgcaggtgaaataagtgaactaccttatntttcaattcaataatgctcttcacacgctcatcaacttggcgcctttctgcgcaaccatcttttctctttgatctgcattcgagtagaaaaatcctgcatttatttcactgagaagagtatatatcagttaacagtgtcccttcaatgatgcatggcaaatataggaatagtttcaagtaaaggaactaagctaagtacaagtgtgtgcaaccggtcttaactgcagacaatgtagcatacatgaagaagcaatat

SEQ ID NO: 71014 - DNA, 416 bp, Oryza sativa
gagcttattcctttttaattgggaaggaattccgtggattaagagatgacatgcatactaattactctgaactaacttcactaaagctatggatcatttcaaccaaaatgtgcatcaatggctgcaacatagatctcaacaacatgatagtaatgcttatttgttaccttgcgccttcgatgtgtagatgtctctctttcattaacttactttgtccattgttggcactttaatctcatgtttattacagaatgaaatcaccctattcaatagtggctcccatacattctccctcatgtgctgcaagagctctgtcacatctatgagcaaactcattgcctcaacaatatcttggttctttctttgcaaagcacgtgacaagtcatctgtaatgctcaacatgtctatcatctaat

SEQ ID NO: 71015 - DNA, 317 bp, Oryza sativa
  unsure (1)..(317): unsure at all n locations
gatgaaaatgcccncagtgatatttaagtccatccttcaagaagtcaactagagaaattatacatgctatgtatacacattcatcataatgcactctatgttaaaaaattattagtgaccaactggtgatagcttgcccatgatagctttctctttcacctcgtatgggttaagggatagggttacatgaaatatntatgtataagatttcttataggcaacacattgtactgattgatcactctggcgaaatgaacttaatttgagatattgtttctgaaataacattatttattaagccatcacaccacgatatt

SEQ ID NO: 71016 - DNA, 414 bp, Oryza sativa
agcttcattattcttcaaacaagagggaaggtcatgtcaaaatttcttgtgaatttattttggtgattatatacaatcggaggtgtctaaaaggttagcaactttatcctccaatgttttttttgttgttatattacatttggacctatgtttcgtacacattattgtatctaaaactttgttggaagttgatgagagagaaaatcactgtaggtaagaagaatacatagaaattttgtttatttacaattttataaaaggttttatataatagttgagaaggaaaatatattgaaaattaatctaatataatagaaaacaagctaaattgaaaattaaaaggagtacaatacattaaatatttgtttaaaacttcaaaaataattaaaacataattattctatgaatattgat

SEQ ID NO: 71017 - DNA, 348 bp, Oryza sativa
tcataccctctctcagatggttactctgtacatatactatcatatgggtacatgggtctcttgggccacaacacacatactacctttaggaaatggtacaagataccatgtattgttctttttaagagcctctagttcatctaacataacttgatgccaccttggatcttgttatgcttctctccgatcgtttggactttgcataggatctaatgacgctacatacgccctatatgtcgatgatataggatcataagaacattactcgatatgttatctcatcatcccctcatcttgagcttcaaaccattccctatgggatgttccctggatgcttcttacaccttt

SEQ ID NO: 71018 - DNA, 394 bp, Oryza sativa
agcttgttgttgtggtaccaaacttgagatcatcattggcagatgcacgacgacgtcatttacaaatactcatcagaagtctggggacaccggcagtggtatgtgtgtatgaatgctgtcagtgaggcgacgagcttgaagaagactacgccgatgatagtgatgagctttaagtcgtcaccggttgtgacggtgatacacgtacaccatataaataatgtattgcggtacgttggtacgagaatttacacgatacgatatcaaagcaaacagaagacaagagttatactggttcagacccctcgtgagataatagctctaatccagcttatataagattgatatggaaaatcacaaagtacaatgagaacatatgaatccgatgataccgatg

SEQ ID NO: 71019 - DNA, 405 bp, Oryza sativa
  unsure (1)..(405): unsure at all n locations
agcttgatggaattaatatagctagctcgctaccaattgaactattgaaggacggcgagccatctgattcactctagagacatacctatctaccagctcacagagatctcgacaactcctcaaatatatgctttctcatctaattcaggccatctattaattggccacttgagagagacgacatagctagctagtatctcacatgatctcaagtctcaacaacaactggaatatgctttgtgagctactccctctgttctatattataggtgtatttggagagctttagattcgaagaaacaattgatgggaatcctgttagtaagaatttgaagaagaanaaaaatcagtttcaggtttctaatttattttcataatcctacaactataacattttagaatctg

SEQ ID NO: 71020 - DNA, 186 bp, Oryza sativa
  unsure (1)..(186): unsure at all n locations
taactataactatatgcttctaatatagtcacgtgcaatcatgttgcgcattngagaaanaaaaataataaacatgttccaaaatataagcattaatgaaagcgtgaaaagagaccaaggttatggtgaaaaataatcggaattgggcgaggtaaagagtcaaatagagaaactgggggaaatgag

SEQ ID NO: 71021 - DNA, 237 bp, Oryza sativa
agcttttctcttatttggattagacgcacagattcgtaagatgacactgaggatgacctgcaattaacaatccaaaacttcttaacttgttcggtgcaaatgatatctgtgtatgacactggccacctgcggcatgccacaagattttgacatgcagtatgcaaagtccacaagaaactgatactatcttcacctgctttctcaaaaggcaaacgagcatgtttgatggacctgact

SEQ ID NO: 71022 - DNA, 404 bp, Oryza sativa
  unsure (1)..(404): unsure at all n locations
agcttaattatagtagtattagctcgctggcttacatggcgccgaagaaatgaagaatagacccggtcacttttgttgcacaccgcctttttaccaccaaactctatatataaccaacccccgtcctgtctctcttccaacaaacctagctagctaagcttcaatattaatttcttcatccattttcacgtacgtaggcagccagcttgaattcttgtctgccatctctgaaacaaatctagttagtaacttagtacagtagtaactgcagctgaattcgatcatggcgtcatcgtcngcgatggtgaaggtggtggtggtggccgtgctgctgatgcaatgctgcaacgcgatcatggcggcgaggctgctggaaagtgaacttgttggcaacagctggctgc

SEQ ID NO: 71023 - DNA, 400 bp, Oryza sativa
  unsure (1)..(400): unsure at all n locations
agcttctaagcttttgctggagtgaagatggaatttaatgtatgctagaaatgtacttacgatgatggcaaattaggagttgcataatttccatattttcactccaatgccatgtttgaagcatatggccccaggggtatccttatgtatttgaataatttctctctccaattaagctgaaagtgtccttcagcaaattaacaatgttctanggcgtcttttagccataacacgtttttgcgatgtctactagcaaattacacaaattttagatgtcctatagcaaaatttgccttttatggtttagtccctcatttcctatttttcatcttctattctagtccttggactctgtagatattatgaacaagtccttcatttcctatttttctatctgcat

SEQ ID NO: 71024 - DNA, 388 bp, Oryza sativa
gacttgctgaatacgaaagtactcacccttgctctatataaatatatatatagttcctgcggccggaaaatgaagattaattcatgtgacagctaaggtctccgacaggataccagccaccgcctgtggtgatgggtgatagtccgatggatccgctgctgcacgtgatggaggagtgaactagtgcgcgtatgattgtgcaagcacgggctcgtctgatctggaaacgatgataaagtaaataagtactctatttattatatggattgcagcgatgcatatgtcgcaccgagggtaccagcgctacgttctatgactggtactgtgatcgcagtattctaggaagcggctctcgccaaaaggactatgacacgctactatcaagtgc

SEQ ID NO: 71025 - DNA, 412 bp, Oryza sativa
agcttcacaagctgtatatatgtgtctgtatgtgcaccatgcatgaatggtcaaatcggaaccgggaacttcatatatatatatactccatgttgtgcatatcaagatcccctagttggtacatcactagtttttttttctacatgttatttggtcttgctaacatttgttcatgttagaatatttgcatctgtagtttgtaacaaaatgcacctgaattctatttgaatcttcactatatacttctaagcacttgctctgaccctctgatatatacctctgatgctggtgggctccaaaaaagattgtcacgtaacttggagatatatatatgcttgtattgggtgtgacatgtaattggattggatgggataggtcagtaccaccactttgaacgatgagggtgatgaga

SEQ ID NO: 71026 - DNA, 436 bp, Oryza sativa
  unsure (1)..(436): unsure at all n locations
agccttgatnggaattatatattatgctagctcgctttaccaattgaactattgaagagacccggcgaagccatcttgattcacttctagaagacatancctatctanccagctcacaagagaaatctcgacaactcctcanaatatatgnctttctcatctaattcaggccatctattaattggccacttgagagagacgacatagctagctagtatctcacatgatctcaagtctcaacaacaactggaatatgctttgtgagctactccctctgttctatattataggtgtatttggagagctttagattcgaagaaacaattgatgggaatcctgttagtaagaatttgaagaagaaaaaaaatcagtttcaggtttctaatttattttcataatcctacaactataacattntagaatctgaanaaaaaac

SEQ ID NO: 71027 - DNA, 282 bp, Oryza sativa
  unsure (1)..(282): unsure at all n locations
tctaatatattcacgtgcaatcattttgcgcatttgagaaanaaaaacactttacatgttctcaaatataatcactaatgaaagttttaaaagaaaccaacgttatggtgaaaaataattggaattgggtgagggtaagaggtaaatagagaaattgggtgaaatgagatactgtatgaaaaagtgcttatatttgtgggataaaattttgaatccttanaatcttatattttgaaatgggtggagtattagtactctaaaaacagaatgcctactccctat

SEQ ID NO: 71028 - DNA, 412 bp, Oryza sativa
  unsure (1)..(412): unsure at all n locations
agctntgatgctttatccaccaatcttctgtagattatttacataataatctccgtggattatgcatctccttttcttactacttttactctctccgtcaaaatgacacgaacctatgttcttctcaatatccgctgcatcactattacacatacgggatcagtgtaattgcttaccaattactgtatctcacagatgtcgaccaatgagatctctggcagcaatgagctgtgtgctcaagatccagaggtcatgactttctataatcttcgcggttctgataaaaccacaatcctgaggaagaaagaactgcagaggctgagaaaggaacgcatcgaanacaagtgctttagaaagaaagagaagataaggaaagctaatgaaattgtggacaatgccctcaagataagag

SEQ ID NO: 71029 - DNA, 412 bp, Oryza sativa
ctttttatttttttagagggatgtgccccgttgtcggctcttacggcccgaccgaccgccttcccatcgtagtcttctctggcgccgacaagcgccttctggcgatgcgccggatgacgcgcccgattgtggaccgtctccgccgcgccaggccaggaacagccgcaagccgtttgcattatcgacgcgctgcgcaaggtcaccaaggtgcttgaagaccgccgcgaccgcaacccgtcgccaccgtcatgctcctctctgacacgcagcagcatcaggatgcgaggaagccctgcgcggttcggtgcccgccagctcgccctccggacacgcgagtcacgcacgtcttgtgcggtcacgggcagcatgcggcattccttggctgcggtgggacagctcggcggtgagtgtc

SEQ ID NO: 71030 - DNA, 316 bp, Oryza sativa
  unsure (1)..(316): unsure at all n locations
gtatgaaggagacattctctttgtaactgtaatgctattggtctttacatgtgtgcttagatgtatatatttttccctggacaactgctatctattaaatttaacagtaaagaaatctagtttatttctcatttacaaaacagatctgataatacaagcatatgtgcatatggcctaagttggagctactcttcttttgatttntgtactatgaattctatagggtgctatgaattaaaagggtaaaactattcaaatttgagttggagatggaatcaaaacatgatattattgcacttggtaagatgacactctg

SEQ ID NO: 71031 - DNA, 412 bp, Oryza sativa
  unsure (1)..(412): unsure at all n locations
agcttgtcacgctatataaaatggcatggcagaacacaattgcaacaccaattacagtggcgtggtaacactgatgacgtgttatgtataacacaatgtggcagtactgccacgccaatatacatgtggcgtggcaaagttaataggcaacgccagctagcttggtgtggccaaaaggttcacatttgaaaataaaattttagatggtttagtattaaaatattatattaaaaaggtataaaatataaaaaaattcctcagggtcacagacacactgacttttacataacatcttttggcgttctccctccttttcatattataagatgttntgactntnttttcctagtcaatctttaagttttaccaagtttctttactattataaaaattgaagatgtttacaccaaaa

SEQ ID NO: 71032 - DNA, 386 bp, Oryza sativa
  unsure (1)..(386): unsure at all n locations
tacgcttgaaagcatcgtgctgatgctgcatcatgttgttgatcgtggtgaactgagcatcatcattctgttgccattcttgtcgttgtgctatgtgttcctcaacgatgtgttggttctctcccgtctgcatatcaagggtatccatcttcctagtgatttcacccaagtcacaacgagaggaacttgagcgccattcactgtgagatggaggcataccacttgatttgggggactggttgttccagactccccactgtatgtcatgaggcgcctgccaccggctctcgctggcactttcccagctcgagactccaatgctatggcgtggagcttgggtctatcctggtgcatccncagatggctcccaaacagccttatacatc

SEQ ID NO: 71033 - DNA, 406 bp, Oryza sativa
  unsure (1)..(406): unsure at all n locations
agcttgcttatcttttttgccaagaattctccacaagtccgatataggcttcttaagtgacttcngttgtgcgcacttgatgaaatgctcgatgacatgcggaggaattggaatctttggttccttgggcttcttaagaccaaaaagcgaaatgatgctggcgttcattgtcttcttaagcagcgacgttgtcggctttgacactaagtctgaattggaatgtttgagtcgctctttgcttgacgaaacagacatctgtgatgcacttggtgttcgggtcttttttctgagtgggggtggactcgtggatttctccggacgatgtcgttcattatgtgtgttttcatgaggaggtggacaggatgtcctctgtcgaggcggagaacgagctagatntggacctcat

SEQ ID NO: 71034 - DNA, 285 bp, Oryza sativa
  unsure (1)..(285): unsure at all n locations
tttctagggttgcaacacgatgccacagtatagtatcatgcatttgatgcttcgctagaagtgcataacaaatattgcgagcaaccgaacaccggattagatataatataaagcacgaaggacaaangaggaagtacggcataatacaaacaagtttgtggatactaacataagtaaaagggtgtattcaaagctttcagtacggaagaagtgacaaaatattgcccatctatgaagactggaagactagaagttgatcaatacataacagaactccacaactct

SEQ ID NO: 71035 - DNA, 390 bp, Oryza sativa
  unsure (1)..(390): unsure at all n locations
agcttaatgatacatgggcccacatgtcaggtgcatccgtcctggaaaccgccataactatcacaaccactatgaggacccacctttcagccccttgaccaaatgtggaggcctattgggcccgcccaagtttggccgaaccctggcagcaccagctcagctcggccctccatgtggacacttcacatacactcccaataatggttgcgaggcatttctgacaattccaactgccataaccgtcattgtgaggctatataaaggggtcacttncttcactccatcacacactcaagcaagaaactttgatctctctctcaagtataagttaatactctggtgctaagtgaagtagaataaaataattctcggagtccctgagttttccga

SEQ ID NO: 71036 - DNA, 376 bp, Oryza sativa
agcttgctcaatctctatcacgcgtttggacgcggcgtatgacgaggtcgtcgacgcagagtgatcgggcccggacgtgacgctgatggtagcgccgcaggctctgctggtagcgcgcggctcggatggccgcgcgccgccttcgctcttccaagtagtcgaggtcatctctgcgaagctgatcttgatcagcctcgcaatacatggtagcccgaggagacctcacggtgagctcggatgggagaaccgcttccgctccgtatacgatgaagaaaggcgtttcccccgctgctctgcttgaagaaatacggcttggccagagcactgaatgcatcttctcgatccatgtatctccgagctacttgataatgttgaa

SEQ ID NO: 71037 - DNA, 406 bp, Oryza sativa
  unsure (1)..(406): unsure at all n locations
agcttctatgttatcagcttgcatcacctaaacccaaattccatagttcacatcggcaatgtcgtccatgtttgtgaagccttcttgggaattaagccccacttcgctctgtttcgccgaatcttctttctcaagccccaaccaaacaagagtaagccatgtgtagtcggaggggccggaattcagctgagggggactctgagccagaagtacttctctatgcccttcaagacctcaaacaaagggtggcatgcaaactggttttatattcagaatcctgagcctgctcttcccgagtactcttgtcttcctccggtgtaccaagatacctggaactctcttccgattgnggatgaagcagcccaagccttggagctgatggatcgcatgctaaaactcaaagaac

SEQ ID NO: 71038 - DNA, 404 bp, Oryza sativa
agcttctctctttcatcttgctcataatatgccgtactctgatggttcttgtctgggattgcgtcccatttgatcacaacaattacacatgcttttccttctttctcaattctttctgctattttatagaccttggtaccacagaaattcaccatgttagaaaagattggttagacaacatctctttgaattgtttgggggtgcacatgtgcatgtgatggggtacagatacctgctccgtaatgcaggccattgcttcaacaactagggcaaccacatcataccggcggattgcacgaaaaggcccgtttactgaaagagtttctcgtgcgctgccaacagaagcaactgctgcccttcgtccgatgccatcggtgtcaatgagtatgtacttctgcagcata

SEQ ID NO: 71039 - DNA, 81 bp, Oryza sativa
  unsure (1)..(81): unsure at all n locations
gctgagagaagggcacgtctgggacacaagtgagccatntctgtacgcgacaccaaaaaacagactgaatagggagcatag

SEQ ID NO: 71040 - DNA, 416 bp, Oryza sativa
agcttgcgtttcttctttctatgtgattgcaaaaatcttgttacttttgctgcatcagctacccttcagatactaagcatctcgtcttgcgagaaactgaaggaactgccggctctcccgtccctccgttcactgaaactgagtggctgtgaaagcttggttgcagttggtcacttcccgtcactcaccgtcttgcatatgagtactgaatttgaagaagaggtacttcacaagttgatgaatttacacttaaagctggaagaattgtcaatttcgtctgataccatgaagttaatcaatcttgagccacatagcctgcctttacttagagagctcgagttagtatgccctaacttgcagaattgtgatgcacttgccagcctcagttccctcgagatactatgcgtaaatcgttg

SEQ ID NO: 71041 - DNA, 413 bp, Oryza sativa
agcttcactactagctgcattcacacgctcacattcatagtgttacactgatttaaacttgcaaagaaaaattcaatacacatatcttcatcggtccaaattaatcacagtatcacactaagaccaccaacttgacaaagatataacatgcagtatgaaattccagaggaaactttcctctcctcacctccttccaaaaaggcagaagaagaggtaggatggagctgacgaggagccctccatgcggcagatccagcagcacccgccgtactggagaccgccgctgtccgaaacgggacaccaatgccacagatcatgcagctccctctccaaatcggttcaccgacctcctggatccagtgattccccgtctcctcgacgtcccacacgcacgtccgtggccgcctaatcgc

SEQ ID NO: 71042 - DNA, 410 bp, Oryza sativa
agctttgccgtgactcgtctcatgtgttgggacgaggctcatgtgttgggcagtcgcggagtgcgggtaaagtgtacatccactgcagtgtgagtaaaccaaacctattcgaatagccgtgctcgcggttattgagcaccgggacatgtattacacttggctagactctaaattcttaacttgtgtgggatgggatattgcatgatgaattttatgctgttggagccacttcctgagaggcgggaaggtggacgtcctcagaaaaccatgacaaatcaatggcgggaagctatccttgggatcacaatggatggtggacagaaccgtcgttgtttaaatacaaactctggtactaaaaatttgatcagtcaatgctaggtcttaggcttgtgaaaagaattacaaaactt

SEQ ID NO: 71043 - DNA, 375 bp, Oryza sativa
ctcagcttatcaccttccttgctcacacgttcttgctgctgccggtgattgtggcatatctcccaatgtgtacgtctcacattatttcacgaaagaagcaatctttcatacatggagtgatgatatatatgggttcgggatctcaagatcttacacaacgctgagtgcccaagttttttatattccagatccatctaagttaagggtgaaaaatggtcgacgccaaactagacgcatcagaaatgatatggatgagtcacaagcatgtgggaagactttacgctgcagcaagtgtgatctgcgcggccatacttacaagaaatgcccgaagaatgcagaagtttcaagcggcgcagatgctagtccatctggaca

SEQ ID NO: 71044 - DNA, 410 bp, Oryza sativa
  unsure (1)..(410): unsure at all n locations
agcttgaatgctgtgttattaataaanttccaaagtattgggcatacgccatgcgcacactgctttaacagatgtgcttaagtccctaaaagacacatggtttcaccacacctggaaatatatggcatatatggtataacattcgagtaagtaaactcataaaggatttaccaaccgcctgaaaaatgaccataatatataatcagcctaagccataatattggtcaataaaaatgcacacatacgtggcaaaaagcaatgatattgtatccaatcaattgcttgataaacccaaacagcgccatgactatataaaaaagtcagcgggacagctatataaagctgtactgtttgacaccttttaagatgcattgtaccaactcctatatagtcgagtaactgcggtataa

SEQ ID NO: 71045 - DNA, 412 bp, Oryza sativa
  unsure (1)..(412): unsure at all n locations
agcttctatgttatataagtaatcttgatccatcgtattgagcgagacgccatactgaattgtntttttctatctcatgagctgaagtagcattgtattgcgcaaaacaatttcacattgagctatgcaatcatgaagactatcacaacgatctgattaatgcactggacaatgtcgttttaaggttattttggcctactttacataattttgtttatagctgcacttggaaatgtgggatatcattgttcgtgtgattgctgcagcatggatgagaacctgcaacagtccgatgcttggagagagttagctattcctcatgataatggatgtatgtattttctcaaggctggtgtctgtgctaagcctttcccacacgtagtaatcttttaacacctagcatcctcaaata

SEQ ID NO: 71046 - DNA, 353 bp, Oryza sativa
aaaaaccaagctccactgaatgaaccgcgacaatacctgggacatatgatatggagatatcatctccacagcacaggaacagagaagaatgttgtggcctacacaggaatcacaaacataaaactaatgcggatgggtgacagcacttactgggctatgaaatcaacagacacaccaaatgctgcggacatcgctgtcatagacacactcttggatgactccaaaaactgtgaatatactacaggccgcaacttcctcatatagtagcggatatgaagctgaagatagcgatccaacttaatctgctccggcatgccagctgaaaagaaggtcagaccatatattcatatagc

SEQ ID NO: 71047 - DNA, 415 bp, Oryza sativa
  unsure (1)..(415): unsure at all n locations
agcttggtaacatggtaccctcatattagaattcagagacttatgccccgttcgatatcccgttatggagatggatttttgttccacgtagaacaagaaacctcattagcacatgattaattaagtattaactattataaatttgaaaaatggatttatttgctttttttaaacaacttctatatagaaacttttttntaaaaaaatacaccatttaacaatttaaaaaacgtgctaatggaaaacgaggaaattcaagtttggggttgaagaatagaactaggcctaagaattgatgcaatgttattgggcctgcttcaatttagtttccattttattctacaaatattcatgtttaactccagtagaaaatgaatactttatggtacaccaattatctttccattaaataaca

SEQ ID NO: 71048 - DNA, 459 bp, Oryza sativa
  unsure (1)..(459): unsure at all n locations
tgtcgaggaacgcctggatggagtaaaaaaagaagagaaatattagtggaaagagagatgacgtgtatcacactgacatgtggggcccacatgggtcccacactgactcattcgccacgtagaccaaaaccggtgctaaaaccacccaatgatctcgggtgaccggttttgtatagttaagggaccccgcgtatctagttttgcggctcgaggatgtttttgtatcccgatgataagtngagggaccttcggtgcactttttccgccggtgaactatgcgtttcaagttagtgggcttcatctactaagcccgtcatatagtacgtgtgctctangctgggctcgtttagcatgctacgcacacttgtcaaccaacgaaccaacnagatatgtccgtttttcagttaccggtgcagttcattgttatatgctgtgcagcaaacctcacaaaaatgtgtg

SEQ ID NO: 71049 - DNA, 451 bp, Oryza sativa
  unsure (1)..(451): unsure at all n locations
attagattcccccgggatctgtacatcgacctgcagctgcaagcttgttttttgttagancgcagctcagtattacgcatagtgatacaagataatcacgactatatgacatatacatcttgtgtttgagttgaaaacgagacaggatgggtcatgatccatccctatttgtgattgggtggaatgatactatcatccgtttggcatatcggatatagtcccccacattctcatcagagatagaaagtgagtttgactgtgccaccaccttttgatgagtgaagctgacctggaattttatggaatatttcctttcggggccatcccatttccattcattttcaaccagacatagggaataatggtgtcgacccaacccaagccatatcattcatcgtaccacacacatgtttggattcggtcacatcagctatatgtgactgtatcctat

SEQ ID NO: 71050 - DNA, 405 bp, Oryza sativa
  unsure (1)..(405): unsure at all n locations
agcttgtgtatgttaccaatatcagcaggcaaggattctagagagcaattggatagaattagagtttgcgtatactgaaacatatgctaatatttacgaagtgctgcaatgggcaagcctgagacatcaagataagctagcagccatcagtgacgaatggaggaatgcaaacccatacctacagggatagattggccttcanacgaaccttcgctcaaggcccagatccctatattcttttaaccagaaaatgcctttcggggaagttgcgatccaatgcactccctaaaatgaatggttccaaccgtgcttgggagaactttgagaaacttgggttgcttctggtaggtgaccaactgtgcatgtcggcgataacgcttattattagctttgctccatgtattt

SEQ ID NO: 71051 - DNA, 385 bp, Oryza sativa
agcaggcttttttattgtagaagagcgagcttaacaatgttggacacatgttaagcatgttagctcaatgaatatgttatgctttggcaatgtgggtatgccaaccgaataacctctaaggttgaccaaggttgttcaatatagagatggtatttgcacccatgacaaatctattatgaacatatactcaactattggattgaggacacatagttgtggtataaatattactactttttgctataaacttaattgaatttgaaatagatttacctgtgactaaaggtgaaacgccttgtaacctgaaacacctgagctgagggagtataatgcagcagcgtcttcactatcctctatgaattttgcccgtctacaatacatcatg

SEQ ID NO: 71052 - DNA, 408 bp, Oryza sativa
  unsure (1)..(408): unsure at all n locations
agcttgacacatctcatctcgctatntcagatcttacatgaaacttcatcacagaaaataatgaaggaccaaatttgtttattcatcgctttgatcacaccatgaacaaagaatggaaaccacagacgcatatatatcatatatgtatccaagggccacttctacggatagacctcaatgacacaccgaggtcccaatttcttcacaatcttgtagtccctgaagcctactttcatgaagagatctcgccaatcattctcgtcccgctgtcggcttttggtcaccaacatcacggccacatccataaggagttgggattccagcattggccctgaatcagaaccgactactatgtcgatgattatcactttccctctctcttcttggagcggaaccgctttcttgcat

SEQ ID NO: 71053 - DNA, 317 bp, Oryza sativa
  unsure (1)..(317): unsure at all n locations
tggcatnnccaccgtcatccaccgcgcctgtgttccgcgtctctgcccgacctggttaccgctctgtccctcccgccgttcaagctaccgttcctccgccgtctcatgcggctgctggtccactccggcgtcttcgccgccgacgacaccaccgataccggaacgtaccgtctcaccacgctgtcatgcctcctggtggactgcgacgacaactgcgccgccatcgtccactgccaccccagccatgtgcccacagtgctcgccatggggtccaagcactgcgtcgaggccgccatggggctcgcggatgggatcaa

SEQ ID NO: 71054 - DNA, 343 bp, Oryza sativa
agcttgttattttgatatgtttatcatacaagattcatgtgtgcctgactctgctacaccataaatgctatctgaaggaacaccgtaatatactattggtaaacaatatgtctcggctgacttggagatacaatttttctctgcatttatataaaataaatgaattgatctgactcctataactttcctgtccctcttactataacatataaggtgaataactcatattgtattgccaactcatctatttgatagagcaaatacaattacatattatataccaactatttacacattttgagagggatttaacatgagacagacattagctgtgaactacaga

SEQ ID NO: 71055 - DNA, 418 bp, Oryza sativa
  unsure (1)..(418): unsure at all n locations
agcttaggttgattagtttttgacatatatatccaggtacaaattgagtgcattntacataatgtgtttctactgaatcttgccattactcatctaaaagtattactgatatttacatagggtgctctaaaagaaaaggatttcgatataaagaaaacagcacgtggaaaatcttttcgcgtagttaataggagtttcatggtaactgtgtctaaaaacttccttgagatccatctattctgggctggcaagggcacagatgccatacctattaaaggttactatgggccaatgatctcagcattgagggtcactccaagtaagaaccacactaaaacgacaacaggaagtgttatactggctgctaataaataatatttttcctttgcagattttactcctaccgtgcganatggca

SEQ ID NO: 71056 - DNA, 380 bp, Oryza sativa
  unsure (1)..(380): unsure at all n locations
ttggcatagtggtgaaaagagggggctgatcatccatacatcataccatatggagcatgtatttccacatttcatattacactttgcaatacctctaaagacatccattagtttgcaaatatctctccaccagaatgagcccttcaagtttgtcaaatgaaggacagagttaccataataggcaaaccaaaccagattgacccatggcaaatccttcttattgtaaaacttgtccaaaaatttgatgagcagagcatgattntggatagtaatagttagcactcctaaaccaccttttctcttaggcttacacactttatcctaggctgccaaagatgttttattggagttgacctcagagcctctccaaagacaatggc

SEQ ID NO: 71057 - DNA, 300 bp, Oryza sativa
ctgcctctcatggatcagaaagtcgactccgcacacaagagcaaccttgtgtgttaccgagatacatactgtggttaccatgagattctcatggctagggaggatgacgaagaaactgcctccattacccccgtaagcacctattgttatacatactgcccttctggcttcataatgctcgctctagttatcaacgatctactctaatttcttcgggagacggaataggcgaactgtagacgctactctcgatgacttggttgaacaactctcatcccacaagacttactttcagatcta

SEQ ID NO: 71058 - DNA, 415 bp, Oryza sativa
agctgtgcagtatattattgttttctaaaagagattctgcatacaattgttgcatactacaataaggtggttatgcccaataaagatgaaaagttgaaaacctcaagtataagctgctgatgctaaaaatgttcatggcacgtgtaatattgatatcaaagaagataaattgtttcagtagtaagactttgataaacactactctaacataagcaagatgccagcaaatagtagacttgatcaggctggccaagaataggctaccactgtcagtgagaccatatgtgaaggcaaatgcagatgccacattattcagttattgttccacacatatcatagcttggataaaataagtaaatcatagcagacttcctttagcatggtgttatcttatgaattcctaaaactcgttgaa

SEQ ID NO: 71059 - DNA, 392 bp, Oryza sativa
ctaccaaaagttgtaggaaacacccttcacagtgtatttggctttaaatagagtttttttactgacaataaattttatgattcaactcatgcttttattcatttctgccccaatgctgagaacaattaataatcgcacccccatcctcacctatcaacaactcattcgtactatccccatctccaccactccaccgagccaactgatcttctcttctcccactacaactatgccgcatagtcacccaaccgatgagaaacacgactcgtctacctcatcgatggtcgtggccagtgtcgtgcatccttccctttgcagctccttctcttcctcaacagccaattgcctttcctcatccacacacgcaaacctgtgggtggcgcgaccggcga

SEQ ID NO: 71060 - DNA, 369 bp, Oryza sativa
  unsure (1)..(369): unsure at all n locations
cttataccccagtctagcgcctgtgaacatagagccgcacgccccctaatccgctgctatttattgttgatcgccaggccttaatcacctctgtaataatgtaaatactatccatataacaaagatgtgtccgttatatcatgtgtgtgtggtgtaccccggctcttcctgagaccgcgattaatacactaacgttccgggaaaagcaattttctcgggcgcgacacagaacgaccacccgccgngcggtgcccggtgaggacagatcgcgatggtggtttccccaccattacaaagtgaagttgggcgcgcctcaatacgggggcaggctcaaaaactatcccccgacctttacccacaatgcccaag

SEQ ID NO: 71061 - DNA, 414 bp, Oryza sativa
agcttgacgatttctagcaaacatcacaggttcagcacgacgattcaacaagaagctaataggtctgcaaatgcacatagcaattattttttttgaaaggaaatgcacatagcaaataaaacatgatgaaacgatgatgattaacgcaaacttcttccaagaggtattgctcatacaacatcatcccaacatagcatcctaatggaaattcatatccaagtcactaaaatcatgtgatagttatcatgccagcaattaattaaccgcgacagtatgaataaataagaagatgtagtttggttgatatggagttatagacttcaagcttgacgatttcagtaaaatttcttggcgtctcaatacaagtttacaccgtgcacacctggaatttaagttgcggcgttccgcatcgac

SEQ ID NO: 71062 - DNA, 287 bp, Oryza sativa
tctaccgatagctaaggggaagaggaggaacgaggagggagaactgtgaggatgcactaccgctgtagaggagggcgctgtgacgagaggccgacggcacgggagagatctcatcattctcatgccggggaagaggaagaagacgagcgcccagagtccccttccgcgtcctatcgcacaccggctcctccggcgcacgcgacagcagcggtcggcgatagagagacagacgggatggcaatggcgtggtggagcgagggggaatggggagggaaaggaacggacgg

SEQ ID NO: 71063 - DNA, 411 bp, Oryza sativa
  unsure (1)..(411): unsure at all n locations
agctttatgctgtgttctcccgacatggaaaacggaacaatagattagtgtgtggttaattaattattattttaaaaaacttcacaaatggattaatatgatttttaaagcaattttttatataaatttttctcacatttttaaagcaaacttttctaaagtaactccttcgtcacccatcctttcttcacttttttcttcacttttcccacatttgattcactacaccgtcttttgtataaacggtcttgactagacctataggagggtgaataagcaatttagaaataaatgcggaagttagaacaaaacagaatcagaatatccgatatcatatcggatagtcctatgtagaccacgatgtctgaattgagatcgaactgtcngacatgtacaacaactatacaaaca

SEQ ID NO: 71064 - DNA, 414 bp, Oryza sativa
  unsure (1)..(414): unsure at all n locations
agcttgagttgttattatcaactctcattgacctggacgccatggatgggaaaaagagtgtttccttacttgctgaatgttcaagctctccagatgttaataccaagtatatcacagcattattgagtacagttacctgcaatgtatgttgcttctgcgttgttagcaagatcgaatccatcttcaagtacagaaaatgagaatgtacagaaaatgagagaatgttaatataaagaatgcagatttgatatgtcctgtctctatacatcatggctatgtgccaaaatagctaattagcgacaaaaaataatttatggataaaactattatgtatatgtccttagtgacttanaagccaattcaaaaaaggaactatgttgaaaataccgtagaattaactcacaaattaagtct

SEQ ID NO: 71065 - DNA, 257 bp, Oryza sativa
  unsure (1)..(257): unsure at all n locations
taaccgcccgtcatctcggagaccctcttatccgaaatcaaatgcatcatattatagacggttgcattnacaaaagcatgcatacccaagtgttccaccagagcaagcaatgtaccatatgtggcatcatgtgcaatcaacacaaccagaagccgcattttccaatggtacccactatgggcagtacaggcgtttcaccggctacaactgtgctccacatgtaccctccaccttaagggcaattcaccatgccatcc

SEQ ID NO: 71066 - DNA, 410 bp, Oryza sativa
  unsure (1)..(410): unsure at all n locations
agcttgttctctcttaaccagttaacattgcacagcagacatcgttagtactcctatataatgatgtccgtcgatgtaaaggcgctattattttagactaaaaagggaaaatgccatggcatggacttggatgacaccaatctgttggaagaaaatagtatagctcgaaatatagcagcagttgggggtacaatcgttgggtgaccactgaccattgcctacttggtcaggctctctagccagcgcatgttcaaatggcatgccagtatcactggcaaagctactgaaaatgacggttatgaattatgatgctgtccaacagaacggccagtcacgtcaatgcttgacagagagaanggccccacgagggtacgaggatatatccatcttggtaacaacagacaggcata

SEQ ID NO: 71067 - DNA, 117 bp, Oryza sativa
acaggacgaagagcattatgagacagcacccccgagcaggagagagtcatcgagacacctgttaaaaagatcaccacggaaaaaagctcgagaactcgggcgggcaaccacatgggg

SEQ ID NO: 71068 - DNA, 409 bp, Oryza sativa
agcttgttatttgttttgcactgcctcggttgggtctgatctgctaagaacatgatttgtttaatagatttgattaaatttgatatttttaaatagggttgtaacggagctatagccgatacattatttacctataacttaagtaacttttttgaaagggaatatcaccaggttaagcccagtagtgtaatttttataaagaatagagagttatttacaaaggaaaaaacaagaactctatacaaaattacaagctttgtaaccaatcaacttaagtaactttatcggctattgtttaaatcatataattattaatttatctgatctttgttaccaacagctgatattggctcggttaggtccgatctattgtggtcgcttgtactagagatagattgagttaacaaat

SEQ ID NO: 71069 - DNA, 406 bp, Oryza sativa
agcttatcatgtcatatatttattcaagaatgtatacgatattgacaaactgaacaattagatctgaaactatggcaactctatttctcttgtgactgcctaatgcttccatcctacatttgcacgatattaagctactctatgaatggtagcataaagtgataaaggggctctctgtatttgtggtggtgggttagtggaaatgtagcaaggactgctgctttgtgtggcatgagatgagaccctcacattttgtgctgtacattgccgatgtcttaggcctgtagccaccaatgcaattactatatcttttgctatgtgctgtggtagaattaaaactctgttaacttattggatgagatcatatggatgtgaagctgtatcactaaaccctgttaactctctg

SEQ ID NO: 71070 - DNA, 382 bp, Oryza sativa
  unsure (1)..(382): unsure at all n locations
agcttatgggtttactttcatatggggntggtcccacattaaatttactcattaattgtaggaatcgacaaaacaaaccacgtacctcatacaatccaagtttgatttgggtcctaaacgttgtaattatatcgttggctaagcccaagagggcatacgccctaaggcttatgtttttcaattcatatgcatggattagtcttctaggcgaggtcaatctgacaacgtatggttgataaccagagtagaagtggtattacgattgcagggttcggatcatattgatcggaagccagaagccagaagccagatcgtgagtgtcatattttcaccctatcaatctaatcaatacctatcggaagtgtgctcatcagtacgtcat

SEQ ID NO: 71071 - DNA, 444 bp, Oryza sativa
gcttcggggctgaacaccaactcttgtaccgatctggaagctgcttgcatctggcattcatcctacgatctccatgcccatcgatcttggaagatcatattacatctgacgccgatatatgctaatatgcatatgcctctactccaattatgccccggcaatgatgcggctacctgtgaccgtgtcagtcttgttacctgatggattcatgtgagaaaagaaaagttttgcgagaaacgcccagtgatcttccggcttgcttcacaatgtgaggggctaaataacctgcgttcgaaacatcactctttctaactatctgatacggatttgctatcctactgtcgacaggtgttatgggtgaaaactgtcgaattcttaaccgacgatatgctctgagaattgggctgtgaagaaaaatggaaaaaaattaaccggcaaattctt

SEQ ID NO: 71072 - DNA, 405 bp, Oryza sativa
  unsure (1)..(405): unsure at all n locations
agctttgtacattatcagancagaaattaaataattcttttcacttatgatgattgattttcttgcctgatgacatgcagaattttgatttgttcaattcaaattttgcaagggcaccgagtgtgtgggcatagcaccagcctgagacagacgagttgagtgaacgacgaggattttcttttttttttgccagcaagtgcggtggaaaaacccagtactaccatatgatttgaattttacgaaaatgcactgaccgaataacataggaagacaaatttaccctttcaagttttatattacaatctaattaagtaaagcatcaaattaatctagaccattagatcatctataatagcgagatatactactcctaccgtaaaagtctctatatatcggcatatggcc

SEQ ID NO: 71073 - DNA, 416 bp, Oryza sativa
  unsure (1)..(416): unsure at all n locations
agcttagacattcatcacagtattgctatccccatgttgttccttgcaatggatttgccaagcaattttgaatcaaaagctttgaccaaacttatttataggacaaatgtgcaatcaaatgccacttttgcaacaatatacactgctcaagcacatgcagtgtacccaatgaaggttcagaatgagatagattttgtagagctaatcagagtcatggcttcaggtgatccgtttcttatggaattgatctgatgtangaattcactaaaactgtatacttcggactgggaagggaaaacaaaacaaagtttattcagtatattggtttgttcttctttgccatccacttcagctgtaagttcaatttaacaccctttntgttgagcaagatatgctgtgttttcttggtgtcattt

SEQ ID NO: 71074 - DNA, 414 bp, Oryza sativa
  unsure (1)..(414): unsure at all n locations
tgtagcttctggagtatcctatgatacgcatacataattcaagtatggttaacttttctgtgttaattattcagagttaactcttgacatggtttactgctattcaactattgagactgtaccattaactcttagctgcaatgctatccctctatcaggtcgcatatggacttgtttgctatcttatgctacatatcttggcatttatatatggtattcacaatgatatgactctcttctgtagttcgcattcctctatattgagaaataatgatacctctactaaagaggcatatgcctcaacactgagtacttgctaatgaatgccactatctagtgaacaatgtgcccaagaacatgtatagatcgtggaggattctctgaganagttactaaaatgatccctcaatctca

SEQ ID NO: 71075 - DNA, 413 bp, Oryza sativa
  unsure (1)..(413): unsure at all n locations
agcttaggacatcgtgaacgaaagtgatccgtagaaccacattcaaaacaacgatttggtccacctcttttcctgtacctaacattagccacagctcgagaaagtttgttagtaaccaaaaccaagtcctcctcgaactgttcgagttactcatcggacatggcattaatcaaagcaagaacagtagaatttgatgaagaagcaccaacatccaaagaagtcgaggaagaaaccaaagcactagaattagaatcaattntacgagaaagaatattcatctcatgtgttttcagttttgtgtaaagtgaatccaaaatcaaagtagacatatcgacagactcctgaattgatgtaaatttcatctcccanatagacatgtcaagaccattcaaaaagtgacgagaaacttcaga

SEQ ID NO: 71076 - DNA, 206 bp, Oryza sativa
  unsure (1)..(206): unsure at all n locations
tgtcaattccacagtatacacacanagctgccagcgcaagcactccatactatccctctcacttggctgttctcgtgctgggggatagatatactccggccattcccaccatgaccatgcggctacagggtcctattcttagcgatcgaccaattcaccaagtgaattgaagcgacacccacaagagaaatcatagcccactacac

SEQ ID NO: 71077 - DNA, 391 bp, Oryza sativa
agcttatccagttttataccgaggtcaaagagaatgcggcatggaaagttatttattaattaggaatagtttgttagtttccttttatgtttaggaaaatgtgtttagtgtcctataaggactttatcttttccttttatctttaggaaagtttctttcttgtccggcaaagacttgtatcaacccatgggtataaatatgtacacccagggtccatgtaatctatcaattacgatcaatagaattcggcgcatcgccaccttttaccttttctgctttattttatcgtccagcgggacttggcacctgacgcggggttgcatcggtgttcgatctccggcgaagggataagtccaatgttccgtcggtccatgcaattgtattgtctacg

SEQ ID NO: 71078 - DNA, 415 bp, Oryza sativa
agcttaaacatgtgttatacaaaaaatcagaaaaccatgaactaatctttgcaaatagcgctacaaataaacaatataaattgacaaattagagagtccatgttaatcggaacgccctcaataggagtttgcctttttagagcacatacacccaagaatcaattcagagttcagacaagaaaacaagaattttgacaggaaaaaaatgctgttttgcatcatctgaatgatctgtttctcgtatataatcctaacatttacatcaggagctaatgagctatgtacaaacagcaagttgatggctgaacactctgacattgtggcaaggcctcgccatggagctcaagaatgccctctcaacctcgttagaggcatctctcctaagcagacacaagacatactccatcactgacgc

SEQ ID NO: 71079 - DNA, 199 bp, Oryza sativa
  unsure (1)..(199): unsure at all n locations
aattgtggccaattgtattgaactaagattaacataaaccttctgttgatatattcctcctgtcctganttgctcggtatttctcaagaaagcctgcagcctaataaacctctcttttcaacttgatagcttgatctttgtggatcaaccggataacatgctggagcagcaccacgagatgctgttctagtatccgaaa

SEQ ID NO: 71080 - DNA, 411 bp, Oryza sativa
agcttctaggttctcatattactcaccgcgatagagaatacaatcgttcggacatgcgtgtatcttctgaacctctagttctagagggtagactatcttcttagcttcgtacgttgtttcgggtaacttgttttcttccggaagaatgttctttactagtttcaataagtcgccaaatgccttatcactcacaccattttttaccttccattgcaagaattctagagtggtacccaattttttttgtgcccctgcttgcaacctgagtacaacggcgtccaatggtccgctaacatacgctctaatttctgggcctccttttcactttcacagtcctccttgacatcctgcaacatctgaccaagatcatctgcagcgtcattatcttcaacagccccgtccacctcgcct

SEQ ID NO: 71081 - DNA, 317 bp, Oryza sativa
  unsure (1)..(317): unsure at all n locations
ctaagcttncatgtcctcgccctccgataacccactgatatgccattagattatgcgcatgggctcatgacaaaatgtaatataaccgagcttgaataagatatatccaagactgatgaaaatagatctatgtcgacaccaaggctctgcctaaagaatgcttgaacctatcgatgccatgcgacatcaaattgcatgctgctatgcaacaccttaaaattttcgaatctataacagaaaaacaaaatttgaaataattaagagaacttttctaaaatatcatcttaccggcattttattgggtgttccttttcttc

SEQ ID NO: 71082 - DNA, 392 bp, Oryza sativa
agcttgcttgttatgggtatcgaaccggccaccgctaaatggctggatcgatcgaagttctggtactatgctcacggtagaacgctcaacccagttgatggctccctggtcttcagtgatcagatacgtgaggctgcgagtcgactaacggacgcagtggaagcctcttctcatggcacgttccgacccgacagagagaaggacgagctgtcactcgccctacagactcccgagcatccaggacgaacacgagggaaatgggtgattccttggaagattggattcaaggaggacatccacacgttcaggagtcgaatgaggagcacgagagataccgaggcgaagattgcagatcttgagtacagggtatcgagctacgagctcagcatgca

SEQ ID NO: 71083 - DNA, 412 bp, Oryza sativa
agcttggtgtctatctcgcctccagtagattaaagtacatgctgtctattgctggcaacatcaccgaaggcaatgcatctgcgacgatgaagtacttgagtagcactcttaatagctccatggacaacgtcgagtatatggtctgcaaaatgccaactattataacactttctgaggaaaagcttcgcagtaagattgagctcttgagtagcacccttaattgctgcgcggacaagatcggtcatatggtttgcaaagagccatttattctagcaatttctgacgagaaacttcgcatcaatacaaagttctcgagtaacgctcttggatgctccattgacaagatctgtgttatggtctacaaaatgccaagtattctacgactttctgtgaacaatctctgcagaaagat

SEQ ID NO: 71084 - DNA, 375 bp, Oryza sativa
actcagctatatctcggtcctgcaataacaacacaacagtggacataatattatgacactggaagatagcacatgccgcaatctatctaatagccaaaacgtttctactctgaatttacccaaggatgttgtcccgagtatgcgactatcaattcttccagcttgctgcgaacaaacttctgctggttcagatattctgaacttttcattgacgatgcttgcgaggtttgacaatcaaacatacgaattcttcttctgcataagattccgggtagctgcactttgatcattgcgttagctcctccaatcagcatttgaataaccacctggaaccatctctagtggatttactagcctgcatgtatcaacttcttg

SEQ ID NO: 71085 - DNA, 377 bp, Oryza sativa
agcttactatatataatagaagagatactagagccatacccgaactcttccgaaggcttccggactccgatttctgctctatttctattgcactagcttgataacactcaactaacttgagagaatatgagagagcttttcttgaggtgtgtgagtgaagtgagaagaggagctccttttataaggatagtaatgacagtagcgacggatggaatggtcggtaataccctccaaccatcattgaggatcaataccagccgtccatccaaaccttgcatccatcggcgccacgggaggttcagccgaaccatgggctgtgcccacctgtgccaaactcggcatgtggcctgctctattgctcctttatgcaaacttgt

SEQ ID NO: 71086 - DNA, 268 bp, Oryza sativa
  unsure (1)..(268): unsure at all n locations
actcagctgcactatgcgctgtacagtctttcgccggccttactttatgtgtgcgctggacaccgggagtgacctcttctggctgccgtgccagtgtgatgggtgtactctcttctgcttctgccgcttgtggatcggtaagatcactattctctntacaattcgatagatcctctcgtcatctacgtgttggtgcatatgtcatagctatacaacgatccatgctgcgaaaattttcatgttgcttctgtggcttttaaactgtgca

SEQ ID NO: 71087 - DNA, 397 bp, Oryza sativa
agcttcgctgttgttgatggaggaagacagggaggaagaaggaggcggcggcgatgatgacgtacgacaagatggacaagacggagagcatgagggtggagatcaggagcaggcaggcgcagaagctcatcgccaagaacctcgtcgccgccgactccatcggccgccgcaacaagcgcttcttcctcgccttctgatttctgattcatcagttcatcaccatcgagaatccaattaagcaaacaaaatatatatttatgttgttatattgatcatcgccaacatcgaaacattcaagcgacagtatttactatgttgttatagatgcggagaatcccatcaaaacagttactgaaattttgctgttcgtcatgagattccacgaagaattgttaca

SEQ ID NO: 71088 - DNA, 332 bp, Oryza sativa
ctaagcttggacgtgtggggagttacacgatgaagacacggttgtttatgtgtgtttaattattaaacgcagtacagttgttaagcgggggaggaaatgggatggtttgtgttctacccgatcgaagttattatttattcatttatttatttattgtcttttggataggcgggcgaggggattttgctaggcgcacactaggcgccgccggccggtgtgtccccaagattggctcgtttggcatcttgctgtgtcccatctttgtacattctctttgcagctcgcttggctaattggcgttctaaatcctaatctgctctgtaggagactca

SEQ ID NO: 71089 - DNA, 406 bp, Oryza sativa
  unsure (1)..(406): unsure at all n locations
agcttctctagatgcatgtatccctcccagtgcatatgaagtggaacatatctatgtaagttttgttttgcctcaatacgaatcaattactttttttgaacatcatacgaagtcattgtaacctatttagaactggaattttaacaaagattgtcctatgctgtagccatgggacttttttttattatacaccagcttgcacgaagtgcattagtctttgtcgcctaatttggttcctcttcttagctagaggtatactaagaaatactagctaggttctctctgtacgagcactaatgcatttttgggaagtatggtatctcatctgaggtgtgtgaatntaggcaataaagaaaaacatatactcatgttgtagtttttggttagaaatgaaatagttattgat

SEQ ID NO: 71090 - DNA, 274 bp, Oryza sativa
  unsure (1)..(274): unsure at all n locations
ctagctgacttcgtcgccgagtagactgagtgccaagaagacatgcccacggagaagatggagtattggaccaagcattttgacgggtcgaagaggcgctcaagcacaaataagttgagagnnccaanntccccgaccggagagaggccgagcaacgtattgtggatacatttttctacgtctcacaacgtggcggaatatgaggcgcttcttcacggactaaggattgcaatctccttggggattcggcgtctggtaagtcgtggagatactt

SEQ ID NO: 71091 - DNA, 343 bp, Oryza sativa
  unsure (1)..(343): unsure at all n locations
agcttgctacttaattgccgaatgcctatgagaagttatgaacagctgtgactgaatgaactgaaaatacttgatctattacacagcaaatgatatgaacccgctgaagattgggcctattttctaatgcaaatgtttctttcattcagttttagcaaagccaagatgatgttcctcatggtgggtcatcctcatacccacagctgcggcaggtgtgagattaaaccatgccggcaaggtgctcttgctgatagtgacatgatatgtgtcgcggaacgtacatcgaggttgtcctgagtactactaagttntagaacaataagcaattctacggttcttgagg

SEQ ID NO: 71092 - DNA, 297 bp, Oryza sativa
  unsure (1)..(297): unsure at all n locations
atcttaactgagttgcaaacgaattagtattaatatccagaactgtctggttctcgtatatcaaattatcaacaatagcgatcagaatctaaccgtgttgttatcggacagttaattatgtcattgtaaaacttaaacgcgatcgtatagatttnttaattgttgtaatgaactttttaattggttgcaataagtatttaatgatgtttcgctatgtcattatgaaatgttacgtggggtgttttttggatgtttcaagaggtattttagtgatgtctttggttgatgcttcactat

SEQ ID NO: 71093 - DNA, 406 bp, Oryza sativa
agcttgtgaattttgtctacataatatcaataggaaaatgcaatagtatgtgtgcatttgcatttaaatcatgagaatcattttttatttcaagaaaacaaaagagaaccaagtttggcttttctaagttcctaccttcacagcatccacattcttttgtttcatgtccgcagcacaatggaggtaagtgaatttggcaacagatgtcacaaaggcatctcgctgtgtctgcatacacattacagcggttacatgcactgcagatctgaatccttgcaaacactgtgatgtggcagccttatcatcactttggtcaagtgtcacactgaatgcagccatcataggggcccaacaaacctccatcatgaatcttaaaatggtagaatcagtaataacatgaaatata

SEQ ID NO: 71094 - DNA, 297 bp, Oryza sativa
  unsure (1)..(297): unsure at all n locations
aatcttcccaggccagatttatgtggacctatcttctttnntccctacccttctatgcgaatgttaaggataaatgtgctcatatatcaacatatcttctttttntgtcctttgaaaacacacatattgcctattgaggtcccatcaaataatctgcctatgtggctacgcagtgtgctgaactcattccttttagatttgggaacacaattattttagtgtaattgtgctgcaatcaaattatcgtgaaacatagtttcaaatggatgaaacatctagttctaatcaattggatag

SEQ ID NO: 71095 - DNA, 273 bp, Oryza sativa
ctcttctaaaggaggaacacatacctcgggctcactaatgtccatttgttaaaatcctgtgtgtatgctgccaacccgaaaacaattgggaattcacatcctatccagaacatcatgacttctacccgccctttgagcttctcatatgaattatttgggccctggctacatattattggagtacaagttggtttgtcatagtgtgattttccccttacttggtgttttctcatgacaattaagctcagagtttcaacctttccacctgccaaa

SEQ ID NO: 71096 - DNA, 368 bp, Oryza sativa
ttcgtcgaacatgttgcatgtaggtgccatctccacgctgaagcaaggcgacgacaacgatcaacgtccaccgctacttcccacgccggagtcattctttgcttctacgtcggcgggagattctggctcaaatggccaccgcgttgcaatcaacaaccgggggaaggcaacaagagtgattattcctcctgtgccacctcctgtcacgggtacgactaattctccattttcccatcactgtgcttgtgattcattgcatcgggatgaagatgggggttctgaggatcgatgctattatcacccggattccgagattggattttccacagttcgatggggtatatccacaaaattggcgtttgagatgt

SEQ ID NO: 71097 - DNA, 384 bp, Oryza sativa
  unsure (1)..(384): unsure at all n locations
agcgttgcgcgttcgctctttggtgaatgaccaccgggtgtcgcccagcccactcctggatgggatgaacttcacgggattgaatcccggcctccaagaagtctcgccaccctcctcgcggatgaatggcttgactgttccgggtgcctgccgccgcactttctgccggaccggccttgcgcccggccgcacggcgagacagtgctcaatcacctccctgnggaccccgggcatgtccgctggtctccaggcgaagacgtcagcgtttgcccgcaggaaggagacgagcgcgtcttcctatttgccatccagaagaccaccgatccgtgtggtcttggatgggccgtcgcccaatgcaaccttcttgaccgggacctcgacgta

SEQ ID NO: 71098 - DNA, 337 bp, Oryza sativa
cagcttcttcccgaactccgcagcaagagggcagaaatatcgaagtctctgctcttatagagatgtccattgcagggaccccagcgaagatcaggctgaatgtcgccatacacgagcaaatgaatgccagcgtgtcagataaaatgaaggcgtcaaatgcatagctcccagcaagcagtggtgtgcctgccgcgttatccgacccggtttgggtaacctccggcaacgtgaatgctgacgcgaaatgcacggtcgcgacaagtacggacacaatgcccagcatttgcgatgcatttgtagatgcgccgagaacctgccgttgctatccttggatgtg

SEQ ID NO: 71099 - DNA, 411 bp, Oryza sativa
agctttgccgtgactcgtctcatgtgttgggacgaggctcatgtgttgggcaatcgcggagtgcgggtaaagtgtacatccactgcagtgtgagtaaaccaaacctattcgaatagccgtgctcgcggttattgagcaccgggacatgtattacacttggctagactctaaattcttaacttgtgtgggatgggatattgcatgatgaattttatgctgttggagccacttcctgagaggcgggaaggtggacgtcctcagaaaaccatgacaaatcaatggcgggaagctatccttgggatcacaatggatggtggacagaaccgtcgttgtttaaatacaaactctggtactaaaaatttgatcagtcaatgctaggtcttatgcttgtgaaaagaattacaaaacttg

SEQ ID NO: 71100 - DNA, 382 bp, Oryza sativa
gcttcatcaccgttcttgctcacacgttcttgctgctgccggtgattgtggcatatctcccaatgtgtacgtctcaaattatttcaggaaagaagcaatctttcatacatggagtgatgagatatatgggttcgggatctcacgatcttacacaacgctgagtgcccaagttttttatattccagatccatctaagttaagggtgataaaaggtcgacgcctaactatacgcatcagaaatgatatggatgagtcagaagcatgtgggaggactttacgctgcagcaagtgtgatctgcgcggccatacttacaagaaatgcccgaagaatgcagatgttccaagcggcgcagatgctagtccatctggacaggcaagtgat

SEQ ID NO: 71101 - DNA, 411 bp, Oryza sativa
  unsure (1)..(411): unsure at all n locations
agcatgctngctgttatgctgcactcattgagcttccagggtcccatgccactgaccagcgctggaggcgccgatggtgaagcatgagccgcnataacattgagccatgtaggcatttccattacttgcctgacacaccatgcgaaagcctgtttatgacagttgaaaacgaacactatcttaaaacataaagcgagcgttagagcatctacaacagagttgtcatctcactctccaatttacactttggtaaatttgagcaaataacgggctccgacagacttactaaactgctggctcaactcctccccangctggccaactttagccatctagagttgccttgcctaatcgtgggccccacgctttattccccatctactctctccgcactcgagagcactccactgg

SEQ ID NO: 71102 - DNA, 131 bp, Oryza sativa
gtatttttctgaccagatttggcctgtctccactgcgctggacatgccgggtcctgtatcttcgccggatgcccaacatctgggcagagtgcaaacggcaaagcgaaggttttgggagtacatctcatcgt

SEQ ID NO: 71103 - DNA, 411 bp, Oryza sativa
agcttcctggttgacttaatagcgtgagacctgtgagctcctccaatgcttgcatcttgctaacaccttctgctgggaacttcacatcttgactgacagaaaggcgagccaaccgctgaagtagaacaatggatggtggtaattctttaacttcactacctcttatatctaatgtttccaaatgctggagacgtccaatattggcagggagcacagtcactcttcccctaattctcagatactgcaaatggactaacttttcaatattagcaagatggttgtttgtcaatgattggcacccgtctagatccagtactcttgcaactttaaattctgatagaggatggaatcctgtgtagtccacggaacaaataagtgatctaacatgaagcttaatcggcatcatccttg

SEQ ID NO: 71104 - DNA, 393 bp, Oryza sativa
tgcaagcttcaatgttgctaccgatctgagttggataacatctctggatcatgcgttgataagtagctactgcattctttaatccgaaaggcatggtgatgtagctgtatgcccctaatggcgtgatgaatgaagactttaagcattctgattcctttacccggatctgatgataacctgatcgcaatccaataagctgagtggctcgcagcccgctgttgagtctactacctggtcaatgcgaggcaacccaaaaggatctttgggacaggacttgttgatgtcggtgtagtcaacgcacatgcgccattgtcccatcttcttccgaaccatgactgagttggccagccagtcgggatgaatgacttacttgatgaagcctgctgctaacag

SEQ ID NO: 71105 - DNA, 314 bp, Oryza sativa
  unsure (1)..(314): unsure at all n locations
aacccctctaccacatgtcacacaaaccaggaacatctcaattctgggcttgcctaatgaaagtaaaagatcattcttttcaaaatggatcctctaaacttgtgtatgggatggacataagattttgggaagacacatggttgngcttgcaatccggcaaatattaatatccctctctatacattgaggttcgaaagagacattcaactttggcagagggtacgaacacaataccggtgaatgttcattccgacgatcaattgtatgaccaaagttagttgagtggaatgatttgatttctccacatactaaca

SEQ ID NO: 71106 - DNA, 380 bp, Oryza sativa
  unsure (1)..(380): unsure at all n locations
ggataagaatataatttggattaaaaataaatgaaatatgaacagtagcttttcacaatttctcggattaattcgaaattgaatctttaaactagcataacccacccattttaactcccgattgagttaaatttgaacctaaattcatctaaattcataagccttccaatggtatataaatcactatttaacagaatatatttataattattaaatgattaatatcaatngattagattatggtcaacttaaaaatatgataataaataaaattggtattattcagtagagtagatgtaataatatttgtttctagcatgtcttgtcacagtagcaaccatgtaaattatgtacagtgatgtctcaaatgaacggatgta

SEQ ID NO: 71107 - DNA, 304 bp, Oryza sativa
ttgtctgtgtcgtacatccatacccgatccatctctaataaacatcttttatgagtcgaattgtactattatattagtcttcacactctagtgattccaataacattaatttaaaaaattaagaattacctataattactacatttgcgaaactaggacattcgtcgcatttcactatatagatgaaatagattgacgatacttaacaaataggatattcgtcgcataccactaaaattgtttgagataaatggattgacctacgcaaagaataaatttaaggtctatgcacctcctaatacta

SEQ ID NO: 71108 - DNA, 148 bp, Oryza sativa
  unsure (1)..(148): unsure at all n locations
agctttgtcatcttcgttgagttgntgttgacggctcgcgaagtggggatcggtgagggagagaaccattacgaaacatactatgggcctgtttggtaccgctctaactcctaaatttagctctaggaattgggtctggagtagagtt

SEQ ID NO: 71109 - DNA, 363 bp, Oryza sativa
  unsure (1)..(363): unsure at all n locations
ntaaatccgacatattcaaaatcggcacgaatgaatcatgacttttaactttacatatgattgaacaccttgctggagaggacaaatatctggccacatgttgcagattacttaatacacaacaacctatcaatcttagtattgaactaatcatttgcttgcttgaatcttaacgggatatcaaacattaactacaaagaaaatataacacaaataggtggatttgtagtcatacctgtacaagcagtactttatttgtctcctccaaccacttaatctctctttaatagacgtctgaagataatgagcaacatgtcagccaaatacagattcgaatggctttggatgcatttgctgcgaata

SEQ ID NO: 71110 - DNA, 405 bp, Oryza sativa
agcttatgagatatatcttatagatcgtcttaataaagaaaatattcgtcttttcatatctgaattaatatatgtcaaacgaaaggagttctccattcgtcccaagatataacaaagccttcaaaatttatttcaaaatataacaatttttctatctacgttctcttcgcaattaatcataaacttttaccattccgatttcccatctaccttctctttttaatcaattgcaatcttcttctatttaatttcaccaacttttttaacttatgtgtctatccttaaaacttcttatcttttaggatggaggtggtaatacttaactagctagagaggcagaaattatgcccgtttgaatttgacaaagatgaagatcaagtagggtacgtaaaacgagaataccat

SEQ ID NO: 71111 - DNA, 328 bp, Oryza sativa
  unsure (1)..(328): unsure at all n locations
tgcataaaaaacatgaattctgtgttttctggattgcgtttatgaattccttaagagcatccaactntgtgataaatagatgaagcttgcttgctcactaattgccgtatctgggaggaagggtcaaggccactgatgccaatangcttcttgctgaatacaacangctggttgatggattggcacataggggaaacctgccaagtgagtaccatnttttctttcactaattctgtgtcttagactgctcattgtggttggtctgtctgggtcaggtaatagtttaccataaaatatttcctggtatgtaatatcggatgcttggctc

SEQ ID NO: 71112 - DNA, 391 bp, Oryza sativa
  unsure (1)..(391): unsure at all n locations
agcttggggtgttttgtcgacngtcattatcgatcagtttcgaccatcaatattaccagaataaaggagaactagtgatgcttgcaatgcataaatatgttagaataataatattacactagtattaggtatactaaccttttgcagagaatgacaataaagtggaagagaatcgacatcaactcaaacgataaatcaatcggacgatgtcgagaatcacacttatgtgtgaataggccaagaactcagaattgacacgatgaattgggccaaaattcacaagtctacgaattgaagcaacggagaaggccacctaccgattntgggccaggatgcgccggcccctcgttcggccgaacctccctctccaccgttggatgtggggtttggc

SEQ ID NO: 71113 - DNA, 431 bp, Oryza sativa
cgaatcactcgtccgggattcctaagtcgacctgctgcatgcagcttttattatcaacagacaggaagcacctaaagatatgttttgttggtagtttactctaacctaaaatgatgtagcattggtaattaggatacagtacctgttgtaaattattcagacagaatctttgtactatcaaagcatcattagcagcagtttggcaagagttgattacatctgaagtctgaacgtgaaagcatggtcttggtctcttgacattgacgagcatagtttaaggtggctttccaagaatgtttgccacgcggtgcctgctaacaaaaatgctaatgtaatgttgatgcttctagattaccagaaaataaattattagatgagtgagacttgcaggagctattatacaatcataagcaagcagtatcatggaaagc

SEQ ID NO: 71114 - DNA, 294 bp, Oryza sativa
  unsure (1)..(294): unsure at all n locations
ctgtntcttntatgatactcctatcttactactccttataaataataacttatcaatcattcatgggttttatatgtacatctcatctatatatctatatggaaatggaccaaattagtcaatggttgcgaataatagctcaggacaggggacagcaacaacattacaaaatcattcgtatgagcgaatgtagctgaaccattctagtagctgggtaacaagccaagcatgtcattggatacaacaaaatgtttgcaactgggtagaaatttacacgactctgaaatcttaatc

SEQ ID NO: 71115 - DNA, 405 bp, Oryza sativa
  unsure (1)..(405): unsure at all n locations
agcttgctcttttttgacgtancagctccgaccttcacttgaaagcatgtcattgttgccaagcttgccaaagcaaagcaacttcgatttcacggcaaacttgtgtcgtcgttgccaagctcatcgcagaaacaaccaagcagctccgacttcccatggagaacattatccaaagccaccgtatcaccgcttcctacttggttgtggcaccaacacacctagaaagagattgcaacgtgttattgttgacgagcttcatctcaccccatcaacaaagcagctccaactccacctagcagaatcaaacaaggccgttggccgcctactacaaagcatgaagcatatccaaccaggcaaatgcctcgccgaacattcccggcctattaagcgtcggtgtgaacgtag

SEQ ID NO: 71116 - DNA, 385 bp, Oryza sativa
tacagtgcacgtgatggagcgacataatgcggagctgttaatggatgttcagtgtgcttgtgctgagctgaaaaggcaagggtttctcggtcagttatgcttagcagtactgtcctatctggactatatgttgagctgtagtatgggcttttgtttattgaccactgcatcagaagaggtccataacctggttgcgctagcggaacacgtttccccggctggaagtatccttggtagtggacaagtggtagtagtaataatcttggtgtcgtaccgacgtacttccttcgtctataatataagatttatataatggtgatcactcggttattgtaaaaattgtctgatataaaacaaaaattggcttacagacattgagtataat

SEQ ID NO: 71117 - DNA, 415 bp, Oryza sativa
agcttctcgttattacttatgagaatcgcataaactaggaaaggagagaaaaagggtagagattgaagatgacatgtgggacccaccatactttcaaggtgtttcttctaattagagacttggtgtgtcacatagtcgtcaggtcagatgaagaccgtgtcaatgtgccacgttaaaaccaaaactgctatcaatattaccgaggaattcattttgcgctgatttttaaaagttggagatgctctctaactggttttgcggtcgagagatgcgaatggaactcgacctgtccttgagggacctgaagtgaactttctgcgctgcctgtcgatggttgtggttgtgggctgttagtccatatgaaaaatgatccgacagacagaaaaccccaaaaaatgagtgaggcggagatgac

SEQ ID NO: 71118 - DNA, 188 bp, Oryza sativa
gacgtattctcaacagccatgattgtgccatactctccacattacttacaccagtctcaattatatcgactgactaaggaacgtgtatgtctaagaacaacatgcgtacagatatgctggcaagggtggcaacaatgcaaatacacgaggtatgcattctgtatgacagatctctgcttgttaacata

SEQ ID NO: 71119 - DNA, 406 bp, Oryza sativa
gagcgtgacaattctttattaaacacaccaaattgccagcacaagcgctccagactatccctctgacatggccattctcatgctgggggctcgacatactcgggccattcccacgaggacaatggggctacaaattcctgttcgtgccgatcgacaatttcactaagtggattgaagcacagccgacaagagaaattaaagccgaagatgccatataatttatcaaggggatattctgtagatatgggttgcctcaccgcattcttaccgacaacgggtcccaattcaccaacggtgatttccaagattactgcatcgaacttggagtcatgatctgcttcgcctcagtgtcccatcctcatagcaactgtaacatcctgaagattcgattctatatatggaatta

SEQ ID NO: 71120 - DNA, 463 bp, Oryza sativa
  unsure (1)..(463): unsure at all n locations
tcagcttactntatntcctttctcatctactatacatatacatnggtgtgatgggccctattgggctgaaatacacacgcctacactcaacactcccccctcaagatgggcgataaatatctatcatgcccatcttgctacacgaagaagtgcactctctagcacctaatgccttcgttaaactatcaactacttgttcaccagagtttacaaagcctaagttaagggtccctcatccattctctctctataaagaagcgatctattccacatgcttcgttcgatcatgctggactggattgttagcaatatatatggctgatntggtgcacaccacaacttcatgggagtgcttgtcgacagcttcaattcatgcaaaagattttttaaccataacaattcactccagctcatctacattgacctgtattccgcctcagcagtcgagcgagacacaactgat

SEQ ID NO: 71121 - DNA, 371 bp, Oryza sativa
actataccgctatgaggatcattgtgatggaagacaatctatgcaacttcacggggtgatactgctagcttatgcataacacgataatcattgactctattgagacctgacaccagtcaaggaaacatggatcatgtagtaagtccttcgataaatactgacagctaattatctgatctgtcatgtcatgttcacacatcctactgcataacttgaaatgctccatgtgtagtagtactaaaaatgcaaaggtgattaagagctacagaacttgatcaaaaattctaacaagagatgagcttacaacgttcatgatagtaacgttatgagaatggagctgtggtggatcaccacatatcacctaatgatcc

SEQ ID NO: 71122 - DNA, 406 bp, Oryza sativa
agcttgcataattctgtgtctcattctactaatgattgcaaggtcttcaggcaacagatccaggcagctattgagggaggcaaaatcaaatgtgatgattctaagaggccgatgaaggttgatggcaatccttttcctgtcaatatggtgcatacagctggccgaacagtcgatggaagtcgtgcaagaggttttcaggtgaattcggctaaaattatcaataagtatcagaagaagtatgacaaacagctggagaggtattatgaagaagatgatggcggttttgatcctcattggggctgtgagttctttagattttgctggaatgaaggtatgaggctgccatctattcaagactatcctgtgtgcagtaatgttgcagaaaattcaagtcgatcgttcaata

SEQ ID NO: 71123 - DNA, 410 bp, Oryza sativa
  unsure (1)..(410): unsure at all n locations
tccgcanatctccatataacagcattaaacttcggatgatcatatcttggtcatgcgagctccgaatcgacccgttcaagtctcttaatgtttgatataatttatagaaccctgtgctttctttntatgtgttgttattgcttctttataggcttgtaactttgcttgtgtgcttccgtagctatcgtcgttccggaggttcccgaaacgtgggtcgtggtcgtcgccgaatgttcggaatgccgtctttccgagcaaggcaggtacatcatccttgagcatattgaatcccagttataaaagtatcttgatttagataatgcattatcgcttattgaaatcctgcgtattactgggttattatacatgcctattacctttgtatgacctattatattgctatgtatatt

SEQ ID NO: 71124 - DNA, 405 bp, Oryza sativa
  unsure (1)..(405): unsure at all n locations
agcttgacgaatttgttcttgtcngagtacgagtagccgaagctgaagatggagtcgatcatgtgatggccagggctggcctgagcatagtgtgtgcatccaatgaggagttggaggaggagaaggagaaagaaggtcatcctgtttgaaggtgagtgctccatggttaatttgggctcttgtccaactgctatcttatgcctgcaggaattcatgattggcgccaccagtgagatccttcatgttattaacatgtatttgtntgataatgacagagcaattagtagtacatgtttatacttcatagtttccagttatacttttattaaatttgataaatactaccctcatcttaaaatataagtttagctatgaatcatgtgtgtctaggatcataactaatac

SEQ ID NO: 71125 - DNA, 374 bp, Oryza sativa
agcttactctatttatcctgccggtatgttaaacatgtcagaagaagagaggggtggactgactagcacaaacaacagttctacaagaacttctgccattctttgggtatgggctatgggcaccgggactcgccgccgggccgtgatccgagccgctgtgcatcaagaggtaatgttctcttcatatttgcatcctccaggggagtttcctttgttctgtgctaatagcactggctgaagcagaaaaagaacccccttggcttgtcttccatcttgcccttcggtgtgtcgccgaggtcgcctcgagaagccattatggagcttgtcccacgagaatcacgaggcaagattgcattctctgaactgaacgtccg

SEQ ID NO: 71126 - DNA, 402 bp, Oryza sativa
agcttgtcttttatcttatctaagttcagaggcgcaagcacatcatcaatcactgctctggctaggaacagtcccagctcatctgaagcatccaatatatcaagtgcggcatcttctgcagattctagaagcattatgaaacccttgacaatgtcttctgctgagaacaattccatgcttaatgaagatagaaaaattgaagccatctctttctccctgtcttcgcgggccatagcaattgttataagcttcttaatacagacggtgatgtactctggagaacctatctccttgaggctgcgaataatctcacgtacatcatcatagagaaagtactcatgaatcatatatacagcctctatcttgtacctcctcagcatttcatgttcatcatcttgtaca

SEQ ID NO: 71127 - DNA, 162 bp, Oryza sativa
  unsure (1)..(162): unsure at all n locations
acacatagaaactaagcttaataactacgggagaatacagtgcgatgtggctttgtttaatctcgacatnccacaacaagctacaggtagatgttcaccttattgataagcccatcgtcgatcacagaaccactaatgctcttgaacatgctcgaacaaaag

SEQ ID NO: 71128 - DNA, 404 bp, Oryza sativa
agcttcttattttatcaaagcgagatgagaatgttgctactctatcaaaaattaatcagatgtttatctaacttattaagatgtctggtgtattttgaactcaaaaacgagtgtgcatatggtaacctgttaccgctgttgatcagacgtgttatggcgcttgtttttgttaatagttcaatgctgcgggttttgaaatcgcatgtagtattggtcttttttaagacagaacaatccttgtacattttcaaatttaatatttatatatatcatgatttgaatggaagtactatctccattccaaaatatagcaatattttttctatgtatttggatataacattgtcctaatagcttgaagtaactataattttttgtgctgaacatggacgcgttgcacgtgc

SEQ ID NO: 71129 - DNA, 366 bp, Oryza sativa
agcttctgtcttttctgaatcaccctgtagaatggcctgttcttcccggtcggaataggtagttccttcccctagaaccgtacttgagagtttcctacctcatacggctcagaaattgctatcttaatttcccttgtcttaactgaattctatttctcaaaaatcgatccaatttcttcttgggttacgcagaagaagttatttacctatatttcaaaccctaaattttgatcaataatcagattgatcttttctcccacctgcagaagaatgaagcatagatagacctatatccttcgtccgaattttctgacaggtaactatctcggtttcatatatgaaacttctatagaatcctttgaaaag

SEQ ID NO: 71130 - DNA, 368 bp, Oryza sativa
tacagggtcaactaagtatattaggcctaacaagcgctacggtcttgtagagtataatattggaatttgatcgaattatttttctaagggaaacaggaaaaggaggattcaaaatccttttgtcttcggacttatccaaacacaaaatacctccctgtattcgcactctcaaatgagagtggaagaaattcgactttcatataatatcttaatagaattccatgttatgatcaatgcattcttcggatactatactaatcgcatgtctagtatgctaccaagagaatacgccccatttctatctgattgaagaggagtgacgaatataaataaacatagtactgttattagcgcccatataccccaat

SEQ ID NO: 71131 - DNA, 397 bp, Oryza sativa
  unsure (1)..(397): unsure at all n locations
agcttaatcttatttctagctacaggttacttcagaaaagaccaggaaaaggacttaaagatttaggggcgattgcaaatttaccactactttgaatcgttattgcaaaactgccactagaaaattgcaaaaatgccactagaactgtcatttgagtggcattcttgcaatattgaaaaaaccggtggcaaatttgcaaatgcctcgaagatttatgccactaactcaaattagatgatcgaaagctacagccaaacaattcagctcatcttgctgggtggcatactagagtttgagatgttcctaacagatcccatgttctaatgtcatgtatcttgccgaacacctacttttgctgagtagtgaattgatagcttaacctcttctagcanaatac

SEQ ID NO: 71132 - DNA, 408 bp, Oryza sativa
agcttgtctaattttgagagtcttgtatttgtgtagcccccgactctttggttaattgagaaacaactgaacatagagtcgagaactgtagcttcttgtcatcgagtagtcattgcttgagtgaatatactcatagaagatgtccgagtggaaatctttaatattggaacaccacttgttgtagtaaaataacatggcattatacttgttgacgcatgccgagatgtcgaggctcctgtagatgtcgcggtcggcgaagtagcaaagcttgcgaagtagacgcaatagagtttgccaatgcctaagataataaagatgaatgtgctccaccatggtgacaaagttgcatatccgtgatgacgtgaacaggagttggcggcaacagaagcaaaccggtggcgaagatgc

SEQ ID NO: 71133 - DNA, 319 bp, Oryza sativa
tctgatgctgaatctgagcacagatttgctctatgtaacattcctgtggagatgagaggatgcaccaagctcatgacccttcacctaagccataaccagcttcaatgtgagatcccagctgagatatgttccagcttgaaaaatctcatcaatttatatcttaccagaaatcttgtgtcgggagagatccctcaatctttggccgagttaccatcgctggaactgttatctttgtccacaatatattatctggagaggaccatctgctttgaacaatctcacaaacctcttggatattctgttcttcaataacatgctt

SEQ ID NO: 71134 - DNA, 402 bp, Oryza sativa
agcttgtcacatttgcggcaggtgtcgtctcgtgccggcttgtggttgccggtggcaacgccctgtgcgcctctgcgggcgccaccctcggcacgtcttcgcgcccaccgtagctggacacctccccgcgccttgcgcggcttatggccgtctgtcggggaagatgactcccccttcctcccgtcaccctgagaggcctcccactgctcccgagtgagatggagcttcccgccgatggtgatgggccccgagagaggccgtggctcatcaccatcgacgaccttgaggcgacctaacgcctcctcgatcgacatcgtggagaggtccagcagagatacaatctagcgagcgatctgcctgtacttctcatggacgcagcggaagagcttatcgacagctctt

SEQ ID NO: 71135 - DNA, 298 bp, Oryza sativa
aaaatagaggattcacgcgacgggccacggaactgcacggagcagcatataatagacgggggaggcacacggacccgagaacaaacccaaagacggaaatgaagagcgtaagaaacaaaggcgcagaccgactgggaaagatgaaaagaaccagccaaggacggaaaactaccaaaaaagaagcaaaacggggggaacaaagggaccacagggggaatgccaagaacaatgaggggagactggaggggaagcagtggagtgaaagggccaaaaaagaaagaagacccccccccccccc

SEQ ID NO: 71136 - DNA, 364 bp, Oryza sativa
  unsure (1)..(364): unsure at all n locations
taacanagcactacaccttntactctgatagatagtaatatttattctgcaattctttatggtttcaagacttttgtctggacagctgtctcgtaccaaatgaaggacatgatgaaactgtcaccatcaacatcacagtttttggtctcagttgcatatttcccttggagtataaagcctgtatatgggtaatgttacttctgtttgcttctgctgtgaacagaaattcaattatgttccctacaacctaattatgtattttttggttcagagtattttattaatgtactgtttcgacatcatgtgccttacacagtttcaccttangttcagaaatcttacatgtgattatacttctgacaac

SEQ ID NO: 71137 - DNA, 286 bp, Oryza sativa
  unsure (1)..(286): unsure at all n locations
tataacattccatattcccacgcatattacatcacagacaggactcagcactaagcttgtggtcaaatacaccacaatcggtccctagtgaacacgaccagactaactcgatacagacatatttacccttcgatgaacatcaaatagccaagacaatgcaatgtgcattctctatagaacgaacagtgacggtcgacatgcggcgtaccanatcagacaatctgcaggccgtcagtagcttaatctgcaatgaagtgcacagctttcttataccgatgaaataatc

SEQ ID NO: 71138 - DNA, 445 bp, Oryza sativa
  unsure (1)..(445): unsure at all n locations
gcaancagctcgacccgtgatcttaagtcacctgcagcatgcagctttcggcttttttatattactccctgttcccatttgttttgttgaacatcgagtgtgaaagaataccgagctatgttgacatactagcaaatgcacaacctactctattggtgatttagtggctgacatgcagccaaaaaattgatctttcttggaagattacgtgtccatcatatctcttatataataaagaagatttacatatttgtcttctgtcctaagagacacaacatcgatcgttccctgttcaagggagataggggagattgagtctcgtgttccgcgcgcacgattttcaaactactaaacgggacgtttttgtaaataacttctatatgaaggtagttttaaacatcagattaatctatttttgaaagttaagataattaatacttaatta

SEQ ID NO: 71139 - DNA, 83 bp, Oryza sativa
  unsure (1)..(83): unsure at all n locations
ggacatgacgccncagtgcaatcatgtctctctgagagatgggaaaggattcagacaccatgttntcagcgggcattgcacca

SEQ ID NO: 71140 - DNA, 355 bp, Oryza sativa
agcttgcgttatccttttttgttcccctggcttgctgagtacgtaagtactcacccttgctctctatataaatatagttctgccatctccaaagatgaacgtgaagtgaagtgaagattagggtgtcgtcctagttccctgccgttgcctgtggcgtttggtgttaatccgctgggtggatctgctgcttgtgctgtctgtggtgtttgccttgtccgtgttgacggttgcattctcatgttgtctgagctgcagactaagtcaaaggtaatacagcctctatttattatttggattgcaaagatctatgtttgtaccgtgggtgccagcgtcttgtccaggaccggtctgacat

SEQ ID NO: 71141 - DNA, 351 bp, Oryza sativa
  unsure (1)..(351): unsure at all n locations
tgcttcaagaattgactatnggatataataatattcanggtatgataccaaaggagatattcaaaattccatcattgcttcaaattgatttatctttcatatactctatatggaagtatcccaaaagaagtaggtgatgccaagcaactcatgtatntgaagctttcgtctaataagctatctggggatattcctaactctttaggtaattctgaaagcatggaaataataatgctggatcggaatatatttagtggaagcatccccacttcattagacaacatactcagcctaaaagttctgaacttgtctcagaacaacttgtcatgatctataccaccatctcttggc

SEQ ID NO: 71142 - DNA, 401 bp, Oryza sativa
  unsure (1)..(401): unsure at all n locations
agtcttgatacatcaactctagaggatgagaactcaacaaatgagcatgaaagcttctctttcaaagtacctcagtgttcatgctcacataaagaatcctcaaagttctgtctgattactatcacttgcttgtgtgagaaccataaccaccttttgggccttacctctaacatgtttacaaggttggttttggatgcttttatatatcataaatattgcaaatctgatatgtgtttgtggtactaatcttgcagcgacatgtctccatggtcgagcttgtgaccataaacgaagcactgccgggagataccccggattatcttggtaagttntctttataataaaagcaagaaccagttcttacgatatcatacaccttctggtattctgggtagtcacta

SEQ ID NO: 71143 - DNA, 385 bp, Oryza sativa
  unsure (1)..(385): unsure at all n locations
agcttgtttttgtttcaaanaacatgcatactaagtagttggttcacttatctatacactgtcccatatggtttggctcaacaagtgcccatataatatgttatgacactctgcaatctctttcaaacgaatatgcagaacaattattcttataatgcatagtatgattgggagattccagatgccttatggacatgggtggcacacatgccttttaacaaggttttgtacctggagaacatatgtgagattttgtacagagttttatcccatcgtgatataatcaaatgctatctagcatgtactaactagtatgggttctctatagacttgtgacttcagccctatttctatattactcatctattcttcttgatcaagacat

SEQ ID NO: 71144 - DNA, 311 bp, Oryza sativa
  unsure (1)..(311): unsure at all n locations
gaatttcagatgcagaataacagtgatgctgttgatntttgcataagaggagggtattcttattcttcacggttcagaatagcagcagcacaatgcacaagcatcttttctctgtatacattgcacttcaatcccattgtgctctgtgactctgtcctcaactccacactgcaaaaagggctttggtgcactggcacatccatgcaagaattattaggcttcttggttaatttttatttggacagacagctgaattctgtgtgtgaggagccttatattaaaataccacttcaatttggaaagctttatga

SEQ ID NO: 71145 - DNA, 401 bp, Oryza sativa
agcttgctatggtctgtaagcgcgtcttgcgccgcgacgggatggtgcccatggtggccgccatgctgaggaacggcagcgcaagggtgcgtctcacagcgttgcaagcccttcgggagtttgcaagagaggacgatgaatacagggtaagcagagggacgatgcaacggaatggatttttatgtcttggtactacatagcactaactcggaaattcatggttttgttctctttttttttaggattctgtatctgaaggggacacaattcgcaggattgttaagatcatcgatctcgaggattgccaggagagggagttggctgtatctcttctgtgtgagctgtcgaaatctgaaatggtatgcgaaaagaatagcgaattgaatggagcgatacttatc

SEQ ID NO: 71146 - DNA, 343 bp, Oryza sativa
  unsure (1)..(343): unsure at all n locations
ttttgccgatcagtgcaatgggttccgtctccggcatcgacgacctcgtcttccctcccgggcagacgtntcggttcggcagcctcgacttcatcaccaacaacttcggctagatttctctccttgactcggaatcagaccagtcgggagagaaccggatttcggtcccgtttggattcccgaacgcggctganagctacttcgagaccatctcaaccgagtcggcttcaaaccactcggtcgagatcgcatcttctccaacgacaccagatcaagatgatggggcttacccaccagtcctgatgaaggctcccgacgaattagcgggcgtctttaccacgac

SEQ ID NO: 71147 - DNA, 399 bp, Oryza sativa
  unsure (1)..(399): unsure at all n locations
gaagctntgtctctgtatatgtgtgtctncgtaggatggtgtgtgcttcggcagtgaanggccaaccgtctctctttatataagagggccaggggatgaatgtcgccacgtgcctctcctgcttaatctctctcgcattatatagtatatatgatcatatatatatatcatatatcatatatcatattatatatacagactggtatggctttgtatctcctcgggaattaccatatacaaccctctccctgacagatcgatcatctccataggatccacatattgtctgaatcgataaacataataattaaatactcgatgtaacaatcgatgcatgcatacaactactaatttgataattactgtcgcatgcaaaacatctatgtatgcagcgtgctt

SEQ ID NO: 71148 - DNA, 341 bp, Oryza sativa
  unsure (1)..(341): unsure at all n locations
cacggcatcgttgaaactctcaagatcctcaataccaagtcctntntcattaaagaagcaaataaatgacttcaggggcctgcgcgncgaaactganaataacacatacgcgaagnngcccttgctacctaataagagttcaaaagaaaggaaggccctattccagtcaaaagtactctttacgctcacgagcaagcctatgaggatcccccctggttctgactatgattcactagggcgaagatctaatataatctgggtcaaggtttccttttctatcgggccatggatcaccttccttgtttccatntatntaacttgatcacgcaacatttgcttct

SEQ ID NO: 71149 - DNA, 408 bp, Oryza sativa
agcttgagactactattatgcgaacttttagccaattatagttggagattcacaaatagacttcaataatgtgttctccttattctagtttcgttacttattttgttcatggggtgttctcaatgatttgttgaactacactcttgtttgagtgctaatatgcaataattggctgtagttctcttgagcatagaccgggatgttatattccattattctaaagaaaaattcgtatatcattcctacaattataaggctataatctacaatttctctatatgtattccgttagttgtggggtgtttggttgcattcacgaagcctgactcacattaggccatataaaatagtcatgcactagcccgcgagctatgacgagacgatgctaaagcgttctcccagctacgc

SEQ ID NO: 71150 - DNA, 343 bp, Oryza sativa
  unsure (1)..(343): unsure at all n locations
agacaatatgtgaagactacagctgagctctctacagggggctcctcaaagaaagaatctacagcgccgatcctgaatacattgaataataacatcaggttagactgaagtaccaataaagtttagtggtttgctagaatggacagctataaggatcagacactgaaaggcatgccaaccacaagctntgcagcaagagacctataaaggagctcacgagcctgaaaaataagagagccgtccatcattacaaaatgcatcaattgattcgagtcagatagaaaaaaatcaatgccttctttttgctattgctatcctcactatgtactatgaactatgcata

SEQ ID NO: 71151 - DNA, 405 bp, Oryza sativa
  unsure (1)..(405): unsure at all n locations
agcttgtcagtcaaagcattgaataaaccttgtgtatgaagcttcactttatcaaagggtgcattccatcttaattatgccgcaaactgttcctaattatgctgtctcatctcaaaccaaagagaataggcatatttgctaattcctatgctactcatggaaaacctatctttctggcttccctaccatctgaatcttgcacaagtgaccatatgatagccttgagttgtcattgtttaatcacaatcagcttaatccagtccatacatgagaagattgtgattagataagacctagggtcatgcaaggcaagccaaaaaggttgggtaatcaaagacaatggtctaatacaaattgcatgaattgctccatntggcatattgttataagttattgtttaatgaa

SEQ ID NO: 71152 - DNA, 390 bp, Oryza sativa
agctagtgaattataaagcgggaaggaggatgattttcacaaacaaattgcaggggtaataaagtggagaatacacgcataaataaagcagcaagtgttcacttcttatatgtttgcactgcaaatgatcaattacaacagatttctataatatcatatcccatagaagcaatcattttgagcagaaaaacaataaattttcccagtcacttgtacttctgactcgaggaactgaataggtacagatgctcaggggtgctaaattggattgctttcaccaaaatatatattaacattaacttgactatattgcaaatcacttaaaaaaagttttagtgatctaaccaacatcacagatgcgtgctctcagagatgagatgcaaatcatca

SEQ ID NO: 71153 - DNA, 330 bp, Oryza sativa
ggcttataatagctccgagctccccggacacggcgatggtgactgtgagtggaaggaaaaacccaagggcaatttcgtctggtcacaaactaaagaggatgaaagacatcttaacatggagcaccaccatgtttgagaatataattctggcgaatctgagagattgcatttgaaagaacccatctttgactatggtataatctcaaatttctctgcaacccacggaggtgttatggattaattcataaattgtaagtgaaccacaatttataccttttaatttagtgatagtctgatagacatataaatggatctcatctccgtcttatc

SEQ ID NO: 71154 - DNA, 397 bp, Oryza sativa
agctttcatctttaaaagacactataccaatgaatcactgtaatcgttaggttgatcctaaatccatctagcaacagaacctctagtatataaccgtcctatctagatagatgcgtacatagccaaaagccttccatagccatttgatatactaaaccactgagtagccaaatatatatgtatcccataaatgctatgttggctaactcctaaatacgccacgatgacaatagaaagattaagaatctttagccttagcatgattgggatccattagcaaacacgaatagtacattatgttgcgcatattcgattgatgggtgagatattggcttttctcgcgtattatataccttgtgtatcggttagtcgagaagcaacgtctgcgactcacatg

SEQ ID NO: 71155 - DNA, 345 bp, Oryza sativa
cgatctatcaaagagctaaatctagatggggtggaataactaaaccggctagcggagccgacatctagataattacccgtctcgtaggcaaacggaaggttgtcaagacaaacctacaaagagatgtcgcactctcgcagcggcagcggacaggttatggcgcagaccaacaaagatggacaaactaagagaagactcaaagctatatgagaagaacgattcgatcgattgatagagattggattttacaatgaaccagccgtgtcccttatataaggggagggctagcttctacaggcccttctccacgtccaactcggtgggaaaaccaaaggaaaacccgaa

SEQ ID NO: 71156 - DNA, 377 bp, Oryza sativa
  unsure (1)..(377): unsure at all n locations
agcttgtatgttgtgctctataaaacactttgccccanaacttgagtatcatgaaacaaattgaaaacactgaggttttgagttatagatgcctataattctggattctatggaatttgctctttagaaaaccacacgtattatcactactacagaaagcgtttttgcatacgggcggaatcgatcttcacatgcggttggccggcccgcatgcgcgacatggtctgcaaagatcaccatttgcgcatgcggccgtcgcagccgcatgcgaagattgatcttcgcatgcggctgcgacggccgcatgcgctaatggtgatctttgcagaccaattcgcgcatgcgggccggccaaccgcatgtgaagatcgattccg

SEQ ID NO: 71157 - DNA, 452 bp, Oryza sativa
  unsure (1)..(452): unsure at all n locations
agcttagctgaacattaatatgtcccgtaaactactttcaattgccacttttcagtcagaacttcacatgtccacatcccgttctaattgaatttttgtaaccaattttactttatcatgttccgaaatcatttattcccctgctgaattcaatgtgtaccatgccagcaccaaatctcttcataccttgtaccaaaatccgaaattgctacttagagccatacgtttgcttgtgtgctgttcactcgggtgatgtgtaacggtataagttggatactgacttactgaggacatgcttcatgtgtatcaagttcaggtcttatcangaataatcattcacgcgttaaagagaaataagatgttcttgctattttcaattttgtgaaatgaaataatcctgtataatcttttgggtaatggaacccaatttgtgcttggtaaattgtacttat

SEQ ID NO: 71158 - DNA, 280 bp, Oryza sativa
  unsure (1)..(280): unsure at all n locations
tcgggagtcgcatgaagttctggcggccgtcagaaagtggcgctgccctgcagtccanatccaccccgcacgaatccctcttcctttggatcctctccatcgntcctgagtaagtcacgagtgcatgcatctncggggtataaagaagaggaatatgaactcaagaaagaactcaccctgatatttagttgatgtgcacgagcgcgggtaatatgaccatcatgctgtacatggngagacatggatgtatcgatggtgttggtgtcctcatcacgatgcg

SEQ ID NO: 71159 - DNA, 451 bp, Oryza sativa
  unsure (1)..(451): unsure at all n locations
agcttgctcgcacgtctctgcttccactcagtngaattctttcgatctcgacgtctgtctagtgacgttctcgatcgtaatctcgttgtcaggcactaattaacctgttccaacttgtcggaagctgatatacagtaacatagtagtactatagactacagtgtatcttgttgagatatcagtctttgattgtttcngagctcggcgagatcgaccaatcgatgcaagatggagtagtagtaatagctgcacgaatgaataagcttcaatgttcaaaaaaaaaaatagaatatgcttcgagtactggtgatcgtcgtgtcactctccactggagctagattactgctgacagcaaccggataggccaattggctgcatgggcttcatgtcttggccttctgctgtaagtgcctgaattttcacatctggttttctgacgaattatttataa

SEQ ID NO: 71160 - DNA, 481 bp, Oryza sativa
  unsure (1)..(481): unsure at all n locations
tagttaactnnttaattctgatctgtgatatttgatggatcacttctgcgtgtgtgcgtgtgtatatatgtgggtgtgctggtctgctactctggtgtgtatatatatagatataaagctgagccccactcgccacaccacgtataagttaatcgggctaatggaaaataattgtactgtaaatttccgtggtataaaatagaaactagttgggtggtccgcacaattgcgcggctagcacccaaacaaaatcatatanttttcatatccttctttatttacttgctcggtctaccactatttctatttcttcttcttgaaacctntaaaaattggatcttaatagtttttgagtttattatctcgttgggtttcgtttttataatttctggaagtcccgtcaaacgctgccattatactcctttacagcccatccactggtctttctctttattgtcattagaattttacaaatcgaaca

SEQ ID NO: 71161 - DNA, 112 bp, Oryza sativa
cgaccggatccagagcaccgagcagcaacaagagattaacggttctgttaaacaagaccgggagctcgcgggcatatttccctttctcacagaccactagggcatgccaatg

SEQ ID NO: 71162 - DNA, 478 bp, Oryza sativa
  unsure (1)..(478): unsure at all n locations
tctcttccacctgtccagacatgcataaacctttataagattagcagtctttttgaacgcatacacttcaaaagccgcagctagtcaatctgcacttaaatgaatccgatctatcaaaaactaagtcaaaccaagtccaaagcctattatgaaatgggtaacttacaaaaacttcagttaatgctaaggcatcagaattactattagacattntagcatatgcccgtctgccagttttgaaggaacaaagtatcatgctatttatttatcttagctactgatgaaaaggactcatgttcctaaagtgatgatttaggctggtcaatagttcatttgtagttcttccttccgttcttttctgtcagcaagtggactctggacgttttaatctttacttctttaataagagttgtgctattggngtgctctaacatccatccncacactagatcttgtgtggctagatatatgcatatat

SEQ ID NO: 71163 - DNA, 97 bp, Oryza sativa
  unsure (1)..(97): unsure at all n locations
aacatgttcaccacaatgttatgtatttttttattgctntttatagatgaaccaggtcgaacatgcatcgttctgaatctatatgcctctttatttt

SEQ ID NO: 71164 - DNA, 340 bp, Oryza sativa
actgatagtgatatgtaacacaactctctcagacataaaatatgttctatttttatccatcttacacataaaaatacaaaacccaaaatattaacaacattcttatcttatcaaatgtcaatgtaatcatttctctgattatctatccccaatacatatttaccttacttttataaactccgattcaataaccgctaaatatagatttattttaagatacataggaagagcagaaagctagctcgggcagcgctcttcgtcgacccttacttccttacttacttccacttcctgcgtgctacggcagcatgaaaaaaaacgccgcccgcgctggcacctg

SEQ ID NO: 71165 - DNA, 352 bp, Oryza sativa
  unsure (1)..(352): unsure at all n locations
ttaatgctagagatgacctctaatcccctcagcgagttgacattatggaacgcaccctgctcccctcggaaggtggcattgtcgggcagcagtatcgacgcgtcgcatccctatgaaattggtaagaaaattaagtctatgacataagagacatgctattgaaaaaaatgtgaataagccataacggttacactgaacaaagtataaagtatatgtctaataaactgtgacaacaanaaaatgtggtgtggtaaagtgttatcgtgaaccaaacacccttgcctgtaaatcacaacattctacctagccaattcatgttagtagtatattccaatagaaattcactgagatc

SEQ ID NO: 71166 - DNA, 459 bp, Oryza sativa
ctcagcttgctgttggcgcggcatccagaattcagagctattactctcgctctcctgaacaaggactgtgagcttggtcgtggtgggtttggcactgtctataagactactctgcgagatggccaacctgttgccatcaagaaactgactgtgtctagcttggttaaatctcaagatgagtttgagagagaagtgaagatgctaggcaagctacgccaccgcaaccttgttgcgctcaagggatattattggacaccatcacttcagcttcttatatatgagtttgtttctgggggtaacttacataaacaactgcatgaatcatccactgcaaattgtctctcatggaaagagaggtttgatatagttcttggcattgcaagaagccttggccatctccaccgccatgacattatccactacaatcctgaagtcaagccacattctgcttgatggatc

SEQ ID NO: 71167 - DNA, 385 bp, Oryza sativa
  unsure (1)..(385): unsure at all n locations
agctttacctcttgttgaagatcgaaaccgatgcagctcaacccgaacgcaagaactcgtccaaataaaactaaagcaaaagagtggcgatgcactgaaattgtattgtacgtgtgttaaaaattacatatggctcggggtcttatttatagccgagaattacaagatatgtctataccggacacgactattatctctaacaaactctaatataccataagtctttgcggcagacttttgcccaagcatatctctaaggaaattacataaaatatcctaattaatagatacaattgccttctcaggactntatccatgcgcggcaatcatcttgaagcaccacaattcaacccgatatcgcacaccaagttgtattgtcggaatc

SEQ ID NO: 71168 - DNA, 386 bp, Oryza sativa
  unsure (1)..(386): unsure at all n locations
tctgatctgcgccacagaagaaagacgaagagtgctattattttatatgggtgtgtcgncgcacataacaaactgaagcatccaaattgcgaatatatatgaaacgtttgaatactcctcgcaaactgaacagtatgaagaagaagaagacaagacctagcatttaattccgacactcgaatagggacggcaagaatttgaaagaaagaaaaaaaaatgccaatcgactgtgtgcttttccacggccgaaacaaatatctaaactcccctaaaacgacgccaaataaaattatgaaattgaacaatgagcaacaataattcagctagctagtgcatggaccgaccgggctatgaatgatggcgcatgggccatccagggattcaca

SEQ ID NO: 71169 - DNA, 442 bp, Oryza sativa
  unsure (1)..(442): unsure at all n locations
agcttgccaatcttacatggttgaatcttgagatgaatcagctccatgctcgtaacaagcaagattgggatttcatggatagcttaaccaactgcactcagctacaagcattatctatggctgggaatcagctggaaggacatttaccaaattcagtaggaaatttttctgttcagcttcagcgtctttacttgggacagaatcaattatcanggagttttccttcaggcattgaaaaccttccaaacctgatagtttttggactggattacaacaggtttacaggttctgtgccaccatggctcggcggattgataacattgcangtactaagctngactaacaacaattttacagggtatattccttccttcctttccaattngtcacnattggtagagctntatcttgcaatcaaatcagtgcttggaaacataccttc

SEQ ID NO: 71170 - DNA, 465 bp, Oryza sativa
  unsure (1)..(465): unsure at all n locations
ctcagctggagcggagcatgcctgaagnttaaggtggatcgtaatttgaacagaaacactgaaactttagttgcagattttggtgagaatgcaattgggagggtggctccagtggactctggattttggtggattattctactccgggcatatacaaagtatacggcagatactagtttggcagaatcaccagagtgtcaaaactgcatgaggctgatactgaacctatgcttatctgagggatttgataccttcccaactctgctctgcacagatggctgctcaatgatagatcgtcgaatggtatgagctttcaccttgatttgatttatttcttgacatgtatcattaaaaacagtacagttcagttgatgtggcaacaaagaagctgaatgtctctgcttttcttcttagaccaagcaagtctggttttcaaacattttttaataaacggcagaatctgat

SEQ ID NO: 71171 - DNA, 430 bp, Oryza sativa
  unsure (1)..(430): unsure at all n locations
gcaagctggctttctctcatggtccttgataaggattgaaccctcgaaaacggaagtacgcttgaaggtcatcgtgcttttgctgcatcatgttgttggtgttggcgaactgagcatatcagattgtgccattcttgcgtttgagctatgtgttccgtgaggttgtactggatctcccccgtctgcatatcaagggtgtccattctcttagtgatttcacccaagtcccaacgagaggaactcgagcgccattcacttggagatggaggcacaccacttgatctgggaggttgatcgtccccccattggatgtcatgaggcgcatgccaccggtcctcactggcgcttggtcaggtgagattcgatgctatggcgtggagcttgtgtcacncgggtgcattccagttggtggcccacctgcatcatacat

SEQ ID NO: 71172 - DNA, 478 bp, Oryza sativa
  unsure (1)..(478): unsure at all n locations
gaccaagaaactcagcttanagccatgaatccctttatgcatatctatatctggatcctttatatataacatatangatgagtagtatctgatataaatataatactcaagaaaaattcaagtattgtaaaatatttataaatatgtatttcttctcttgtcaattttgatttccccgagcagatgactcattacgtttaaacactctgcccgactagtcatagccaccaagcaccgggagtcggcctaagcacttcccaaacatgcatatgagtgacatgagttcgtcattaatggaacaaagtttcacggatcggagtttactactcgggtacttttgcaattattaagagcagacaataaattatcttatctctatgcttttgatttattccgaataatacttagcaccttgcgttattcggtccatccaccaagcccccgggtgctaggaatcngcccataggcaactatctat

SEQ ID NO: 71173 - DNA, 302 bp, Oryza sativa
agctcgcatattaatattcaaaaatggataaacagtccatgtcttcatttatggctgatatagctagtgtaatatttttttttggaggaacagaaagaatcggttttacagatgtcaaaagaattttatttgatatatagagaaattcctctacattctggagaatttctagcataagatcttcacatacttacgagatttgcaatctaacttatgtatctttccctcctttctatctataagaaagcaccccatttgccgcgcaagggcgcagcaagccccacgccctatccgccgtgact

SEQ ID NO: 71174 - DNA, 354 bp, Oryza sativa
  unsure (1)..(354): unsure at all n locations
actaagctntaataccagtgttcatattaaacaatgacggttctgtccattatccattgtgatcccaaggatagcttcccgtcattgagtcgttatggttttctgaggacgtccacattcccgcctctcaagaagtggctccatcagcataaaaatcatcatgcaatatctcatcccacacaagttaaagaatttagagtctagccaagtataatacatgtcccggtgctcaataaccgcgagcacggctattcgaatagatttggcttactcacactgcagtggatgtacactntacccgcactccgcgattgccaacacatgaacctcgtgccaacacatgagacgcgtcac

SEQ ID NO: 71175 - DNA, 416 bp, Oryza sativa
  unsure (1)..(416): unsure at all n locations
ttttaattntctggatgctgctctgncttctttangcatggaaattgaatctgaagaagcaatcgacggtgcatcaaattttcagcttgagctaaagagaaaggggatgttctccagcgctctcctctacgcaagaaggagattgccctccgagtcccaattgccttgttcatcaccatcacttatgcaccaagcaagcgtacgcaacaaaggctgtttgttttcaggcagcgctcttcaaaagaatttccatttatggattgcacgaggtctcangttgctacgctgatctgactgcgcgataactttcatatgccgggaattcatgcttaaatagccaattaagcctgatcagaatgtaacaaaattcttgtggcaagtgacaacttgctatctgctgaacaatattatctcag

SEQ ID NO: 71176 - DNA, 327 bp, Oryza sativa
actgaagcatcggattgcgaatttatatgacacgtctgaatacgtcctcgcaaacagtactgtatgatgaagaagacgacaagaccttgcgtttaatttcgacgctcgcctaaggacggcatgaatttgttggaaagaactataaatgcctatcgagtgtgtgcttttgcacggacagaacaaatatctaaacggcgatgacgcgacgcgatataatattatgaaattagacaatgagcaacatgaattcagctagctagcgcatggaccgaccggcctatgaatgatggcgcatgggccatccacggatgcacatccggtgctttg

SEQ ID NO: 71177 - DNA, 411 bp, Oryza sativa
  unsure (1)..(411): unsure at all n locations
agcttccattatttgtcaaatgccactaaaacatccaaacatcatgcatgcaaaccaaacagcaaagcaccatacacatcgtcagacatgctagtctgcgacgccaaagctcaccttctctgccgaagaaatgcctgcgcgagatacataatcgattatcctaagagcatcagaaacacgcagagcagctggcaatcgctggacaagcaatgcgtacgtncgcacgtctggcctcgcccacctccaggccccagctgcaagccggcactccacaccacagggactcagtacgctcaatccanaacataattcactacatttcgtgataaagaaaaaacgaaggagtgaacgatgccctacctctgcaagccggatcgatcgctcgaacacggagcgctactcacgttgccc

SEQ ID NO: 71178 - DNA, 484 bp, Oryza sativa
  unsure (1)..(484): unsure at all n locations
tgaggcttgacttgacttccgaacaggcatgactctgtctgtttgtcctccangtttgacaactaaaggaattggaggggcatggaggagaattttgaaaaacccgttggcaaaaaatagccgataggcgaggggagacatttttcacatacggttatcagaaagcttgtccttagggtttgaccgtttggctcaacctacagtcgagttggctctgataccactttgtcacgctcagaaacttagcccaaatttccagactattntgtgtattaaatccctgtccaggaccagccagggtacacaaaacgacaagtaatatacagttccaaacgtaaataaagcgtataatacttacagaagaggcacttagtcctcacaccgaaacaaaagcagcatcagcggatataggcgatcctagcggggcttcaacttcactccacaggcataactcatactgggtctgagccttggtcctctaatt

SEQ ID NO: 71179 - DNA, 454 bp, Oryza sativa
  unsure (1)..(454): unsure at all n locations
agcttgtgatttttataagtgttgactaaggttggtcaagacttcgacataaagatggtaaaaccgaatgatcacaaagaattgagcccgagttcagtcaaaaagaaaaagaattgagcctgagttggatggccacaaggcaaaggtatagtgaaactaagaatgcttttattagttttttaccagtctcggtgtttagagtaaagaccgggctactagataggcgtcgtactattaagagggctcaatgagtattggcttgatttgaaccatgtccaaatcgctcaatctgaaatgcatgatctctntccctcggcatgcacactaagggttaagtctagtttggagtgaggaatccgggttggatcttgatccttttgagactcaactagagcctctgacatgcatgtgatgaaggtggtagatgtgtatgatgcatggcttttatatcatg

SEQ ID NO: 71180 - DNA, 460 bp, Oryza sativa
  unsure (1)..(460): unsure at all n locations
tgttatggaatgccttccgcttcagcctatccttcgcttcactctgaaatgtgaaccatatcttcattgccgttcaggctcgctctttctcggcttatgtgaccttgccgatatctttatggaggatactgaaattctcacgtgccgacagcccgcagcatttagaccagtttctcatgacagtcctcggcgccgtgggcctaccactatcgtcaacctgtcttatacttgcattgtggtcggccatatattttgtgaccggngatctctactctgactacttgcacttgtgccgcccgacatcgacgtatgttgctcatgnggcgattctgcagcacaaacagattgcaacgtatgctaagatgtggagctaagattatcgggcatatggcaaaattatctataattaccatgatatcggtcgtcaccgcgtagcgaggatgacctcggaactgctctg

SEQ ID NO: 71181 - DNA, 418 bp, Oryza sativa
  unsure (1)..(418): unsure at all n locations
agcttgcccttcataagtattgtcatgtataatcattaacaaaaagaagaggtggaattaagcttaatatgcttgttacagaacagtgcaaattagtgttaccagactttatgtagtaagcaaaccagggtaatgtatcacgcatatactcataaaatgaaaggacaattaaatatcaccgaaggacccacaatatgcagaacactaatgatcaaataaaagtatatgatgtgatgttaaaggataaatccatataattgcatacctattacctangcagaatgagccattaggtcttagtatagacccatcaagagaaacagcaccatcatttatcagaggaatagcatttcgcaattcagctctagtcttatagacttgcaactgagaaaacagggctgtaaaataaagttcccta

SEQ ID NO: 71182 - DNA, 346 bp, Oryza sativa
atcttccagcctcgaagcatctgcaatctcatcactgtgagcaccctgtaagtagtagggtttgaatagaagattaataataatagtgtgtgtgcagtaagatattagaaagagcatcggggttgacttgagtagaagagaagagaaggtaccgatagggagtctaggacggcaagaatggccttgtcctccccggtgagtatcttctccggctcgtcgacagtggtgatgttttgcaccccgggagctagcttcttgttgacccacgacacgatggcttccctggagccagtgcaagagatcaatcatagaaattgaagccaatagacgagatgagatgggatct

SEQ ID NO: 71183 - DNA, 493 bp, Oryza sativa
  unsure (1)..(493): unsure at all n locations
ccaaaatctcagcctaccctggcggaggaaatccttaaagatattgagtagtgttgactcttctcattctgacgacctgaaggtagaggccatggatgacctgaagaaagagttctctgacagtgacgactactgcgattgggcttgtacggctcaacttaatgactcaacctattcccagaatttgatagaatgggagctttatcacataactgattaatcaataccgtaaaaactcattattggtattttatctgcactcattcttgcctgctttctttgggagaaaaaaaacgttgttgattaatgcaacctgccctaaacttacgaataatcaaactcaatatctaaacatttcaaactacgttctttgtattgtatgtgaatgatgaagctgtcaggaggttgcctactttcagaatgtattcactgtatgcanaatttaggatgggcgttctgcttgctgatacagaagattccatctcattggttc

SEQ ID NO: 71184 - DNA, 456 bp, Oryza sativa
  unsure (1)..(456): unsure at all n locations
agcttctgtaagtaggctatccttaatccaaggaaccatggaaggatctttgggttactgcagcattcttgtaatgatgcagcatttctgactatgtagctattgctaataggtaatctcattttgctatttcagtcaaaattggcagcacatggatttacatctgcttccccttccattattgaagaaagcattcctgttgttgacaaggttgtggatgatggatggtgcagtcctagagctagtatggcaatttcttcctcagctcttttacattcttaatttggttggttctcttatccataatctcgttcaaagttgaaattaatactcaaatcgttgttgaccatttntattgttatactgaatganaccgatgagaaatattcgctaaactggtgaatannatattcgctgaactttctttttgctgaacctgaacctgaactctcacat

SEQ ID NO: 71185 - DNA, 413 bp, Oryza sativa
attctgcacccatgctcgactcgaggcggctcgacatggcgtctcctttgacgcagccgacgctggccttgaggaagtattcctccaaccccgccgcgacctccgcgaggctactgttcctcaccaccatcctcatctcctcaccgccgccgccgccgcgttcctctcgcgtgaccgatcgacggcgccccagccacgtcgccaacaagatgatcatccacaacagcgccttcctcctcctgcgcgcgccgttgctgttgctcgatggagggtgcgacgacaggccgggcggtggacaatcccggcgggcgggccgtggtcgaacattgggagcggctcgccgatctcacagcgggtgagcgcggacgcggcgtgggtgaccgaccggaggtactctatcgtatgcgtgggag

SEQ ID NO: 71186 - DNA, 418 bp, Oryza sativa
agcttgtcaagtggactttcaaagtttttggtgcaaacaacatcaagaagccatgcggaattgatccaagaagcctgcacactaaacgaaaacacgtatcagtattccagagtaggaagtaaaaaaaaaagtgaaatggtaaggttggattatttatcagttttgaaacttgtatacaccttatttagacagaacaactaaccataccaaatgatgttgggcagtttgcagcaatgcatactgttggtaacttttttgacaagtcgacaagcacgatcgcaacacctaaagctttgcagtgatagtagagtcgccaaccaccctaatctagcaagcactatatcaagatgggttttgataaactaaaccggctagcagagccgatctagatagaactatagataactacctgtctcgt

SEQ ID NO: 71187 - DNA, 425 bp, Oryza sativa
  unsure (1)..(425): unsure at all n locations
agctgcgcgtagttattttctcanccgntccagncgtacacactggtcggacggaggagtcgtacgtatagcacggttgtaactactatntgtaactgcactataactatcatggaaatacagtactggaactatagaaactatagtatagtgtaactactatataactattttaactggtatataatgtgatatatatttcttactacgactccgttatgaaaacttttcagcccatgtcgagtttgtctagtcaaatgtgtgtgttggatcctaatctaataaggattgaaaaatccttgtgatgtgtactctaaaatctatcgaaagatatctagctagttcctagctattaatgcttgtaatcaacatgcttcggccccaattgccttgaaaaagaacagcgagacactaaataaaaatac

SEQ ID NO: 71188 - DNA, 407 bp, Oryza sativa
  unsure (1)..(407): unsure at all n locations
atcttttctggtgcattaggcctcatttcgccttgttctgccgcatcttcttcctcaagccccagccaaataagagcaaaccatgcgtcgttgggggtgctggtttccaactcangggaacactaagccaaaaatacttctccatgcccttcaagacctcaaataaaggctggcacgcaaactggttttatgttcaaaaccccgagcctattcttcccgagtactcctgtcttcctccagtttatcgggatacttggaactcactaccaatgggagatgaagctgcacaagcagtagaactgatggagaggatgataaagctganagagcatggccttcaaggagaacagatcacccgacactttatcaagtgtcggttagctccaatcaaagaaagatctcgcaca

SEQ ID NO: 71189 - DNA, 369 bp, Oryza sativa
  unsure (1)..(369): unsure at all n locations
gataaaggagttacaccaatgtatgaatggctcaacanggactatctgaaaggtgtgggaggccaagatgtgacatcatctcaactggacttataaatgaaagtaaactagaatggcctcatgtacctggtggggtggggaactgcattacctgaacatagntgcacccgcttatctttgtcggtgtacttaatagttccaaaaccgcatcgcccttcaattttgtaaactcaagatacctagaagaaccatttgtggaaccagccaagttccaacttcctgaacaancaaatggtgatgttatgtcatgaagcacattaacactgtaatgaagcaacggtatcctatgcatagcactagcacaacata

SEQ ID NO: 71190 - DNA, 405 bp, Oryza sativa
  unsure (1)..(405): unsure at all n locations
tntcatganaccgagcttggtccggggaggggagtcgttcttctgaagatgtgtgaaanggtatcattaacatcaggccggatcacatccggcctggtgtgctaatgcctgcaatgaatgatagtcgcgtcttatcatgccaccattataaaattatcgctgttntgcggtacgctatcgccaggttatgccagaatcatanaaaaacaggttgggagtcgtcagggtgcagcacgagacagaaatggaaaaccagagctggttgaaaaaactcgcacgccgcctggggcctggtcatgtcgttaatctctgctatatcgtggtattgctattttccaccttgctcacctggcgtgaagtggtggtgctggaagatgcctatatctccagccagcgtaatcatct

SEQ ID NO: 71191 - DNA, 430 bp, Oryza sativa
  unsure (1)..(430): unsure at all n locations
agctntatttattctttctaaaggacccactangactataatttttgtattattcccaaagaaattcctttgcccaaacatactgtcaatatgcttattangtctcactcccagggcacactctatcacacaccaaataaaatgagctagaggacaatcaaagaataaatgttgaacagtttcatccttctcacagaactgacattnttttctcctttctccagccccttctgtacagattatcttttgtcagaatgctactccctccgtttcacaatgtaagtcattctagcatatatctagattcattaatatcaatatgaatgtgggaaatgctagaatgacttacattatgagacggaggaagtatttctaatcgtgtgagccanacaaacactttcactcttggagggattnnttaattccacat

SEQ ID NO: 71192 - DNA, 450 bp, Oryza sativa
  unsure (1)..(450): unsure at all n locations
agctttcacctcaatgtcttggtaccaggttttaacaactcaagtgtcaggttggattttaactgcatatattgagatggaacatttttcagatctattatgaagttttatttcggtagaggctaaatcgtaagcactaaattgtgttcctttaagtggtcctagaattaatctagttcttttaaatatggctttgttagcagaaccgttgttttatgaactttgcatcatataatgctgcttatgtctctggaaaacaaaaacaaatgtatgaactctggatgtattcatatttgtatatagacagtggttgcaacctttgataattcagatctttgtagttggagacataatgctactgttctaggttcccttctcgatagtttggaacgctcangatctttnntttatgtcaacattttctacactgcaagcatgtagtacataagt

SEQ ID NO: 71193 - DNA, 511 bp, Oryza sativa
  unsure (1)..(511): unsure at all n locations
tattacggacctatgaaactcagcttgtatagtcattgtggttcttgctanggagcaagttgagaaacctctgaatgcagcccattggcgggatccctggaaccagtatggtcttggcaccaaggtcgatcaaaacctgttcatccatacataatataatgataaaacatcagtggtaaatcgtagttaagtatacttttgttatgaatgtagttagtaccttggtggcattttcaatctttaaaatcactagtggcactaagggtttgatctcagctgtgaaggatctgttctggaagaagtggtggttgtaatcgtttatgcctatctcacccattaggaataacgatcttgtcgtaatgtccttgcgctctgtgtacacacataagtgtagtatagtgagaagaaatacaacgaatcaaaantggtaatcagtaacaatatattcagttatagctatccattgaaatgtgtgctaactaatactntaaggggctgacaatacaacatg

SEQ ID NO: 71194 - DNA, 371 bp, Oryza sativa
  unsure (1)..(371): unsure at all n locations
agctntgtggagttagtcaagtactaagttntgtttagtcagatggttgctaaaagattattacttccaggtgaacccacatactcatcagctgaaattatgtgacttcngcagcgcgaaagtcttggtatgatcactcattaccagatactcacacgaacattgccattgtctggtgtacctaatcttttgttctattattatagggaaaaggagaaccaaatatttcttacatctgttcaaggtactacagagctccagagctcatatttggtgctactgaatacacaacagcgattgatgtttggtctgccggntgtgtgcttgctgaactcctcctggggcaggtaagagatcacattatttacatg

SEQ ID NO: 71195 - DNA, 439 bp, Oryza sativa
ttacggacctatgatactcagctggcgggggaggaggccagggattctgctgatatgttctcggcaacgtctacaacgctgtcgttacgcgcctgtggagagtcggatggggaatgttctggttgcaacgagatgggcagagggattgaaccaatgtcgcacttacaccactatagtcacgcatttgcaagccaggagctgagatgcttggcctttggctggatggtagcatggatgcactccaatgtctcacatttactgcttgggaaaggtttttgggatggaaagtcatgatgccttttatgtgcattgatggtgatgaaggatgggcccatcacaatctcttcaatgtctcatcgtggctttgctgattgggatttgaaggacatttattcttcacagttgaaagaatgcctcttcccaccgactcctatttacc

SEQ ID NO: 71196 - DNA, 399 bp, Oryza sativa
actcagctgctgagccatgctgtcgctctctcaacatagttatctagagacgcaaccatagtgaatcgtttttccaattcgaatcccgaacaacacgattcctggagaaacggctctagccttggggcatactgaccttctcttctcgtggagaatttctaaattttatccatctaccatattccaatataaaaatatattcctatttatcaatcacaatacaactattcttactttgtattatttcaatacaataattttactttcacaatttgagtgatattactttaaaataaatatttcgaaccatgtaagaataaaatgattatattgacgaagagatacactcttgctttcctatagataataaaaaaagacttttccttcgaacaccaacca

SEQ ID NO: 71197 - DNA, 365 bp, Oryza sativa
  unsure (1)..(365): unsure at all n locations
ctccatcactcccgcaccgctacacccggcagcgtcccttttaactcctacggtcagcgctcgccggcggcgagtaatgctgcgccgtcatagcttcggcgacggcgaaggtaccccagccgacgcatacacatccaaacccgccgtcngagcccgattctccccgcgcgccggtgagtaccatcattgacagcgacttcggacatggattcgcccgccgtaaccgaccctcttcctctaatgcttgccattttgttcctatgatgtccggagatcgatcgacttcgtcgtggacacacgttggtcgggtacgagatcggctgcgtgtcactttgccggcaacctagggaaaatatccctcttcc

SEQ ID NO: 71198 - DNA, 420 bp, Oryza sativa
  unsure (1)..(420): unsure at all n locations
tcacgctggacagtaagtgcttgctcaagcaaattctctaaccttctctctggtnaccataacagtgggggaagcaccttttgcaattcctctagcagcttcagccgtgagtttgaagattcaatgccaagcttcgaagaaccaagtaatacatgctgtggagaagaaattatgcagcctgacaggtcatgaactcttnttttgttgacaccaagtggtgtaatttcactctgcatagtccttatagcacccatgacattgtcatttctcaaaagttcaagaacattttgttccagtatcagaaatatagcagactttacaatggtttcgtccaaaaggccaaccttcttcaaggtaccacttgactatcccaattcccatcaagtacctgccttctgaaaagaatcactggtggggaat

SEQ ID NO: 71199 - DNA, 419 bp, Oryza sativa
agcttaccatatgtaaatactgctgcattactatctggattgacaaaggtacaatttgatcggcaacgaccgactgttacatctacaagtcatacagcatgggtaaactgcagggagagagagaagctataatgtagtataatcagatgttaaaaaaaacttgaacataatattaattcattaaacgaatgggaatttaatcattgggacgcaaagtggcatcgtcttcctcctcgagagatgcactactcctcatgtgaaatcgatcataacaaacacaatacttgaagcatccatccatggccgagggtaaaatctgtcactcatccttcccggctggtggctcgcggcgtctcctctcggcgagcatcgacttggtcttctccagcacgccgaagaagatgacccgccgatgccat

SEQ ID NO: 71200 - DNA, 254 bp, Oryza sativa
ggtagaatgcaagcactctgcttacccacctcgctaccttctattcaaagctcaaaacactcctgggttcatattaacacatcattctaacagaacctctaaagtttgttatccaggggttgttttatttcacgccaagcccgagtttatcttatgaaaatttggcaacttttgaccatacgaaaagaattagtaaagggtccagtttctttggctatccagtttagtgtggaccatttttaagttaaaaaaaa

SEQ ID NO: 71201 - DNA, 291 bp, Oryza sativa
  unsure (1)..(291): unsure at all n locations
agcttcctcgattcttactctggctaccaccaaatcagcatggctaaggaggacgaggagaaaacagcgttcatcactccgttcggagtattntgctacgtcaagatgcccttcggattgataacagctggcaaaactttccaacgcacggtccagggcgcacttagcaatcaacttggcaacaatgtcgaggcgtacgtcgacgacatcgttgtcaaaaccaagacaagcgactcattgatggatgaccttcgggaaacgttcgacaaccttcgacgaaatcgtcttatg

SEQ ID NO: 71202 - DNA, 410 bp, Oryza sativa
  unsure (1)..(410): unsure at all n locations
tcatcggangccactatgacgtatctgctgtcgtcgtcacacattgttgttctcgtcattacatgtganaaaaaagacatcattatatatatcctcttaggtatgtcgctattaatttgaacacgatgaacaaatcaatcacagtgctaccgtacacgtgacctggttataactagtactgtagtcccttttggtacgtgtgactttgacaaacaatcaacgcgtcaacatggtgatgctctgcttgaaaaaaactgttcttgcacacccatggttaatgttggatgctagcctgctattatacctgaacggctgagcagaagatcaacaccaaaccacaagaatacactcctcgaaatcaacatggatccagaacgcctttccctttactctgctctttgttctttact

SEQ ID NO: 71203 - DNA, 372 bp, Oryza sativa
  unsure (1)..(372): unsure at all n locations
agctngngaatatctcttctctgccaagtaaaagctagtgatgtgtgataaagcttgtgatgatctaaccaacattaagttaagttcttttggctgctgtttggcttgagttactgtgaccagttttttacattactaggtacatgaagatatctatattcatatattaaaagtgaatgttgtaattagtttatttccatgttactctgatgtttcagattaaggttctttctagtgagtgtactgaggaagcgaataatgtgcaagatgcactacatatggaggaattgttgaagcagaatggtgcagatgagaagaccagacatctataagctgttacagaagttgagatggcaaacactttgttcgctc

SEQ ID NO: 71204 - DNA, 486 bp, Oryza sativa
  unsure (1)..(486): unsure at all n locations
ccttttgggctgcttcacggctaattatgccactggctgctatatatgtatgtctgttcttcgcttaatttgccttaattattttattattgtaaacttgaaggtcgagctcgatcatgtcgatcgatcgatcgaaacatgatctttntactgttcacaggtacgtacttgtcgattaattttccggcctattgatgattatgtcagttacgatgccggcgctctaatttgtgtctcaagggtgtgtcgttctcactgattaattttgaggccaacattgtcttanacagatggcatctgaagaggggccatctttgatctcgagtgtcaatcacaggataatctcgtttgtaaacatttattgtctgttgaggcgcctgtacttgttggaacaaaggatatgtagttgagaacactataacggatatatcgaatatgcagtatataatttgaatggctcaccaaatgtagacatgatgaattaca

SEQ ID NO: 71205 - DNA, 451 bp, Oryza sativa
  unsure (1)..(451): unsure at all n locations
agctntacactgtgctacactacatatgcattccttgaatacaaaaatagtctcctatagcaaggcttagatgttgaattctaagtccctaattgtgaccgtcatctttcaccctgacagctatgttgttcatgctgaggttaatgctattttaaatacaaaccatgcttcagcggctggacaggtttggacttctaatctcctacaaacttaaagcatcttattaatttgcctttataagctaagaataatcttgtgttatcttctctttgcagaaattatatgttaccatgttcccctgcaatgagtgtgctaagattattatccaggtttgtttctggatagaatcagtatcttaaagntaaaatgtatttntgtcatcacctatnntaaatactctcactntgaggaaatgcattataacaccatatatctcaatcatacacttcat

SEQ ID NO: 71206 - DNA, 504 bp, Oryza sativa
  unsure (1)..(504): unsure at all n locations
gacctataaaactcaagcttaaatagaattgatttatataatanaacttatcgttaatgttttcatgaatataattatatntcaaataaaatacatggtcgttccataaactntaactgggatgtaaatcggagagtggatctggaaatgccatattgcagtggagagacctaaatacaaaattctgaccatcataaagtgactatttatgatggaccacatgtgacatattaaatcaagattagggatttagttgtatattntataagtctatggatgtctcggtcntaagttatggattattaccgaaatttcttaaaaagtttcctttnttactttatatttcttttccatcatctagcttattattgtccatctctcctgtcgaaatgaacaccaccgagaccgtgtttgttctttgatcttagaaactaatcctttccaggaggaaacgtcctgaaggttacaacccanagcagctaattcatgcgctaccttattaca

SEQ ID NO: 71207 - DNA, 406 bp, Oryza sativa
  unsure (1)..(406): unsure at all n locations
ctatgtgaagctctaggtttctaaaaaacatgaatatgtacttacctcatgaattcattaaacatggctactggagatctttatagtagatgaaatctacttaatttatattaccatcaattttcgggtccaagtattcagtgccataataaagcttgagatttgggtacctgtagcacatttttagcagcagattggtcatatcatcaaaacatcaatctattcatgaacctgcaaggcanatgctttaggctgtgttagaatccaggggtgaaaattttgtcgtgacacatcngatatacggacacacanttgaagtactaaacgtagtctaantaataaacanatcatagatttccgctgtanactgcgagacanattattaagcctaattaatccatcatta

SEQ ID NO: 71208 - DNA, 428 bp, Oryza sativa
  unsure (1)..(428): unsure at all n locations
tactcagcttgttagccagnaaggaacttaaagagcaagtacaatatatagtatcttataaatcggctggaaacacatgtaaaaaaagatattaanagagaaaagaaaacagagatggactacaactttatagtcggttgcagtactgattataaaacgttttgtgtgttaaaggtatgactangtatngtggtattgatgagtgtagtatatatttataggcaactattatataaatngagtattaaaatatgtatagataatntaattaggtcctttttgttggccccatatttttaataagccanatcaacttattaaggaataaaaattagttagtaggtaaaatatacatgtgttcgtagcaacttaacaatcaatataaaaaagaaatcatgttgaaaatatcttanattaactttanaaac

SEQ ID NO: 71209 - DNA, 216 bp, Oryza sativa
tatcttgtatgtttgttataaagaaatatccaaagtattgggcgtacgccatgcgcacactgctttaacagatgtgcttaagttcctaaaagatacattgttccaccacaccttgaaatatatggcatatgtggtataaaatccgtgtaaggtaacttcataatgatctaccaaccgcctgaaaaatgaccatgatttataatcagcctaagccat

SEQ ID NO: 71210 - DNA, 308 bp, Oryza sativa
  unsure (1)..(308): unsure at all n locations
agcttatgaatttatatgaatntaggtttaagtttcactcgaatcggagctaaaacgaataagttacgctagtttaaagattcaaatttgaataaatccgagaaattgtaaaaaggtactgttcctaattcattatntttattcctaaactttatccaaaactccaagtgactgccatgtggggtttaagattgtatttgctttcctaccggattatntttctaaagcaaatcctgtgaaccattgacaggtgggcccggctgctctctctcgttctttcttttcccgtcgtcttctaccttcagcca

SEQ ID NO: 71211 - DNA, 481 bp, Oryza sativa
  unsure (1)..(481): unsure at all n locations
tactaagcttagatactggtgtactgtcagcagcgaggtcttggtgtcacatgaaaatcaacattgtgaagcagcacgatgatcttagtcaaatactgtngaatttttttgcattgcttgtcatggagcatggagctacttgtgggttaatatattcccttttgtaatgcaaaagaagaaaaacaaagatctagagttgagtgtgatttcctaaataatatcactaatcagcttctgatcagatacgaaactgcaaaagttgtaataataataatacacttaggtggataattacttcatattattctatacatatatggttcattagctcaattgtaaagcatgcatgtatgtntcacatatatagctcatgttgatcaaacaccagttaattacaaaaattgcactagttcaggtaggatgactggcctatagcccgactgggtgtggtgcgcanggaccaaagtaccgagggtaactc

SEQ ID NO: 71212 - DNA, 434 bp, Oryza sativa
  unsure (1)..(434): unsure at all n locations
cagcttttctgctacaaggactacccagacaggccaccaactgtaaaatttcactcaagaatcaacatgacctgtgtaaacccagagaatggattggtatgacacgagaaatttggttcagaattatttctaactcttgtgttcaattatttgattaattaaaacttatcttttggagctaatgtatgttgaccaaaggaagttcagcctgttgtcaaattggcgccgcgagtacacaatggaggctatcttgacccaacttaagaaagagatggcagcatcacacaaccggaaactagtgcagcctccagaggggacattcttctataagcaggcgcccgccactcatctncgcatgccatggatgaaccattgtaattctctttctatatatcgcatgagatttgagccgtctgaacatttggtgcaaatga

SEQ ID NO: 71213 - DNA, 486 bp, Oryza sativa
  unsure (1)..(486): unsure at all n locations
tcaatanaacaataaaatatgaaggtgaagatcattatatcgtatcaagaaatgtcaaatgtcaaagtacatatgcccaacctgaagaagctatagtacaccctacccaacttaatctaatctgtagaactgtagatcgattccaaatctaattaaaaaaagcaaacccattccattcccatgcatcaactaattaaagattgctagaaggagagaatatatgcaagaagttgggcgatttgggatcgatgccgccaccaagaaaaaaaatatatatttgaagcatcagagaagtgattaaaacagcaagtgaacacacaagcaaacgatgtataaaatggcatggaggagacgaggatcagtgctatacctctagctccgacgagaggccggtgcggcggcgagacgacngcgatgatctccacctccacctcgtcgtcgtcgtcgccgtcgtcgtcttcctcatccaccatcatgcttgacctg

SEQ ID NO: 71214 - DNA, 413 bp, Oryza sativa
  unsure (1)..(413): unsure at all n locations
agcttatcccatagaataagaagggaaaaaaagaanaaagaagaagttacttctactgttcaaaggtangactgtgcattgtgcccttcgctggttatgctggcccacngcgacgtgcaacgacggcgacgtcccggcgaggttcgctgcgtgtgctcgtcgcggcattgatgtggggtctctggccgccggcctcttgatggcagacgggtatttgcagtgggtgtcatcattcttaagcggcttgccttcaatggagtatgttttggatggactggaatacacgatggtgatggcatgaggctacnngctttgttgagtagcttgtaactacatgtttctctatcgagtatactattttttagctcttcctaacaacttaaatcagtttctaataatcaatgtcgaaaaga

SEQ ID NO: 71215 - DNA, 471 bp, Oryza sativa
  unsure (1)..(471): unsure at all n locations
ntagctaggagttagtgtttggatctgttcgtccaactattttggaatttttctgtgcctgattggtggggagataataatgtgcatggtgttattttttttctgcaggaggcaagagagattggacttcctctacgagtcanggttggctgttggcaaggggagctccgagggattccaagcgctgcaaccatctgccccagcagctgctgccgccgcctcttcttctgcccaagcgagtgccggctcttccaaggtatcgcgaccgtttcttctcggccatgtgattgtacttatgttagtttgcagttctaaaatattttttttggttgtgcatctaattccactgatattatcaaagaaattcgtatagtacgaagatacttggttgatgtgacagggcacagggttttcttagtatgaagatacttggttgattcttagtaggatgcgatgcttggttgattctta

SEQ ID NO: 71216 - DNA, 440 bp, Oryza sativa
  unsure (1)..(440): unsure at all n locations
agcttttggtttatgacttccaatcggtaacaaggatgtgccgggactacagttcaagacccacaaaacacccacaaaagcgcatgtattagattaacaaaacaattatttctttgcaagcatgagaacaatgtatggattggtacgaacatcatgtttaatgaagaaaaaaattgtgatttgatatggctagcaagataataatcaagcatcagtgcatcactcgaacaaaaaagatatacgatacccaacccccttgagaactaaagtaaccactcctaatctcctatagattgtgccaaagtaggtaaaagtaagggtaaactgcanaagaattgagttccagagtaagatgaagcaaatcctatgggtnttcagatctaatctgatactataatcactttatacatncatgttcttgacagacgtgttgtcatgta

SEQ ID NO: 71217 - DNA, 467 bp, Oryza sativa
tcggatctaaatcgcacaccggcggagctccgttcaccggcaggcggcagcccaccctgcctgcttatctccccgagcaattctcagctctgagccgcaatctcggcgccgcgtcgagcacgcgactaacaattcagagcaccacctcggttattcctcctcaatgcatggctccatccatccacgcgacgaatcgatcgaacagcctgtcctagccgagcacccggatcgcgcatctgtggtctgataagctagctagcggactagtttccagccaattttctagccgctagccacgccgtgatctcgaaggcgattaggcgagaggcgacggtggcatgtacggtgctgccgctaattcctctagctggcctgtaccatcgcgtcgctcacgcacgcaagaagcctctgtttacagccgtgcggtggcatatggtgcatatcatgcatacatgctgacgcgagcg

SEQ ID NO: 71218 - DNA, 324 bp, Oryza sativa
tggaatgccttccgctcgagcctatgctatgcttctgctggaaatgtgaaccatatctccattgcccgccaagctcgctctatctcggcttctgtgacctttccgatatctttatggaggatccccaagttctcacgcgccgctatcccgcagcagttagaccatctttcaatgacattcctggcgccctggggcttccactacgttaaccctcttttacttggctgtgggggcccattatttggacccgggttttctaaaccacttgccttattctcttgaaaaacggatgttttctccgcattctcccacaaacaaagggat

SEQ ID NO: 71219 - DNA, 276 bp, Oryza sativa
  unsure (1)..(276): unsure at all n locations
ctgaatgaacttgagagcaaactctggagagggaatgaaaatgtgnttaaatggngtggaattccctctctcggccggttggcttaagtagtgcacccacacagtcaaaaccgacctgtggggcccactatccgttgcctcatagaaagaggcagccgaccgattgcctcgctggttcagccgaacccacagtgggcccaaccaaccccactttcagactgtttgttccaactgtcagtagtgttgttgcacaataaattttcactgaacatttta

SEQ ID NO: 71220 - DNA, 409 bp, Oryza sativa
  unsure (1)..(409): unsure at all n locations
agcttactcttttatctngngacacgaacgagctgaaccctctttccagcaagctttcacaaaccgaggctatgctaaactcggttgggtcgcttccacccctaactacgtactcctctctttgtctcactcattaatattgtattcaaacttgtcacagacttcaaaactaatctttaactttaaatttctcatatactattattttcatcaaataaaacgtaatttataataaattatttatcgtcaaatatttgaagagttaaatattaaaatacgtgcatagcttaatgagtgggacagagggagagggagtaccggtactatcgtagtaccacactacttcaatatatggccataaggctcgaggcccgacggcctgaccctagaacgacacagcacaactggt

SEQ ID NO: 71221 - DNA, 438 bp, Oryza sativa
cactatagagtactgcagcttatcttatagactggccgttagcagctacattatgctacatatcatgtcactcgagacagcgattgtccactgtgctgtcacatctcgcgtcgctgacatgctatacctcctacatcagcggctatgacgccgatgctaatcattcatctgatggatacgctctgcatgttaaataccctactattttattggtagacccttaccaaccgctgacaaagaaactacttgagactattgtagctattagcggctacatcgtaaagaatacacatagctgatgcgttataatcggagatataccaccttgatttctctatgacatactaccccatcctataatgtaataacttttagctatgaatctgcatacgcagatgctcacattcttagcttacaactcctatatttctgggatgg

SEQ ID NO: 71222 - DNA, 453 bp, Oryza sativa
  unsure (1)..(453): unsure at all n locations
agcttcgactggattgtctatggaacatacactaatctggagtggaaaaacctagagcagattaaaaattagtttcattcttaaatagggtaaagttagtcaaagttataatatgaaataaaaggagatgtaaccttttgtgctggagagccctgtaaagactctacttcagcttcacaaccaatagtagcagaatagagagcaccaacttgatcttccgaggagccaacattaaaggtgcctattggatcccaaaaaagggttggacaagccaatacacccaaaacaactttaccctcatcaagcagaggcaaggcgatagcatatnggtctnnccttaagaaactgagtaacgtngtaaaaanaatgtgaatttgggtcacaagttgagatatgacattacaagagtactaatttacaggatgcctttacatggctttaatttatgacctt

SEQ ID NO: 71223 - DNA, 334 bp, Oryza sativa
agcttaggagaagacgtcatatgcggagtcttggcatacaccctagtttagcgcatgtgaatatggagccgtaggcccgctaatacgatgctgtatatttctctaatgacaggccataaaagccttctgcataatgtaaatattatcgatataatagagatgcgtcttttacatcatgtttgtatggtgtaccccggatcttcctgtgacggggattaatacactatcgttctggacaatgcaattttccttgtcgtgacattctgccaaacccccatctccaccggtgatgccacagttcgacttggatgttcaagattgcacctcattgacg

SEQ ID NO: 71224 - DNA, 415 bp, Oryza sativa
  unsure (1)..(415): unsure at all n locations
agctggacttctcctacatattgtttcatcatccatatcatcagtgccaaaagggacacatgctcttcttttcctttctccttatcatcatctgtctaatacactcttcgtcctagaaacaatcaaatcctgcttataaatcttgatatgtgcatgtgtatatattcatagcacagatctatctatttattcatttattttacaaggagggagcacattatggattgcagcttgcagctgcaaacatgaaacaccctgaatgagtgaagtgcactggttggtcacagggatgtgcanggtgcgtacagggatggatctctcgaggctgtgggctttacattcaaggagcccaccacagacaaacacatgcatatctgaatgctgcctatngtctcanagaaaaagatctgaatgt

SEQ ID NO: 71225 - DNA, 403 bp, Oryza sativa
  unsure (1)..(403): unsure at all n locations
tctgctattctatgatcagacaggggaacgccagttgtttgggacggaagtttaaatgaggcaaaagaaaaagtcagagctgtcanggaaagactgagaatcgcgcaatctcgacagaaaagatatgtatacaaccgccaaagggagcttgctttcgaagcaggggactatgtgtaccttcgcgtcactccacacctgggagtacaccgcttccaaaccataggaaagttggcaccgtgctntgtgcgaccatatcggattttggaacgtagaggtgaagtcgcttaccagcttgagcttcccttcaacatgcttagcattcataatgtgttccacgtctctcagttgaagaaatgtttgagagttcctgaggaacangctagtcctgatcacattgaaattc

SEQ ID NO: 71226 - DNA, 423 bp, Oryza sativa
  unsure (1)..(423): unsure at all n locations
agcttcttatgccttgtctttgttgaaagtactggtacttctttaccgaaggaagatattgtaattgtgccatgactgtcagcaaaagaagattctgaagaactgaatatctgcttctcaaaaccaggcattggaatgttagaggttgataaagctgctaactgtggtgcaatttcacttaatgatatgcatgacttcctcagatgagtggctaaagaagctgcaatcgaatcataaggccgccaaatctctcctaatgctgatggagatccacggggtgtcttaagagctgtgattgcagaattcaactgagcattatattccttatggaaccacacttcgtgagatgtntttggttcacgagatgtagaagctagaccgcgctccaaggctactacaatttgagtcataatagcagagtat

SEQ ID NO: 71227 - DNA, 486 bp, Oryza sativa
  unsure (1)..(486): unsure at all n locations
ntctagcagtgtcgccttcatcgtcgcttaaaactagcttcctcttgtgagatattggctggccgactggatcaggagcacttggttgagtttcagaccgaattcttggtccaccgctcccttgcccagtttggtggtgaggagatcggcgttgagcgattgtgggatccgacttcatcaaagcaaattcctgtgcgtgatatcctttatcgttaactgattcaacaaacagataagattgtattttgagaaaggctgagatgtttgagtgcataccggtggaggagggttgaatgcattgaatggcacaacgggcagcagatgtgaatagctgacaacaatagcgtttgagaagatcttgtacattctttctctcatgaccttacagtcaagagaatctggatcttccccgattggatcatgctgtgcatcaaactcanaagccgtgcgggatctctctttcgatggagctaatcgacttttgat

SEQ ID NO: 71228 - DNA, 455 bp, Oryza sativa
agcttgtagagatgcgggcatgccagtcagtttgatcctgcaactaactagatatataaatatgttgatcaccaaagagctgatcggctgacgagtcgatcgagcgatactagccgatgccgatagcaaccgatgtcgatagagttttgagcaatcgactatatgtccaatgtagagtctgatacttgagtaaataatgatataaagataattggctgatgataatgtaataaaacaacaatataatccaataaaaaccaatcggctaacaatgatatgatagaataagtgacccgatgggtaaagcatacatcggctagtggtatgatgtcattaattaaatccaaatgattagataaacagtgaaatctttgttacaatcttgtaaaaacaactggtatgcaatctttgtaagccgatacaacgtctagataactcattggctgaatcctcga

SEQ ID NO: 71229 - DNA, 485 bp, Oryza sativa
  unsure (1)..(485): unsure at all n locations
tcctcgacacaccaaccattaagaatgatgttccagctctttatgacatgttggaactcatctttcctttggagaaagagggcctctgcttcctcaacatgcttgtaccgacagagagacatcacaagtatctggaatccaaccaagtcaagctcaaacccataatccttcctcttggagaacatatctatcgcctcctgcaccttgtgcgcgcctgcataccgggttaacatgacagcaaacatcctgtttgtgaccactgactggcggctctccacaggaatctcatcaaacagttgtctcatgagcctgaccttcttcatcctcccaagaatgtcaagcatctccgtgtaggcccttgacccatggttatactggggcagaccagctgcccatttggngaaagatagtgcgactcttcaattggacctctgcttctggagcacctttagcacaactatctcatgcatctcgtctgcaattga

SEQ ID NO: 71230 - DNA, 393 bp, Oryza sativa
  unsure (1)..(393): unsure at all n locations
agcttatacgttgtgtaatgactaaggaagcttcataaaaaaatcatatttgttttaaacttgtaatggaataaattaattaattgtcaaccttttatatctataaagtaattntaggtatttctgaaaaagatgtaacccaataacatatggtagaaacaattgataagcttaacagcatattatagaaaatatcagtgtccatgacaaatctttgaaccgttacaaactcattgtagacatagaaccgattctctcttgtttatacttgaatctaataagtgaataagaatgcataacggtaattctacaccacttgttttattgataatggataacctagcaaatgcgtcaaagacacacaaagcccanagttatatactaattacaata

SEQ ID NO: 71231 - DNA, 406 bp, Oryza sativa
  unsure (1)..(406): unsure at all n locations
cagctggcgcgtgggatccctcctccaaacaagcactacgccgttcctctctctagctcggccggagtggccgtcccgagtctgggatgcgccgacgccgggccatcttttcaccgcgaacaaacgagcctcttatgcgcagtggcatttatgtccgaccacgtcaaaaaacagcctaccgtccgccacgtcagcacagcaagtttcctttagacggcgcggtgttcatcggcaaatatccacgattatgagatgtcttccctcaagactntacttacgcggtatccctgaggtaaactacatattacaatgtcatgtagtaaaattgcctatnaatattcgaattaaaaaacaacttactgtccgtaacttccattagcattangggccggacaacttttactat

SEQ ID NO: 71232 - DNA, 332 bp, Oryza sativa
  unsure (1)..(332): unsure at all n locations
atctttgaacttgtgacagcccgggatgtggatcatggagtcaccgagctccccgaagcttgtgttgatgctatctcgcatgctggttaagtggaggaagacggcgaggtcgctggcggccgatgtgaagaaaacgtagaccggtaacctgagctcggaggcgacgtcgagagcgtccgtgcagaacatgtcgacgatgagcgcgtccacggagggcagcgagcagaggaagtcgcggagcggcgcgttcatggcgtngaggaacccgagcataccgacgatcggtgacgcggacttgccgtcggagccggagcccacgggcgcgggcggtg

SEQ ID NO: 71233 - DNA, 333 bp, Oryza sativa
tatcttcacttcttctcagtacactggcacatcgccgtcgtcgacgagccatggccagaagcaccgccgtctcgccggagccaccccgcaagtcgcactcccccgccgccatgagcgcggaggcagcggccctctgcgcctccctctggcacccgcgcagctcggccacgccgtacatgaacagccgcagcgcctcgcaccggcagcgcggctggacagcggtgagctcgcggcagcaccgcgccttgggcatctacgggcagcgcggaccgtggaccgggcatgcgcagctgatcacgtagccgcggcagccggagagcgggttgtgcggga

SEQ ID NO: 71234 - DNA, 484 bp, Oryza sativa
  unsure (1)..(484): unsure at all n locations
tctcctgtgaatgatagcattatgcagtcctatcacatcatctcataaccaatcaaggatgcagtcactagaacaatgccagctatatctctccagaatcaaaatgagcagccatgtttgtggttttcagttcgctacttatcatggtgtaatcgaaagtttgcagcaaccatgtaatacataaatatattcatgtctataaacagtgagcttgctgtgcttatggatgattcacgttgagaatacaatgtaccgatgttaagcaccgtccctttctgtttaaggcagtgcctcgtattcatgtaataagggagaaatgtgtaatacagacaagttccatgaggattcgtttgaaagatgcggatatgtgatcatgtgtataatngtttactgacaaaggagacctanggtctcgtgtcagaggaactatattctaacctcgagttaataaccaacctgtggatggaaaagaaaacaattaact

SEQ ID NO: 71235 - DNA, 448 bp, Oryza sativa
  unsure (1)..(448): unsure at all n locations
agcttgcgtgttctatccaatctttcttctttcgaagggtgcttgtagagcgatagttgcttgtaaactgccatccgattcgtcatcctggctgttgacctgtgttattccagtgatctatgaaacgatcgatctcgtaaaacttaagtttctttctttctttctctgtttgcttagttctgaaattacttgctcctgcatgctccatttcttagaggagtgcaattgcagcactactatgcaaaaagcttgtgccctcttttggagctgttctcaacaattggtcccatcatccttgtcatactgatccttangagctcatatccaagttgtccacttgtggttttggatgatctcatcagaatcggctactaattagtactccaggtttgacttggtctggcctatgtatatctctggtacggactgtttctattgggaacaagtc

SEQ ID NO: 71236 - DNA, 457 bp, Oryza sativa
  unsure (1)..(457): unsure at all n locations
tgaccaaagaanactaatacgaaaaactttgtttccgtcatatgtcttgccttacatgtttgtaatcagcacctaanaaatacatataagtagttacagagcttcaatggttttcttgggatcatgtaagttgatgtgcccatagctaggtcatgacagctgagttactagttgtgcacaatgaaatctagaaacttgttgaaagatgacagatttttactagatgatgcatgtgactcaagaaaaacgaatctgactagttgacaatatataactactaaatgacaatgttattgaactagtatctttcatgaagggttacttggtccanaaagtttagctagatgaactttacaagtaccaaatcatggcttgataacatgccacccatgttaagttgaatatgttcagttaatatacacatcanaccaatgaagtacagataacttccatgcgc

SEQ ID NO: 71237 - DNA, 433 bp, Oryza sativa
agcttgtagtattagtaggagtagatagctcttcacttccaaatctaaaaaaagacctgcaagggcagcagcatgcaggagaaggagaagcatgagccaaattattggtgacatgaacactgctgctgatgctgctgctcagagacaaagccatggcagggcagcagattgttccttccttccttccttccacaaaagcatatggtaaagattaaaaaaattgagataagtagagtaaaggtaatctaatccactgtgcactaatcagttcttgcaattatcagttgtgcctgcccatccatatgccaaagccatatactactaggtttatagaatgaaagaaaagatctcctagctactcctatagtaaccacacgacatatacttctacatatgcaaagatatctaaagcatgcagtaaacaggatatatg

SEQ ID NO: 71238 - DNA, 486 bp, Oryza sativa
  unsure (1)..(486): unsure at all n locations
ngngagctatgtgtgcaggagcaaattgatgagatgtgagcagtgcgaactgaggcgacactcgagagtgctctattagctactgcatgtttgagctttcacactagcccagcaagatcaaggagagagagcaagggaagagagggaaagatggagaagaagcaaagtgtcccaaagggaaactatatgtaatctttcctggttcaaactgaaaatattgtgccgctactagtccaagttgccacactggtaaaaataaatggccctatatgcaatttactcaaaaatctgtaatgccccttagtaagtgatatgtggttgggagtgagagaacggttacagataggatgggccgaaatttgaataggaggtaacggatcagacaaatagtactcgagtgacaatccttgtgggacaaactctgactcatatgattagcttcatcgtatcgcctacacctgattataagctgtaacatttattggt

SEQ ID NO: 71239 - DNA, 282 bp, Oryza sativa
gcttagagcttattttttatataatggaatataacatcccgacctttgctcaaaagagctatagcccattattataatctagcacttcaaacaagtattgtcccaaaataaaagcaaccagcgcataaagataaaaataaccaggtaaagatacggagaacacattattaaagtatatttgtgaatctccattcataattggcaaaaaacttgataaccatcgactcaagctttctgcatgcaacttttaaaaactctcttgattcattctacttttgaact

SEQ ID NO: 71240 - DNA, 453 bp, Oryza sativa
  unsure (1)..(453): unsure at all n locations
ctatctgtattccaggagttcataagagctcggatataatccatgttccattaatttataatacgaagganaatccatgttctatctttatcaaacggaagtttaatggcattataaaccaatgttccattattaaattataatacaaaagcatgttgcatgtgtatgcaggctttacagcttgaaagggcacaacgagatcctgcagagaagaataaggggctcgttggtttacacgaacttattccaagtccctgtcacatcggatgtttggacactaatttggagtattaaacatacaataattataagacccattccataagcttggactaattcgcgagacgaatcttttgagtctaattacgccatgaatttgacaatgtgatgctacagtaaacttttgataattatggattaattaggcttacaaanatacggtgagaaagggtg

SEQ ID NO: 71241 - DNA, 293 bp, Oryza sativa
  unsure (1)..(293): unsure at all n locations
agcttaggcttatgttttatattcctacatnngcatatacaagtcactgtagtgcaaggctaacttgggggcaaatcatcttgtgctaacttaacccccgctcgagtttgctttgtgctcttgctcttttccagtcatgaagagatggctctcctgtcntgtcaagggatccggctcagaatctagccgncatcaagatgagtcaagtgatcggtcatccgccgacgtgtcgatggaggatacngacgcagtaccgcaactctagagaattcaataagtccaaaatcatgttt

SEQ ID NO: 71242 - DNA, 457 bp, Oryza sativa
  unsure (1)..(457): unsure at all n locations
cagaacacaattgcaacacttattactgtggcgtggtaacactgatgacgtgttatgtataacacaatgtggcagtactgccacgccaatatacatgtggcgtggcanaattaataggcaacgccagctagcttggtgtggccaaaaggttcacatttgaaaataaaattttagatgggttagtattaaaatattatattaaaaaggtataaaatataaaaaaattcctcagggtcacagacacactgactnttacataacatctnttggcgttctcccttcttttcatattataagatgttntgacttttttttcctagtcaatctttaagtttaccaagttctttacatataaaaattgaagatgttacaccanaatttggacatcatcttgagttggtcaatgcacctatgtcaatcgacgtgactctagaaaactattatacacccttccagc

SEQ ID NO: 71243 - DNA, 424 bp, Oryza sativa
  unsure (1)..(424): unsure at all n locations
agctntaaattttatattatatntgagttcaaaggaaattcatggaattgtttaaatttgggacaaagattgaatgaactcaaaaagatctggagattgtgttagcgcattttgcagtcaacacggatttatctaattaaagatttattatattaacatgtcaaccattttgatctaaaagagctcttgactaagatgggtttagaaaagatcaaaaccgactagcagagacgatttaaagattaaactgacctttaagctaatttagatcggttcggagataaccacctatctcgtgagcgaattggaagttaataaaactacaaatgatatcgttctcttgtagagaagatggatgatttatgaccaaatngataaagctggatgaactagttattaggtatatgttaaagtagaaaatatg

SEQ ID NO: 71244 - DNA, 333 bp, Oryza sativa
cttcgcaatccgtcggttgttcgcgattataaatatatcctcgagtggaaacgatgtgaccaccctgaccgagtgactttgataatagtgagattatttcctaacggtaattaagacaccatataataacctttgaacctgaggataccttatctgggagtcggctaaaaccccgcttacaaaatagattggtcgttggactttttgaatatggccttcctcttcacgctcgacaaccaggaccgtactcacaacctgtgaggtcgccgacatatataacagtagcggctcttgtggatgtggcgaggcccaaactgggggagtggggagaaa

SEQ ID NO: 71245 - DNA, 396 bp, Oryza sativa
  unsure (1)..(396): unsure at all n locations
agcttgaaggacatgaggaacttactgtgctaatgaagcaaaacatacaagaccatgagagggttcttagtgtatcgactgttgatgctgatctaccgtccttgtaagaattaaaattctggtgcttactcttctggtctttcacagttcatttcattgtcatcttaaagttgcagttatatgttactgaaactggatctggatatcttgcaaattacaatgccatttaaactctttatctcttaaggggaagatagtttttttttttgagaaaaatgtgcattcatctgaaaatagtatagaatcaaccgatgaataattntcccatcatcaatatataagtctactttcatatatttaatgatatttatcaattgatttcagtatcaacaagaa

SEQ ID NO: 71246 - DNA, 485 bp, Oryza sativa
  unsure (1)..(485): unsure at all n locations
tattgtacactttactaggaattcaatcaccaaacacacacatgctatctattatatcttggcttccatggaacatctaactaaccataaagcatgcattcttcacatgccttattacattgtaccaatctcatttttatatgatgacctggatagctaactagcttgcacatcaggaccaaccatttatttatttatatttattanggaagatcgtatatagtggacaaagcctttactatgtattagagtataccccaagtccatgtactgctagtatttgtccttcaaacctacgtactattgcttatctacggcatgcttcactcacctttattcctggctnntttaaaaaaaatttgccangactaccaatttagctagctcatgttntcccattttcagatnatactgtagttaatatacagggtatggtacattagttggagaatatgtgaacnactgatcgatctcactaccgactg

SEQ ID NO: 71247 - DNA, 243 bp, Oryza sativa
gagcttggagctgctcctgttatgcctaaaccccttctgccattggttgcgacatctgaccaagaggcggggggcctacttgggctctaccaaccgaacttgtggctgtacaagaaagggccggtgtactgttgcgaccgaactctgtcccgcgcaatacgcttgtgcttgcacaacttgtgaccgaaaggcttgaattggcgcttgcaagtagaccttgggtgggatgttcgccgaatattt

SEQ ID NO: 71248 - DNA, 487 bp, Oryza sativa
  unsure (1)..(487): unsure at all n locations
tcctccatgttggcggctgttaaacaccgattctataccaccttcatctgcataaagttcagacaataaaacatccaacatagtgataggtgcttaatgtcacatattccacaagtgttggtgtatatttgtatgcaggtgtcaaaccccgaagttggagggaaatctagactaaagtgaggggaaaanttatctatacaaggatgggttgtgaacttcatcaaaatatcaaagacttagcccaaaacttcgagaaatggattaaggaggacaaggggaggagatgggccgaaggccatgccaggtgggcccagcacaggtttgcccgaaccccttggttcggnccaaccaaaatctcagccattcaagctggggtttggcgtggacagtcctgatcatctcctgatgaatggtgcggngcattttcgacaattcgcattgtgtaaccatcatacctacctctatataaggagcttcacttcttcac

SEQ ID NO: 71249 - DNA, 429 bp, Oryza sativa
  unsure (1)..(429): unsure at all n locations
ttcttaacgtttcctgatactttctttccatcctcaagttcaacagccttgtcaagaacagcctccaacccctgcanaatgatttttntggatcagatagaactaatagaatacatataaattagtgtgaaatgtcctgatagtaacattaaacaataagcaaagcaatttcactaccttaatatcagctcctcctgcaagactctgaagcttctcaacagatgctggagatgcttctgtagctcgattcaatgatagcgcatctccaagagtaattntttcatcagctgggttaccagtggatacttcaccattctctgattcctctgtgctagatgatggttcttctttcattgcagagctggcaggtggtacagaaacctgacaaaaaaggcaaggcacacaccctcgtccttcagtanatcatct

SEQ ID NO: 71250 - DNA, 411 bp, Oryza sativa
  unsure (1)..(411): unsure at all n locations
cgagtaactgcggtataaaaggattttaaggtattgggcacttgatcacgcgcactctggcctaagcgaanagtgcctaagtccctaaaagaacgtgacaggccacacctgataatatgggctgcagacatattaggcctatgccaaaaaatatgccttcgacaccctttaaaggatgacgcatgtaacatgctcccgagtaataaatcttccgggtaatatagaccaagtgtagctcatatgaatagcttctgatctgaatgattatcccttatgggatactccaaaataaatataataattgaatcccgactggcgcanngtattcggtgatagcccttacggggaataataattggtccagtctttgagcatagaaaatagactcatgactatgaatccatgtggaat

SEQ ID NO: 71251 - DNA, 408 bp, Oryza sativa
  unsure (1)..(408): unsure at all n locations
ttcttgcttttatcggttataggaggtggcggtggtggttgctattgggtgggagagaanggagaaacnggaaaaaatgggttcgccggtgggaagcatagtcattggcgcgagggattggctaatagagcttccgtgagggcgactggctggtggtgatgatggccggacattgtggggagagagagagcagagcttcaagctctgttgatgtggggataaagatgggacctcgccatctatttataggcggtgagaggtcggtttggaggacgaaggcaagaggaacacgacttgttgaattaatggatgggccttacccactggaagataattcttcgtatatcacaaaacccacctatgggatgcatgcatgtgagttaataccacttgctatcttagaagggg

SEQ ID NO: 71252 - DNA, 488 bp, Oryza sativa
  unsure (1)..(488): unsure at all n locations
ngagctntcttcaccagatgaattgattgggtgagttctctcgtacatatatatcctttttgccaacacattctatttcggttgtattcttccattaagctcttaccatgagaaattatcactattgtcaagcatcccttttgagatcttttntccattatgaaacttgtcctgttgatgcattaagctcatcacatccaacgatccatattttaacatcctatgaaggcgatactacgatatttggaccaaactggtctgaacaaactgctatttcagtgttgaatgccaaaaagacatcctgcgattgtttcatgttttatcttgaaaatctacgatatttggagtctttaagttagttatcaacttatcatccttgtctgtggcataggtggacgtatgcagatccatcttgngcccgtattgcagcacttgttcctgttgtggtatcttctgctgaagatggtgatgaagtagcatacaaaata

SEQ ID NO: 71253 - DNA, 434 bp, Oryza sativa
  unsure (1)..(434): unsure at all n locations
tatttaacattttattatgcccatcatattcactactacctccgtcccataaaaattatatttctagctaatttaggacaaaataggaggattggaaaatgaccacaataaccttatttaataaacgcactgcatgcacacattccatatatacaaatgattaaaaggaagtttgagagaattaacccatataattagcatacttaataaaattacaagcattagcagcccaaattatgtgggatggaaggaaacttatatagatgaatcaattagttgggccccacatggctagaaatacnaattttgtgggacaaaaccttggagctagaaatgcaatntttatgggactgaaggagtaacaagatgccacatcatcatccactaacaatcatcacatttagacatcatacaaatatgctatatctttatag

SEQ ID NO: 71254 - DNA, 415 bp, Oryza sativa
  unsure (1)..(415): unsure at all n locations
agcttgtattgcactttgacgtgactgatattgtatgagggtttgaaagcctgcaccaccaaaaaagatcaccatagcaaacaagtcttttaattcagcatgtagtaaacatatcgtcattccagcaaaaaaaaatgcactaaaaacatggctgtgaatattataaataatttaattttttttgaacgactatgcagttgagagaactatgaaatacgcctcataatctgcatgctatctgngcaggaaaacactgcattaaatgcaagaatagagtgagaatgagaggtagaaagaatctgaccggctgactnttgaaatgtgactatcttctccacaaatccatagggagaaaacactcgatgaagcacttcaatggttatagggtaaagcatatgatgaatggttactaaca

SEQ ID NO: 71255 - DNA, 387 bp, Oryza sativa
  unsure (1)..(387): unsure at all n locations
ctttgacatgtgtggctgatactggtataatcgatgaggcacctccggttgtgtgtacaagatcagaattcggcgctacctttgttctgcctaacccagcggtaaaaagttaaaaaaccgaactgacctgctataactgaacattgattcggttcggtaatggttggctaattcaggttgattcaagtgcttggcacgagttnttgtctgaaatagcaaatggctccatgcggtggatggtgcanatgtgtttttgtctgacgccgacgtcgtttactcttttgccattccactttcttaactaattacctttcattaattcaggatgtatgtatgcatgcttagcagtaatctgactggtactactaccagtctatcgattagctt

SEQ ID NO: 71256 - DNA, 424 bp, Oryza sativa
  unsure (1)..(424): unsure at all n locations
agcttatctgattgccgagttgntatattagactacacgttacttcaatttactctanaaatcccatgtttaaactctatggtctttaaatgttgaaacaactgtaaggagagcagttaggatgacactaattgtttgcctgcaagtacagtgtgatgactgtgatggtgcttttctcaacctcactctcaatataactagtaaaattacgcgcaaaaactgtgaagagctcatcgagtattgaatccccaaaatggcttgctataanggactctattgctgcccttanggtcgcagacatgctctgtccagtggcctgagtggcagcagtgccctctattggctccaagtcattcatggggtttccatccatctccaagagttggatgtcacttatatcaagtaggttgttctgccacaccaa

SEQ ID NO: 71257 - DNA, 490 bp, Oryza sativa
  unsure (1)..(490): unsure at all n locations
cgtggtcaaaataattgtgcanaaagaggttccattccttgatattatggaaatacgtgcctttaataaatctaggcatttggtgtggtaccttcaagctgaggcactataacaaatcatggatattgcaccanatagacacccaggattggacaacattgccatgaaaagttgctattggtctgaagacagtagaagttatgttgccttcacaataaagaccgtagtacaagccactcaccaaaagaaagtgctggtactcttgaatatctcaactatcaaagaattaatctacatacgaagctagcaacagataagctaattagcatcagtagtacanatttactaatctgctaccttacgacagctattctttctctatcagtacacactaagctatgcccagctgtcttctttagctccatctctatcatgactcctcttatcctctcagcatctgtcagcattccagcttcaaagtacatgtttg

SEQ ID NO: 71258 - DNA, 413 bp, Oryza sativa
  unsure (1)..(413): unsure at all n locations
agcttatcatatacggacggctctcgtcgagagctggtagacnggcgccggtaatcaagggcggccggtcctttgcgtgcaccgacacgtgcatgcatctcatgtgtgtagcaccacatgcatgcacagatacgcgtgcgcgtgtggcggttgcaccgtcactttcgctgctacacttggccgcctccatgctgggtctcgatcgtcatcatcattcattcattcacacccataccgatacggtcatatgtatacncggtatatctctctctacatcacttgtaactagtactctctcttttttatattataatcgttaatcatttttaataaaattataagtttgataaattatagaaaattaacatattaaaaattaaatagttataaattacgtgatatatctataaata

SEQ ID NO: 71259 - DNA, 454 bp, Oryza sativa
ctaagaacggatgacctcccggtgcctctcaagcctacgaatgtatcaccaatgaacttacaggcctacatctctgatgttttcaagctcgtagcaaagtgcctttacaactcatcttttatatggataacatggtggtaccatcttttatatggaaaaaaattgtgcacctgagctgcataattaatcaagtcttcagctattcagctcttgaatagaatgcaattacttgaaccggacgcttgattgttgaagtaatattgatggaatgaattgttattcatctctccttctggcaagtgaacgaacagaatcaaagagaattagttcgacaagcacgtgccatgctaccacttttggtgagtatagccattccagaccaggaagtagctagatggctatgctaactcagcattcttcacgacgatcacgatagacactgaatactgatatc

SEQ ID NO: 71260 - DNA, 363 bp, Oryza sativa
  unsure (1)..(363): unsure at all n locations
gattatggtcttagcatacattgcaatgccacacattcttccaatagacaagttcccattattaccagttctcctgatggggcctaagaaccccacggaaacagtgaaacactatggtcctgctcctggagtgcacacatctgcaccaaggcttacgtgcgctcaaagggaacgaaagttggagaatgcgataggaaggaggaacaacacaagcttctagggctaaagtaatcgcctgctattactgtggtagcactgaaagggctacataactctttgttggaattcatagatcttgtgttgttattactcaagtgccangatcagctcaactttgttcgaatgttatgcactttgaatcac

SEQ ID NO: 71261 - DNA, 343 bp, Oryza sativa
aactcagcttaacgccttggcggaccaatgattttttacattatttcacatctcatatcgtgctaaggaaaaaaaacccctggcgtaagtgcttggtgcactccagatgccaataccagcggaagggtctcaactgtcctagcacctctgagaactgattatgcttccgatgaggacaagcctctcatattccctttaaccgatgacatgaatatctaccagttaatacctacaatctcacagccaatctgaatattactaaatcagctggatgtgcttcatactgcactgatgaaaatagacaactgacatttgacacaagtactgaccactgttttaccaa

SEQ ID NO: 71262 - DNA, 286 bp, Oryza sativa
agctcatcatcatgtgtatctatgaatgttcacgccgatggttgatagcgaagacaaggatgctcccggccgtggagggcgcaagcgtgtcaccagcaactgttacagacgtgaagacgctactggccgccagccgctccttctcacgccaagccgatgtttgcgccggacacgccatctcgtaccgtgccgacattcactaccgctggccacgccaaccaaatgctgacatctgccacgccttccctgctagccgcccgtggtcgtgaaaccaccgtgctctgca

SEQ ID NO: 71263 - DNA, 357 bp, Oryza sativa
  unsure (1)..(357): unsure at all n locations
tctcccgcttcagccaatggccgaacgggcagtggcgcacattctctcttctatcgctagcggngaccacagtgagcagaacccgcgttgtcgagctcgtactccaccgcccccctctcgccgaagttctatgccggaggaggcgctcgatggggttcaaagatcctcaacttctccgcccactagcgatggagaaagactgcgaaaccgggagcgttccctcctcctctacggcgatggcagcacgcccctaggcgcgctccaagctgcgggcgcgctcttgcgtcacccgcccgttgtccccgatccaaagactccatcccgattgtggctggatgacgtggccgacttggtatg

SEQ ID NO: 71264 - DNA, 385 bp, Oryza sativa
  unsure (1)..(385): unsure at all n locations
agctngcacgtatgccttctagctcctcatggcaacattctcccaatgtgtttagcgctggtcatacttcaccaacctaattcctcttggatgcgactaatcatctggtgtgctgtcgcctcctttgctctgaagattcttgcatttcgttccttccagatttcccgagcaatgagcaagaagagagttctgagtcctttctattttgttgcttccgggtcgcttgttccttgtgtccaccaatttaagaggtntctacttatgttccatttcgggatgatgtgcccttggtgtagccatgtgagaatcccaaaccagatgtgctntgagaccggcattcaaacagaagatggtcgactgtttcgagatttcgaaagcatagctg

SEQ ID NO: 71265 - DNA, 246 bp, Oryza sativa
  unsure (1)..(246): unsure at all n locations
tcctccctcctcgcggcatggcggcgccgntcgtctactgcctgcccaccgacgactgcaccagttcgtccagcctcccnccacctctncgcatctnctcctagctcgatcggcttgctagctcctcggccatgtggtctaatggcgatatctcggtttgttcgcaggtgagagcgctctcctgagggcggccttcgacgggaacctcggacgcctcaaaggtagggttgcttcctctcctcctcc

SEQ ID NO: 71266 - DNA, 417 bp, Oryza sativa
  unsure (1)..(417): unsure at all n locations
agctttggaatgtgtagttttttttcatcgagtaattcatccacattttcaaaagcgcggtgcttctcttctttgaactggattatcgagttagcttgtgaacttgtcagaatcttgtatacgttccaatcatgggacacagatctatgtgaaatcgtaaattctgaatgtacacatttccaagctatctcgacattntcactttgaaatcttaaaccaaatcatttgaccaacttcacaaaattctacagaaaagataggagaatctgcacgccttcatagatgggccgatagcccatctgtattgcagcccactacaccggaaaatagaaagactagagaaaaaaagaatggaaggcaacaccgcctatccctcattttcaaggcggaacgcgcgtcgacgccacgcggaccatt

SEQ ID NO: 71267 - DNA, 445 bp, Oryza sativa
  unsure (1)..(445): unsure at all n locations
tctaggttntcagtttatgacagatcatgttcacaagggtttaaaattattcaactaaaaatcccttcagaaactattgaaaccagccagctcctacttnctggtaatgccatattggacaagtgctttgtgcatcttgtacaagacttcctaaaactgtccacaattaggataatggtttaatggtaaacagatgctagtgattacgagagaaggaaaataacacaacctaatgataataataataataagttagccagtaaacaactcaatactcaccagtttggtgcacaccagatcaagctgggattggaacaaaaaaaaggacgtgggaagtatcttcttttggccatcacattatataattgtcagcttatatgaaccacaatattttctttacattggatgtgcttatgtctcttcgatntttatgaaaaatatgcat

SEQ ID NO: 71268 - DNA, 454 bp, Oryza sativa
  unsure (1)..(454): unsure at all n locations
agcttgcctaatgttaggcgaacaaatttagcaccacactttggctagcaatctataacattgccatacttttctgagacaatgacatgtgggaccaaagtgctagaaaaagaatcttgccataagtatggcaatgaaccaaacgcctgactaacttagtcaaagctgcctaacttgagatgtggcaaagtgtggcaacatgtggtcacgaaccaaacaacccttagtgcttcactctcttactccaacgatactcaaatttagggaaattaggtaagcttcaacccctcgcttctcttgccactgtcactgtcataccctgtcacctggcctatccgggcggcctnctgcccttctcttcacctctctttactcccatcactaacaccggcccattacctgtcaccgaccccgtggctctagtggcggtggcacgccacccaccactgatcca

SEQ ID NO: 71269 - DNA, 474 bp, Oryza sativa
  unsure (1)..(474): unsure at all n locations
nntgaaatagaaagtatcctgttntcgataggtatcagtggtgcataattgcagataagataaccatgctcatgtggattgtgcagcattagagacattaaagatctccagtcctctggtatttggtccatactgtaattcctgaatacagtttgacggatcacattacgaagatcaagataattttgacaaaccaattaatccgtcctttntgtcctggtgacaagccggaatcttatgtgtccagtatgggcaacccagatattagaatcaccaaatcttgacaagcaatacccctcttcatgttgattgaataactccacagccattgatctgacacaacacttaatcctctccttaacaatccaaacattgagtttcttgtttctcccaacaaactacaccgagtgctgtctatatattccatcgctgatgtcgtgaattctctgacagagataanatacttgtgatctg

SEQ ID NO: 71270 - DNA, 253 bp, Oryza sativa
  unsure (1)..(253): unsure at all n locations
agctttctcttgtcaacataccacccatccacttgccttgactgtcctgcacaccgcagatagctgcacgaacatcacatgaattctcanggaagtatgttacaggtctattcggtgggtcaagaagcttcatgatangaagaggaccaccaacataaggaggaacatagctgagccatttcaagaatgcagaaacaccttcaaggtcatctgacacagtcagatggacgacaccatttgtagccatgatttt

SEQ ID NO: 71271 - DNA, 460 bp, Oryza sativa
  unsure (1)..(460): unsure at all n locations
tgaacaagctntccctcgccctcgccagctacctcattctcttnctcgccgnncgggncaccggcggcaccacacgatgcacgttcgagatcgtcgtcaagaccgactgccggaggaacgccggcaccgacgcccgcgtctcgctgcatgtgcgcgccggcaggggcccgacgctgacggtcgccaacctggagtcgtggggccagatggccgccggccacgactacttcgagaaggggaacctcgaccggttcaggggcgccggcgactgcatgccgtcggagccctgcaacatggtgctcacctccgacggctctgggaacaagcccgggtggtacgtgagctacgtgatggtgacgcagctcgggcatgggagactcccgtcgatgacgcaccggtgggcggtggatcagtggctggccatcgacgaggcgccgcacatgctcaccgccgagcggag

SEQ ID NO: 71272 - DNA, 454 bp, Oryza sativa
  unsure (1)..(454): unsure at all n locations
agcttgggcttaagtctgccgcaaagacttatggtatcttagagtttcttagtgataagagtcgtgtccgacaaggacatattttgtatctcggatataaatatgactcgaagccatgtaatcaaacaacacacgttcaatatcaatcttggcgcattgccaccctttntactttcgtttcatcccgacgagttcttgctttcgggttgagctgcatcggtttcgatcaactagaggtaaatttgtcatggcagcttgcgttctcgggattagtgcttccatcattataatactctaatcttgttcatgtaagttgtcaagttatcatatattctatgtaatctctagcaatattagtatttaaccctcaatcggctaacatctcgtaatgggaggcggccaattaggttaaataccaacgttgacttagatatatanggtgtctaccactcta

SEQ ID NO: 71273 - DNA, 459 bp, Oryza sativa
  unsure (1)..(459): unsure at all n locations
tcagcttgacagaaaccnaggatattggattcccttccgtattcatttcttaagagaaatggcaatattntctattagtttttttcctctttctttttaatacaaaacgaatggcgaaggaagggatgaaaaataataaatttacctagatggataatctgttatctaacaggtccaattactttcttatttttgtaacttgtttcctatgtattcagcacaataggatgccattcangacaaaaccttgatgtacgtacttagccagggacattatntgtatggngaaannatacnanttactctnccgaactatcgcggtcgttcgaattatacncttaatctcaaaaatcagacattcttaccctccactatgcaacctgactaattcctcctcgacccatccatacggttctagttactagaaacacctgtcgtacatctctattatttataata

SEQ ID NO: 71274 - DNA, 472 bp, Oryza sativa
  unsure (1)..(472): unsure at all n locations
tgccaacagcaatcgggttcgctntcttccttaggacaagatgaccaggcatcagttccgtcggtcgaacttttttgttgtaagttgccgaagtgctcgtggcatacttgcgcatgtgctcgagtgcttcgactcttacccnctccaagagttcgagtgacacttcgcgcccctcttcgcccccagagaacatcacccttggtgagttagcccctagctctgctggggtcattgcctcatcgccataaagaagcatgaacgggctaaacttggtcggtcttgtggtggtcgtccgaagggcccagagaaccgatagcatttcctctggccatntgcccttcgctgccccctcgagccttttctttagtgcttctaggatcttgccatttgtacgttcggccgccccatttgactgtgggtgcgcgaccgacgcgaacctgacttccaggttaagtccttcgcatatntctct

SEQ ID NO: 71275 - DNA, 452 bp, Oryza sativa
  unsure (1)..(452): unsure at all n locations
agcttagcttttggtgatgcctcattaacaagttgaagtgatgatgatngcaggcccagcccacataggaggaggtccagacttttcacagtgtgaactgaagtgatgatgattgcaggcccagcccanatagaaggaagaccagaaaagtctggactccggaagaaagcggcgcggcggggcggggcttcgcttctttccgttgttcgtcccanatcccaatcagattccgagggagcgcagtcgcagtagcaggccaacgatcgagtcgagtggagcacaaggaaaggaacgcatcggcatcgcctccaaaccctccctccatcttcttgatagcggaacttcttcttcttcttcttcttcttccttggatgaatcgagaattggagatccncacttgcgagtactcttgcctagctgccgtanacttggaattggttggtaccgatatc

SEQ ID NO: 71276 - DNA, 475 bp, Oryza sativa
  unsure (1)..(475): unsure at all n locations
cggatttatttgccatccttgctcaccgcanacaagacaacactctaagagcccactanggccttgtcaataacatctcttggctagatgaaaaaacaaccaaattgcccaacttatactttntgtctggaacaaatggcacattacttgacgacactatagtataacaccagaagaaaattagaacagatcttacacagtacaacagtggtatggcagcactatgccggcacacgtgtaaagcagaagaatattggcaggtgagagttgttttcggtatcaatgcacctgctacaaaccagatcccttcttgcattctgctactgagactgaagagtgttataataattgggctatgcccaatttataatattaaatctcaaacgtccataataaatgttgaggataataataccacctcaggaattaagcgagaaatatctcaacctaaatagggagttattagaggctccct

SEQ ID NO: 71277 - DNA, 447 bp, Oryza sativa
  unsure (1)..(447): unsure at all n locations
agcttcatcataatctatatatntattccatgacgatccacccattaattttgcatctattgtttgggctactatctcttcaaaagatatgtacactccatgaagctttccgtcaaaaacaacatatatgggtttttgctgtattacttcattattttctgatgttggcattatatcattcattagatggaaatattcagcacgactgtttaatattgatagcatatagcctttntcttccctcttattattgtattgataccaganattatctaaaatgcattcttggacttcatctaatattatgtgggttntggcttagacttataggtattcggtgggaatactttgagcttattgtcttctgcaaacgtgaagaactcaactncattataattcatggacttcttcattccttgcaaatatgcaatcgcgagagtagatcag

SEQ ID NO: 71278 - DNA, 468 bp, Oryza sativa
  unsure (1)..(468): unsure at all n locations
ntggcgttatatcgagcaaatccgatgtctatagctntggaatgctgctgctggagatactggaggaagaaggaacttagacatgcatgcagagaactcaagtcaggcctactacccgtcgtgggtgtatgaccggctaaccgagcaacaggtgagtgctggtgagatatctgatgctactgccgctgacatgcatgaattggagtggaagctgtacatcatagggctacattgcatccagatgaagtctcacgatcggccgacaatgagcgaggtcatagagatgcttgaaggtggcgttgttggcctgcagatgcctccaagaacattcttctgtgatgatgaatccatgtcacctatgatggattcttaccaattctcctctgggctaactgaaatcttagaggaggacgagtgaacttgtgcatgttttgatgccaaatcagctaagctagtagctacagtagc

SEQ ID NO: 71279 - DNA, 437 bp, Oryza sativa
agcttatgaacaatgccatgtatctgaactccgagttgccagtcccccgttttgccagacaaagcaaggagcgaaacaaatgagcgaactgaaggcatcttgccatgccaaagcatctgtttcaagtaataaactgcttccttcatatgtcctctgtcagcgtacattgataaaatggagttccatgagatgacatcctcagacaggatatcattcagtgccttcactgtgtccactgaatctccaattgcagagtaaagatctacaagagaaattgacaggaaaatgttggatggaatccacccagccttgagaacaactccatggagttgcctgccttgttctagccattcaccattttgatagcaccctttcatggcataacaataggataagccattcagcttcaaatactgccgtctcatatcaagaaagca

SEQ ID NO: 71280 - DNA, 481 bp, Oryza sativa
  unsure (1)..(481): unsure at all n locations
tagctatgactatctcccttntcatctacagcattgttttacatattgtgctctgttccctgaagattacagatttgaaagtgacgagatgattcacttgtggataggactagacatattacaatcgcggaatcaaaacaaaaaagtcgaagagataggactgagctatttgaatgatttggttaattatggattttttagaaaagacatgaacaaaaatgggtctccgtactatacaatgcatgacctactacatgagttagcactaaaggtttcatcatatgaatatcttgctataagtagttctagtgtgagaagtgtgcaaattccaccatctgtacgacatttgtctattgtgatagacgacacggatgtaaatcatagagtgactnnttgaaatgttaagaaagatttagcactctacataagagactagatgttgaaaactacagtctttgatgcctattgggacatatcatgg

SEQ ID NO: 71281 - DNA, 459 bp, Oryza sativa
agcttaaggtggtgaccatgtctggcgtgggcgcgcagcgcgttgcggccatggagacgctgccgcgggagacgttctcgccgcgcttacgttgcggcggcggcgccgccgccgccgtggcgtcagccattgttggtagaagctaccttggtggtaaatgagctcgtggccattgcatgaatgctagctagactaattgttaattcatggcgaattggcgatagaatgttgtgcagtactaagcaggtaatcttggctttgtgatatgcatggtttgtgtctgaaccttcacggtaattgcatttttccttagtaacatgagacaatctgagttctgaatgattccaattagaagatttatgacctgttcgatgctttcgttagctgattgcttctgcatcccttcaaaacctgattatttaatcaatgtcgctgtacgccatatgtgtgagacacatg

SEQ ID NO: 71282 - DNA, 388 bp, Oryza sativa
tatcattcttgttgtttcactctaaattagcctctattctcattatacaaagagatatggcctatccgtgcctaactaaccgggcttacagagataggtaccaattttgcattggagatacttataaaatcataactagaaagattcatgcccgattagcattgaatattcccatgactccactcaaatgttgcatcggcccttgcaacttctgccgatgtatccgcttgaacaatttcaataccatcgctagcccattgaattaaatattgatgcaacgtagaaggcacacaacaattggcatggatccaacaacgacccaagataacattgtaattatcttgcacatcgacgataaagaaagcgggtggcaacgtcttgttctcta

SEQ ID NO: 71283 - DNA, 336 bp, Oryza sativa
  unsure (1)..(336): unsure at all n locations
agcttagccgaatctaaagtcttggactgagattatagtacaattccacacaggcaaacaggaaaaaggaacaaaatgaaagcgcggaatggatggtacactcacttcttccaggaatcgttgagcgcgtgcacctccccctcgacgcgatccaacgcctgaaacagaaattgcaatcactcacaaaccanaacgactagaaattacaaatttacaatcactcacaaaccanaaacgactggctcacgatgcggtgggtagcaacgcgccagtagcgtagcgagcgcataccttgtgggcatggagggaggcgtctaggaaatggcggttgatggt

SEQ ID NO: 71284 - DNA, 489 bp, Oryza sativa
  unsure (1)..(489): unsure at all n locations
tattgtagccatcggagagtgacaccaagaagcgtataaagattgaaataagtccttgccacaagaatcaaccaatgttttcttaagaagagaacgcagctcagcaagttcggttgatgtgagcaaaattaaattcaaggcctacaagaaatttaacagttacggaatgtctacagttaaattaggcagtagtatagtgttgcaacagtgggggatacctgaaccatggtggatgcaaattcaaggtcaccttctgtctcaagaatagtagagaactctcgataaactttttcagcacccaaaagaatacaaagtcgacgaactatcaatgcgccacgtctgtataagtatgtcataaaccattgtttggaagcaatttatgtaatagtgaactgtgtnaccctaanagtaggactaataacanagaaacatatactatgtaatcaacttttgagtggngaaatgtgcatacttctccagtagaacatg

SEQ ID NO: 71285 - DNA, 458 bp, Oryza sativa
  unsure (1)..(458): unsure at all n locations
agctngcaccaacatggccatctcgtatcctcgacgtctgcaaccttgcaaccaatccttccatgattgacttcgggttacttctttcagttgccattggatgtccgtggccgaacgactccataacagactgacattaacactatagacttgtgggtccaatgagaatgagcatgtcaaccagtaccacacttcgggcattctaagattgtccggatttgggtgatacagtgtgcactaactaaagttgctcaagtcaacacccatttcgttcgacataatttccccgttgccataatatactctaaagtttgccattcctaaacaaataaacaattgcattacgtacgactaaganaactataaaaaactttcagatatcatacacacaactaanagaactttcgaaatatatacatttcttcccacggtctaacacanctaaaaaaaaaatcatg

SEQ ID NO: 71286 - DNA, 441 bp, Oryza sativa
  unsure (1)..(441): unsure at all n locations
tggcaggggattatnttgcgaacagtattacattatactatagttgatatagtatgattggtttgcttaagtggtatgttagatgtgagactatgtattcggagtatgaaagagggttcttcaatgtattaggaagatccacaaagtttggtggaaaaaacaaagccggacatgcttntttgtatgcaatatatcagaagcttgtctcttnttttttgtagaaggtacatagtaacgaatttatcagaagcttgcccagaatagtgattttttaatataatctaggagaaaagaatgtcaaaaccaatcccctacctcaagatattgtattaacatcctaaaggactgcagtatgctgatcagctgtggcagacacatggtacaactgccacaggtggtgggaccattttcatgctagatttaacttatttaattttatat

SEQ ID NO: 71287 - DNA, 442 bp, Oryza sativa
  unsure (1)..(442): unsure at all n locations
agcttgcgtagcttctaacttgtgatttgcaaaatcttgttacttttgctgcgttagctacccttcacatactaagcatatggtcttgcgagaaactgaaggaactgccggctcttccgtcccttcgttcactgaaactgaatggctgtgaaaagcttggttgcagtggtcacttcccgtcactcaccgtcttgcatatgagtactgaattttgagaagaggtacttcacaagttgatgaaattacacttatagcttgaagaattgtcaatttcgtctgataccatgaagttaatcaatcttgagccacatagcctgcctttacttatagagctcgangtagtatgccctaacttgcagaattgtgatgcacttgccagcctcagntccctcgagatactatgcgtaaatcgttgtctccccaactcgggtgcctaattcac

SEQ ID NO: 71288 - DNA, 452 bp, Oryza sativa
atgctttatgtattctaatgaactactgtagtgacctacgaaggtgccacggcctgcatcctaaaatgatacataaagaaagggccatgccatcaccaacttttatggattagacttttttccatgatttcaaaacatacttttttacgatgaatctgaggataaggaattgacaatttagcaaaacatgaaatggccgtaaagcagactacaaatatatatatccttcccttgtacagtttaggatatcgcttagtcaggaaaagaagcttgatcaccaccgcttccaggaagctcaagagtaattgatcgatcaaatgtgactcctcacagaaaccacaagagtaagtagcataaacatgtcacatgctaaccaaacgcgtgtagtgagaccagactctagcagagtaagatgaccaatatacagaagtacaaaagacgagatccagagt

SEQ ID NO: 71289 - DNA, 490 bp, Oryza sativa
  unsure (1)..(490): unsure at all n locations
ctcagcttgtcgccgcgccataacagctgatgcgcgccgttgtttttggngactggcgagccaagccatggtgtttgcacggaggaacgtatttaggattgacattaattatcaacgcatatggcgagctcgctacaacacaatgatagtgagagagatcgggctactcggtctggactcttgagtgatgggttcgactgtactctctgatgatgatgagttgaaaaataacagaagtacttaaaaatagaaataaacaacttttagatattatttaactgaaccgataacttttattcttcacagaaaagtggtaacttttagtactagaaagctaagagatataaactttggatgcttaaagtccattttacataaatcagtatgtactgtggtctaaaatatagcaatctttagataagatatgttccatcattcacttataagttattatgtattgagacagagattctctcgtacactagcatat

SEQ ID NO: 71290 - DNA, 426 bp, Oryza sativa
  unsure (1)..(426): unsure at all n locations
agcttattgctatgctgggacctactccctgtattttagataaatatcaattggataacgaaaggtagaatgctcaaaaagatgggagagaatggcagtgtcgaacattcttaccagcaaagtggcaccaaggcccttgtagagccccttgacaccctcgtctctgcagatggcgtaaagagcatgagatatgcccctgtagtaagcagtgttcgtctgcaaacatttgatgaanaggcttcattattagtgaagattacatattaaaaatgcaaagcttcaatggaaaaaggcctacagttcaataatgcccaaagcagagagcataaatgcaatatgccttctaccctgaacgtgaaactgataaagaagggaatcaacaggggattttgagttatctatgtccttcacatggggaatagatgt

SEQ ID NO: 71291 - DNA, 478 bp, Oryza sativa
  unsure (1)..(478): unsure at all n locations
tgtaagccattgccaattatagtcatcccaagatccatgattgttggagagctcagtttcagcacatatgtttcgtcaaaccagaactttgtcatagtgtaatctttacttgacctagatccacgatatagtgtcataatgcaaggcttactagctgctggcaccctcaccgtgccgcaggctggccgcgcattgcccgggctaccggctcccagctgcaatgccccgatcgcctaaccgtcatgtctctatggtgattgcctgctagcctgctaacgactactccctccgtcccaaaaaaaggcaaatcgtgggttcccgtgccaacgtttgactgtccgtcttatatgaaaatnttttataattagtattntcattgttgttagatgataaaacatgattaacactntatgcgtgacttatctttttaaattttttataaatttttcaaataagatggacggtcanacgttggaca

SEQ ID NO: 71292 - DNA, 281 bp, Oryza sativa
agcttgaacttgttgtgtgcacaggacgattcacattatattactgcactttacctcactctagcctatagcgtggaagacaagatctgctctgatcctgtattaatcaaagagagcacgcatgctgatctagttgcgagctcccattactctaactacagacctacagctctgataccatcttgaggcgcatgctccatccaattgaaccctctggctgatacttatgatgagatgtcgtctattcattgtatatttcaacgattgcgaacagcgcacca

SEQ ID NO: 71293 - DNA, 355 bp, Oryza sativa
ctcagcttgctaagatgccgtactgtcagaggacgcactgagctcgtgtcgcttcaccgaatatactaacatactgattcaagtgttgatgacaagacggtctgtcgaacccttctcgcctcagtcgtgaacctgctcaatgcggctaactgtcgcaccgctatccacgttagatgacgcgactacgggtttcgcatactgtggcgatcattgctactatgatatatgtgacatttaggtcgatcagatggtgaccaggattgtataaccgttccgcgccttaattgcaggtggttcactgatgaagttgccgacctggccgtgctatcattcatcatgatgacaccgtcccata

SEQ ID NO: 71294 - DNA, 454 bp, Oryza sativa
  unsure (1)..(454): unsure at all n locations
agctttntgaacaaataattctgcaggatggcaatccatccttactgagacatttgctctttttttttccctccaagagcataaataaaggatatgtgtttatttaacgtgctcagtggtttcttttgtcattggagttagtattaggccactcccaacgggagtttcatccccattaaattgggtgccatgtcagtaattttatgatgtggcatgaaattaataaagtgagagatgaaatgagtttcatctttcaatatagtttgtctcttgtatgtactacctatgaaacaacaaataatgaaaccatacaattgtacgagctattttgatcatcaattaaatgtcttggtgcttatgacacttttgggaacaaanagataacacctttcactgtgaatggcctaaaaattctagctagctgatcggggttctgactctacccatcacgatt

SEQ ID NO: 71295 - DNA, 486 bp, Oryza sativa
  unsure (1)..(486): unsure at all n locations
taagcaagagagcgagccttgtgactagtgtactctaccttgcctaacacagcattctgcagagagagggagagaacctccctttttatacacacaattactagtaaactatccaataatctaacgaataaaattaacccggttagttaattaccttaatcgcccccattgactntagcggcggagtcatgcatgcacagcactgcttcactactgaaaacacgcatgtataatgtatcgatgtatatctctacggcctttgagagagcgacatgaattgtagactangaagacctggatggcctcctagtagtttagctaaaatcagcttaattagtttgcttggagcaggtggtgacttactgactcggccaccctaattccacaaaaaccaaacgcccacttgcattgctcccgtagcaacgcgtgatntgcctcagttntccacttgaaaaaatactccatcagtcccaaaatataagtatt

SEQ ID NO: 71296 - DNA, 256 bp, Oryza sativa
agcttaacacaattgagtagattcttggcacgacgattgcaccatcaatatcacctcattatggtggacacgcacatgatgagtggagacttgtctatctccatacttaacgtgtacactgtgcactgacgaaagaaccatcaatacgttcatgtataatgatgatgggagaggtagactgatctccacagtaactatattcctagtgttatatcaatatatcttgtatcaacacattgtgcgcgtataattgctg

SEQ ID NO: 71297 - DNA, 353 bp, Oryza sativa
ctattacggacctatgaatctcagcttgtgagtgatctatggaattcgtgtctttcttattcttcttgatgcagcagactctgtatgatgaccgatcgtatacgatcgtgcttgcaactctaatttagtgtacctcccccattgggtggatgacctgttcaccgacctgcaagagcatgctcgtgagatatcttatgctgaactctgagacatacttgacttatatcggatgctgttcatacattcgctacattgcatgctatagaggtctcactactcgcctacattgttcgatgcctgtataatgcatgatagtgcaactattggcgcggacacaccgtcgacaacagatc

SEQ ID NO: 71298 - DNA, 446 bp, Oryza sativa
  unsure (1)..(446): unsure at all n locations
agcttgntgttcgctctccccacaatgcaatatttataatgacattgctatgtaataaacatatgggaaattaaattaaaaatatgatggtatggttagtggctatttttaggtggtanggatgctgtgtgggagtaagagatcattgntatagcaaatttatgtgcaaaacagcaaagcaaactttggtggaggttagatggtaaatctggcacattatatgaaaggcgttagtatattcaaaaacaaatgaggagaagcgctaactcggcgttgcggatgcaaacactcctctttaggcttgtcaccatccttgatccttgtctgaatagtgtcactgatgacacctcagtaatgactccaataacatctatcacaaaaagatcatatgagaaaacagagaatgccaatatgaagactggaacaatctatcataagaaacaatg

SEQ ID NO: 71299 - DNA, 474 bp, Oryza sativa
  unsure (1)..(474): unsure at all n locations
tgggcttgtagtagcttattgcaggcttcatcaagctgtcatgaattgcaagagatcggcttnttcagacagctaatagcgaactaaatgaaaatagtggctcagttgtacataaaagcaaatagctaaactcttctccaacagttatctccgaagacagtgacagtttatagccagagatttaaaaccttacttgcaaggcctgcatcgatcatgcatgctcacaaatgcagctagctagcagcactgaataataaagctatagtattagctactactagcagtaagcagcaagttaatgtccaatggacaggacatatatactttctttctcctctttctttctcctctcgatcgatcgatctcctgcatgttaatgtactctctgctcctgcataaacacacacacacacgcaggcacactactgccactgccacacctcgccggctatagctgaaggctgaagctatagc

SEQ ID NO: 71300 - DNA, 446 bp, Oryza sativa
agtcttacttgtttcttgttcgcaaacattctcttcatgcgctccgcaattgggagataccacaccacctttgctgggcctcccctctttgacttacttacttcatcttcactctttgctcgctagtatcttgatgccccacagatagggcagacattcaagtcagcgtattccttgtaatacaaaatgcagtcgttcggacatgcatgaattcttctgacctccaggcccaacggacataatacttgcttcgcttcatatgtcgtctgcagtaaattgttcccctctggcaacagatcctttaatagctcgagaagttctgtaaaactcttgaacgaccagccattactagccttaagcttcatgagttgcaacacgcatgacaacttgctgtgcttcgactcgcattcatcatacaacggcatctgacaatcttcaccaactta

SEQ ID NO: 71301 - DNA, 457 bp, Oryza sativa
  unsure (1)..(457): unsure at all n locations
tagcaagtgtgagttctggttgtccgaagtcaaattcttgttgtacgtgatatctgctaaaggagttgctgtggaccccgacacagtgaccgncgtcactgaatggaagcaacccaagacagtcacccaaatccgcagtttctttggtttggcaggatactaccggaggttcatcgagaacttctccaaaatcgctcgacccatgacacagttgttgaagacagaagagaagtttgtgtggagcccgcaatgcgagaaggcgttccaaactctcaaggaaaagctggtttcctcgccagtgttaatcttgccagatactcgcaaggacttcatggtgtactgtgatgcttcgcgccaaggattgggctgcgtgctcatgcatgacggtcatgtggtagcctatgcttcacgtcagctacgacctcatgaaaggcactactctacgcattgacttgag

SEQ ID NO: 71302 - DNA, 474 bp, Oryza sativa
  unsure (1)..(474): unsure at all n locations
gctcgaccgggatctctaagcactgagctgcaactctcggtctggctctgcctagcattgaggccaccccgagaagatacgagctatagagcggatgcgcccccccatcaaacttaaggatgtgcagtgcgtcactggttgcatggccggcctaagtcgttttatatcgaggctgggagagaaagcgctacccttatttaagctcctcaagcgctcggtgccgtttacttggacggaggaagctggaaatgccctcgcccagttgaaggcgtatctcagctctcctncggttctagtcgccccggagccaaatgagtgcctgctactttacttagcagctgacctcccaagtagttagtgcagcgttggtagtggagcgccatgatgacaatnctcattctacgcaccctcactctgtgccgacttagtcccggagcatgcatggaggagaggctcttcattcaactgtggctt

SEQ ID NO: 71303 - DNA, 450 bp, Oryza sativa
  unsure (1)..(450): unsure at all n locations
attaactagctatctatcgtggataaaaattgatagcaaaccaagtatcgccgatctcggaggtccttcagtccatccgctcatagagccatctttggtcgttagctggccattgctaatttggggttttattgggagagtagtgggctctgccccttccagttggttggagtcgtactttccgagtctttntcctttggtcttttgttttcctcctcttttggcataagtcggtctggcttaatgcgttgtgtaacgaatattcttatcttctaatatattgacgtgcaatccttttgcgtgttcgagaaaaaagatagatccctttaacactgttaaacttatcaacactttagtaggacaaatatcaatcttggcttcaaaccaaacaaatccatacaccgtacatccaaagtatgaaccatatttcttttatcactaagattaagt

SEQ ID NO: 71304 - DNA, 367 bp, Oryza sativa
agcttgctatagtctagctcttccatctcatgaagcacttttctgtgcctttagtcacctacaatcccatctgctagtagctttatcttgcccatgatatgacaaactagtcaacatattataactcatgactagattactttagttgttttttaaggacgaagagagtagaatattgttgcgcgcgattgagacggtcatgcatgatctgcttccatgtcccaatctaactttctgtccatcgtatggaactatcacagtcgtacgtaatactattaattatcactattctttactattataggatattatttttttgcagattgcacgacccttgtagctcgaactgatggataaccatcacccg

SEQ ID NO: 71305 - DNA, 286 bp, Oryza sativa
  unsure (1)..(286): unsure at all n locations
ccatctactcccacaaaccacaagttgtttgcatatactcatcaccggttaactaaccaanggggcacacgttctttttccacgattttttattcttctcccccttggtcttctccattgttatctgcagcaaccagctgtagataccgtcacaagtgcgtgacagattccggtacgtgacctcatgggataactccctgtaccaaaccgctnnttttcttcctttttttttttattgccttcaccaaaagtcatcgtcgccatcgccttgtttgcccatgatggc

SEQ ID NO: 71306 - DNA, 461 bp, Oryza sativa
agcttagagagcacgttgaagcgcacacagatgatcatgtagaacccacggcctctaaggatggcggttctgtattgtgccacgtttgcgcaactcatattcgagttagacaacgcacgataataaacaatggtacgagtatgaaatttactaacggtaattactatcttttattatatattgatttcttgtgtgcggataattaaatataatgtcttagataatggactgccactctaatatatacggctttgataggttaagttatggcttatcgatcaaccatagaacataaaccaaagaattataatgcgttggggattattattatatctatattcttagtagttcaaaagacatgcatcatatcaaatagcctacgatgaaatacctaagatagagtttagaaatttaattgttagttacatctcataagtcaacgaacagataatgagacatta

SEQ ID NO: 71307 - DNA, 332 bp, Oryza sativa
ggtggcagagacgagcttcttgccttcaaactccttaagctgaccaacagcgtactcatcaatggcatcaaccatgtacaggacctcataacccttcttcttcagcttctcgaggaagggggagttctcaacagccttcttgctctcaccagtgatgtaatagatctcactctggccctgcttcatacgggttacgtattccttgacgctggtcaactcatcaccactcttggtggagtgatacctcacgagctcaccaatcttggtcctgttggcggaatcctcatggatgccaagcttgagattcttggaaaagcctcgcagaacttgtt

SEQ ID NO: 71308 - DNA, 445 bp, Oryza sativa
  unsure (1)..(445): unsure at all n locations
agcttagcaactacacgatgcttgtgttccgttttctcgatgagagcacaatcgaaccatctaccanacagacatatggatccatgttgaaaaatcttacatttgtcaagacattcgcatctggtataattgtcccaaaaaaatatatctggcctgtttcaccagataattatctggaaccacacacttcagtcgtcgatgatgctcataaagcagggttggagaattatgctgccgactntgccaatgactttatgttcagttacaaccatagctatgatccattagcagaatatctctcattcattgacaatggtgctttctctgttgatggagtattgactgattatcctgttacaccttcagaagccatatgcaagtcctttttgtctatatcattgccgaaagggcattttgttctaaaatttnaaacactcctgatgat

SEQ ID NO: 71309 - DNA, 419 bp, Oryza sativa
  unsure (1)..(419): unsure at all n locations
ntatgagttaagtgccataaatganattagttcgtaaataaatctcactctcctcttcttgcatgtttgcatctactatctcttaactatatgtacatagctaagcaaaggataaataccgtatgggcatgtatgtttgtatccaagagggatgctctaatgaaagatggacatgagaagtagttcttcgcacttaaggattattacacaacgtatatgaaaaaaaaaatgtactccttgtggtaaaaggagaaatgtgcgttccataatgcctacaacgcactcggaattggctttttatacggcattaatcaagcagtggtatactggtagttcagatctatctgcaagtttgagcgatcagaaagaaatcggcacatgcagacggggtacttaccggatgctcaccctgtggggat

SEQ ID NO: 71310 - DNA, 450 bp, Oryza sativa
  unsure (1)..(450): unsure at all n locations
agctttccttctttccgttttaaaaaggacaagcatcgtttaatcgcagaaagatgataaatgaagacatactccaggcttttgattgacgctagggtactgcataaatacccccaacctgctttcacaaggagtaccatgagcaagtgcagtaagaaaatgacgaagaaactaaaaaaacatatttgctgtaaaatacagcatcacttgcctgaagacgcagtaattntttatttatcaactcgattctctgccagcttttgatgttccattttggcaagacaatttcaactntatgctgccgctctatgctttcctccatcattacttcatattgacctcttcctgcagttgtgcccttccaagaagcatgagccaaccaaatacaaggattggagtgaccagacacaagccgaacatatgtctccaggaacagaaaataaatcacat

SEQ ID NO: 71311 - DNA, 451 bp, Oryza sativa
  unsure (1)..(451): unsure at all n locations
tgcacagatcnatngaagctcnagcagccctgatatgtcacatgtataagaacataactatgttgctaaaaggatagcaattgcatctcatccaaactaggtcgaaaaatctataatgaccttgcttaccttcattgccaacaaatcaaccaaagaacaaagaagtggtacaagattttctgatggctgctgagatatcataccangagaatagtaaccaaaagttttgatctttgaccacaggccaaatacattctgagcgctatcaaagattacctattcagatgacaacgatgtaacaagcatgatncagaaaagcaaaaggcagaagtatttatttttgttatatacttgctaaaacatctangatctgttgtaattaccttcgcaccaagaatggcttcctgcgcacaatgtgcatgcangcagtatgcaatagctaattgatgga

SEQ ID NO: 71312 - DNA, 453 bp, Oryza sativa
  unsure (1)..(453): unsure at all n locations
atctttgaggtatgggtccaagaatggaggtgtgtctgctatcgttgatgagatcccatatttaaccgctattgtctcagaccctcattaccagaaagaattccagatgcttaagcgcatatataagactcccggntttgtgtttgtaagcctcttgctctattgcttcgcttaattcactcatcatcctttaagagctatgctacattctggacaaaattttctggcctaactggcatgatcatgtttntttctttttttgttccccttcaggtgtttcctcctggttttccactggtgcataatctttcaactgccatgttggatgttacaagtggggatgaggggtcacgtatggaaacgaaatggtttggtgcagaggctgtctcttcaagtaatgcaattcccaacacagattcggcacctctcactttgcngagtttctctggtctt

SEQ ID NO: 71313 - DNA, 478 bp, Oryza sativa
  unsure (1)..(478): unsure at all n locations
ntgctcaggctgatttggattgtgggttaactgaaattttgattttaagatacaagataaagactccatgcgaaacctgtattactactattgaattactgggactgatattggagtacactacagccaggtgatcaactggtctttcacaaaaaaaaaagttaattagcttccttcactgcaccagctattttgctgatgttagaatgggagttcaggtaaaaattggattggaactggtatggcatttcaataatttatctgcttaaagaatgaagcttaactacatagctactatatctatgcttcagagctactgaatgatgttacttgtgaggatgtgcctctacatcaggtgcaatcctctttggcatcttcctcttctgcatatacttcgcatatgaataccagacacctncaaatgtattgatcaccaatccagtaacgttgagagtatgcactttcacacctcccagca

SEQ ID NO: 71314 - DNA, 449 bp, Oryza sativa
  unsure (1)..(449): unsure at all n locations
agctngactttattcttgccaacatgacgatgtccttggcttggtgaccactaacccatggtgtcattcattagcctcatcgtagtgggacctattccttttcacacctcanaggagaacattagtctcaacaaatcggttgtcatccttcacttgatgaccaaccggttgcatatgaaagatatggatatatttgttgagtattcattaatatcacaagtgtcatatactcgtatgcaagctcaagtgcaaagatccgatataaataataggtgaacaacatggatctagaacatgcacaataaatgtatatgatttgctccccctaaatatatgcatacaaataaatatacaagagatgcangtgtatgcataatttagagaatgaccaatgggggttatcctatagatatagagaaggcatatgtagtaatgatgtagaccaacat

SEQ ID NO: 71315 - DNA, 491 bp, Oryza sativa
  unsure (1)..(491): unsure at all n locations
gctggggcttccctacanatatacacgagtttcatgcagtgctagctanccaccatttccatctaaatttcggataagacctttagaaatgattgaaattcgtcgagaatcgagattgtgaattctggctctctaaccgcttgtgtttgggaaatgcatgcatttgcagggcttcatggagcgcctggatggcctgacgaacgacgtgcaggagatgctgctgcatcaacggcggcgtcagaggagtagtacggcgagcggcggcggcggcggcgcccgggagaggatggccaccgtcgaccacctgaagcgcctctgcatcgaccactacttccaggacgaggtcgacggcgccatggatgcccacctcgaggagctcgcccatggcggcgacctgctcgatgccaccctcgcgttccggctgatgagagaagcaggacaccatgtatcaccaggtcacacatactgatcatgacaaacaatgactaatc

SEQ ID NO: 71316 - DNA, 453 bp, Oryza sativa
agctttgaaatgaaggatttgggagtggctgatgttattcttaacattaaactactgagaggagatgagggtgggattacacttgtgcaatctcactatgtggacaaggtcttgagtcgctttggttatagtgactgcaaggcagctcctactccttatgatcctagtgtgctattaagcaaaaacggaagaatagcaagggatcaattgagatactcccagattattggttcattgatgtacttagctagtgcaacgaggcctgacatcttatttgctgtgagcaagttgagccggtttgtttcaaatccgggagacaatcattggcatgctcttgaaagagtaatgcgctatctaaaagggacaatgagctatggaattagctccactgggtacccaaaagtactggagggctatagtgattcaaactggatatctgatgctgatgagatc

SEQ ID NO: 71317 - DNA, 426 bp, Oryza sativa
  unsure (1)..(426): unsure at all n locations
actaagctttgaattagatgaattaggttcaagtttcactcatatcttattaaaatgaataagttatgctagtgtaaagattcaaatttgaataattgcgaaacagtactgttcctaattcatttatttttattccataatttacatagactgacccgtgggaccggcctgccatggacacaacatatataagtgaatttccatagatgttaatcatagggaccccacatgtaacggacttaactaataaagatcaaggggaggattactatttactaatcacgtggggcccactctaacctctctcctccattctcttttctctctctcttctctgtattctcctctctctctctcccggctcggctagaaccggcgggcggcgcggctcgactacaaacggtggngaatggggacgctcacctg

SEQ ID NO: 71318 - DNA, 431 bp, Oryza sativa
  unsure (1)..(431): unsure at all n locations
agcttccatgatcttaatctgattgcagctggtaagggaactacccccaatatgcatacaaatatgaaagtatgaaaggcatgtaaccaaactactatggatattttactgagtttacgcacgtttcagaattccctgtacaaaagaatccaatctgaaacaaaataaggttttaccattaccatgaatctgtcttacacaactacttctcgatgcctaagttcatatctcatttctttgccttagagaaacgaaggcacctgtacttttcaccgctaacagtgatctcgagggcaccgtcttggttgtccttgatcgaagcagtgcccatgagcacgctctnttccttctctaagatctgctttttcatcttcagccttgcctcttgccgcgcaatctcagcctgtgaaacatgcaattggatcaagtca

SEQ ID NO: 71319 - DNA, 409 bp, Oryza sativa
  unsure (1)..(409): unsure at all n locations
tggcttggacacagaacccagtgatagaagaatgcccatcgttctgagttagcgactntgtagaagagcaataataaacatcaataaacgaataggccacatacaccaccaacggcatcctccgcctggtaaatatggccactcaactctactgagtagacacccgttagcctgatgnggttgtctcttttttttcttccttttttttttttacctcgagcatgccacatggaatcagcatgtgaagctcttgggtgtccacttccagtctctctccaacgggtacaagaagaacaatagacagtagttaacattacggggttttgtccatttcctcggcaatgatccaaatgatacgctcaagaggcgaccttggacatatctttgctggatctgttgtatttcatgt

SEQ ID NO: 71320 - DNA, 166 bp, Oryza sativa
  unsure (1)..(166): unsure at all n locations
agcttatgtctcactggnttgnggagcttctggtggtcatcttttgcattggtggtgtaaaagtgtgttcaatgccacttcattnntcctgtaattaattagcttgatatcttggcctaagatctttatactgtttatccattgaaacatataatctgaatgcttt

SEQ ID NO: 71321 - DNA, 418 bp, Oryza sativa
  unsure (1)..(418): unsure at all n locations
ngtcagtctcttttgttggctgatgcctgtacatgagtgtgtacgtttctgacaatgagtgcttatcactgaatgttgattcccaagcaattatttttgtcatgaaatctcataacaactgtgcatgactgaaagaaatgagtacatcactactggatttttccagagttttggacagtgatgaagggaacaagctgaccatgactcatgggaaaccagaatcttttgttgctgaaactgagctgagacgctgatgaaaccagtagatcagaatcagctgtttcttttttttttcaaaagaaaaacatgaatactgtcagaatcatttgtgactggaaactatgatgtctgaattgctggtgacatangtggtgccatgctgttaaatgttaatcactggttccctcttgtgtttggg

SEQ ID NO: 71322 - DNA, 444 bp, Oryza sativa
  unsure (1)..(444): unsure at all n locations
agctttgaatacctgagcagtggaaatatgtacagcaccagggtgatctacgaaaaattgcttatcatcccgcagatctattaacagtaacttaatggttaagcaccgccggattacatcaagtacgcaagtgattaatataagcacaatgaacagaanagcaaaagaatattgcatttacatgctgaggctacgacatgtttctgacaactatattgtgtatgattgtatcaggagcaaagtacaacttgcaccaccaaagctgctacatcgaacctgatttctaactccagtgatccaacttaagaacataatctaacaagagcccattttggtcagtgaggactaagtctctaaccacctaacttgcctctaaggccagtaagttgacaaggcttgtagctgtacaggctatatctatntataactctgctgtagctgtac

SEQ ID NO: 71323 - DNA, 416 bp, Oryza sativa
  unsure (1)..(416): unsure at all n locations
tcagacagcactgcttctcgccgaggtttacgtcgcctgcctgcatcccgacacaaactactccgaatttgagcagaagtacatgctgtattaccatacctggtcaactaccaaaagcatgcaacacgaatacatgatccaatatatatttgtaatgcatcatgcangtttcaggagtggggactggagaaaggctggggtgacactgctgaaacatgcaaagaaacactaagcagtctctcggaggtgctccaagcaccggatcccatcaacatggaaaagttcttcagtacggtgccctgcgtgttcaccgttgtcatcttctccatccatggttactttggccaggagaaggtcctcggtatgccagacaccggtggtcaggttgtctacatcctggaccaagttagagctct

SEQ ID NO: 71324 - DNA, 420 bp, Oryza sativa
agcttgacacatctcatctcgctatttcagatcttacatgaaacttcatcacagaaaataatgaaggaccaaatttggttattcatcgctttgatcacaccatgaacaaagaagggaaaccacagacgcatatatatcatatatgtatccaagggccacttctacggatagacctcaatgacacaccgaggtcccaatttcttcacaatcttgtagtccctgaagcctactttcatgaagagatctcgccaatcattctcgtcccgctgtcggcttttggtcaccaacatcacggccacatccataaggagttgggattccagcattggccctgaatcagaaccgactactatgtcgatgattatcactttccctctctcttcttggagcggaaccgctttcttgcattgggctaggatc

SEQ ID NO: 71325 - DNA, 201 bp, Oryza sativa
  unsure (1)..(201): unsure at all n locations
tggcatccncaccgccatccaccgcgccggcggcgcctcgtttctgtccgacctggttaccgctctgtccctcccgccgtccaagctaccgttcctccgccgcctcatgcggctgctggtccactccggcgtcttcgccgccgacgacaccaccgataccagaacgtaccgtctcaccccgctgtcatgccttctggtgga

SEQ ID NO: 71326 - DNA, 412 bp, Oryza sativa
agctatgcctcttctatgtgtcgggtaaggaccgtgttgacccaaggtcaaagaacgtccctggggctgacattcctaatctcccatctggacagatgcctgctactgctccgcaggccaattctaacacccacttgctcaatgccaaccccaacccttggttcatgggtggaggcattccactagccaatgcacggtgggggaattacaccttctctgcggcatatgggggtttgttctccctgctcatcttgcaagtccatgggtttccagatgcatccgtctatgggcagtctgctggtttacctacggatattgacacggtcacggtcaccgttatgggcacgctgtccacggtggacatgcccatgctgctgtagctctccgtatggacctgctgtgcaacaacatc

SEQ ID NO: 71327 - DNA, 467 bp, Oryza sativa
  unsure (1)..(467): unsure at all n locations
agcttcgaagttaccacctcaagcgacttgaattgggagcccaacactatatccacatatgtgttccactccaactccccattcaaatctagcatgtacttgtgtgaaatgggtcctgctccaacatcatatctaccttgtatagctatagactgattgctccaccccagcacatcctttgtatgacaaactaactcctcaaaactaggttttccaccaaatataagttgcttaacactcatcccctcgaaattgctaccactgttactttgctctaccaccgaaccaccatagtgcaatcgtactaatctatccatctacaacattaaccgacatattagcatattgcattttttaaaaacttgaatntgcaatagaaagaaatctaacctacaactatgtnccccaacgagaatgtccataaatatctaaacatacacagaacttcatttgtaacgatccatcct

SEQ ID NO: 71328 - DNA, 407 bp, Oryza sativa
agcttaacatgttttcaactcggcgactaggatccagagtatcctttcttccggttgtttatttcttgtgcgctagcaaatttggtagcgctcgtaccttatctgtctcgtggttttgattgatttactggtccagatgaatagaaccctaaattgcaatgtggattagtacaactgacctaagatatctccttgccgttccatatattgtgtcttgcgctgtatgttagggtaacattcaccttcttatgtacctaactgtgcttattactgttagacagcatctcgtggttatgtattgatgctatggatatacttagtgtggcaatggttctgagcttccggatatcttttgggatatttgatatctgtttgagaattctgttaagggttatgatgtcatggtc

SEQ ID NO: 71329 - DNA, 331 bp, Oryza sativa
  unsure (1)..(331): unsure at all n locations
agcttagcttaattatatatgtggaaattaaagcggaaatgaccccttgatcatgagagtatgaaaaatatcttatcacaagtcacacaaatttgacgaagctcaatataatgtcaagcagtcgtatgcataataaggtttatcaatgatatactttgcatatggccttggtgggtataaaataaagtcaattggaggaatcaactctttaaaacatgttttttctttctnttgagacaaattcccataagtcgtgataatagttgcaagaattcctttcaaatttaatcatctcacacatagcaatcacttagatcactaatagaatcct

SEQ ID NO: 71330 - DNA, 410 bp, Oryza sativa
  unsure (1)..(410): unsure at all n locations
agcttcgaataaatttgttgatgttatgttttatgcactggcaggtgaggaacttgaaggaccagcactttacagaactctatcatctgtacaataagatatctaggaagcaagaatatgtggatagccaaatgccatctcaaatgcctatagaacagtatggaaagatgaagaaatttaaagaaatgttggagcgcatactgcggttcctgcaaatttacaagggcgacattctgcctgctctcgcagaanaaatccctaaatacaagagggcagatatcacactagtggagaaaccatctttcgtcggtcgggctatnttcacaatagtcccgggtgcaatanagaccgggactaaagatctnntagtcctggttaaaaggggaacaggcatatntgatctttagtcc

SEQ ID NO: 71331 - DNA, 470 bp, Oryza sativa
  unsure (1)..(470): unsure at all n locations
agctttctcctcgtacttgactaaagatggtaaccacaattctgctctttggatggcagctgctccagtctgtgggaatattggcccgcgaataacttatgtggctagcgttgcgggtggnggcaacattgggagaaccataagctctgccggaatgtctatgcctactgttgcatcccctgtgaatttgtctggaagtggcgctcttaatatccgaggatcaaaccaaatgggtggtactcatcaacaatgtatatactaaacatataaacccctngtataaatgcacgcgcatatgntctcaatatgtctttctttctgatttgataatgaaatgattctaaataaataatattaacaatcacatactccctatntntntatatgacattggtcggttcaattttgaactagccaacgccatataanataaaggactgagtattaagcctatgaagtacactagtcat

SEQ ID NO: 71332 - DNA, 393 bp, Oryza sativa
agcttcttggtgtcatcttgcaccctcaccccctccccaatgaccctgagagagacgaacatgaaagcaaccacacacaatttagtcatgattcatcaattaatcaagatgaattaatatgtaataatcaagattttttttggtcacacgtactctttgagcttgatctcgatctctgggtacttagcggcgaagcggtcgatgtagtccttcatgttggggtacccggcggcgcaaaggaagcggccggcgatggacggctgatccatgcagaagacgtgcgcgtcgcagacgtcgtcgatgtgcaccagcggcacggagcccagcagcgcctgcagaaacttgaggacgttgtggcagagctcgtcgccggtgagcggcgacatgatcacc

SEQ ID NO: 71333 - DNA, 465 bp, Oryza sativa
  unsure (1)..(465): unsure at all n locations
agcttttaaatttctttanaaaagaggggaggacatgccaaaatttctattgaatttattatggtgattacatacaaatcggaggtgcctaaaaggtttacaacttcatcctccaatngtttttttgtcatactacatttgcacctatgtttcgcacactgtttttgtctccaaaatttagttgtaagttgatgaaagagaaaatgtgcgtggggaataaagaatatatagaaatttagttcatttgctaaacaaggttttataaaatagttgagaaggataactctagtgaaagttaatcttaaataatataatacaaactaagatgataattaaaagaagtataacacattataattacgttaaaactttacagatagtctttaagaattatttggtgtaatatcttatgaattctgtatgaataacgatatcttataattatngtatgactgtcattattgt

SEQ ID NO: 71334 - DNA, 341 bp, Oryza sativa
  unsure (1)..(341): unsure at all n locations
agctttatcatacttcttcgccgaatggaccaagtgccaagaagacacgcctgcggaaaagatagagcattggactatgcattttgacgggtcaaagaggctttcaggcactggagcggnggttgttctaattttcccgactggagagaggttgagctacgtattgtggatacatttttctgcgtctcacaatgtggcgggatacgaggcacttcttcactggctaaggattgcgatctccttatgaattcggcatctgatagttcgtggagactctcagttggttgttaatcaagtcatgaaagagtggtcctgccttgatgataacatgactgcctatc

SEQ ID NO: 71335 - DNA, 465 bp, Oryza sativa
  unsure (1)..(465): unsure at all n locations
agcttgatacttaactctagaggatgagaactcaacaaatgagcatgaaagcttctctttcaaagttcctcagtgttcatgctcacataaagaatcctcagagttctgtctgattactatcacttccttgtgtgagaaccataaccaccttttgggccttacctctaacatgtttagaaggttggttttggatgcttttatttatcataaatattgcaaatctcatatgtgtttgtggtactaatcttgcagcgacatgtctccatggtcgagcttgtgaccataaacaaagcactgccgggagataccccggattatcttggtaagtnttctttataataaaagcaagaaccagttcttaggatattatacaccttcgggtattcttggtcagaactatttcaggtngagattaagaacgaaggacgtacgatgcctaagaactcgggagctacatcaactatg

SEQ ID NO: 71336 - DNA, 439 bp, Oryza sativa
  unsure (1)..(439): unsure at all n locations
atcttatgttttgacattgtggngaaaagcaaacaggcgttcactcatggcaaggatttgcacgaaacatttgagaatttaagaaaatattcagtcaagcttaacccganaaagtgtgttttcggggtaagagcaggaaagtcgcttggtttcttagtatctaagagaggcatagaagctaatcctgacaagatcgcagcgattcaccaaatggagccaccaaacaacacaaaggaaatgcaaaggctgacacgaagaatggcttctttgagcagaattctttctaaatctgaagagcanggtttgccatttttcataaccctaagaggagcaaacacatttgagtggacggccgagtaccagaatgcttttgactgattgaagatgtatgtacagaatatgccaactttatgcaagtcacagaaaggtcaacctttac

SEQ ID NO: 71337 - DNA, 474 bp, Oryza sativa
  unsure (1)..(474): unsure at all n locations
agctngcaagataagttgaaatagttgaaaacgaggttacaaatttttgtacttttgatcatcaggttttaacagaaataaaagaaagttataaaatcgacatgctaaatttattttattgcagcaggattaaataaaacaatattgtaaaacttttgctggtaaatgagtcattagtacagtaatagatgtacagtactaataacactgaaataaattttgaatgagaaccattaaaagagattatgaagtgcatgtgccattagtttggtttaaaagagaaagggaggagaacagttctacttttccaatatntttagagggcttctatgggtaaccatttggcataacctaaggtcaaggaggctctgataccaacttgtcacgcnctggaattctatccataattacaaacgcttacatgtgtgggaaccctcgtctaggaatcagccgaggcacacaataacaaattga

SEQ ID NO: 71338 - DNA, 448 bp, Oryza sativa
  unsure (1)..(448): unsure at all n locations
agcttacctgaataattattgattaggcgtatgttctgaagaatcatcgaatntgtattcacattgcaagtcatgtagctgatacaatcatgtacaataattcaataaagtaattttgatgatccttgcctgatctgattttctagaattgcacgaacttcttagcaattggttgctttaacaaagagatctagagtgatgtacatgtcagataatgatcgaagtaaaaaaaaagtgtggtcaggaggggccgaaatgccagctacacagttcatgagttgatttatntatttttagataatgaggccatgagtngatagctcctgtaataaattatgcgaatggtccttcattctgaaaaatgaaatttgaatgaaacaatatagttcttgatgagttgatgtgaatgcatgcaacttcacaagcataataatccagaaacagcagt

SEQ ID NO: 71339 - DNA, 197 bp, Oryza sativa
  unsure (1)..(197): unsure at all n locations
gagcttctacttttagtgtttgtgtttgngngagagcagagagaatgtgagtgtgtgtgtgggcacgcgcgctcgtttttcagctggtcgtcagtgttgtgcgtgtatgtatagacggtgtcacgcctgggggggagaggggcctgtgttctagagctatagtccanatgtgactttgcgcaaaaacaaaaatactg

SEQ ID NO: 71340 - DNA, 398 bp, Oryza sativa
  unsure (1)..(398): unsure at all n locations
tccaacaccagacggagatggtgctgatggtcttcctctgattgtgagtatatcagaatgtcatccatgaaaaccacaacgaacttattcaagtattccatgaacactctgttcatcaagttcatgaagaaagcaggagcattggttaagccgaacgacatcaccgngacatcatacagtccatatcgcgtagtgaatgcggtcttcggaatatcttcttcacgaataccgtaattggtgatatcccggaacggagatcaatcttggagaatactgtggccctttaagctgattgaacagatcatcgatctcgggaagatggtcttgttatgatgtgacttcatgaagctctgagtcgaacacatcctttcgtgtgcattctctcacaaaatacagac

SEQ ID NO: 71341 - DNA, 336 bp, Oryza sativa
agctaatcttcgtcatcattttcatatttagagaaaagaacgccaccagtgtccaccaccatcgtacgttgaacgggcctaccaaaatggaggcctaataaaggcccaagtaagtataggcccaaatacgcccatgggtcgttaaaaaacggaggcccaataaatggtcgagttagtataagcccagttaggcccacgagtaggtggaacgaccacctcacggcccttacccgccttatcttccacatccgaggatttctctctttctttttccaacgcggccatggcgccgctccctctccccctcccgctttccgccactcgccaccctcccaa

SEQ ID NO: 71342 - DNA, 469 bp, Oryza sativa
agcttatactcattaaaagttctattttgagcgctgatgtacacgtactatataaaatcgattttgctatatctcactcgaaagatgtttttcttatctctcactcgattttctcactcaaatttacagtgtattttcttgtaagttacagtgtaatttataaatcttacattgtaacttttgtaagttacagtgtaatttttgaatcttcgcatgtaagtcttaaaatttatattggttttggtatttttattgaagatatggtagttagtgtccattatggtgtttcttaattgtctattgtgtttatgggattttaatccaaagattaaaaatctgtgtgatatgatcataaaaatctttcgaaagatgcataagtactcccatataagaattaattaagaataaacatactctcattagctgtataaggaggcttacgagatagcatgcccagacaccatcgtga

SEQ ID NO: 71343 - DNA, 409 bp, Oryza sativa
  unsure (1)..(409): unsure at all n locations
agctngatctatttatntatatgcttgcactaataagctcgagtcagatcagctactctgctgaactatacgcgcgcgcgcgcacacatatatgcattatcatctcacacaaagatacacaattattaaatggccgaaatacaacattccaactccaaagaatacactaaaggcaatccgagagatgacttgtgctgcattgctcttcagggatactcgctccgttccagaaaaaatcaacctaaaagtggatgggacactacctagtacaatgaatctagcaaggtaatgtgttaggaacccactactttcaactcaacaacaagcatccaccatagaagcaacaactggtntggggacaagagaagaagaagctatgaaatacaagtgctggaaacttctagaaccg

SEQ ID NO: 71344 - DNA, 402 bp, Oryza sativa
  unsure (1)..(402): unsure at all n locations
agcttatttatttctcttcatttctatcacaataagatggactctacccaggatgagaatggatcagttattaaatcttggatggaaatttcttttacctatatccctgtgcaatctcttattaacaacttcttcccaacttgtttcactataaaataagataatacaataacagtaagaatattttcaacacagaagtcctctcaaacaagagaaagaaacatacctttttcatagatatttcgaatatgttccctatggtaactgggttcatgagttatggtcaacatacaatacgcgcagcaaggtacattggtcannagttcataattacctatcccacacaaatcggttacctataacgattcactactcctatgaaaaatcaattacattcgagcg

SEQ ID NO: 71345 - DNA, 218 bp, Oryza sativa
  unsure (1)..(218): unsure at all n locations
agcttttatctggtcatttgnatttntatacaatattcatgcgatgttatctcagaattgtaaattgatctggataggtcgccacctattgcaaacagtatttaaggtttcctttatcatttgagctacagtgcctcaattagctggcctccttatgtattgatgggctggtatctttctataggtgacctttcatctttcattgatctcaagtctgt

SEQ ID NO: 71346 - DNA, 449 bp, Oryza sativa
  unsure (1)..(449): unsure at all n locations
agcttctctctcacattntacttccaaattgcaaacacgcagatcagatcacttctcctaaccacattgccaatttgccactgatctaggcgtgcaagcagaacggagtgaagctttgtgcagccatggcggccgcgacgctgctcgctgcacggcagtcgaagctgcagctggcgagcaaccagcaggagacgtactccattgcgacccttatcaattgccgcaagtttctcgaaccggccctggatgatcacaacgttggtgagcccctacatcttntactcacattggtcacaatgcangacactgctcattaatgcaccacgagaaacacaaaacattctacaagcaaagcattgctgacattactgatctgattctgcagggttctaccattctgctatcaccaacacgcacgcaatccatggcggagaagagctatgggagct

SEQ ID NO: 71347 - DNA, 429 bp, Oryza sativa
  unsure (1)..(429): unsure at all n locations
agctttggatgactatctttctcgggttaataaaattttgagtgatcttagatctgttgattcttcttatgatgctaattatccacaatctgagatttctcgtcactttttaaatggtcttgacatgtctatttgggagatgaaagttacatcttttcaggagtctgttaacatgtctactttgactatggattcactttacacaaaattgaaaactcatgagatgaatattcttgctcgtacaagtgattctaagtctagtgcattgatttcttcttcaatttctttggatgttggtgcttcttcatcgaagtcttctgttcttgctttatttaatgccaagtccgatgaacaactcgaacagtttgaggaggaggacttgtgtttgttatctaacacaatttctcgagctatgaaanatgtatgaat

SEQ ID NO: 71348 - DNA, 456 bp, Oryza sativa
  unsure (1)..(456): unsure at all n locations
tatcttgggatatgcataagagaagacaaagatggtgagaagacgaacaacaacaagcccaacaacaacaagtcgaagggtacatcccaagggaggaagatggagaatcttatgaaggcttttcaacaagtttgggctgccttcgagccactaagtgatgtatatggtgaaagtggagatgatgataaggggaagaacatctccgatgtttgcttcatggcacgtggtgaatctgacatagagtttgaacataatgaggtaagtgcgtttgaggaagctattaatattttgagtgaaacaaaaagaagtgtgagaagatgtatataanacaggaatttatcattgaatctcttaatctgaagttgcaagttaaaatctcttatcctaatgatgatgaatgctcaattgtgagggttaatgaatgagatctcaaaaatagagatataatgctgacat

SEQ ID NO: 71349 - DNA, 414 bp, Oryza sativa
  unsure (1)..(414): unsure at all n locations
agctttgtcaatattgagaggcgcagtgattggttgactggatgagagtagtagtagttgacactgacactntagcggttgggagggaggcgagtaaataatttactcatcagtgtggttgccagcctaccagccggccggccgccaggaccaaaaccagcggacgttttcgaggggcgcagctccgggctttggctgcctaccgtctcgtggatgggccttaatttgattcgttccaaatttggaagcccaacttagatttaatccgggatacgtgggccagcatacgaagtctgcaggaataagttcactntaggttccttaatttgtcaccgagtctaaaattcattccagcatgacaataccagatatgacacattccttaactttcaagaccagtacaagtgatatcca

SEQ ID NO: 71350 - DNA, 470 bp, Oryza sativa
  unsure (1)..(470): unsure at all n locations
agcttgcactatgtttactatctatacgaccctaattaattattaatcattgtaaattcttgcataccaataaaaatcatatcacataggattattgtattgggatatcatatcgaacgctcaaagcaaagtaatgatgatcagacatggaaacgaaaacgcagccggccggcagcgagcaaaacggcatcagtcgccgccgactgagaacaccggcaacatggacatgaattcgaacagtacataaatatagcttgctttgctcatgctgtaatttgcttcttctttccaatttccacacagnacctcacgccctctcgatcctgttccccatttaccccanaaccctagcctgccgatctcccctcccaaccgccgccgcaccctgcatcattgcctgccgcttctcgacctcgctgcctgatgcacgcaaagantgacatatatatatacctacttcaagacctata

SEQ ID NO: 71351 - DNA, 398 bp, Oryza sativa
tcatgagcaatggagcaacaatgtactggagaagctctcttctgatgctcagaggttgcagagcatccaagtgagcatcaaggagctgaagcggaaaatggggagcccatcaaacgggaaatcgcccatgaactccgaatacaacaccgtcagcactcagctactcgataccgagggatgtgtcttggaacagatcaattacaacaacaaattgacaaagcgggttgagaactatcctgcgctatcagatagcatgaacgcggagcaagaagggtaccccagtaggaggaaaatatccggacaggtccagaaaggatcggaaaacgtggtgagaatggaactggaacttcagaagatacagtatgtccttgctaagcttgaagaggagcatgagtaca

SEQ ID NO: 71352 - DNA, 322 bp, Oryza sativa
agcttatggctcttgactttgtgcgcgggtgtgaggacatcagcgcacactcactctttacaatattaggtcgacgcataatattagatcagcaccttgcagttgcaaacgttctattttcaacgaatgtcctgtgtccagtgagcacatatacgttctgtgcatgcctgagctagcctgccaccacaagacagatagcgttcctggtaatgcacttatcatgtcggatgtgattagtgtataagcttgacaaacgcgcatgtattacagctcgttcctcggatgcattctatacacgaacctactaagtgaacgtatggga

SEQ ID NO: 71353 - DNA, 402 bp, Oryza sativa
agcttatggttattgactgtgtgtgcgtgtgtgaggtcatcaccacgcctcgccttttgagaagaagaggaggaggaagaagataagatttccaccatgcaattgcaaagtagcagcagccactgtctgtcctgtgtccactgatcacttctcctttcggtgctcgtctcggctcgccggccggcaaccgccggcgagcgtgcatggcggggcgctgtcggctccggctggctccggcctcgaggaaagcctagcacataaaagttcaggtcctatcctagtctcattatctaatcctgttcttcagctatgattagctttgatgtaccatatgcatgagcattttcatggtttcagtgtgatgtgtaattagtcatgtgctcatgtgatgtatggaactga

SEQ ID NO: 71354 - DNA, 431 bp, Oryza sativa
  unsure (1)..(431): unsure at all n locations
agcttgttcaatatatggatccaaggcgggcagatcatcagtcgacatattagttggttgtggttgagttttcttgaatttgatctttttctttggatccaaggctaaggtactcatggctaatgatctggttttccttttcttgcctgcatcggctggttccctagttaggccgtgaaggagagttgaagtcttgggggcatggtagccgatgaaatggggagataatccacctccattcagaattagacctgaagcatattcaatgttcttgccactgttactttgatgaggaggggaggactctgttgtctgcaaaacacgagcaagaagttagtcaagtaatgaatcggctaactggttatgcaatntagtaatgacanaagttacctcgggcatgacgtcatggaatagatcntgtcatatacatt

SEQ ID NO: 71355 - DNA, 415 bp, Oryza sativa
  unsure (1)..(415): unsure at all n locations
agctttgtgtttgttgtatttcgtttgttataggagtcactcacccgttctgctgctctggtatattttcaactgtctcaaagtcccaattaagtatgtccatgnttcaccctggagatgcaagacgcatgcattccattacacactgtgacaccatgatctttatcttgtcatgcctggtgaaacgtgattcccctagtggatcttctgtgtttagtgaatcaagcaccgataacttcttgctctccatgttaaatacgtacagcacgtaatgattgaatangtgaacaggaatcagtatctgcaaagtttaggtttttcagtggactacttctgtactattgttacaagagttctacaatctacgaactgcanatntgtactcaccaggtggctttctgaaacatcatatact

SEQ ID NO: 71356 - DNA, 242 bp, Oryza sativa
  unsure (1)..(242): unsure at all n locations
agcttgccattatgggtacccgtcccattgacacactccttccaatccaactataagttagccaaataaactagtgtgggtcggccaacatgcttctccggctaaacatacttaactgnaccccccccccccggntcaattaactgctgaccaagttaccacatgaacaagatccaaatttacagcacgattagctcagtatatatcaatttgcttgtcaccataataaccaatagagtctt

SEQ ID NO: 71357 - DNA, 424 bp, Oryza sativa
  unsure (1)..(424): unsure at all n locations
agctttatgtttnttctttttatataacaggaagcaaagtcagagcttcttcgcaatcagttgcatgtaaggattattcttttatgcattctcacttgttagtatccttgttattacttcatctttcactgcagaatcacatgttagatctttctatttcttatgccatgtctgtaactcaattgcaatggaacgttaaggtcaaaattatgctgatcattttcatggatccataagcttttgtttgcctagcggcctagcctaagatgccccatgagtccatggcatgtgagcacaaccagagntttgctttgtcaaggacattcattcatgaatntatatcacacatgttcaggatgagtagagctaggaaagaacaaagccaacatgagaacacataagatgcacattgtatgctctgaca

SEQ ID NO: 71358 - DNA, 408 bp, Oryza sativa
  unsure (1)..(408): unsure at all n locations
agcttgcagtttgtgaagtaagctgccaattcttgntggcggttgacatcatctctcaattccttcctcttaagttccatcctcaggccaaggacatactccctcacaatctcgatcaactctttcacttcatccacttccctcctcgagtctaccacgataagagggatggtatgcaagatgttaaggaactgcctcagggcttctgggaacttaccttctgtggtggccttgtangcagccttgagtctgtcttccatttgtgagaaggtgaaaacaagtgcaggagggcctctcacattatgacttgcagactcactccaacctttctcaacagcaaccggaataatggnggcagttgcaagtgcacgaagatatgagtggctgcccatgtgcagatcgagaaat

SEQ ID NO: 71359 - DNA, 427 bp, Oryza sativa
tagctaggacccgcgatccttagagcgacctgctgcatgcatctatcttttttttcaagaccaaccgacaatattgcgctcctgtagaagaataatcatcttccgtctagaatggataacacttggcctggactattcagtttcagctgaagaaatagatacctctatgtggagcacgtagatgtctgaatccaagatggcattctgcccaatgtggtagtaccaccgtggtatgatctcgtacattcatacgcctgacgtccgcgggaatgcccagaccaacctgcttcttccctgagacacctggatgcacaagaacaccagctatactgtgggttgcttctcttctatctcttgccctgatcatctgtcagaatccacagtctcatcaggtattgacaatactgactagtagatggttcttgac

SEQ ID NO: 71360 - DNA, 377 bp, Oryza sativa
  unsure (1)..(377): unsure at all n locations
agcttactattgttactccataaggtgcaccccactattggtggggaattaggcatangatcaagattcaccatttatgttatgtcagctgttacaaatagcgagcataaactgcagtcgacgtcatggctcgtatatgtgtgcatcaactatctgcttcagatccttgtacaagaacaatagtgctgaataaaacggttcttaatcaattcttgctctgtcaccgttcaaaagacaaaaagcttgctctgtctcttcttgtaataaaaattccaatcacgctaaacccatctctagatatcacacattttagaatacttgtacaccttccatccgtccttaacaaagctaacttccactctggctatggatcctag

SEQ ID NO: 71361 - DNA, 411 bp, Oryza sativa
  unsure (1)..(411): unsure at all n locations
agcttgggctcatctctacaacctgcaaaattaacaggtaaaaagctttccacaatcctcgtccccccaaccaacccagtccagctatctagatcagtagatctgcaagccccgccgataatcccctatcgtttcaatcgacgtttagccgtggaagggggaagagggagggagctcgcgggaagcgagaactcaccggagctcgggccgtcgctcccgccggcggctgatggcggtgagactggagccgtaagggagcgtctgccgcggcggcgcggtggggcggagctgttgccatggcggggtccggagctaggggtggaaaggcgcggcgcgagcggctgggatcctctggtggattcngaaggggagatggacatcaactccgcgcgggagctctgtgttgggtca

SEQ ID NO: 71362 - DNA, 424 bp, Oryza sativa
  unsure (1)..(424): unsure at all n locations
gcttacgtgctagggtgatctgaatctctcgctcaccatccaaggaaggacacattgtgtccgggttgggcttcttgttactttcaagtgtcatgcaagccacggcgtctagccccgattcccccaatttctcgtggtgtgtattggacagcacacgacaaagccctcgacgctaacgtggcgctgcaacatgtcaagttggcccctttgattcaggtggctgcacacaaaaatatacacctattgaaattaagcatgaataatatanatccacaaaaatggtgctagatatcaatgccgacctagaaataacatataagatgtgatttttatctgaatgtcactggaagacaagctataatggcgtgtatgagtgttgcaaaatagataaaagaatcaccagatggggctaacctgctgttaa

SEQ ID NO: 71363 - DNA, 433 bp, Oryza sativa
agcttatgagttatgagcacgtgagaaaaagttcagcacaataattgtaaaaaataaaatatattggcacatatgcagaacaagagagcttagaagacagcccattgatactcttttatcctcaagatacctgagcttttgcactgaactgggagctcaatttgtcttgattattaaattgatcttgctttccacttgaaatgtatgattcttttgcttcacgaaatttgtcccaagatttctcttcaccaccaatagcaggagtttgcacaggttgttcaatccgtgaacgccaatcacggttgtctgtctcagcgtagcggttatatgactgagtttgcacctgccagatatgataaaacatcaaacaggtagtaatcagtaaacgtgaaactgcaccagtcttactgagcagatacagtttgcaacacat

SEQ ID NO: 71364 - DNA, 347 bp, Oryza sativa
  unsure (1)..(347): unsure at all n locations
ttcttgccgttctgctgngaacgacgaccgggttcgccagccactcctgatggatgacctcacggatgaatccngcttccagaagtcgcgccaccttctcgcggatgaaggcttgacgttccggggcctgccgtcgtactttctgccggaccggccttgcgcccggccgcacggcgagacggtgctcaatcacctccctggggaccccgggcatgttcgccggtctccaggcgaagacgtctgcgtttgcccgcatgaaggagacgagcgctgtcttctatttgtcgctcagaagaccaccgattcatgtggtcctagacatgccgtcacccagcgcaaccttcttg

SEQ ID NO: 71365 - DNA, 244 bp, Oryza sativa
  unsure (1)..(244): unsure at all n locations
agcttcccaggacgctcacccnctccaaccccgttctgttcagccgcgccatgctcaggatcgccgcacacgccgtgttcttctcctcgccgacgtcgatcaggtacttcgccggcggcaccgtcaacgcggcgccgccgccctggaacgtgaacaccaagtccggggcggtggcgcggctgaaccccgccgtcttcttgaagcaaaggtcgaacggctgcggcggcgtcgccatcggcggtgc

SEQ ID NO: 71366 - DNA, 425 bp, Oryza sativa
  unsure (1)..(425): unsure at all n locations
agctttgctatttttggttcgnctnnttttcgctgatatttctcctgatcacgctntggttttttgtccatccggtttttcccatcaccagtttttttgatctcgtatgatccttttcacacgcgcaacactcctcttgctgccaccgggccaaaccctagcgtcgccaacgtcgatatgtctcctagtgcattttctcctccaattgatagcaaaaatcaattcatcacttctcccttattagttttgtcacaatttccactttcaatttagctttaattcgctggagttaatcttagtcgccaatgatggccggccagcgagcttcgccgaccatttttatctgagttttacgaattcgctccaattctgggataaacggagatagagtgagtcaaaagctcatataccatttctgggagatc

SEQ ID NO: 71367 - DNA, 452 bp, Oryza sativa
  unsure (1)..(452): unsure at all n locations
agcttcagttctcatctcttcagcagctntgaactggtaaatgactgtctttctctttgcttcgattgatccaagacgtaagatgagatatntttgttcttgcaagctntgctttcctttttcttttacttcgctttgactgcatgattgtaaggggattggactctcctgcttatatttgggaagcatagagtgctttcctttcaattttatatgtgactgggtggntctcacccttggttgtgttgattaatgatgattgcttgattgtggttcgctgctacagtaaatcgggttttgctagaggatttggaaaacatatgacgagtgtgaatcttgatcactccactttgttgatgatatagttcttgctgaattcttggctatagtttgccgaatttgtctatcagtccttctaattcagttctgttacctcttctattctgattctc

SEQ ID NO: 71368 - DNA, 470 bp, Oryza sativa
  unsure (1)..(470): unsure at all n locations
agcttaactaatttactgatgaaatataagtataatatcagttagttaatcacaaagtaggcgatcgatcacaaattcatgtaatgaatgggaaggaattatatattcatggacacaaattaaaacaatatcgttactacatccgttgttttttacttgatgttntgcatgttgacagtctattcaatgtatatgtatatgaatataaaaccatatattcaaataagtatatgagaaaggaggtggtgtatctgaacaaatggactatacatcttttctcttactacctccatataaaaatgtaaggcatgtnttgttttgtataacaaggctctaattaaccaacaagtagttgctctactaattaatatattccctcagttcatattataagactntttatagtatttnttaagtnaactaattaactttgacaataatatagcaacatttgcatcacnaaacaaaca

SEQ ID NO: 71369 - DNA, 463 bp, Oryza sativa
  unsure (1)..(463): unsure at all n locations
agcttgcagcttcctttttatgaggtttgtacacatcagttgataaatttggcgagatgagcttctgaagtgggcagtgatgtgtggaatctacaatcacgatgatggacatggcagcatgcttgtaagatattgcagtcaccttgcaggagcctagaactgggtgatacaggatggtgtcctgtccataacatgataactccatgagaggtgtgccgcacgacggagattgtgatgcaaggcggagtgtgaacctggactttggtccatgttngctgcactgatttggtggacaactcttgaagttgaagaagctctctgcatcccatgctgtggccgcatagatgagaagagatagtagcagctcaacaacacgaagttatccatgtttttgtttgctgctgatattgatgctcacgagatgccatgatgtactattatgaatttctgggagttatgctgg

SEQ ID NO: 71370 - DNA, 460 bp, Oryza sativa
  unsure (1)..(460): unsure at all n locations
agcttaagcttgctattacgatcctttgggccagggaatccgcagaaaagccagcaaatacaacctgagaaaattttgcagtatgcattaaatcataaggattaaccaggataaccacgagagctctttagctgtggccattaccgagtgaacagcaccaatgcgggcacaagcaagcatggcaatgggaagctccagcaacattggttagtagatgatcacagcatcacccttgccgacaccaacactcttcaagtaattggcaagctacgaaaaggataacgcaacacgttatattacggcattttccacaaacatccaatgacacacattgacagttaaacacctatttgtcaatacgttctcaggtatgagtgtgcatttacctggcaaaccctgtccaagagctctgaatangtgagcttcccatcctgaccaggctcatttgccctccaataca

SEQ ID NO: 71371 - DNA, 400 bp, Oryza sativa
  unsure (1)..(400): unsure at all n locations
agcttttgttttgttcagacgccgcggcggcagaggccgtggggactactatggagccgcagctgacgcctggggcggtgcaagcgatagctgagcacccggacgggacggtgactatccaaccngtgctgcatgtggtggacgtgcggcccgtcaccacctagaacgcgccgcccacgcccaagcccgcctagcgctaccagatgatgctcttcgtcggcgtctacacgcatgcattcatgctctccaccgtcattaaccgtctctgtaaggacgccactctgcgctccagcaccgtcatccacttgacttaccttatgtgcatcactttccagggtaaatgtcaatatatcccactatacgctcccccattatctcatgtcatcaatgagagtctgca

SEQ ID NO: 71372 - DNA, 427 bp, Oryza sativa
  unsure (1)..(427): unsure at all n locations
agcttatcatgccatatatttattcaagaatgtatacgatattgacaaactgaacaattagatctgaaactatggcaactctatttctcttgtgactgcctaatgcttccatcctacatttgcaggatattaagctactctatgaatggtagcataaagtgataaaggggctctctgtatctgtggtggtgggttagtggaaatgtagcaaggactgctgctctgtgtggcatgagatgagaccctcacatnttgtgctgtacattgccgatgtcgtaggcctgtagccaccaatgcaattactatatcttttgctagttgctgtggtagaattaaagctctggtaacttagtggatgagatcatatggatgtgaagctgtagcactaaaccctgttaactctctgaatgagatcatctgcattact

SEQ ID NO: 71373 - DNA, 414 bp, Oryza sativa
  unsure (1)..(414): unsure at all n locations
agctttctctttcttctggaggaggaaaaagacatatatatatatgggtgggactttagtccctgttggtagcaccaaccggggctaaagatcaccgggatttattntactatttttaattattttggttttgattttttatattttctagtattcttgttatgttattgtttttttatgttttgtatgtttattttttctatttttctatttttttattttctagtttgttatatatttaactatatgtttttattttttccctcttatttatatttaattgtattttgtactttttgaaatttaatttctaatatttgatttgttttttattaattaaatattattatttttttgctattaatttagtattagattattctatattatatttatatttctcgcatattattt

SEQ ID NO: 71374 - DNA, 419 bp, Oryza sativa
  unsure (1)..(419): unsure at all n locations
agctngttgagtnttctattgcatcggttgtgttaatttgctagacttagtgtgtaggcgattggagtttcgagttcttgccaccgcatatcgccatcctcatcactttngccatccatcaccaccatcacagtcacccaccaaatcactttccatttatgtttgatttgtggccgatagcgtttgtgagttgcctttgatcctgccgccactagaaaggaaatagaaccctgattcgagtgacattccttaaaagtcatacaatatatccatggacatctatagaaaatggtacatccgattgcaaaatttataatcaccaaattccgcttgcaaaattctattttcatggcgagaagcttcacgacctattcggatagaaccttggaaaaagattctgtatgcttcatattgtgtct

SEQ ID NO: 71375 - DNA, 463 bp, Oryza sativa
  unsure (1)..(463): unsure at all n locations
agcttagcgtgactgacttctangcagcggcgacctctggctgatgcggcaacagaggctgctgcttcctcctgttcagaaaacttcactgaaattttaggcatccgcagtactcctgtttagcaaagttcagagaattcgatggcatctcttatttagtaaaagtcagtgagcttttctcatccatttggtatagacacaaactgattcgatgtaagctgcataaatcatctattcaccgatttcactaatttaacaggtgccaaattctagtgcctggaacatgatgcagagaagtgtgctcactgctctgtttcatcgtgaaggtagatagcaagttattaaatctgtcaaatcccctttgaacattatatgtatatatagtatatcaagttatcaaattcattatctaaaaaacatagtatatcaagctatcaaatgttacttcaacattgttagtgga

SEQ ID NO: 71376 - DNA, 448 bp, Oryza sativa
  unsure (1)..(448): unsure at all n locations
agcttacttacagcaacatcgatattntaactacttcatatttggctctcttgttatatatcatagggattaagtggcatgaaatgggaagccatttaaaaatgaaggcagtaagacataccttttgctttgagtggaacagcaagttcacaggatccaactggaagtctgagcttctcccttagtgccttcaagtcaggcttgtacatccaagcattgccttcatgtttcacaaggttcttgcaagagaagagatttggaatagggaagcaatccgtcacaaacagcacatggataccacgattgcctcttgaagcagtcactgccactattgcagcagatagttgcaaatgcagacgtgcaacgtctctagaccatccaccagctccggtacagggaacgttcacagcaacaacatcaaagtgtgtccctcttggaaaatatgatc

SEQ ID NO: 71377 - DNA, 403 bp, Oryza sativa
agcttgccgtcttttagcagaatggcgtagccagaatattcatatcccggcgttatccgtgaacttgtcggcgctgcactttcgcagtaatcaactgcctaatcaggtgtctgatgcaatgcacgcctggggtattgacggccaccagctgacggtagaaatcacggaaagcatgatgatggaacacgataccgaaatctttaagcgcattcagatcctgcgtgatatgggcgtgggcttatcggtagatgattatggtacaggctcttccggattatcccgcttagtcagtcttcctgtaacggaaatcaatatagacaaaagtcttgtcgatctgtgtctgaccgaataacgcattcttgtcttacttgaagccattaccagcattgtggcaagcctcaat

SEQ ID NO: 71378 - DNA, 244 bp, Oryza sativa
  unsure (1)..(244): unsure at all n locations
gagcttggcattatcattgtataactcccgctgangtcttgtgttatcttgcttattgtcctcaataatctatcttataccctgtgatcaacaggatgatcgacttctttgctggaaaagatgtccgaatgctccgtttaagaaagctcttcatcagcacgctgtacgtgtgataatggagtttgattctacgctaacatatgtatctgacattgaagtatgcctgttgtccatgttaatatca

SEQ ID NO: 71379 - DNA, 475 bp, Oryza sativa
  unsure (1)..(475): unsure at all n locations
agcttcctagaagattcacccaanatcttcatagactgcgaccaacagtcaagctcacaaaggtgagttctttcaagaatgctctgcaggacaacatcttcgctaattaaagccaacagaactcattaaggcatagccaacctgccttgcagctcacgagagtacatgcatcttcacttggagagggtatatatattgatactctcctctagtttactaatggtttgttcttcccaggatctaattcacgggatctccgatcacatagactgggttaccaccatagtataactcacatgggtctcanacccatctccttcgatgccattgttatcacatttcgtgatagtcccttcgtgaagggatctgccaggtttctcgcttgttggatgtaatccaacgttataactccgngagttcttaatttcctgacagacttcaatcgtcttttcacatgtctagacgatttcatatt

SEQ ID NO: 71380 - DNA, 454 bp, Oryza sativa
  unsure (1)..(454): unsure at all n locations
agcttaanaaattactgtgatngagctaaaagacaacatatgagacgtctacggtggtcccttggcagctcccactcgcccagaccatccgatcttctttgcgtcatcctcctttgcttcacagctgtccaattcaagtaaagggaaaccggcgaaacgttgtacacgctgccaattttagttttcactcaatccctaaacttatctgaagactgaacactctgaaattcagataacgttttctcccgacttgcagacaagacacctgtaactgtacgacctagctgtatataggccacctggctatagtgagaagtgagaaatcactcctaatattgctacgttattagggcaacaacaatgtatatagcataaataatccatatagataggatctacatatatgaactataagtattataaccttcacaatgcatatagatagcaactagta

SEQ ID NO: 71381 - DNA, 461 bp, Oryza sativa
  unsure (1)..(461): unsure at all n locations
gagcttatttcttaatggacagacgcaactcatatgtataatatcgtgacgtatcacacatgattctaacactaatgctcatccgtgctgagtagttagattagatgagctgaaaattaagatttgtcatatatagcatactttacataggtcttaattaagttacgtgcaacgtaatactatgagccaatgtttttttaccacggcaaactatgtcgaccactccatcggtcctaaaatataagcacctttatactttgtcatagtcttcgagatgctactttgagcaacaatatctataaaagtaaggtgttctagatataaaagagttgcatattataatagtgtgtttaatgataaacctagtaacatcaattttatattatcgatctcttctatcttatatattaatggtcaaaggtaaaaatgcttgacttgatgctatgctnataatgtttata

SEQ ID NO: 71382 - DNA, 163 bp, Oryza sativa
  unsure (1)..(163): unsure at all n locations
cagctntactgtttccttggattggctttgggcctttcctgcgcagcttangtggaaggcgaagaagggcccctttcgggggggcccgagccatcaatgagataccactctggaagaactcggattctaaccttgtgtcagacccgcgggccaagggacagtc

SEQ ID NO: 71383 - DNA, 320 bp, Oryza sativa
  unsure (1)..(320): unsure at all n locations
tcagcacagaaaacggagtggtccattaccgcggattattagtattacctattttttcaaaagaatcaatatgattttntaaacaactctctgtacagaaactttttttataaaaagcgcaccgcttaacagtttcaaaagcgtacgcaccgaaattgagacaggagagttccgaacctggactaacgaacgcagcttaataagccaaaataagttattgggaaataaaaaatagtttctagatcaaacttgtatatattggttcatagcgacttaaacggcaatgcttaaaagaaattacgttgaaatatcttaagatc

SEQ ID NO: 71384 - DNA, 409 bp, Oryza sativa
agctatttgttgttcttcagcatggcctttccccgtgaaatgttgacgacgctcagtgtgtgaatggacctcaatcgtccaattcgtcttggcactctaacaccaaacagatccatatttctcaaccaaccactgatcaaaaacatgagtactgatacaaataacttgattcccatcccaacctcttcttggtttgtccagtactcacgaaatgcctctaaaattgccgatggcggagtcggaacccagcttctggtgtcatcctcatcatctggtggcatgccagcatggaggtatttcaagttttgtaacctaccaatggttgctggcaactctgtaacccatgttcccctgatatctagtgtctccaggttcaacagattaccaaacgaacttggaagattgatga

SEQ ID NO: 71385 - DNA, 453 bp, Oryza sativa
  unsure (1)..(453): unsure at all n locations
agcttttgatgtctgcatgtcgtaatcttgagacgacagttatgtagctntttgtcaactttggattgagattcacaaatagaattcaataattgtgtgctctttatcttggncgttatgagtttgtgttcgctttatgtctggaagagtttttttaagttctctttgagttgcactcgctttaagtgatttcatgtaataattggctgtaacttcgttgagcagaggccgggatggatttctattccattatctacaaaagttacgtaaatctggtaagcaacaatgttccacaactgcaacggcagctgtaactgcaaattattggtacactatttgcctccaactgtcagtcatacaccaaatcatanatagcttacttctcatagatcttttcgcttactaaacctgtgctcttactgtattctgtagtaatcggcatgatggatttgt

SEQ ID NO: 71386 - DNA, 381 bp, Oryza sativa
agctttactttgtatattgagtgaagtgtgcctgaactgatctggatgggatagggacagaaaaattatgctgtggacgtgatctggcgagggagccatctgggagggaatcggacatataaattatgcgatacagataccatttgggaggaaattggataaataaaaaaccgtgcactataaggggatgacgttagagattacttggttacacatcttgtatttttataatacattaagatcgctttacatatagctgaatttaaggctatgataagtgccatacatgacatatctatacataaagaatatgtttgaatgtgaagcatcagattatgcatgatgatgacatacccttgtagtttacatgactatgatatg

SEQ ID NO: 71387 - DNA, 467 bp, Oryza sativa
  unsure (1)..(467): unsure at all n locations
agctttatggtcttgtgaaaatcttctgcacaatcgccactacaatccccctttcattcgctgctgccctcgctccagatcccgtcacccatctcacatccatggcggaggagagagaaagctttgagagtcaatgggcaccctccgatgtaacagaagagaacttgaaggaaatggtggcgcacggtgttcttccggtgaaggaaatcatctgttggcgtgcggcgtgcggcgaagcattcccgaccccggacacacacgaggttgtggtattctctcatttcttctatggtggtttttctctcccaactttganattcttcaagggaattcttgacatttacaggagtagtttgcatcatctcaaccccaacttcatcgttcacattgcaaactttattcatgctngtgagacctntctaaggattaagccagattntgccctattccgtcgcatcttcttcctg

SEQ ID NO: 71388 - DNA, 242 bp, Oryza sativa
cgtacgagagaaccgaagcagatgacattgtaccaacactatcatctaacaaagaggaccacacgggtaaactatgtgaaccaaccccattctgtagcatcaactccatcatgttgtagctcatgtgcgtgcgagattgctctggtgctggtagcataccatcgatgtactctacaactttgtccatgcttggacttgccttgggccctggatgtgatcacattagtcctagttgcgcaaca

SEQ ID NO: 71389 - DNA, 62 bp, Oryza sativa
tgatgcccgcctaacgctgatcaaacatgtccttatggccctatctctttacttcatgtcag

SEQ ID NO: 71390 - DNA, 266 bp, Oryza sativa
  unsure (1)..(266): unsure at all n locations
tgaaccaacttgcgcacctttaaagaacacangctacctcaagccacgagaacacatgagaaagtgattacccctgtactctgtcctgtagctaacatcgcatggaaagattgtaatgccttaataaactgtctattttgtgcctaaacagagatgagcgtactccatgaagccacattccctgcacgcctctctttgaagagtgcctcatcaatcaccatcttacagttgtcccattacctgaatgagacagttcaacatactat

SEQ ID NO: 71391 - DNA, 438 bp, Oryza sativa
  unsure (1)..(438): unsure at all n locations
agctngagtgtgtgatatctgagctaccacgaccaagtagttgataggagcgtgcatattcttgtgtatgtttgttggttgctactaaccatcgcaggattgcgcaagggaataagagatcatcgacttcttcaccttagatgagatatgacaacttctccatgaagtgcatatgaggtacctgactataagtttgcatgagttgaatctaagttatcattatgcgacgagaagtatgattntgttgcttatattgattggaagcctagcatagacaatgagattgacaagaattttctgatgctcaaatgattaaggctgctaataataagttgacctcttctgcattattctggtggagttatgtgagtaataaacctaaaacttgggatgaatgcaaacaatgatggaaagagtttgtaagttctatacaatgtc

SEQ ID NO: 71392 - DNA, 311 bp, Oryza sativa
catccagcttgtcaattattgaagcctaacaagtcaacattgatcggcttgacgctcgcaaaattgaacttctagcacaacttgaagaatgtaacgctgaactggatatatagcacataaagctagccgatctcccaaagtctattgaagaacaaaaagtaatactcaaatcggctatcaagcatgttactgatctgaccagtctctgaaagtatcccagaaccaatctcatgaccccaagccatagaggaagatatcaaattatgcaaacgttatatcgccatccaacatactatctaataatcttatga

SEQ ID NO: 71393 - DNA, 381 bp, Oryza sativa
ttctactttttggtaagaagttcatgaattcttcaagaggaactacgaggccttgcttacagatacagttgagcacagcgatggaatccagaagtgcatcacggtgaggttgaagcctgggcgacaccaaccgagggatgttgatgggaaggggaggaatatgaaacgcactggaagttcgggctggagagatgacaatccatttgatagtagaggatctataatctggcctgaccatctaaggaagtacataaggtaagtcatctgtcagtttcatgcctaactactattgtgcccaatcatccttattctgttcaggtaagagtgcaaacactgttctgctgacttcagtatgcattaacataccaggttcatctttac

SEQ ID NO: 71394 - DNA, 253 bp, Oryza sativa
atgaaggttaaatgggtacccttcatgcagagataattctatctgttaaattacattccaaccaaaaattttatacaatttgactaacaatcctgtgtttttatggttgacacaggttttcactgagtggacgaagaagaggagcgaactgcggcaagatgcacgaaaagtgatgctacttatattcataatcgatgccataactgaaaatcttaattaacaggacctcctactcagcttagttggatgtctg

SEQ ID NO: 71395 - DNA, 414 bp, Oryza sativa
  unsure (1)..(414): unsure at all n locations
agcttgaaagtacacacacaaacacacagcagattgtatgtctggcctanaagcagttagatacaacaaaatattctatcatacttctatattccttttgatcaacagcttcaccatcttcatcaggatccaacacagctgtagaaccaatcggtgttgaaattggcttgcaattctccatcttgaaccgtctcaaaagatccttcgtatacttcgttgatgcacaaaagtaccttgaggtgtttgcttaatttgcaatcccaagagggacgattactcacccatcatgctcatctcagattccctacgcatagtctcagcagaatctacaaccaaagcgtgagtcgaactaccgaagatgatatcatctacataaatatgaacgaacagttgagtatcatcatgcctaagaac

SEQ ID NO: 71396 - DNA, 437 bp, Oryza sativa
  unsure (1)..(437): unsure at all n locations
agcttctttatatgctgtntgctatgtgaatattcaatgatgtagccaactttatgttacactcattatatcttacaaagcagtcggtatatcacttggatcatgttattgagggattcataccgcatatgctatatattgatatcaagctacttggttgattgcaattatcaaaaccactccgttggttggattatttattccttgactatatgcttaagtagttcaacttaccacatagtcgggggctacacctattaggtgcatttagtcgatgcacctgactttattgttcatctctccacagttttatatattgtaaaagtactccggagaccatgccaaagatgattgaacacttggcttatagtatctgttcgaagataatatctttcgacttgaagtctatgagtactgtaatatatggtactcatacc

SEQ ID NO: 71397 - DNA, 469 bp, Oryza sativa
  unsure (1)..(469): unsure at all n locations
agcttgtacagttgggaaggggntttttgagagaaaagaagaatctacttcaaccgatatgcccttaggcacggccatacataacatagaaatcacacgtggaaggggtgggcaattagctagagcagcaggtgctgtagcgaaactgattgcaaaagaaggtaaatcggccactttaagattaccatctggggaggtccgtttggtatcccaaaactgcttagcaacagtcggacaagtgggtaatgttggggtgaaccaaaaaagtttgggtagagccgggtctaagtgttggctacgtaaacgccccgtagtaagaggggtagttatgaaccctgtggaccacccccatggtggcggtgaagggaaagcccccattgttagaacaagacccacaacctcttgtgggtatcctgcgcatggaagatgaactacgaaaaggagacaatatagtgatagtctatacttc

SEQ ID NO: 71398 - DNA, 462 bp, Oryza sativa
agcttgtggagaggtggcaaaagatgacaggtaacattctttgatctctatgctcgacaatgtccatgctggtcggtcaagtcctccgagacctccgtttgaaccatgtccgcttcgtgtaacttgcagccgatgagaagcatccatacgtcgagcagtctcaagttgacaagaagcgctacgcggaggagtcagccgcctaccgcggggcggctgccatggatgtggactccggccctgcttcggactgaagagaagagacctgaattgcattccagaatacccttagtctatgagggcgacagacaggatacggctagtggcatctctatttccatgtaaataaaacttatgagttatctggatgtaaataaaactatctgacgtatctttcgagtcctgttctatgagtgtcttatcgctatatcgtagctatatatatagatagtcagctttgtatag

SEQ ID NO: 71399 - DNA, 421 bp, Oryza sativa
  unsure (1)..(421): unsure at all n locations
agcttgtgggttgcgcctcctccaaactgcactgattcgaggcggtcatgactacatatcctacttacctccaacaccctcaggctcgggaacaatactactgcggtggcctcctgctgctcctggcggaagttgagacagaccacatgatcgttgaacgaatgctcccacaggcgcaggatggccagccttggcagtgtcccgaggactatgatggcggcatcggcatcctccagttcggtccacatcagtctcagcttcacgagattctggagctttccgatccactgtggcagtttgcctagcgcaccctgcagcttgaggctctgcaagttctccggaggaggcgaggttgacgacgacgacgacgtgccatgtaggccttgacaccaacctgcacacaccgacnatgactctagct

SEQ ID NO: 71400 - DNA, 276 bp, Oryza sativa
  unsure (1)..(276): unsure at all n locations
ctcagattaactgctcattacagccattgtaaatgagagctttgacgtaactcatgtctgattacagccgactgatagaacaaaagcacgtctgctcggaggagcagccacaggatatatcatatattgatagctaaaatccctggctaaaacgaacatgggggttaagagagagcaaggaatctcaacctccatagggatngagtgacatgggagggattactccatccctccctggatatatatcacatggagaatatagctcacagaaccgaa

SEQ ID NO: 71401 - DNA, 280 bp, Oryza sativa
agcttgagcttgtatattaaaggctctattgtactatattgtatacttcaatacgaagagagttcagcacaatgagtcttgagaattcctgagttgtccgtaatcctcttctatttcttttattctgattattactctgaatacaatataatattcttcttgagtaatttagatttatcttgtgagaattatctcttggttatgttcctaaatagcatacctgattattgctcactataatcaactaacatataatgattgctctggtgagttattaaca

SEQ ID NO: 71402 - DNA, 274 bp, Oryza sativa
  unsure (1)..(274): unsure at all n locations
atggacatgtggtgattatgaagctnatgattactaaaatggtgaccagctgattagcagcttcaggaccagtgattataaagaccttgatcggagcattcgaccgagatcaactcaaccaatacaaatgcagggagcaagtatgccctaacactgctttattngtaccacacacactttaacactgtggcacacttaactacatatattgtggattaaaaaatttcataaaactacactgtcaacaaacatggccaccggcgagatgatatgg

SEQ ID NO: 71403 - DNA, 449 bp, Oryza sativa
  unsure (1)..(449): unsure at all n locations
actcgacccggatcttaagcactgagctgcagctgatcttttgaaatantccttctgacagactgtcaccaggtactgtgcttatactcttgggctgcaagaccgtgatcgatcaatatcttgtcaacgaatgccttgtactctctccatcccaaaataaaccaacatcctaatcctaatataaaccaacatcgtacggcatgtgacacatactantatggtgaatctggtactaggatgtgtcacatccagtacgaccgtacgagaggttggtttattttgagacagagagagtagatatgcaacattcgtcctgataagggcatgttcaacgggtgagcttgatttgagctcttaattagtacgcatcatcaaacagctatccacagatattgttacaacttataacacacacttatctattccctaataacttttttactactatg

SEQ ID NO: 71404 - DNA, 370 bp, Oryza sativa
atcactcgcccggatcttaagtcactgagctgcagctttgaaactaaaattggcggcaccttgagaatcttgaggtacttggagaatgcacagggacgacaatctgaacagagaacggagaacctttcagcagaaattggggccacagcttgcagagtgttctgtttcatgtcaacagagatgatccaggcatttttgtcttcttcagtcatcgtggacatcatgtaaacaaaatcgtcgtcatacatgctcagagtggggatagtacaaatcagtttcttcaattgcatcattttggtattatcgtcccatagatcgggcaaaacagtggagtaactgggatcaaccaagatgtcaaatttgtcaactg

SEQ ID NO: 71405 - DNA, 408 bp, Oryza sativa
  unsure (1)..(408): unsure at all n locations
agcttcttgttctgtctattattanaatgaatgagttcgatacaggtctcaataccggtaatttcttaacaactcaatttatatagtttaaagataattantttttactccatgatgtataatgctcttccgagactattgatctgaatggacggacaacacaaaaaaataaatttagataggattatttctgttgtaaatgtgtaattagaaagaggtgacatggctacatctaacccatataaacaaagtaaggggtcagattggtccaaattcaccggttgaagttggaagccaactccaggggatctgcacccaacattttatagtacaacgaatntgaatattcttntattcagattcgttgtactataaaatattntatctgggtttaaattgctatattat

SEQ ID NO: 71406 - DNA, 416 bp, Oryza sativa
  unsure (1)..(416): unsure at all n locations
agcttatgtctgacggtactattgaaaagnacaaggctcggcttgctgctcatggctatactcagaaagaaggcgaagatttctttgacacttactcacctgttgctagattgaccacaattcgtgtgctactttccctagcagcctcacatggtcttctcgttcatcaaatggacgttaagacagctnttcttaatggagagctggatgaggagatctatatggatcaacctgatgggtttgtagttgaaggtcaagaaggcaaagtgtgcaaattgttgaagtctttgtatggtctgaaacaagctcctaagcaatggcatgagaaatttgcaaaacattgacatctgcaagctttgcagtcaatgaggcagataaatgtgtgtactatcgccatggtgggggtgagggagtta

SEQ ID NO: 71407 - DNA, 352 bp, Oryza sativa
  unsure (1)..(352): unsure at all n locations
agcttatctttacacaactatcctatctaatttacaacttagtgaaggttgggttgtattaattagctgatcaagtgttgctaattgctatggccttgtccttaagtgacatcacatcaaactgagataagatggttagtgatcaaagttttgggagggggtcagctaagacctggcctgaagaaagagtgttgcacttgcacccctgcaccatatatagactgtactgtgtggggccttcattttattttaattatttggtgtgtgtgacaattangagtaagattgtatatttggtgtagatgatgagatcctgtgggtctttcctaattctacccatcattagatattt

SEQ ID NO: 71408 - DNA, 373 bp, Oryza sativa
  unsure (1)..(373): unsure at all n locations
agcttgtcttttttgactcggggatctcctccctgcgcactctggcaggatccaaggcaaacgacgctgtgcgcctgtgcggcgtgtgtgcactcgattgcttgtacacacctatgaacagttcacgtacacgctgttagctaacgtggatgagtgatggagcgaaatgaatttgtcaaggccttttacgtgctggtggatccccanactgagtaagggcctttgaattaaaggatttatgtagaaattttataggattcaaattctataggaaattttcctatttgatcctttgattcaaatgattgaagcttttcaaatcctatgaaattcctatggaatggcacattgcatgttgtttttggaggaaata

SEQ ID NO: 71409 - DNA, 408 bp, Oryza sativa
agctttatgatctattctgatagaaccttggaaaaaaatgttgtatgcttcatattgtgtctgtttgagctaagattttatgtgcttggatctagtgtgctcctgggtgtgaaaattaaataaaatgaaataaaatataaataaaaaaagtcgcatctctcttctcagcactagagagagaaagcaaaaaaaaggagccgacttgtaaacacaccccaccattccccttggtcaccaccttccaccgttccgtgttatcaccacctttttcttgttatcgttgctgtttgcgtttgtgttatgtggcatcctttgtggttaggctcgctgtcacgaccggaaataacccaacgggcgttccttacgtgcgtgcataataattcagagtttaacaagcggaagcataat

SEQ ID NO: 71410 - DNA, 421 bp, Oryza sativa
  unsure (1)..(421): unsure at all n locations
agctttttatgagaatagaacagcaggctggctgacccgttcgcggaagatggaagacgacgttgccgtccatcccttcacgcaacgccgccggccgcaacgcgccggtttccggtccgatccgcttcacacccaccacgtctgcaggccagccgcacgacgcaagcaaaagaaaaaaaaaacaaacagaccggataagattacctactactctcttagaaatacgaatctaaactataaaccttatttttttcttataaaaatataatattttacattaatttccgttagcacgttttcaaactatataagttntgtgtgaaaaatttctatataagctttaaaatacatcccattcgtcagtttgtccataattaaaattaattaattatactacatgtcaataagtttttcggtttac

SEQ ID NO: 71411 - DNA, 389 bp, Oryza sativa
tttcttctatgggtcggcccctcggctcgcgttcgcccccagctccgacgaggagggcgacgccagcggcgaggacgacgggggcgacgaggccagcgacccgggcgcattggaatgagcccccaggcccccgccaatctccaattttttctttttctttcttctttttgtatagatcaacttaatctgcaatcaaaaatgatgaaaaatttctatgttaaccttgttttgttatgcatatgagttgaggatgattttgtgccgggtccttttgattttaacttgatttaagggctcgtgctcaagtcccgatcctcaaatggcttcggtcggggctagtgccctgggagatccacatgtcgagactggccaggccgggaacatggtga

SEQ ID NO: 71412 - DNA, 116 bp, Oryza sativa
tataccactcctagcgaacctccgattggatcgaaattcccagattacttaagccctttaaattacttcctctcgacccggtccaataggcgccactcatctatataaagcgtccc

SEQ ID NO: 71413 - DNA, 409 bp, Oryza sativa
  unsure (1)..(409): unsure at all n locations
agctatgtgtctggtgtgccacacaaataaccaatgaaatatgaaagcatgaaacacataacaatcatgaagaattaacttgtttgtttcggtttacagaatgacgtactaagcacataacacccaattgatgcaagtcactaagattatcatatacagcaagaaaattgtaacacagttcaatcagactatgattctacggattattcaattgggctaccatacgcagtgagcaaaatagcaacgctataatatttcagtgaaccaatatcaacgcgaactgggaattgtcagtatgaggcatcagatgatcacacagcaaaagagnaggataccatgatacgatacgagaacctagagagaccgcagcatggacctaccagaacttttcaaaaacaggcttcatatg

SEQ ID NO: 71414 - DNA, 252 bp, Oryza sativa
aattagatgtatgatgtgaatattttgtcctgatacgtgattggcacaattaatagcccagaatacgggtattgaacacttgtggtatccttcccaagcataatcgtatactccctttttcaaaatacactaaccgaaagacatcctatagataaataacaacatcctatctaccactaaggattcccatttttttaaaagaatgctttttatgcaaattctaaattatatgtatcacttatgaattttgac

SEQ ID NO: 71415 - DNA, 229 bp, Oryza sativa
  unsure (1)..(229): unsure at all n locations
ctatcgctgtcatcgatttccccgacgagtcgagcttatccgccgagtgccggaagtacaaggtgtcgcttcgctttttgcctcatctacccagtcaatagttgatgcgatatagctaatagtttgtaataatgcggacgtggaatgaatgaatttggttcaggaagagagggaggtgtttgcactggaggctgtggcgctccganggatgctgcgtgagcttgtgggg

SEQ ID NO: 71416 - DNA, 449 bp, Oryza sativa
  unsure (1)..(449): unsure at all n locations
gcaatcactcgaccgggatcttaagtcacctgagctgcagcctgtttcgttgttattgacttataccacaggtgttttcatgttttcaatatttctatgaaatgtttataattcttttaacactttgcttttattttttaagaaaaaaatgtgttatcatattttaacatgttttggacaaaattattttcatattattaaatcttcttataaatttcagcttgtgaacatgttaggagttccacttcatgtttttctttaattcatatacttatttatgtggataaacacggtttaccaataacaataatgccaatagactatcataactgatctgtgacgattgttcaagtaatgagtaatggaaaacctttttccacgcccaaagaanaagcttacaccaatcaacaccagatctttgattggttagactctattagnatatgttc

SEQ ID NO: 71417 - DNA, 422 bp, Oryza sativa
  unsure (1)..(422): unsure at all n locations
agctntgntttntaataccattctcttaccacctgngcaagcatttgtggtgatacataacgtatttcgattgtaaaatatatatatatatatatcactgctagggacaatcaatcactacaaggcttgtagtggaacattgcataatgaaatcaacgttatagttgttataccttatggattntcttcagtttcgcaacaacaacagccaaaactgcatactgcatgatgttgttgcttacaagcagctccaatggacaatgacggaccaactgagtgcctataaatgttccgaaacaacgctaattaaaattatctntctggtggcactcattagtcaatatgtaacgatgctgatgaattaattgtcactggcctcaaccaacacaatagacaatgttggaactgcatacctatgtgac

SEQ ID NO: 71418 - DNA, 253 bp, Oryza sativa
cttcttattttccaatgttgtaaggcgtgttagtgatattctcttctttcataaaacttcaccttttggggcgcattgcattttcaaagggcattacaagctctgctacttacattccctgatgaactctagccatcattaacctgtgctagagctaccgccaaatgaatagcactcctgacagaaaatctccccagtctatccggatgccaagcaatgaagatctcctccagccttgaagatatatgaatgt

SEQ ID NO: 71419 - DNA, 348 bp, Oryza sativa
  unsure (1)..(348): unsure at all n locations
agctttatttattgtctggaatttggcgaaacctgttntcgatgattgaataatttgaaaatcttcccttgagggtaatagccctatgtcatgctcagtttgtatatacttgaacatatataatacaatcattggatggggagctcttgtctagacctaatagactatcttgctggggtcaacaatcanggtgttttcgtaaagctctcatggtcattaacgaaataaaattatatattcaaccgaaggacttcaacttctatgcaacacttgtccaacatgaatatcaaagaagacaacttctcttctctaatctgctttcttcttcatctgcttgattgctcggca

SEQ ID NO: 71420 - DNA, 320 bp, Oryza sativa
  unsure (1)..(320): unsure at all n locations
ggcttggatagtggattcaatgtctatgcgttctcgccgntcggctagtcttaacttcgctttcttcaatatgaactggtggtgctcaaggtagacagcacgagtaaggatatcggctagctcatctggaattgaaatttgaatttcgtgcagccgagctctgattgggccacagtcaaccactaagctgtctagcgatgatgcttctagccgatccaagatactttttagagttttcttgacatcatcagataagggagtcaatgctttgcttgtagtatcttcttctccttcatcaagatagtctctgatatcaaaag

SEQ ID NO: 71421 - DNA, 411 bp, Oryza sativa
  unsure (1)..(411): unsure at all n locations
agctttatttattggttagacacaattaaggagttagatcactgcttaattgatttcttgctgtgcttgccgagtggtgatgaacattcactgtcaattgttgtcacccggccccttccaatttcgtgtaccatattcaaattggaaattgcaggactactccaagtccaactctctctttaaaatggcatgccgtacgcatgcagttgcaactagctagcttgctgaagtaatcccagctagctaccgggagtcggagacatactccctccgtactcgtaaaggaagtcgtttaggacagcgacacggtcttcaaaacacaattatgactttctttttctataaaaatnattattaaaaagtgatatatatatatatacttttatgaaagtatttttcaagacaaatcta

SEQ ID NO: 71422 - DNA, 399 bp, Oryza sativa
agcttacgctatcttttcatgctcaatgtgctagcttttcattgtgagaagcatatgcattggtgggtgttgttaatttagatgaggggataatgacctggctcggctcgttattagtagtatcatgactagccagctcggcttattaattaaccctaacgagctaaaagcgtggctcggcttagcttacgagttggcttgttaagctcgttagtaagttcaatcttatttatatcaactttaaaatttcaatatttaccaatttatcatatgttagtataatataagcaataactaagtaaatattcactaaatacaaatagttagtttgctagtaaattaaaggactaacactacaccatggtccacttttgctaacaaaagtcagttggaaaaaag

SEQ ID NO: 71423 - DNA, 326 bp, Oryza sativa
agcttatatattccatataactaatatattggtctataataattgtgaacaaatttatgagatagttttagtatatatatatcccaggaagtcggtttcaacaatcgttgatcaccacggtttgattactcatgtcattggcagttaggaattttcaaaattttagcgcaaaattgagaataaaaataaagtaaacgagagggatatgtaatttgactcaactaatatgaatttatgttgaaacaatcataaatgataatgaaatatgagtgttttatatatatgggtttctggatacattttgccccaaaatatgggattccttg

SEQ ID NO: 71424 - DNA, 397 bp, Oryza sativa
  unsure (1)..(397): unsure at all n locations
ttcttggtcattgnttcccctcttgccgatatgtggaaccatcacatgttaaggtttgtctccaaaactctggctgggagacctgccaactgttgatcccattgtgttgctgcatccgtgccgcttgctccgatcccttccttgctttcaaatattgtagattcattcgccgccgtcttctcaacatctcccctctatcatcaggcggaaatcggcaatgaatcacccccactatcctcacgaagaccgtgcttctatcatgtctgcaataggggtgtaagtgggtcacccgcgaacagacttataggtcaaaataagcgagctcgcgggttagtttagcctataagtgagctttcgcgggtagccgcttgcacacttagttgcacagccccacttt

SEQ ID NO: 71425 - DNA, 401 bp, Oryza sativa
  unsure (1)..(401): unsure at all n locations
agcttgtttattgacaatgngctaacgtttaaacttgtttattgaaaacggtaacaaggcacaaggaactatgctgatgcttttgtgtagaatagtgtgcagagagagaggttactgggaatattaaacttggtgtattttaagccttagcgctctttccaacttaaaggattagattcttttcgttttctgatagcatgcttttcaaactgctaaacgatatatnttgtgcgaaaaccttttataaagaagtagtttaaaaaatccaacaaatttattcataaaaaattatatattaatacttaattaatcatatgctaatcttatttcttattttacgtgcggctaatcagtccaccgcacctgctgaaacgggcgcacccttagtgggccagtatata

SEQ ID NO: 71426 - DNA, 297 bp, Oryza sativa
gtcaagcctcaacttaactgagtatatcatcacccaccatgactataaagttttacttattggtgattaaatactttcatgaagccacatcatctcaaacgtgtctgatctttggaggatcgagctaaggcgcaaaaacacctagctgcgcagcaaatcaacaatgcacctcttggcatcggttgatcatgctatttttataagcaagttgaagggtttccatcacgcttcataagtattctagtccctagcaagagtgagcaatgtgtcatatttgatctgatgacccactatatc

SEQ ID NO: 71427 - DNA, 389 bp, Oryza sativa
aagaaaatcatggtatgtaatatatgtaatatggctgccatgtactccatttatggtagaacttgctggatggatgtaataataactaagaactcggttgtccttaatttagtaacctctgtgcttgctgtccagaactttggaaaatctgtaaacataagttcatctaagttagaaatctggttataagctcctgttaatatgaaccaacatttatcttgctggaactaacttctctaatgtcaatttaactaactatctaagcttccataaacccacaactgagtagaacttgccactcacccgcgaaataaaagtttccaaatgttttatggtagcaagtctgtcatacaacttaaaagaaaatattatcttgctgtcatgtcaat

SEQ ID NO: 71428 - DNA, 205 bp, Oryza sativa
tacacaacgacctgctggacactaccgcacgcatcctgacgaattcaccccaaacaccctgctcgactccgacatactcctccggcgctaccaaaaattgcaaactaatacaagcgtgtattcatctcaaggacagagaaagcaagcacaaccgttcttattgatcccactggttacacccaaatttggcacctagagataaaat

SEQ ID NO: 71429 - DNA, 344 bp, Oryza sativa
  unsure (1)..(344): unsure at all n locations
agctntaggaattagtgagctataactntatagtaagagaggagatattaactctattatgaagaacaaagacacagaaaataaactatcctcccaccatggatgcgaactaagacaggaaatagtttagcggagttgcttccttgtacaatatgacgtttttttgggtgcgttcgcagggtgtattatgggggagtattatgtccagtattggaattctaaccaagcctaatcacttaggtcaaaagaacttttgatgtttatctagagggaacagagtgagcatttctggggatgtgacagggaagatcggaaataagcacatttagtggattcggagcacc

SEQ ID NO: 71430 - DNA, 195 bp, Oryza sativa
atctaaacagggaagagggcactgattctatatcaaccatgaaaggtttctacacagattactcattaaacttgaccactatcataacaccgcgctggaaacggctcacttgttaagtgtaaccctgctctcctctctaataagcttaaaaaattacactggttatcccgctatgaccacctaaggctaataacg

SEQ ID NO: 71431 - DNA, 325 bp, Oryza sativa
cagctttgttttcacatccgacgattccgaggacgacgaaccaacgacgatggtgggcagcactccaccaccaccatcactgcgttcgaggcaatcgccgccgtgctttggaagtgccgtacacgagcggtgatggcgagtccagaggctcccgccatactagtcttcgtagtgaacgcacgaaagtacctagcaggcgtcaacgacggctactactggaactgcagcatgatgcacatggccatggcgaaaagcggcgcggtggcgaacggcgacatcatggacgttgtggagatcatactgcgagccaaggagcgcataccgg

SEQ ID NO: 71432 - DNA, 390 bp, Oryza sativa
  unsure (1)..(390): unsure at all n locations
agctttattttgtgtactgtttggtactgccttggtaggacttctatttaaaatataaattgcagtattaactgcttcagcccaaaaagatttaggcatacctttgtcttggagcatagaattggccatatcattgatcgtcccgattttccgttctgcaactccattttgttgagtactatagcctgccgttagctgtcttctgatgccagcantttcacaatatttctcaaattcttttgagatatattctcctccttgatcgctgcgcaatactttaatttttcgattactcttgatttccaccatggccttgaattttntgaatatctncaacgctgcagatttttcttttaaanatatacccagatcattcttgtataatcatcg

SEQ ID NO: 71433 - DNA, 414 bp, Oryza sativa
  unsure (1)..(414): unsure at all n locations
agcttctttgttagtttgatcttgntggcattccaccagcgccaagaggtatgccacagatcgaggtcacatttgacatcgatgccaatggaattgtgacggtctctgcaaaagacaagtctaccgggaaggagcagcaaatcaccatccgatcctccggtggcctctcagaagctgagattcagaagatggtccangaggctgagcttcactctcagaaggatcaggagcggaaagccctcattgacatcagaaacaacgctgacactaccatttacagcgttgagaaaagtctgggagagtacagggacaagattcctgcagaggttgccactgagattgagacagcaatcgccgatctccgctctgtgatgacctcagatgacatcgagaagatcaaggccaatatcgaag

SEQ ID NO: 71434 - DNA, 338 bp, Oryza sativa
  unsure (1)..(338): unsure at all n locations
agcttgtcattcttcatgtaattccagagctcatcagctagattatctgttttttcagcaagcagtctaactgtattcaaaaaaaccttctgcacaataaaaagaaggcaaaggaatgaaatctaaatgactttgagcatttgtatgcaagcaagcagtgaaaaattacttcctattacatctcgtttccactaattgtagcaaggatgaactangatcaagcggaataaaacctactactccctccgtcccataatataacaacctaggaccggacgagacatttcatagtacaacgaatctggacatgcacatccggtcctagattgctatattat

SEQ ID NO: 71435 - DNA, 372 bp, Oryza sativa
  unsure (1)..(372): unsure at all n locations
agcttgtctttctgtgtgtcattnttcttttgggataagaggccagaaggcccagcttttntngaaagccagataataattactgcntcngnncaacagctgggagaaccagcttttacaagaagcattctagccaaaaaatggccttacacacgatctaaagagccaaacaggagaagaaaaccagtgagcaaaaggcaatatctatgactacttgcttttttcatcccacgccagtcctgtactcctgtgttgagggccttgaggagatangaagtgcacagcttctaagatcttgcctgccatcaactcagcttctgcttcttcattntccttcatcaggtagaccactggcttagataaaacatcaca

SEQ ID NO: 71436 - DNA, 189 bp, Oryza sativa
cttcacggtgttgcactatatcaccgtatgggaacgatgtaaacaccgtgaccgcgtggctttggaagtaatgggatagtttcctgaccgtgatcaaaacacccgttaacaacttctgaacttgatgatacctcttattggagtcagctacgaccttctctactaaatatcatcggacgctcggtcctt

SEQ ID NO: 71437 - DNA, 379 bp, Oryza sativa
aatcataaaaaaagattaatggaagtaaaatcatgtttatagttgaaaacagggttaagaatgcaaatgcccttagtataattttagaaataaaattttatttgatgaaagttaatatcattagtttgacatttgaatgtacttcacatggctataactaattttgttgctacaaacactgtatgagaaaaaggacaccctctcaagctcgatcacctcttatattttgggataagggagtatatattacctctcacatttatttatacacttctcatccagttggaacagtaagatcaaattccaaagctctggggagagcatcatttctttgctgggagtaacagtactgtattgtaaactactagtgcagagtcac

SEQ ID NO: 71438 - DNA, 371 bp, Oryza sativa
tagcttcacaattaagaaaacataatgtatttaaataataaaacaataacgcgaggatctctgcgtgcacaataagtttatgcccttaagaatagaatgactgatctacatgatatataatagatttcaaggttctatcacaaagcagaattccatcaagtttatagtgacaaaacactaacttttgaaacattaacaaagttcaggagatcaaaactcaaccaaaaatagcaaaattagaagagacctttatgtgttctatctaaaagaatagcatgcaaagtatatttatctagcaagatattgattaggagattatgttactggtaaaacaaataattagtttacattatgttaaataattagtttac

SEQ ID NO: 71439 - DNA, 407 bp, Oryza sativa
  unsure (1)..(407): unsure at all n locations
agctngctcctcatttaattgtcatccatgcatcccgaagcagtcctataagtcccgttgcaacagcttcaacttcagcgagtgcattaccacaaagtgtcaatgctcaatttcagccccagccaccagttgacaagataaaggccagtatcggcattgtacctttggatgttccagcacagcagccaagaaatcaagtacaagatgaagaacccaagccaatgggaatgagaaaagcatcaacgaaacctcaccagagctaatccaaattgtgggtaaccaaaccaacatgttggcaacagcctttcaactattacagaattggaacaacccagcacgggcaaccaacgttcaagtacctacagtccagcaacagtgcaagttatcagaatttctcaaaactgagc

SEQ ID NO: 71440 - DNA, 123 bp, Oryza sativa
acgtacaacttataatatgaccacaacacgccaagtgtaattatcttttcctctggatgactaattatcttttctccgatcctttcttctcttctcttctcttctcctcttctctcttcttct

SEQ ID NO: 71441 - DNA, 352 bp, Oryza sativa
  unsure (1)..(352): unsure at all n locations
gtaaacaatgaaagaaagaaaaggcatctttactatgaatgatgctaccataccttcaacttttaaattttctgtcacatccaactagacacatgtattaagtatttcatgcgaaacangaactagctacacagcttacatgtagattacgagatagatctttcgagcctaattgcgtcatgacttaacaatgtggtgcgtcctaatgacggattaattaagcttaatagattcatcgtgcagctcacaggtggaatctgtcatccggtttgttattagtctacctttaacactctaaatgtgtgtttgtatacatcatagaaaattgccaagcagctaaacacggtctatg

SEQ ID NO: 71442 - DNA, 415 bp, Oryza sativa
  unsure (1)..(415): unsure at all n locations
agcttctagatgcttcttncgagatgaaggtgatcgagaagatccacgaagcggccgcggatgggccgaccgtgttctcgttcgagtactttccgcccaagacggaggaagggctcgacaacctgttcgagcggatggatcgcattgtggcgcacggccccaacttctgcgacatcacctggggcgccgggggatccaccgccgacctcaccctcgagatcgccaaccggatgcagaacatggtacgcttgtgcgtgtgtgtgtgtgtgtttgtgtggtgtcgccgcctctcgatcgctcattctctcgcgcggcgcggtccgatctgaatctgttttttttgggcgcgatttggttcggcgtggcggaacggatcgtangaagtggctatgtttgtgttgggtgggatgctttt

SEQ ID NO: 71443 - DNA, 253 bp, Oryza sativa
  unsure (1)..(253): unsure at all n locations
agcttcagatttggcaggataacgatcaaacaataagaagtccagcagtaaagccacttgggaagacggccaagcaagaaaaataagataagnnnggnnccgncgagaaacacaattcaaaggcaaagntatcgacccccgcatcaaatagcagatggagctagcacccggagaccaggaaagctaatatgaggcagttggtggcatgttagaagaaaaagacaagcatgatactctcatgatgacaaacaag

SEQ ID NO: 71444 - DNA, 364 bp, Oryza sativa
  unsure (1)..(364): unsure at all n locations
agcttgtactcatcttttttgtcacaggataaagctgatttgttagctggcattctgggatgtaacattggttctctacctttcacttatttgggattacctttgggcaccactagacatagagttgtggactttgcaccattattagacaggatagaaagaaggctgacagcaagctccatatnntctgcctcaggaggaagattaacattgatcaattcagtcattncatcaatcccaacctactacatgttctcattgcagttaccagttacagtcatcaatgctattgacacagctcgaaaaaactatctatggagggggaataacccttcttcacaaggaaatctcttgcttatgggac

SEQ ID NO: 71445 - DNA, 392 bp, Oryza sativa
  unsure (1)..(392): unsure at all n locations
agctttctatattattcacccaaaatcttcatagactgcgaccaacagtcaagctcacaaaggtgagttctttcaagaatgctctgcaggacaacatcttcgctaattaaagccaacagaactcattaaggcatagccaacctgccttgcagctcacgagagtacatgcatcttcacttggagagggtatatatattgatactctcctctagtttactaatggtttgttcttcccaggatctaattcacgggatctccgatcacatagactgggttaccaccatagtataactcacatgagtctcaaacccatctccttcgatgcattgtctatcacatntcgtgataatcccttcgtgaagggatctgccaggtttctcgctgtttggatg

SEQ ID NO: 71446 - DNA, 396 bp, Oryza sativa
agcttatgttgtctactttcagatgattttggttccacatcaaaattcctaccgagctgccgggaatatgcaaaacaagccacacacctcatccagtccgaatctgattttggttttgggccttgtaattgtgtcatgggcttaggccaaaggggtgtgcgccctatggcaaccctaggacgttcctaatcatatttattcagtagcctgtttagattaatctgtcaagaacagttttgccgctatatcggtttgtggaactccaaatttgtgtgcttaatcattcatatgcaactgtgttgtaatatatcttgttcttgcttgtgttcttcgattcatattcagggattagccttctcggcaaggtcaactgggtttcggcacagttgataacta

SEQ ID NO: 71447 - DNA, 374 bp, Oryza sativa
  unsure (1)..(374): unsure at all n locations
agcttcgtttgttctgcgtcgcctcctttctgcaatgctgcatatgtatgtacagtctaatgtctatacacagtgtctcctggaattgctgaacttcacactgcttgtgctagtgtacaattcagaattcagatcatatcatatggtcagggacacaagcaactgttctatttttttttcagcagctgttaagattaattattcgaggtataaatgaatgaagtattataaagttaggaaatagatttaaattaaatagtatttactataagaaattcatatatgtacaaattnttcaaaaatcacgtattgntaagagattgagaaacgtgtatgttaattcatgnttggggaatccaacaagaatcgtgttc

SEQ ID NO: 71448 - DNA, 413 bp, Oryza sativa
  unsure (1)..(413): unsure at all n locations
aacttntatatttttaataanggaattcatgaatttctttgttcatccaagggtaaaatggtcatttttatagaaaatacacggtcaactaacggtcaactgacgggaggggtatgcaagggatcaaaatcaaattttgggggtatataaggaagtaagcaaaattcatgggtatagaacggattangaaaaatttcangggtatataagggattttctcaaagaaatatggtgagagatgagtgttcaaaggcgagtaaaaaaaattctacaaccacattgcataataaaaaaaatcaaataataatttcatataactagactagaacaaagcttaagaggtgaaaggagttttatgctatgatttagtaatcgttgagacctatgttactcnaaattttagactcaatcta

SEQ ID NO: 71449 - DNA, 388 bp, Oryza sativa
  unsure (1)..(388): unsure at all n locations
agctttgtgtactgacaacgacttcatttcagctggacggatcagcaacgagcgcaggctgtgaaagataggctgggctaccgtctgatcttcacaagccgtttggtaattctctgaattcaagagaggcacacatcaattcttttctccaatggaaatgcttttatatgttccttcctggaacaacangttggagcactcgtgcttgtcgacgcattatttcttggcgctcaaaggaatggccctctgcttcaagaactgcaatctcgctaacgaatatcggtctatgagcaaactgctcttgtgacgtccaagcttttcgagcacctccggctgtgagttgttgcggctccgtaatgtaagcccattgtacatgtatgggggaaaa

SEQ ID NO: 71450 - DNA, 424 bp, Oryza sativa
  unsure (1)..(424): unsure at all n locations
agcctttcacatgtttcattaatcctctaaacaggtttttgagaagttgcaatgggaggaagcgaatacgatgatgactgggagttgcctagcgctgacatcactgtagttctttgcggcaaacttggctgtggcaagagcgcaactggcaatagcatcgttggaagagaagcatttgtatcagagtactcccatgctagtgtgaccagtacttgtcaattggccagcaccgcgctaaaggatggccgtaccctcaatgttattgatacgccaggtaagcatgcatcaatttattctgttctgaccttttgttttctgtgatgactattcattgttgttactacatattcatacttgttaatcttgtggatgntttgaatttgcgttatctatatttgatncttgtgccacattatcatctatt

SEQ ID NO: 71451 - DNA, 368 bp, Oryza sativa
  unsure (1)..(368): unsure at all n locations
cttacaaatcactaactgcgaagttcccttccttcccttctggtgctttacatctctgcacaaatatatattcacttctggtagtcttgtaacttgctaattgtgaacaacttgaatgggtcaaacaggtaagcttgagtatgcccagaaatctcctgcgctacagatctcatggaaggcctcgattcaaggttcacccttgtgcaaccaagcgcgattctcactatgaacacgacctcttctgcgagctgccctggtggagcatccagccgctggtctagtatgtccttgagcagtagatcatcttcttctgatgatgagatggctggcanggatgttaagaggcacctgggtgccctaccatcatg

SEQ ID NO: 71452 - DNA, 417 bp, Oryza sativa
  unsure (1)..(417): unsure at all n locations
caagcttcataatttatctagtctaattgagtttgctgtggccctgtggtctgtggaggcccaaggactaacaaaaggggaggaaactaaagcggatntggaatgttctctgggcctcatcttgctgtcactttggcactacagcaccaactctagccaggagatcctggctgggtcangcangcatatggntttgcatcttttgataaaagccaccagccatatggataccatgtgcacggcatattnttaagctaggttatatatacctgatggctagattggcttcaatcacagcacatattttttttcccattaatgatgtggagtactctactagaattaatcgangnntngatccagaggacattgattaaattatggggggaagtgaaaaatgttatagtagtagctgct

SEQ ID NO: 71453 - DNA, 424 bp, Oryza sativa
  unsure (1)..(424): unsure at all n locations
atacagtcgagctgcacgcgtgcgaggctgacgttgtcttgtaatacaaggacatgctgagatacacgtacgcgtanaaaccacgaacatgttcgatattcctatagttgtcaacgacgttcgagttgctaggaacccggccgagcgacttcggagattaagaatggcccttcccataaaggagataacttgggccgatctcgtgtagattgaattttcctcaaaaccaggtcgccgactagaaaagcgcgtaatcggacgttacagatatgatagcgtcgcaacccttgtaaatatcgggccgactgaatcaaagctgcttcgcgggcttcttccaatcggtgcaggtcatacactcggtcctcttcatagcgttttacgcganaattgcgaaagcgcaaggattcgaattccacttcactag

SEQ ID NO: 71454 - DNA, 402 bp, Oryza sativa
agctttattttctttcttgctcacacgttcttgctgctgccggtgattgtggcatatctcccaatgtgtacgtctcaaattatttcacgaaagaagcaatctttcatacattgagtgaggagatatatgggttcgggatctcaggatcttacacaacgctgagtgcccaagttttttatattccagatccatctaagttaagggtgaaaaagggtcgacgtcaaactagacgcatcaaaaatgatatggatgagtcaaaagcaggtgggaggactttacgctgcagcaagtgtgatttgcgcggccatacttacaagaaatgcccgaagaatgcagaagttccaagcggcgtagatgctagtccatctggacaggcaagtgatggtaggcgaccacctggtg

SEQ ID NO: 71455 - DNA, 396 bp, Oryza sativa
agctttctatattattcacccaaaatcttcatagactgcgaccaacagtcaagctcacaaaggtgagttctttcaagaatgctctgcaggacaacatcttcgctaattaaagccaacagaactcattaaggcatagccaacctgccttgcagctcacgagagtacatgcatcttcacttggagagggtatatatattgatactctcctctagtttactaatggtttgttcttcccaggatctaattcacgggatctccgatcacatagactgggttaccaccatagtataactcacatgagtctcaaacccatctccttcgatgcattgtctatcacatttcgtgatagtcccttcctgaaaggatctgccaggtttctcgctggttggatgtaat

SEQ ID NO: 71456 - DNA, 280 bp, Oryza sativa
  unsure (1)..(280): unsure at all n locations
agcttttattgacttgtgactcgaaatgaagagaggaagaaggagcttctcaagctaatgttgcagatgaagaatattccacattgtgatgagtgttttccgaataaagaggagcaggggattcgttttcttcaagatcgcaagctaacgagcaacaacggcagccagcgtaagtgggcagtacatttcgaacatagtaaatttgttccatgccatcacatagtagtaacgcaagcagagtgcaantcgaaaagtgctccctccatcttaaaatgtatga

SEQ ID NO: 71457 - DNA, 336 bp, Oryza sativa
  unsure (1)..(336): unsure at all n locations
naagctggccaccgtgcggcacggcagcagggagcagaattctggctttgccttggcctccggggcttcaatcatcataatatacatcgatggcgaaatgcttgtgccttagttgcggatgagtactctagtcatcgtatgtgagtgaggggatatgaagagagaaggtcgatgtgatagaggaagaggaactggcaccggattgtcgaggtggagtttacgtcgctgataaattgaccccaccattgggttctaactggtttggcacgtaaacgttacgtaggacaaagaccgaatcaataacccacatagacaattgacccaggtttaataatt

SEQ ID NO: 71458 - DNA, 167 bp, Oryza sativa
aaaaaaccagtttaaacgaggggccatttccgccaaatataggggattaatcttcttagtcagatctttgctattgaaattttgaccgaagtacttttaaccccaaaggattttggctcaagggaaaagcgcgccctatatttcgcaaagagcaacccgcacacgct

SEQ ID NO: 71459 - DNA, 383 bp, Oryza sativa
tcagtgagtcagtcagatgatgcaatcatatgcaaggggagggagaggcaaaagcttggaataatcgatcatagggcgacaccatgaatagtatatttatccccttctttcgctttctttactcccacttttgtccaaagctgtttggcacttactctccaggcgtatctgctccacatcatgatcatccctgatgtcacaactcaggccatcagaacatggtgccatgattctttcctatctagcttggagaacatggtcaatgtgtggatcatttcgtaatcctgttattatccaagagctgaattaacccacacattaagtacaacagcctgaactctgaagataggaagaaagaaagaacatgctattgctatcagata

SEQ ID NO: 71460 - DNA, 406 bp, Oryza sativa
  unsure (1)..(406): unsure at all n locations
agcttggagtaagcatcacgacacccatcgtgtggcttgttggtccattgttgaggaaccaaacatgatcaaatggatccccccttccccgcaaaaaaaaaaggatcccctttcctgctgagggatactngcacgttgatcattcaaatgaaccaggcatgtgccaccatatctcattctatccctctagtgcgaggatacatgactatatcattaggagcatgcatatgcatgcctcgatgttggcttgtagttgacttgtctgtaataagttacctagtacaatatggccatgcagcagtcctatgcccaatggtctagtttgccaaaatagtgacactttacttggacgcgtcaaggcctacaatctataatggcctaactcacacccatatagatattaaaa

SEQ ID NO: 71461 - DNA, 227 bp, Oryza sativa
aaaaaacaaacctataaaaattgagaagggtgagattttctttttgccaccatccgggcgggtcatattaaaaccattttaccctacttcctaacctaccacttataatctcttcctatccctaaaaacgtatttaacgacgacagttagcaacgagaagccaccttgatacttctgaaataagccgatacaacgtatgctccctctttaatactaacttcacactc

SEQ ID NO: 71462 - DNA, 111 bp, Oryza sativa
aaaaaatactaacacaactggggggggaaatttttcgcgccgcacgatggggttatgcacgtaaaatacacgtttaaaaaaatacctattcttagtgatccagacatgtac

SEQ ID NO: 71463 - DNA, 119 bp, Oryza sativa
caccaccgcccggacccaagcacggggggggtgttttttggcgcacaccggggggcgcgcaaacccgccaaccttattatacctccacgagggagagagaaccggaccccacaccatga

SEQ ID NO: 71464 - DNA, 58 bp, Oryza sativa
ccgcccgcacgccgccggcccgaccggggggcgcgacaaccacaggaccccggggggg

SEQ ID NO: 71465 - DNA, 369 bp, Oryza sativa
  unsure (1)..(369): unsure at all n locations
aaagcatataaagacgaatgtgttttaaactaccattcgcttcataggaatggcccctaagaaaactatatgaaagtttttcattcctctactttngaaggaaaaacatacgaaaaaaatatctactccaacctaatgtttgcatttctttggttggcttgctcaacaacatatgaaaacttcatgtgtttttcatccataggtntgccattgtattcctctagtattcctatgttttaaaaatcctatgaaccgaatgagccctaagcaatgccaaaagtatacatatcttatgcggtactgcaatttgtagtagcagtgactgacagatgagtaaactgtacacaattacgatcaatgcctaagcac

SEQ ID NO: 71466 - DNA, 403 bp, Oryza sativa
gagcttgacgaaatttagcagacagtgacaaaccatgagcatgaattcagtgatcatcatatattagtatacataagttgatataagtcgtagtttcaaagaattgaagccgtaaagttatataacctagaatcttcccagtctcggttaattattcttttcagatgaaaactaattacttagtatataacaagttgatgatctttaattattagcttgttattgaaggcgtatatatatattccctccggcttaatttaaactcagttatgggtttgtgagtttaaagtttgaccggccgtcttatttaaaattcttatatgattaggatttttatttttattacatgataaaatataaatagtactttatgtattggcctttttctacatcaaccttataa

SEQ ID NO: 71467 - DNA, 420 bp, Oryza sativa
  unsure (1)..(420): unsure at all n locations
agcttcttcatctaagtcttcttttggtgctggttttaatgccacatccgatgatcaactcgaacagatcgaggaggatgatttggctttggttgctgacaaaattgctcgagctatattgccaggaacagganaagaggtggtccanatcgttgctttgaatgtggttcaattcatcatcttcgttcgcattgtcctaaggtagggagaggcaaaagagaagacaaagatggcgagaagaccaacaacaacaagccgaagggttcatcccaagggaggaagctggagaatcttagtaaggcttttcaacaagtttgcgccgccttcgagccactaagtgatgtaaatggtgaaagtggagatgatgataatggaaagaacatctccgatgtttgcttcatggcgcgtggtgaatctgac

SEQ ID NO: 71468 - DNA, 148 bp, Oryza sativa
aagggaggatgatgaggacattccttccacgactcattcacgcctattgcacagcatggaccaatgactagagcctgagcacatgaacttaaattacaagtgatagtcattcctagcctatcatacaatttcttctcagaattgggtg

SEQ ID NO: 71469 - DNA, 387 bp, Oryza sativa
acttgttttataatcttagaaacatgacataaatagtgccatcttataaaggataactgattatgcttggacttcatcgcaattccgcagaatataaatatgaacttgttctgattcaagcatatcaagatctccagttttacgagaaccaatgggcctttcagcacaggagaagaatgataaattaaatttgttaccaatagatgtgtcatgtattcttcctggacgattgtgttttgtctcgacatcatccaagtacctaaagcttaatgtcataaactcatctgcaatgtatccctcagcaattgaaccctctgggcgagccatattccgaactagtgattttaagcacggaatttgtctctcaaataaatacatccatcgata

SEQ ID NO: 71470 - DNA, 412 bp, Oryza sativa
agcttttattttcattttgaatgtgtacaaagtgggttaaaatttaaaatttcatctaaaatgtgcaccaaataatatattttaaggttatcaatgaaaatgtagatctagagctattgatttgtggaactaagaatacctggctcccagattaaaagggattaaaatttaaaaatttatctgacatgtgcacaaaataatatgtttaaatgttatcaatgtaattgtagatctatagccatagatttgtagaactaacgccgcgttagttgatttggcaaaaaaaaaattttgacgtatacggatacacatttaaagtattaaacgtagactaatacaccacaaattacagattccgctaataactgtgagaccaatctattaagtctaattatctgtcattagtaaatat

SEQ ID NO: 71471 - DNA, 90 bp, Oryza sativa
aaacaacaaacaaacaaacaagggaacaacaaaagcacaaaaaacaaaggcgcacaccaagcaaccacaccagcagcacagcagaggaaa

SEQ ID NO: 71472 - DNA, 333 bp, Oryza sativa
  unsure (1)..(333): unsure at all n locations
agctttgtttatctttcttgctttgcatcattaacaagcccttagagatcctactctttttgaatcattgatgattatatactgatagtttgatatactttacgatgaaagtttatggaactttcacatttacacacaacataaccgtcatttctttttggtttgctgcactatgcctgcatacctgcatcattgagaatactggatatatattgaactggcaccgtactgacactctataatgcaactcgggacatctgtattatcgttctgagcaccatagatgaagagtttcttttgttgcactntctttactagcccaattgtttttct

SEQ ID NO: 71473 - DNA, 352 bp, Oryza sativa
ttcttaatattaatcattaaatgtccagtgaagtgagagacagacgaacgagaagaacattataccctaccttataggtaatccattatatatggtggctttaaaataggcttatagtaggaaatgagctcttctattatccttgctctcaggagaacatctgtgctcttgaaattcgcggtggtgacgtctcgaagcttggtcgatcttcccgaatcgaatagttgatagtgatgattccgatctcgtcgggggacatactccggtcaagttagatctctctacagccgaagtcgtctagcagtttattggtggagaattcatctctttgaccaatctcgtcaaaagcttg

SEQ ID NO: 71474 - DNA, 355 bp, Oryza sativa
  unsure (1)..(355): unsure at all n locations
atctttattatttcttcaaaaaagaggggaggtcatgcccaaatttctattaaatctattttggtgattatatagaaatcggaggtgcctataaggattgcaacttcatcctccaatgtttttttttttgtcatactacatttgcacctatgttttgcacactttnttttgtctccaaaatttaattgtaagttgatgaaagagaaaatgtgtgtggggaagaaaaaatatatagaaattatgtcatttgctaacaaggtttataaaatagttgagaagaaaactctatgaaagtaatcttaattattcaaaccacttaatgaaaatatagaagtaaacacttaaattgttaaac

SEQ ID NO: 71475 - DNA, 286 bp, Oryza sativa
  unsure (1)..(286): unsure at all n locations
agcttgcattttctcatcttagtttccctggcctgctgaggacctaagtactcacccttgctctatataaatataagntcgctatcttctgaaaagaaatcgaaatgaagtaaagatatgggtttggtcctatttcctgctgttgcttgtggggtgggtgtagaaccgtgggtccgctgctgcactggtgttggggttgcctctcccggttgcaggtgattctcggctggtgaactgcacctaagtaaggaataagccttattatttaaggatgcatgattatatt

SEQ ID NO: 71476 - DNA, 389 bp, Oryza sativa
cggtggttctagccagaattgtaatatgaatacctttacgccttgcccagatgtaaggggccattttaggattccatttcttaataccatgaccaaaatgaactcccgcttctatcatctctttcaaattgatggtcccatatcttcttgtcatttttttcacacttcctttgatgttttcttttttttcatcctacctttccattacgaaatttctttcttttcgaagataaaaaagagccgaaatagcttgaaataaataataattgttccgatggaaccttctacatggtataagcataaccttaatgaattaactaaacttctttttaaattaaaataaaaatagaaaatctaacctcttagcgttctacagtcaaaatctagtt

SEQ ID NO: 71477 - DNA, 202 bp, Oryza sativa
  unsure (1)..(202): unsure at all n locations
ctggggttggtctaatttcccgccggagaaaaatgagctacctattgtggatacatttttctgcgtcccataacatggcggaatatgaagcgctgctccatcgattaaagattgcaatctctctaagcattcgccgactaatcatccgnggagattctcagttgggtattaatcaagtcatgaaagagtggtcttgtctaaa

SEQ ID NO: 71478 - DNA, 373 bp, Oryza sativa
ggcgtctaatatgaatatacgaagggagaaaactaatcaggaacccctccctccctttaactaccaacagagaaaattattattttctgctgctccttatgcgcgcaccgcgtggccagcttctccttcatctcgcaataaccctgatccctatgcgcgcaccgcgtggccaactcctccttcatctcgcaataccctgagttgggaacctggattattggaagatactgttggatgcgacttaaatctgaggatatagaatagaataagtaaagtgttggtcatactctaaattacaaaaacacgcgtgttacaatgtcacgcgctaccaaatctcatggagatattaaaatgcacacgaatttggtggata

SEQ ID NO: 71479 - DNA, 374 bp, Oryza sativa
  unsure (1)..(374): unsure at all n locations
gcaattnagctcgtcccgggacctctaatcacctgcagcatgcaacttgtttttttgtaagcactcccatcaagattgacgagacaattctagataagtgacggcagctaacaataatagaattctgctaacgtgtgtggatttcccttaataccccgctaagcatttgtcatgaacacgggaatgcttaatgatgcgatgcacgctgaatacgtaacatgacggaatctgagacccctgccgatggttccagtgcgaaacatcacaacaatttaagacttggtaagaccacaaactaccgttggttgagtcagatggatgaatccttttgaaataacacggcattacttggccgtacatgtttttcaactccc

SEQ ID NO: 71480 - DNA, 366 bp, Oryza sativa
  unsure (1)..(366): unsure at all n locations
agcttgacgattatttttgcagtagctctagcaataccaatgcttctgttgatccacggttggctactctcttcgctgtagagaaccatcttgtcggtatagatggcccaagggttgaacttgtcaattggttggatgcacagagcaagttgataaagtgtcgcaaggtattatctattgtggggtttggaggtcttgggaagacaactctagcgaatgaggtatatcgtanggtttaagttcattttgactgccatgcatatgtgtcagtgtcacaaaagcccgatttcaagaatatcttcaaggatattacataccatatgcctacgagagatggtgtcctcatagatattgacacatggaatg

SEQ ID NO: 71481 - DNA, 301 bp, Oryza sativa
ccccccaccacaaaaaaaaacaaaaaaaaaccccaaccaccccaaaacaaaccaccacccccccaaccaccacacccaaacacacacaaccaacacacaaacaccacaaacaacacacaacacaaccccacaacacccaacaccaccaaacccacaccacaccacaccaccccacacacccaaaaccccaaaccacacccgcccaacacaaacccaccccaaaccaccaacaacccaacaacaaccaccccacccaacacacacaaaccacaaaacccaaaaaacaccaccaacaccacac

SEQ ID NO: 71482 - DNA, 398 bp, Oryza sativa
  unsure (1)..(398): unsure at all n locations
agcttgtttattacgttgtggtttaaatgaatgcgaagaagctaaagaattgaggtttttatgtgggcttaacttataatattatgacatgcttgattgtcaaagatatacatctctctctcatttgntacaacttgcttgcaatgctgaaagtaaaatagaggacgacatgaagaagcaacatgctatgtttttgtcttctattactaaccatttgcaggaagtgcataatcatgaaaaggaggagagagacatgatagagccgccagtcccattgatcacactcaaagtcgaggcacctccattatctgaagagggcatcaaaggtaaacttattggtgcctgaattaataaatgtgagtgtggtgtaatgaattgaattgtccactttcatgcta

SEQ ID NO: 71483 - DNA, 167 bp, Oryza sativa
agcttaaatgaatatataaccaacatctcatgtgaaacgtataccttttatagaccattatagcctggtgatggctaattactcctactgaaactatgtcatatatataaatccatcataaatggccatcataccgcgcgtttatacacgatacggcacacaacaca

SEQ ID NO: 71484 - DNA, 404 bp, Oryza sativa
gctgtataaaattttatcatgaatgagcaaacagataaaaatctattgaaattaatgcaccaaccttcactcaagcaaacagctggttcagtggtttctcgaaaaccaccacaaattgccttaagaaccgctcctttatcaagtttccctgacaaacaaagatttggataagcacaccaggaacctcaaaattgcattctacttcttgtagttatgatggatagcagagcacaaacctctgtattgtctatttgtgattacaagagtcggtaagatggtaacatcaccacgagagcccttgccaatctatataaaatggtgggtggtgttaaattcagaataccagttgtatgaatagaaaattatagcatgtatgtactaacctgtgcatcctgttcagcttt

SEQ ID NO: 71485 - DNA, 314 bp, Oryza sativa
tatcttattgctagggatatgattgaagctgcgcacgtgaaacgcagttgtagcgtcagtgaatgttatatttcacccttggattcgccgtatgttgattactgttgcaagaaaagcacaactttttgaatttgattcggaaggcaatgcaacatgggacttttcaggaactcacccggcttgtctaggtgaagaatataagcaagagatagaaatatcaccggtcaaaaaccaacccaatacagacggcctgctcacaatatttaatgtgaatgaccgatacctccaatttgacaagagttggttcttggatt

SEQ ID NO: 71486 - DNA, 311 bp, Oryza sativa
agcttagctagcatcgtgaaatctttgtaggcagttgaagcttatatgtgctgagctcctaccctccaatgcccgccatctacatgtccctctcgccgacgtcgccgtgcacctcgcatcgtcgccgtcaccggcgccgacgaccagaccagcaacagtgccagcgacggaagctgctgtcgaacttcaacaactaaaccgtacaactccgtcagctactactgcaatagaggaataaggctcgctattattagaaatgcccaaaaaatatcatattcgtgaagcagaaacataaatgtactcccattaat

SEQ ID NO: 71487 - DNA, 476 bp, Oryza sativa
  unsure (1)..(476): unsure at all n locations
gaccataaaactaagctttgataganattttaaattaaaaaacacaccatttaatagcttggtttgcgtgcgcgtaaaaaactagggaagtgagttcggaaaggaggggaaagattagtgcacccacagcctaaagctatgagaaccggttccaacacatatgtatgaccatcatacatgcatggaccatcaagacaaaatggattggaggcgcctccaatttgaaactagcacttgccaattgccaatgtgacatcttcctgacaggtcagccgaattgtgttttctgatatagaaatgagagaaaccaaccattgcatcgcgatcgtgtcagtgctattctacctcgcctagtcggtacggcaccatcaacctgtgccaccgtcacacggaagagtcaaattttgagtaattgatatacaagtgccatggttttgagttcatacggtacatggatcttgttgcacaaattgtgt

SEQ ID NO: 71488 - DNA, 348 bp, Oryza sativa
agcttagctagcatcgtgaaatctttgtaggcagttgaagcttatatgtgctgagctcctaccctccaatggccgccatctacatgttcctctcgccgacgatgacgtgcacctcgcatcgtcgccgtcaccgtcgccgacgaccagaccagcaacagtgccagcgacggcggctgctgcccaactccaacaactaaactgttcaactccttcagctactacttcacttgggttaatttgtacattgctctctgccatggcggcgccagcagccgttcttgccgtgctccggtggcggcagcggcggtggctgggtgagctggtcgctctcctgcttcttcttgctcg

SEQ ID NO: 71489 - DNA, 451 bp, Oryza sativa
  unsure (1)..(451): unsure at all n locations
gacctatatcacacttctgtacacatctgtgcacttcttactcttatatgtaagttggcacttttagtactggatacatcacaataacaagagctgcattagaaaatccatttcaagatgttgtatttttttaatcctgcaccctggatgggaataattgatacatatagaaatgtatcgntcataaaaacaaacaaacttttagatntacctttcaggcaaagtgatgccttgtttctcaagttccttgaacagtgatatgagccagttatctggctcggtatcctttgtgccatcagcaacatccctaaaacaagagataaaacactagatgaagatttagccctctttccgtaagtttatttcattattgtgatgtgatatggtcagaactagaacgctatgattcaatgaaaagaagctagcaacacattcctcagcttagagatac

SEQ ID NO: 71490 - DNA, 386 bp, Oryza sativa
agcttagtgatcctcaggccaaaccatcctggtaagaacttgaatgttttcatgcaccccttaattgatgagttcaagctttctatggcaggagtagtcacttatgatagttctgtgaagcagaatattaacatgagggcagcctaccatacttcaatccatgacggtccagcattggccatgttctctggatggtcaacacatggtggtttgtcatgtcaagaatgtatggcagatattcatacaacttggttacctaatgggcacaagtatagctggtttgattggcatagaagatacctcccacccaatcatccatttagaggtcaaaggaatgcatttatgaaggaatcagtaatgcatgacctccctccacgtagattgac

SEQ ID NO: 71491 - DNA, 428 bp, Oryza sativa
  unsure (1)..(428): unsure at all n locations
cgcaaccatctagtgctcttcgtggcagctcgcctctacacaatttngagatctaaatcaagtcatgtgcacactggatgataatgtccagcgacaggaatccgttccatagtgccatcatgtgggacatgtatgctctaatgtgccaagtgcaggtgcttagcaaaaaaaatatgcatgcttaccatgtaatggacaacggcttcttactctgctgaggcactagacagagctcaatcattctggtccggagtacacaaaatgtgtcctcaacttctgcagctggactgcattggaatatatagatagctactgcagtagcagttaaattccggcgagaagatctcgcccaatcagtaaatagctaacattcagtntccgaatcagtgagattccggactcacattatgcagagagctattaccctc

SEQ ID NO: 71492 - DNA, 318 bp, Oryza sativa
catctttaggacttcttgggcagtgggtcgaatgtactgaagccagaagagctatgcgacccgtagcaactgaagtaacaagagctcctctggctactgatctttgaactcccctactggtttcgatacgtgcttgctgtacagaataagacaaactatcttgctgcaactgaacttaatctgccacgcggatgttcatattgtcttcatatagcatatttaccatatgttcaccctctgggctgcctgcaccagctgattgttatagctccagtagttcgggcggagcagccagtcactgtaacggttacggcttta

SEQ ID NO: 71493 - DNA, 451 bp, Oryza sativa
taagatactgaaattgtctcaaatcagtctggaatactatctgctatgtttcaaagttaccaaatgagaaagaagctgtttatggtgcattggataagtggactgcctttgagcccgaattccctactattgcagcagcaaaagctttggaaatgttgaaaaggcggagacaatggctgagaatcatccaggtaaggttattatagattatatctccttgttagtctgttgagagtacagtaatcgcagcttttgatgtcaagctcattttctcacttaacctttcaatttgttgctggtatcaggtagccaagtggttgatgagcaaaggccaagtgctgacatggacaacgtatgatacactactgttggctctttttatggatggaaggatagatgatgctgaatccatttggaataatatcatacaaactcatacacgttcagtacc

SEQ ID NO: 71494 - DNA, 315 bp, Oryza sativa
  unsure (1)..(315): unsure at all n locations
tggggaggtatacaattgtggattgagtatatatttcaccaattcttggaacccgaacttcccccccgatggaccatattgcccagagaaaccctggaccaagataaaaaaacctggcccaaccaataagtaaatatttataagaaccttaattaaaccgtagatctctcttggtatatccagaccataggtatgaacataaacctgaacattcttgagctacaaaagatagttataaatcgttagcaccacataaaaacattccccctagagtagctngttatacgaatacagagactctgtattagcatttct

SEQ ID NO: 71495 - DNA, 456 bp, Oryza sativa
  unsure (1)..(456): unsure at all n locations
tggcttgactacatgtacacatccacatccttaccatattcagtggttaaacgattccggaagagcaaaggtaacacaggtttgtagggtttcgttttccattggctcatatgcagattctgttgattgcgatgtggttcctatgcaagcttgttcacttttgctggggcgtccttgggaacatgataatgatgctacacatcatggtaggagtaataaatacacttttatgcataatgggaagaaaattactttgctacctttgacccctgctgaaattgtagaagctgataaagaacgagctgctagtttgaaagttgatgaatctgaaaatcagcaagtggctaaatctgtttttccacctaaaaaggataagctntcacctagttctaaggttgagggaattaagttgaagggtggtgttatgcttgcaacgaaatgtgacattggtgatat

SEQ ID NO: 71496 - DNA, 351 bp, Oryza sativa
agcttagctagcatcgtgaaatctttgtaggcagttgaagcttatatgtgctgagctcctaccctccaatgcccgccatctacatgtccctctcgccgacgtcgccgtgcacctcgcatcgtcgccgacaccggcgccgacgaccagaccagcaacagtgccagcgacggcagctgctgtcgaacttcaacaactaaactgtacaacgccgtcagctactactgcaaaagaggaataaggctcgctattattagaaatgcccgggccagatgacattcttgaagcacaaacataggtgtactcccattaaggtggaaaacgcggaactgaattagtcaattcaagtcagca

SEQ ID NO: 71497 - DNA, 331 bp, Oryza sativa
  unsure (1)..(331): unsure at all n locations
cgtcatttcgggcttatcctagttgttggtttagtttatgcatgtttaatangagccttggaatggtcttaactgaatattcagacaaaaaaaataaagaaggaaaagattccattaagacagttatgagtttgattggagtttccctacttgaccaaacaagttccaattccgttatttcaactacactaaaagatctttcgaattggtcaagactctctagnttatggccccttctatatggtaccagttgttgttcattgaatttgcttcattaatacgctcacgattcgactttgatcgttatggattggtaccaagatcaagtcct

SEQ ID NO: 71498 - DNA, 394 bp, Oryza sativa
agcttacacataccactacagcatatattttggaaaagagaaacacaggaaataattgtgctctattatacctcactgtagaatcctgctgcagaaagataatccttcttctcaactgcctcaagccctaacgacttaaactctgcaattttccttcgattcacaggtttgtcctgataaagtgaatcataaaaaatatcaaataaacgaaaaccttgcagaacacatgggaaagatatactaactgtaaagcaactattgtgaatattccaggaaagatacatttgattgctcaaacgtgatgtttcaagcactcatgatattctacaagtatccatctgcattatcaataaattctagctactaaactatcaaaacctggtaatatcacctt

SEQ ID NO: 71499 - DNA, 406 bp, Oryza sativa
  unsure (1)..(406): unsure at all n locations
caacattatgatcaatatagcttccgtgcgaccaanattagattgatttttgtagattcaatgtaactgcatgacataactgaggactcctatttctagagttgacaagttattgatgcaattagaatcagagatttgcacaactaagaactattgataattagtcccccacctttattagaggaacaagaggaagttgaatagatgtgggataacatcccggatttgcaacaagccgtgcattccttatttcattgcgaagaacttcagtcaagccatacacagcttcttgcttaataaacagaaaaataaaccatataggaaataagttcatataaacaagcatattgacacaaaataaataactgaaattatgatatgaatacaggtgtccaaatcaaaacac

SEQ ID NO: 71500 - DNA, 217 bp, Oryza sativa
agcttttgtttaactgatcaagctctcctatttttattttttctctgtagtacccaaaacaacgggattttcacatattatttctgcttcgcagactttgggtctcaaaatgggaaagggaaaaaggagaaagccaacgatttggacccatgcaacccctcactcggaccgggtaccaacagtgacatctgaaacatttcaatccatgagaaaaata

SEQ ID NO: 71501 - DNA, 391 bp, Oryza sativa
  unsure (1)..(391): unsure at all n locations
agcttatgcatgtctgggagggacacngaaaggtctgaattgggaatgacngggagggagaagggccggtctccgatggaacgccaggtgcgcggacttgagctgccaaatggcaacaagtgcatacccattgggtttccttgccccatactcacacccatgatggttaaataaatacccacacctatcacgggtacaaaatcatccccatacccacacccacgcgggtaacgtgtacccatacccatataattgacttgtatcatttatagnnttgtaccacaattagctatattagaactgtaaaccctcaatattntctcttgtaacaatgctattaacattagcgttcaaaggcgagttaaaaaattctacaactacattatatgat

SEQ ID NO: 71502 - DNA, 434 bp, Oryza sativa
attagtagtcggcatcaacgtgcgtcatatcatagtcatatgttaggtaactactctctcggttcttgacctataaatgtagctacatcttagaatggacgagacatatattgaattgaatcgtgaggatgctaaaaataattcggagtagctagctagctagatcgaacttctgtttgtgtttgtaactacttcgttttagcatgtcattataggtcgaagtgtcgaacaaaagaaaagtttatctctataacatgtagaccacaggtgtatggcatactaccaaacattattgagctaataagctgatcaaatcattgatctgacacgaaatctgagcacaacgtggctaccaaacatatatactatcctctttgtcccaataaatctatttttggctccttccatttatctcaaagcaaggttattgttag

SEQ ID NO: 71503 - DNA, 345 bp, Oryza sativa
  unsure (1)..(345): unsure at all n locations
atgagatggttttttcccttcttcatgaggagagggtacctgccttagtccagggaggaggaggttgaaccagagagccagacatgccgattggaagacattatttcgcgaacccacccaactgtgtgagtaggtagatgaattttaagcatgcatatgtattctaaacaagttggtaggtctaatggtgctgaacattctgtgggtaagtgatggaatgctgatgtatttgataactggaggcaagtaagttgctttatttgaaatatcgagggagtatatgctattgtctatcngataattattgatgtctaaatatcggttctaagccactgatactatgat

SEQ ID NO: 71504 - DNA, 325 bp, Oryza sativa
gcagctggcgcatgcaagctttctagctcgccctcaccctccattacaccattcttagtagtagtgactctagcctacctcgcataatatattgaagcaaggagctgcgttataacgctgtgtaaagtaagaacagcttgcttgtacctaccttcgggtttcccgaaagggaaaaccgtatgtaagcttatctgtttaatatgaaagaatattccttaagtattcctgcacgtttattctagacaagtgtgtatgctaaggaccctatatgagaaacctcttcggtttgttctcgtgtttagcctgcatcttgcatacgcgtctg

SEQ ID NO: 71505 - DNA, 392 bp, Oryza sativa
  unsure (1)..(392): unsure at all n locations
cacatanaaactccagctctgctctncacccttcgctctgtggatataaaacccacagatttctcgatgattcaacgttactgctggaccaaataagtgacatgaacatttcatttatcgcagtcaacgattaccattcccccgagtagaaagcatagctccaatttcacgcgcttcccaacagctgcttatgttaaccctccacttgagactagcgaggcctgggagatgaccctagatatgctgcaaatctcatgctgcacagatcgtcgcgattaagacgtattcagcctttctgccatctgagtggcatcatcaacaccatgatacatctgcgctccgtgttcattatgcagagatggtgcatcaatctgcgtagctgagatccccat

SEQ ID NO: 71506 - DNA, 383 bp, Oryza sativa
agcttgtttaacaaagtcaaaggcttcctgagccacaggtgaccacacatacttgacatcttttttgagaaacttatttaaaggattggtcattaatccatacccttggataaatttcctataatagccaaccaaccctaagaatccccttaattgtctcaaatttttgggcactggccagtcttgcacagcctttaccttaccaaagtcagtagacacccctgccactccaattatgtgcccaaggtattcaagatgagacttatcaaatgaacacttgcttgcctttacatacaactcatgctgttgcagtaattgaaataccttcctgagatgactcacatggtcctccaatgtctgactgtaaatcagaatatcatcca

SEQ ID NO: 71507 - DNA, 441 bp, Oryza sativa
  unsure (1)..(441): unsure at all n locations
tcgagctgttcaaataagaacagaaaattcacgttgtctatggctgccattcaccgctcttcttgtggatgtccctagtatgttatgtttcgttgtagtacatatttacagtacctttctgccgtagttattatagctaaagttgatgcctatcttattgaatgtcatgatatgctagaagcctatggctacattagcatgcctggctgccacaaatcaaatgtacaaccttattcatgatctangaagttcatttgatgttggttcttaaaagtcaatggcattcaagggaagagatatttgatggtgggtaattatccctggtaaagaaatatgtagatatatatactatgggtgaatcttctgagctattggttcagtggtgtaagcatggactctacatctatgaactagacacgcttctcactaattatagatgca

SEQ ID NO: 71508 - DNA, 419 bp, Oryza sativa
  unsure (1)..(419): unsure at all n locations
tgacttagttattcccacattgaacagatcttgagggtgctcttgctgtgttagatcgccgcatccaatattggaagacgcaatttgaagtatcggaactctagaggacaatgctcgcagtaaaaaaggagcacgctgtggaaacactcccaggtcgcgaggtgtgggtcaactcgtacttgaagagatgctacacatccatggccaaggtctgtagagagctccgagtaccccgtggggatcccgaagagttggcggccggatatatctcgtggctgaacggggcctgtgctcancttgaaggcgtcngcaagcgcatctaccaaacctttaaacacgagtgtcgtcgatcgagccgatatgccggagggcacgtgttggcctgcatacgagaccatcgcccgcgactggacctcgat

SEQ ID NO: 71509 - DNA, 405 bp, Oryza sativa
  unsure (1)..(405): unsure at all n locations
agctttntatattctggcatcgagctattttgccgcaggacctcccctacagtatcgtcaccgcagtagagtttaacctttaaattcgggatggattggtgtggttcctctacgcctaggacaccagaatatcgaaccatgaacgaggaaaggcatgagagaaatattggctagtaattgtgaagccccaattcttgactggaagggacaccaaaggcctctgccctccctctctatctatccaagagatggaagggcagagctttnttttggttttttcatcttttcatcaaagagttgaacaatgaagatagatggcangtgcctgatcgatttgatcaggtcgtgtacgaacaaggttcanatcgttcgttcgttaagatgcctcagctgcatacatcactg

SEQ ID NO: 71510 - DNA, 400 bp, Oryza sativa
  unsure (1)..(400): unsure at all n locations
agcatgcaagctgtcctgtttctattatnaatagaaatcattgcagcccaaaattgtaatgtgcaaacctaccaaaaaaaatagagatgaaaatttaacaactaaacgaaatcaaaatatagcatagtatacaaaaacatgatttgcacaggagcaaaacttcagactaaaatcgcaaaaccttgcaaaagcaacttgtccagtgcctccttcccctctttgtcagggacagtcactttagcagctgctaccgagaattgcactgcctgctccacaaaagggtttgcagattccctgcaacattaagttgttaacactatcaccaaaagtgaattccaaatacactacagaccagagcgctgtctgcacaatcccagcatatgatcaatgacttgccttg

SEQ ID NO: 71511 - DNA, 435 bp, Oryza sativa
tctgaagagctccagatagcggacacttatatttcttatgttgcacatgatggagaaacacggcttccccttacattcaatcatctggaattttgtttcttgcaatacagctggttacataagtacatctcatgagaggactttaactcatgtcagctcctgacagttccagtgataatgttatagtttataagccaactactttgttccacaggacccacaatatttttctcaagtttatttaaatcactgcttcttgtttagcaaagataacctgctatatttagcttgaactaaatgagcaatacggctcatttatgacactcattctaatgaagatttctttctatgacatatgtggtataaataccaagttttaaatcttctcgtgcattattcattttctgggatattggatagacatataaagcttga

SEQ ID NO: 71512 - DNA, 396 bp, Oryza sativa
agcttgtttcattgagtacttcaatttgaccaagatgttaataacattttttagctgaattgtctaaagtttggctagtaaaattgaacatgcaattcacctagaatgacgcaattttatcaaacgtcttacgtcaacgacacacggagtctatacacagtaatgaataaatatttgttacaagtatgacaataaataggtgcctaattaactcgatcgaacctgtctaaccttcagaacattaaggttctatatggacaagtaaaatatattcataagaactcgttgctcaaagttttctaggagaatttttaaaatcaaaacaagccatgtaaataaagtttttttagcaaagttgggcaagccacaatttgtgtggccaacaatttgttagac

SEQ ID NO: 71513 - DNA, 434 bp, Oryza sativa
  unsure (1)..(434): unsure at all n locations
ntagttatactgaactgaccgattcaagtctgtcatgtcaatggtgaaagaaattctcttcccactcttgaaactcatgaagcacagagagagggcaagttgacctaattgaaacaaggcaaacactgtaaatattactcaatttcctgctttagagtgtaccacatctagagcacttggcatacattcagaaaattatttttgcctcatagatacttccattaatgagcttgatataaagatagtggcattggagttccgagtaatctcacaattgataacataaataaccttttgtttgtatgcattttcagttgatcagctaanacattctaacaagaaattntgtactcttttatctcaggtgtaccttcatctatagaacatggagaaaattntcactggttatcagtatttttgccttgcaacccatg

SEQ ID NO: 71514 - DNA, 325 bp, Oryza sativa
  unsure (1)..(325): unsure at all n locations
tctttccccctaacaaaactatatttatgtgggctggaacctggcacttccctaaggacctttcaataagaccggctacaatggttttcagtgcatgaggggcagcaactaaaatggacatggaatcaccatctgntccaactgtatttgtggaggtacacaaagttagaatcaaacaacaccagccatgtgccagtgcgcacaatggaaaatactactaggaacttacgagcaggccaacttctgtatggtcagattgtgccagtacaacatagttgttgattccctgcatggcagatgctctacagaaaaatcatggactgat

SEQ ID NO: 71515 - DNA, 455 bp, Oryza sativa
  unsure (1)..(455): unsure at all n locations
ntgacttatcatgttgtaacaaagacagttgcttattttcagaatcaattttcagttcttccaacacattaagttgttgaatttgcactgtaattgcttctcggtctgaatgtaatagttttctttgctcttgcagcttctcccgttgattattcaaggcttcaatagtgccttttatctcagacaactcttgctctctcctctcacgttccaaagtagcttcttttctctcatccttaagtttctgcaattcaactgcaacatgttctaattttgtgttgatcatctccttctgagaattgatgtgttcgagttccttggcctttttctgctcaaactcttcctccctttccctcaaataagaatctatttccatctgccttgccttagcagaatttagcaattccaccctctggatatcaatgtctctcttcagatcttgcctttcttgttga

SEQ ID NO: 71516 - DNA, 380 bp, Oryza sativa
  unsure (1)..(380): unsure at all n locations
agcttgtctttatgcacgccgaacacgcacttattggggttcagctttatgcgggcggagccgagactttcaaaagttttcgctagatccgagagtaaagtctcttggttgcacgtcttcacaaccaagtcatcaacatatgcctcaacattgcgtcctatctggctacccaaagaaattcgagtagtaagttgaaaagtaagacctgcattctttagcccgaaaggcattgtcgtataacaataagttcctatgggggtaatgaatgcaggtttttcctcatcctccctagccatgcgaatctgatgataaccagagtatgcatctacaagacacaataggtcgcacctngctgtggagtcgacaatctgatctatgcg

SEQ ID NO: 71517 - DNA, 400 bp, Oryza sativa
ataatatcattcgcttcaaatgtagtactccggacattttatttttttagtaaatcttctcctacgtactggagtagtaaagaagccttcaagtcaatcttccaaaagccttttggcccaaaagagtatcaccctggttactgggcactatactgtgttgggatttcggtattaccgcgtttgtaaatcaaggtatacgttacatgtattgcgatttagggacgaattttaaactagctcaagataaagaacataaaatgaacttattccttaatttatcgcgtaatggaccgatgatctccactcaggtggcccattgaagaatagaagtctgatgagtcgcctggcctcctcggttcctcgcacacgggctataaacaaataaaaaccccacctaagt

SEQ ID NO: 71518 - DNA, 401 bp, Oryza sativa
agctattcttatcttttcacaagcctgagacctagcatagactgatcaagttttaataccagtgttcacattaaataacgatggttctgtccaccatccattgtgatcccatggatagcttcccgccattgaatcgtcatggtattctgaggacgtccaccttcccgcctctcaagaagtggctccatcagcataaaatcatcatgcaataacccattccacacaagttaagaatttatagtctagccaagtgtaatacacgtcccggtgctcaataaccgcgagcacggctattcgaatagatatggattactcatactgcagtggatgtacactttaccgccacttcgcaactgcccacacatgagcccgttcaacacatgagacgcgtaccggaaagc

SEQ ID NO: 71519 - DNA, 455 bp, Oryza sativa
tgttcccgaagcgacaggcaggtagcggacggcagcgtcctgtgttgtccagtggtgccgaaatgcaagccatgattgcacacttcttgcgggtttctattgctatctggtgtgtgctggaaatgtatgcatgctgatttttattgttcgttgccaatgctaggctgcctcctttttatcgataaaggaagagagtttatttctagagaaaaaaggggacttaagcatattccctcggcaataggtgatctataagcttccatgttctggacttctgaccaggcaccaaaatctgtgatcttcgttttatctttgctactatcacaataggatttataagttaaaagagtcgggcatttcgcacttttcaaatttactagctcaccatttggatcaacgagtgaagcgggctctttgaagctcaagtgtctgtgcaagggacactctcctcttat

SEQ ID NO: 71520 - DNA, 393 bp, Oryza sativa
agcttgtttattactttgtggtttagatgaatgcgaagaagctaaagaattgaggttcttatgtgggcttaacaaataaattcaggacatgcttgattgtcaaagatatacatctctttctcatttgttacaacttgcttgcaatgctgaaagtaaaatagaggaggacatgaaaaagcaacatgctatgtttttgtcttctattactaaccattttgcaggaagtgcataatcatgaataggaggagagagacatgaaagagccgccagtcccattgatcacactcaaagtcgaggcacctccattatctgaagagggcatcaaaggtaaacttaatggtgctgaaattaataaacgtgagtgtgttgttaatgaattgaatttgtccaatt

SEQ ID NO: 71521 - DNA, 365 bp, Oryza sativa
agcttagtgtttcactaattttggcgattagcacccaaagccgtgccgaaccggccactggttcgccgccggcgagctcttcgtggacaagccatcccgggggctccccttcctatctagctaacaaaatggaacccccgtatgccgtagatgctcacgcactcatcaatttggtcggaaacctttcctgtcgtcttagccacttgcagccgagctcggctatggcgcagccatggcggccatgcgccccgtccctccaagcgccgccgcagccggtgggtggtcgctggagcttctccgtgcgttccctggccgccgccgggttgccctcggccggccttctgggtgcaccgtgtacccctgct

SEQ ID NO: 71522 - DNA, 139 bp, Oryza sativa
  unsure (1)..(139): unsure at all n locations
tgtctacaatacacacncgaattactactaatacacttgaatatggatggctatcgggcgccacgggcacaggtaatgactaaccatacccgtgcccgtctaaataatttatgcccgcggacatacccgtcatctacat

SEQ ID NO: 71523 - DNA, 308 bp, Oryza sativa
  unsure (1)..(308): unsure at all n locations
agcttgtgttactgttgttaaagtgtgtgtcaacataaatggggagagaagtaatttttttagaacgcataaggttttttttatttgtgggggcccnctccccattgctgtttaatattgttagtgatgctctggcagttattcttgacaaagctaaaggtaatggtgttttgactggtttaatccctgaaatctttcctgggggtatcactcacctacaatatgctgatgatactgtggtgtttattccttttgatcaaaatcaaatcctacccacttaaattatcttataatgtaactacgatatg

SEQ ID NO: 71524 - DNA, 449 bp, Oryza sativa
  unsure (1)..(449): unsure at all n locations
tgccgtatgctaagttctcctacaataacagttactaggcttgtctttatatggcaccgtttgaagcactgtatggacggaggtgtcgcactccgctcttctgggatcagacaggggaacgccaattgtttggtacagaagttttaaatgaggcagaagaaaaagtcagagctgtcagggaaagattgagaatcgcacaatctcgacagaaaagctatgcagataaccgccgaatggatctcactttcgaagcacgggattatgtgtatctctgtgtcactccgctcaggcgagtacaccgcttccaaaccaaaggaaagttggcaccacgctttattggaccatatcggatnttggaacgcangggtgaagttgcttaccagcttgagcttccctccagcatgcttggcatccataatgtgttccacgtttctcagttgaagaaatgt

SEQ ID NO: 71525 - DNA, 395 bp, Oryza sativa
tagcttcatggcaagtcttcttggaggttttctaaatccacttctaacaagaaatgtaccaacatcattatcaacggtccataagctaaaactttcagatgttctagcaccagatgagtcccacacgctttcctccgaaaattggcctcccttcaccatgtcacttctaatacatcttaagaaatgcaagtcctctttcgctggtgaacttttagatgcaacacatcctaaagcaacaaaacctggtggagcttgaggaaaccaaaacgatacaccctcagtacccctgtgcttcttaattctaccaacaagctgataaccttcaggagctctgagaaaggtatcatcgccagaatttcgaagtacaacagctgaatttggtggctcatacctac

SEQ ID NO: 71526 - DNA, 441 bp, Oryza sativa
  unsure (1)..(441): unsure at all n locations
tgcattngcagcagagctttcaccactcggtntagctggtaagacgagcgggcaacagaatggaaagttcatcagctaggagcaacacctcagagaggaatcgcgtagattatgcaagaagtgtgtccatggattctgcaggtcattctttatgtgctaggtctgcctcaatcctcagtaggagaagcagcaggcagggttcaaggggatccatcagcctctcccgtgagatgggggactcgatactgagctcgatgaggcattcgcttcaatcagcagaccagttgctaggtgatgtagatggctcagttcttgctcaggtcattgacagtggtgaccgagggctatcatttgaaaacgacgttgacgaagaggaagagaataatgtggaggatcatcanngctgtcctctcccagatgatacatcaatgcggattcatg

SEQ ID NO: 71527 - DNA, 327 bp, Oryza sativa
  unsure (1)..(327): unsure at all n locations
cgggtaaatcttaaagaaatattcaaccacactaaaaagggatttaacagcattgggccacatcattgtgaaacacaaatgcccaaacaaaaagtgcctaagttccctaaagattacaacgggccaccctggaaaaaagactgggcttaagtactggacaagcccaagcccattaatactcccgataccctaataacaccgaagtgaaaaacgtctcttcgtcttccctgctgagactctcgccatttttcccatttcttgctacagtgcanaactgcgccgggcaaactatggttcaccaatccgctccaatccaccctcaaaaac

SEQ ID NO: 71528 - DNA, 462 bp, Oryza sativa
  unsure (1)..(462): unsure at all n locations
tatagatactcagcttncattgttttatattggtatgatcatgacattaacctgtgtgggtgtacttttaattaatatgcacggggagtatttgcacgagcaacattttacatgaagtttgttcatttgacatttggcgtcactgaatacaaatttctgactatgtatgtactatgttttaagattaccttttttaggttaattgaaatgaaggggaaacattcaatcaataataactaattggcatttcatgagacttttgcttgcgcagctgtgtgcggtagtagcaccgcgcttttcccttctaatactatccgcacactctatttcttttgaatgaaaaagacaggtggggttagaggctacacatgtcaaccactttntttttaccaactctctattntntttaattaaagtgattatatanggctaaagggtccacatgccagtaatagaaataca

SEQ ID NO: 71529 - DNA, 164 bp, Oryza sativa
cagactagatgtatattgtgaccctcggctacgaccacctgccatctcatctgaaaacatgctttttgtgcctaagtatcttctctgatgattttgagatcacaacgagtccttggtaaacagatggattgcacacgggtttgttagagcccacgttgggatga

SEQ ID NO: 71530 - DNA, 454 bp, Oryza sativa
  unsure (1)..(454): unsure at all n locations
tctaatctatctattaaattattaagacaactntgaaaggaggctccatatnggcagtgagggctaaaaattcccacattaatcggagaaaaaaaaggagagtccaagtagcaatacaattntaaaatagctgaaattcggaattaaaaataaggaatattgagagaagagtccatataagaaccgaatacgagattaatcaaaataaaataaaatccaaaattagaaaagaaaagaagagcccaagtaggaatatactttgaaatagctganattcggaattaaaaataaggaatattgatagaagagtccatataataacctaatacgagattaattaatatttgaaataaaaataaaaataaaatcagaaattagcaaaaagaaaagaagagttcaagtaggaatacaatttaaaattaactaaaattcggaatttaaaanaacaatattt

SEQ ID NO: 71531 - DNA, 323 bp, Oryza sativa
atggtaagggtagatggctcccatccacaccatatttgaaggtgctatgatgaatttataacatcccttattcaacttaatgctgaatgccgagatggtcaaggtaattgaaatacataaacatattgattcttgtgtaccattggaacccccaaacgttcttttaatatatgttgatacaaaaactgcgtatcccaatattgataaccaagaactgcgatcgaccacgcatagcgggggttgttttggtgctaggctctactcttagtgatttgtgtttgtgtgctaacgcgtggtgcttggacgtgcaccttggtgcactg

SEQ ID NO: 71532 - DNA, 454 bp, Oryza sativa
  unsure (1)..(454): unsure at all n locations
taagctcgccatgaagaacaaggtggtgttcggcacaggtgaccattggtgtgctcctactntgactgctaatatgggggtttgaagagccgtttcacagagtggcatgcctttgttgaccatcgagcacagaccttccgcgctgattggcttgtgacaacctgataaccctgttgtacgttttgccagccaatttgtaaaagtgcatttgtagtcgtagtgttttgctaacaatactccttagatgttccttggtcctagaactgcagttcacttttttattctacctcagttaagtcttgtacagctaaacacacattttctttagtgatgtactacgcagcatcagcagtttagcacattgtcatctctatggctcttcaatcttccatgtcatccttacaaatagtattttgctgctntgctgtttagtgatcatgagaagatgaatttg

SEQ ID NO: 71533 - DNA, 396 bp, Oryza sativa
  unsure (1)..(396): unsure at all n locations
agcttgtcaaatagttgggtggtgcattttattctttcaacgaaaagtcatatcgtgggaaagatgcccttaaatcttacctcaaccaaaatgaaagtatcgcaaaagaactggagaccaatttaaggaaattgatggaaactcaagcacctaaaaagcaagaagatgaaggtgatttcctgagtgatctgcctgaagagagtctcgccactgaaacatcctccgaggaggaactggcagctgtaatagaagcttaatcagtgatgcttaatcagtgatgatagatcaacaagaaggaatatgcgctgagcagttattccactgaaccatacatatnttggttcttggagatgtcattttggctgcaccgggcatatagaatgtgtggaattcgta

SEQ ID NO: 71534 - DNA, 433 bp, Oryza sativa
  unsure (1)..(433): unsure at all n locations
acactatacgaaactcaagctntgatgctgattaagaagtgtatggataacaagtgatggatcgatctgttatgagaacaaaaaggatgatgaggagattgtatgtgtgtgtatggcacttggggtatggatggaatggaatggtggatgtggcttatcctcatgcctccaatggcacgataatggaatatgtcactcatattccgttggcatctcaaagttgatcagggaatggagcttttctttcttttctggccctcctgcaatgccagcctcaagcacatcatcggctcagagaaatacaaaaagccacccccaattttgccattttccttcgttttgtggccactttttttgtctagatgctcgctgttttggagaatgatgggtgagaatcctgaacctccatattcattataaaaaataacctgat

SEQ ID NO: 71535 - DNA, 393 bp, Oryza sativa
agcttgctaacctgatattctcagtgcaagcatgggtgttaagtataacaaatgcaaaagccactctctttttagctttatttggcactgcatggtactatgggttgcttacatatctaacactaactaaaaactcgcttttgcacattttgggattggatctcacgttgcaagaatcatgctaatcttgtgatctgatcacgcaaatcacgagcagaagagtagcaatgaagggatatgtctctccatgttctgttataactgaaagcacttttttttcttttctttttgcagcattggtagctagatcttgcatcacttgaagagttctgatggtatggttgtgagtcgtgatgagtctttgagtcatcctgaaaccaactcttattatta

SEQ ID NO: 71536 - DNA, 458 bp, Oryza sativa
  unsure (1)..(458): unsure at all n locations
ntctataacatcaggtagagcagcctcaaactttgtccggaatgcagtatctttcttcactggagcgctgctgntatgaagaatatcagacactagcataagccgagcaaccttggttgggatgggtgtctccttgagtgtcaaagattctgtaagaacttcaacaatctgaacatacaaggcaaagcactaatgagtactctcatgttatgtgatttaccaaaaaaagggtgttttataaaaaatctaaaacaaaaaaagaacaagaggaaggcaacctatacaagaatgaaataatacatccttatttaaaaataaagaaagaaagggagaaattgactgatcaagtcaaatctagcgcaaggaatgatttacctcttcagctgcatcagcattatccaatgcaaatcccatagcctcctttatctgacttctctccaatgtcaatgcacgtagca

SEQ ID NO: 71537 - DNA, 71 bp, Oryza sativa
tgctctggctgaaggaggaagaagacatatatatatatatatatatatatatatgggcgagaccttaggcc

SEQ ID NO: 71538 - DNA, 447 bp, Oryza sativa
  unsure (1)..(447): unsure at all n locations
cttacttcacaagaatatatacgatntaggattgttcatggaagatgtgtatataaaacttgtcgtgcacttttttttccacgcaatctcaatgttctctagcccttcaatattatatattatcaattcgcttttttaaaatttaagttggcaatataatgagaatgggtggctctaggaagaacttgagctccatccaagtcatcagctgcacctagtatgatgttcaatcttgtgactgaattcttggatgcaccacaccttattactttgttttatttagtggccacaatgtgctagaaaccaatataaggcttagatttgtctacttaagaataaatatgtttatgcataatttgtctcctatgatgtgtcgcacagatnagcatgatnnttgttgtcataatattcagagatatatataggctagttccagtattgtagatg

SEQ ID NO: 71539 - DNA, 388 bp, Oryza sativa
agcttatatttaggctcctacaaggggggttatgcgttctttgcgcaaaaagataaagagcggacagactctaatttctattgccaaggtaaacactactatgccagcccaaatcatgatgttcaccaacttggattgggttctctcgcgaaaatcgcgagttgcagacacgagaaccatgaaaagcaagatccccaataagaaaacagaaaccgacgaaaccacaagagtgaagactagctgagactcgctctttggcgttctttgctccttttgcactcaatgagtcattccaatttcccgaccaaaaatactatatgtctattcatagggcctcggtgccaagtgctacaagatctaatgcactggaactcgtggtatggaccca

SEQ ID NO: 71540 - DNA, 382 bp, Oryza sativa
  unsure (1)..(382): unsure at all n locations
ctgcccggatcttaagcacgcgcgcactgtgtaaacagaaacgagctgtgtttcgcagctgcttggatagaaaccctgttatcttgcctgtacactcggctgtggtctgacttcgatctatncaaaattcacaattactccagtttggtttgtcaacagacaacagcataaagcataaatttctatttgaaggaaaacacgttgaggcaaaatatctagattacgaagtagttttatttcccagagaaaagcatccctcctaaaagaccacaaacgatgtttttcttcaactaaaatgtacttgaataacaccaaaggagcattctgaaaattggtccgcccaaattgtacaggtgacacgagtgaagcattagtggtactc

SEQ ID NO: 71541 - DNA, 451 bp, Oryza sativa
  unsure (1)..(451): unsure at all n locations
ttgctcccgtagtctggtctcatggcgttgtccgtccgtttatttatcgatcgcgaattcgcgatcgaccaatctcctgtacactgttgtggtggagcagttcaataccaacttctctgcgcgtccgcgtcgtatcgaccgcaatgaattcagagcatcatgcgttggtttccggccgttgctcgtctctactccgtttttntaaaaaaaacttaatttagatgaagatgtgacccttatatttccgtctagattcgctatattaaaagggttatattcttttctagattaaatttgttttgggagagaggaagtacgtacgctcaacttgcgacatatgtctcccgtcccattgtctcaccccacctcttcccttttcagaactctgcataataagacgacgctgccaataatcgacagctacaacacatgatcatncaagtgttgaact

SEQ ID NO: 71542 - DNA, 375 bp, Oryza sativa
agcttatttataatctcgcattggcagtacccgctccatgaacataaatcctcatgcactctaggcgtccatgtttttatcagtgagaggagttctggcgctcccgggaaagagaaatctcacacgcatattaaattatggttcaagttaaattctctctctcacacactcatggcagtcctaccaatggcgacaccgatgtagggcatgcttctcggccctacctcaacggctgttccatcgtatcgcacctgcctcactcaggggtgaaccatctatgcagggatactgcctccgctcggctatctaatccgctaggtctatacccattcgagaagtaccggtgtacgggggtcgattcatgcttaacttcat

SEQ ID NO: 71543 - DNA, 454 bp, Oryza sativa
  unsure (1)..(454): unsure at all n locations
ntcaaagtcttcatatgagaatttctccctgattagagctatcataccctanaaagccaaatcggctaactgggcatcagtcaaacttaagttgtagcacttattcctcatttctctgaacctctgaatatactcatacacaggctcatcatgtctttgcttaattgctatcaaatcggacaatttcatctcatgtaccccactatagaaatagctgtgaaaatgcttatccaaatcagcccaactgttaatcgacccatatggcaaagaagaaagccaagtgaaagccgatccagacaaagacaaccggaataaccaagccctcaaggcatccacagccgatgctntaccacactgagctaanaatcggctaatatgctcataagttgatgtgctatcttgccctgagaattttgaataatctagaactttgaaccgattaggttgaagaact

SEQ ID NO: 71544 - DNA, 390 bp, Oryza sativa
  unsure (1)..(390): unsure at all n locations
agcnttttcgattactcttcattggcagtacccgctccatgaacttaaatcctcatgcactctatgcgtccatgtttatagcagtgagaggagttctggcgctcccgggaaagagaagtctcacacacatattaaattatggttcaagttaagttctctctctcacacactcatggcagtcctacctatggcgacaccgatgtagggcacgcctcttggccctacctcaacggctgtcccatcgtagcgcacctgcctcactcaggggtgaaccatctatgcagggatactgcctccgctcggctatctaattcgctaggtctatacccattcgagaagtacggttgtacggtggtcgattcatgcttaacttcatggctcggtccttaa

SEQ ID NO: 71545 - DNA, 445 bp, Oryza sativa
cagcccaccgacaatgatatgagcaataatgacatcctcatattctccattagtagtgcggagatgtacaagtgatgttgctcggcgacatcttcctcaagcgttggttgcgtccctcttttcctttgaggtgggggctgaatttatttgggagccatcaagatccaaagaaataattagtgaggagcgaggggattcctaacttttgactgctaatatattttcttgaatctataactaaagaatcttagaatctgaatgatgatatggattattaatagagccagatattctataagaaactgcagttgctatataagctattccaaacaaagtctaaggtcggtctatacctcatcccttgaagcaacatcatagaactatggatcgtgtgacagtagtcaagctaggtaaaattgacttaattaagcacatgctctcatat

SEQ ID NO: 71546 - DNA, 379 bp, Oryza sativa
  unsure (1)..(379): unsure at all n locations
agcttgatgtgccgattatacaggaaacataccaatgtgttcccgcagctcctgaaacttgattcgagaaagcggttttttcatgatatctgcaagntgcccttctgtgccgatgtaactcggtgtgatttccccattctccacggcttcacgaatgaaatgaaaatttgatcgaatgtgcttacttcgatcgtgaaaaatagggttcttcatcagggccagagcggattggttgtccaccctgagatcgacgacttcaggtgctgcattcctgaggtcaccgaggagccgggcaagccaaatgccctggcatgcagctgttgcagctgcaatatactcagattcacaggaggagagtgctacaactctctggttttga

SEQ ID NO: 71547 - DNA, 440 bp, Oryza sativa
  unsure (1)..(440): unsure at all n locations
tggcgagatcgttcttgacagcaaccacgcgagcaccagttgttattnatccgatgttaagcatgaggatttcacccttggtgagcttggagaccttcccagccttctctgtgccttttgtcctcacacctaatagcctncgaagaaagaagaagttgatctgtgtgaaaggttcagatgtaagtaatgacattcgttcactaaaaccctgaaaaaacaaatgagttatggcaaacctcaagctccacatagacatcatgaagggatccaacttcacccagaaccttgccaaccagtctatcggcacgtgtcaaagttggatccatggntgttccacaccaataagacctcctggcacagcaaaatggagttcattctgttcagcatagagtgaaacgatcctcgaatagattggggtgcatttgatgttgccgttctca

SEQ ID NO: 71548 - DNA, 367 bp, Oryza sativa
agcttgcagttctgactccatttttggccaggttttcaagaaatagcttgcaggtctgactcagatattttttatgttctggaggtgcaaaacaaaaaaaatgtttgtgttattttgtgcggcacagttttgtccttgaacatagaccaccaaatagattagggaaaacttttggaatgcctaaacttggccattcaaaacttggtcctccggtttaaaaaaaccaaaaaccaaaattaggtacttcctgtttatatttaagtccgtttgaaattttctaaacttattcacctttgacctaggttatagtttatagaaaaatatggccatattttccacctcaaaccaagaaattatccaaatatat

SEQ ID NO: 71549 - DNA, 421 bp, Oryza sativa
  unsure (1)..(421): unsure at all n locations
cgttatggacatgaagctgttntgccatgggaagttagtatcttctctagaaggatagaattgcaagatggtttgacagccgatgagtattataatcttatggccgatgagagggaggacttggttcaatcgcgtttacgagcccttactaaggttaccaaagataaggaacgagttgctatgcactataacaagaaagtagtgcctaaggatttttcggaaggtgaacttgtatggaagttgattttaccgattggaactcgggataacaagttcngcaagtggtcaccaaattgggaaggaccgtttcaaatctataaggttgtgtctaaaggggcatatatgttgcaagggcttgatggtgaggttatggatgagcgctcaatggcaatacttgaagagtattacccaagtgttgggt

SEQ ID NO: 71550 - DNA, 384 bp, Oryza sativa
atgcttgcaagctatggactattcagcattggagctagtgtgcaatttgttcaagtaaaaatcaagattatttaaattatgctcaggatgcctttaatttccttctgtttttagccacaaccacgtattaaaccatgtccattagaactctaatttcatgacgtacgtgtaatatggatatatatgcacagatgatataaaagcaagagagcaatgtttgagtacatcgacttgaatgggcgcagaaaatgagctggaagggcattctggtgaagttacataaattgcatagtcaaaccgaatctctacatggggaactcctgacttctgcagcttcttttataatctcctacacctccttgtgtatttgcatagagcctaatt

SEQ ID NO: 71551 - DNA, 420 bp, Oryza sativa
  unsure (1)..(420): unsure at all n locations
tgtaatgaagactcggcaacaaacggagcggcaggctcgcctgatcatggtgaaatccgatctgcagatcaagcaacccaagggttgttccttttttggttttcaatctttccgaatacacatgagtggctcgggattgtgctgggcactggacatgtagcaaatgtgcatgaaccgcccgaagcggcggagccctggccgctagctgctctgcttgctgccgcgctggctggctgcggggagcggaatgcggtggccgtgctgccttgctcggcggctgcccctgtgcttgccgccgccgccggcggtgcgacctgagggagagggaccgatgggtgaggcantgcngcaatcttggtgtttgttgtcttgcatgtggacttaaatcttaaatcatgaacttaggtatgcatgatcacc

SEQ ID NO: 71552 - DNA, 392 bp, Oryza sativa
  unsure (1)..(392): unsure at all n locations
agcttatggtgcgaacccatgctaagccagttaagcaaaaactgcgaagattcgcacccgatcgaaaaccagccatacttattataacttgacaaacttctcaaagctggcgtcattagagaagttctccatccaaagtggcttggctacccagtaatggtacgcaaagccaaccggaagtggagaatgaacgcagatgtcactgatctgaacgaggtgtgcnccaagtatcacttccctctacctcgaatataccaactngtagattcgacagacagctatgaggtcttgagttttattgacacttactccagctaccacctgatcagcatagccaaagatgacgaggagaagacgggattcatcactcccttaggtgcgttccgctatac

SEQ ID NO: 71553 - DNA, 401 bp, Oryza sativa
cacttcaaactcagctttaacagacaatgcatcaagctctccaggtctgctccgactttgtctccattgagatttatcaatgatatgatcatcctggtagtaatcttcagcattctcaggcaattggctgttgcttgttcactgtttccttctaccatctccttgagctttccggcgaagctaaatgcagtgcctcctcctgcggcaattttatcagtcagttcagccaaatctttatcatcattgaccaatctttgaaatattgcctcactaagtgacagacaagctgcataaagtttcatatccacagcctgctctttaacctttacatctagctctttaactttttcatttaactctataaccttttcgcattcctctttaaccttttcatgttgaca

SEQ ID NO: 71554 - DNA, 291 bp, Oryza sativa
agcttaatgtatctcatgacaacctcatttccactactcaacttggagctctcattgatgtcggcatatcttgtgaatttcttgatgatagcgctactcgccatattgctcatgttgcatcatctagcatttctacctcttgtgatgatcttgtggatatgtctagctctagctctagctcttgcgttctatttgcgatgcctcacttgctgttgagaaaaatgagctcaagcgagcaatggctaagctcaacatcacgcctggaaggcgcttcacgggtaacatcactct

SEQ ID NO: 71555 - DNA, 396 bp, Oryza sativa
agctttggtgtatttgtcctttcgtcggggctctttcagttcatcaagaaggaagctgaaaacatggtggctgaatgaaatgcacaatattcgggaatccacccgaataaaagtttggtatctctgcttgtgtgattaaacatacattgtcctgccattttcaagttgttctgcttgtgtagcaatggggaacacagtgtgttagccttgtagtgttaaacagtttacattttatcttccctgtatatcagaaccctttacatgggcatttgtcagccagtgtgaatgaaataaagcatcatatgatttgtctcatgttctgggatctcgtctgaaccataatattcttataagagaacaaggccctgtttaattcacaccaaacttctcccaact

SEQ ID NO: 71556 - DNA, 397 bp, Oryza sativa
  unsure (1)..(397): unsure at all n locations
agcttaatcaaattctcatgccaaagcttcctgatgcttaccttggatcctttatcaaggaaggtgttgtctatgcaaatgaggctcttcttatgcaagaagattgttcaaaggctactaatctctcagatgaagcacaacaatcagagaatcagcctatcataagaaataagcctacatgtttctgctatgcatttgattatcccagatctgatgctgctgaaacaaggacttgcatgattggaaagggcaacctntttactttcgcaaggcatgtgaagacaacctatttcactaccgaagcagtgaactctgagatgggtttgacagagatttgcaaaagctcaaaacttgctgcgcagttctgaacgattctgctgataagtcattaaaccga

SEQ ID NO: 71557 - DNA, 460 bp, Oryza sativa
  unsure (1)..(460): unsure at all n locations
tgtagtgaatgaaccatcagataaccgcaggagaaggcaactcttttcttcacctagaaatggaaaaatgagaaaaaagaattcttataagaaaattggccagcacaaaacttgcctgaggaactgccattagctactaaataattagttcaacagaatacactaacaaaagtgaatttgtaaatattatggactntaaaacagtacaactgctagagaaatagcatgctaccaaaggttatgcctagaaaatttgaactaatagacttacattggatactagaaagaaccaaaaacaatttgtaaaagactaaatcatagatagtcataattaaaaacaagtagtcatcactgagcaaaagaatccaagatcaagacctattagagcacgagctttatgttacagacaatcatgaataatctggcaattgtcatgaaaacaatcacttatttgatccta

SEQ ID NO: 71558 - DNA, 448 bp, Oryza sativa
  unsure (1)..(448): unsure at all n locations
ntcctgagacctattcaacaccgtgtgtgtagctaaacatctagatctatgctctagctccacatgcaccgtcaccggagaaccaccgcgccgctcgcgccgccgtcgccattaattccggtgaccaatgcttgcaagaataccacctatagcctcgccttgaacccctttacattttctccttaggttgcacgccgagatctgccgccgtttgccgccggcgagctcgagaacgagctcggccatggctagctctgtgtcagctcaaaccaaggacctcacttgagaagaatcaaaactctagtactagtttgtaaacctatctcacacacaaaaaacctacctgatcagatccactacaaaagaaattgatggaagactacactatagaatatcatctcaaagattatatatcatgtgtatatgagattggtgtaatatataatac

SEQ ID NO: 71559 - DNA, 399 bp, Oryza sativa
agctttatattaagttaccccctcgtgacacagcataagacgcgccgcttgatctccaaaagggaggcatgtatgtctctctcgctggccaccgtataatagccgctgcatgcgtctctcttctccatatatattcccctgtcgtcttcgtagcagctacgctcacactgctagttagctgcttttccgaattgtttcatattgtaaggtgtgttacattcgtttgtcgttctaaattaaacatttacgatttatgattaagtttattgaaaaaaatatggcaatatttttgacacaaaataaataggatgcaaaaatgtactccctccgtcccataatataagagaattcgaagttttccttacaacgtttgagcactcgtcttatttaatatttttg

SEQ ID NO: 71560 - DNA, 400 bp, Oryza sativa
agcttttcgttaatgtttctattggccgacagctctcaatgatgcggtcgacctggtccgccgatgtagagcgtgtctattccacgccaagcaaatccatcagccggcccaggccctgcagaccataccactttcgtggccatttgctgtctggggactcgatatcctgggaccgtttaggcgggccccgggcgggtttgagtatctgtatgtcgcgatcaacaagttcactaagtggcccgaggcttatccggtcgtcaagatcgataagcactccgcacttaaattcattaagggcatcacggcccggtttggagtgcctaaccgtattattacggataatggcacccaattcactagtgaactcttcggcgactgctgcgaagacatgggcatcaag

SEQ ID NO: 71561 - DNA, 389 bp, Oryza sativa
  unsure (1)..(389): unsure at all n locations
cagcttctcatttgtcttcgncgggatgcttctcattcttccacttctgcgtgttcttcttcttcttcacaagagtgaagacctttntggtgcttgatgccaaaagggggagaaaagggtgttttaatgtgggttgggactatgtatagtgaagtttgtcacctcatatttaatacggttaggaggtttgggctatattttgtgtgggtatgggctattactctatcttgtgtgctatttgcaatttggtaaactctctatgtcatttggaccctttgtggtcttgtatagcctatgttttatttgtgagcccttgatgtggttctaatgtgaacatgtgctatgatgcatggttggagttacattgatatacttgtgaccatcttatg

SEQ ID NO: 71562 - DNA, 297 bp, Oryza sativa
  unsure (1)..(297): unsure at all n locations
ctgctgggntcgttgccagacaggccgctgagctaggctgttgtttcgtgggacaagacgaggatacacttcgtttttacccaccaccaccactaccacggtctcgccgacatgatggtggcgctgctcgaatctccctacagcggccagcgctggcagcgggaactatcggttgtgatcccgcgctcttgctgccactgtcagcgggcgaagctgcggaggctctgcaaagaagagctggcctcatcctcttcaccgacgactaacgctgttactccctcaacctcgaaaccatag

SEQ ID NO: 71563 - DNA, 182 bp, Oryza sativa
  unsure (1)..(182): unsure at all n locations
aaatacagtggggaacacaaaaggggngtgtctcaccacacaaaccaccctcgaggaagagcgaaattcccccccacagcacgagcggaagcaagggcaggaaaaaggaactgcaaaccataaaccaagacccaaccgaaaagacaccaacaccagaagacagcgaagcacacgcaaccaag

SEQ ID NO: 71564 - DNA, 290 bp, Oryza sativa
  unsure (1)..(290): unsure at all n locations
agcttatgacagctttttttttntaaagaagtctttcaacatccatggatttccttgtaacagcctttacatatgtaagttacactaacaaaaacatgtttatggctttcaattccatctaatttcatatacactggtgactggttcatctctttctctatcaacttcaagctgcaccactgtttatttgcatcatcatgggaatataatgatgcaagaccttgctgctgctgctgctgctatattcccccagaaaatgggggggttgcaacaaaattactgacatggac

SEQ ID NO: 71565 - DNA, 450 bp, Oryza sativa
  unsure (1)..(450): unsure at all n locations
ctttcagtgatctattgaggctcaacatgcttttgaggcattgattaatgctatgagtaatactacagtgttagctttgtctgattttacccagccattcacttcggagacagatgcttgtgcaatgggtattggtgtcgtgttaagccaacaaggtcatcctgtggcatattatagcaaggcattgggagtaaggaatcaaaagttgtctatatatgagaaggaatttctagtgtaaagatgcttgtggaaaagtggagatgttatctgcagagggttccttttgttattaaaactgatcacaagagtctctgcaatcttaatgatcagattntaggcactgaattacaacaaaaggttatgactaagctgatgggtttgcaacatagctttcaatacaaaaaggggttgaaaatatagtggcacatgcatcgtcccgcagacctcatc

SEQ ID NO: 71566 - DNA, 145 bp, Oryza sativa
  unsure (1)..(145): unsure at all n locations
tttcttggtcaaacaacgcaggcactgcatgattgaatgcatccctatcccctccgaagttcaaacaatttctcatgtacttcaggaaggtcggntgtctgttgctttgtccatgattgagaacaatntatttcttatgtgcttc

SEQ ID NO: 71567 - DNA, 437 bp, Oryza sativa
  unsure (1)..(437): unsure at all n locations
taaaaatgaatttaatacatctgccctggcttgaaagtaaacatgattttattttcaagattgcattttagtttacagtagatgtacactgtagctaggtctgtcatttttatttgtaaaactcaataggtgtaaccgctggtccgctgctattttaatgcagatttcaaaaccatgtataccacaattggtactgttaagcagttctgcatcaacactggttattattatacaataccactatgttaattagtgtggaatcacttacccatgtcctcttaataatntatcctctgattgcactaataaaattagggtgctatatggcataagttatgcacgcaatacttcttatcaagatattctaaagtaaaacgtctcaaatacagctacaaacattgacaagcgtgcatattacatccacacaacagtgtatt

SEQ ID NO: 71568 - DNA, 371 bp, Oryza sativa
atatcgaaaaagcaatgtcttttctttcaaatagacataacaaaagccttctacacaataaattggccatatcttttggagggtctcaagcaatatggatttggaaatcgttggctaaattggaatttcaaccttttcgcctcatcttcgtcccaagtgctgctaaacggctccccaggccgacaaattattcacactataggactccggcagggcgacccgctaccccgatgctttttattctagctatggaaccttttcatcaaattattagaactgcggaatctgccaacgccctaaccccgcttggtataaggaatggccgcttcagatgttctctttatgcggatgacgttgctttgttcgcaatt

SEQ ID NO: 71569 - DNA, 366 bp, Oryza sativa
  unsure (1)..(366): unsure at all n locations
aagcttatttgcacatggactccctaacccctattattccctaagaagaaaaacagaactggcctatgaattttttgctttaacttatatttccaagtcctctaggtnttttcattctttcggagaccagaaacttttatccaattagaagtgtctagggacaccagatgcaagccttaaagttcaatgctcttattnccataactatatttgcttgtttgtcacatcaacttctctattggccagtgcataatttgcttaccaaattggtcatgaattttgccatgatccccagtgggcagaaattaatagattcatgggcaggagtgtcccaatgctgcaatatggtaccttataaattgcact

SEQ ID NO: 71570 - DNA, 449 bp, Oryza sativa
acacaccaaactaagcttatccacacacggagtaggttacgcttctacggctcttcttgttaatcccttgtctctcactcgcttgtgagcaatctcgatagccagatccctggcggagatacactcttgatcatcgcgccttatcccccggccgaactcacaaaggggggtctcacaacctcccgctagagaggatcactcctcgacagagtctgataggaatgccaactctcttgagcaccgatggggtaacattcacgacagagattgaatcgtgacccgatgatgtcctgtgcagaccttgtattaagaccattccaatctacttacatgtccattccgggatttgaagacgctggagtaaacctactgggctatggtgctctgccttcgctcgttggcaaatatggacaatggcgacgaagcatattattcctctccctcatgct

SEQ ID NO: 71571 - DNA, 400 bp, Oryza sativa
  unsure (1)..(400): unsure at all n locations
agcttaaggacatgctcatacaaaaaaatagtcttcctattagaggtgagctatacaatattgcctgtgtggatgacgtgcttaacaacattgtttcaaaagggcaatcaatgcttcaccttgttgataatatactagaaagatttatgctggcacatgcgtactcatcgttaactcaacagcaacttnttgaagctgttacaaacatgggtttgaaatgtccccatgaagacgcaaaatggtggcacaaaatttacttcaggcttgaagttgttctgcattgcaagaaggcatntccatctgaagagttgttacctgcagaagactataaggtcgttgagtctatctgcaagaatctgagggctttttatcgtgctattgaagttatctctggtcctgt

SEQ ID NO: 71572 - DNA, 459 bp, Oryza sativa
  unsure (1)..(459): unsure at all n locations
tagtgagcctaattctgcagtattatattaatcatggcctcgctattgtcatacgtaatacaactacagtcaggtcttgcttaattaggtgttgtcactgtcgacaaactcctcagatgtactattctatttgtggatcctgacacgcagatctatttgatgaatatgtttcctaattgttctccaagataagttaattagcaatatggtgaagaaaagttttggcacagcaaaccaggacacagtttcacaaatggatttatcagccatgtactcttaagttgattntatgcactttcaagattgtggatggggccatcacacagattcttggaattttaacttttattaagagtttcagaactgaactggctcatgtgatgtgagttttggatnttctaaactgaatncctcatgtttagacctgatcgttncgaanacactttcagtataggtgac

SEQ ID NO: 71573 - DNA, 332 bp, Oryza sativa
aagaatgccgcattggtaaaagatttgacttcatcatgtggatcttttgatttaaacgccttatgaatacctgccatggtgcacataacacgtgtttaaatttaagggtttaagttttaacgtgggacatcgaatattatataagctggcgtatagggtggtccggtattaataaaaagaactaattattaaatcccgtaattagccgcgagattaatttattaagcctaattaatctatcaatagtaaatggttactgtagctccacattgtcaaataatgaataataaaacttaaaagaattggctcacaaattaatcccaatctattac

SEQ ID NO: 71574 - DNA, 451 bp, Oryza sativa
  unsure (1)..(451): unsure at all n locations
ntgataaggcacatacgtgtggatgaaaccattctcgatctggatctaatctatgagtcttattcagagagatattccaaaatggacagcgacccaggtctttttatttatctggaaaatttcgagtctttcgtctcatatctatagtacataaatattcagcatcaccttaaatccttgatccaaattcttcacatggttccattaatttagagtgatcattgcagctttgaataccaaaaaaatatcttcgtttcccgtctgtgatcgacgtgaacaggtaattaatcgttgtcgattcagaacggtgatgaataataacatgtgggaatcaagttgaccgccagttcttcctctaatccatgtgagcatgcgtggccatatggcaatgcagtgtacactgcaagcttccgttcgatgaccaagcaaatgtgatgcaatatattggaac

SEQ ID NO: 71575 - DNA, 396 bp, Oryza sativa
gcttcatttttttacttaagtgcctgcctctccatattctgagcacccatgtagatgatgcactgcagcccaaacctcgcgcacaccgtggcagtggcaacaccgtgctggccggcgccagtctcggcgatgatacgttccttcccaagccgcttggcaagcaagacttgagcgacagcattgttgatcttgtgggcgccagtgtggttaaaatcctccctcttgaggtaaatcatggggcctgtgccatcagcgcgcttgtagtgctcagtcaatcgctccgcaaagtacagcggggtctcccggccgacgtaatccttgagaataccatcaagttctttctgcaaagagcaaggtgttgtcaagcacacaactctcttgttatttcataatctc

SEQ ID NO: 71576 - DNA, 322 bp, Oryza sativa
tctaatctgaggaatattattacaggtaacttaattctctaccctggtgattaactgtattgtgtgtttttatgcgtgatcaatatgcgtgagtgtgaatgccatgctcgccatttgtaagatctaaggaatcgttgggtgaggaattatatgggttcaatcaggcttcaccttaatttagaagccatggcgtgaggaccggttcttccacataaagactgagctctcgaaaatacaccgggcgggcaataagaccagaataggggctcattgttttgattatgaacatctgatgtgcatgcacaatatgtttctctttgag

SEQ ID NO: 71577 - DNA, 455 bp, Oryza sativa
  unsure (1)..(455): unsure at all n locations
tacaaatntattattgatctctgtgtttcttttggcgtgtgatatatgagtgtggttgcataatagtacttcatcaactgtccatttccatgactcaacaccaacaaaagatggattgatacccaatcatgcaaaattgaggaccatctctgatagatatcatgacgtgggacggtgggagtgctgttctgctagaacagtatacatcacgggggaatttattagcttatgttgccgctcgtggtttctacgctctccatgagcgattgcaacttgcaaggctgttaagataaggtttaacgaacacatgaatggtggcaggaccacttcagagttcatgtntttttttccttttctttttttcgatgattcagagagtgagttcatctttctctttgtgtctcactacaatcttcacaagtcanaagttgtgcaaatgaaggccaatgaccagg

SEQ ID NO: 71578 - DNA, 263 bp, Oryza sativa
gccgagttcggaatactgaacggtgctgagaccagagctctccctgactggttctaatattattcacggagagagaactggccgaatcgctggtgacgaagtcaaggctgccgaaccggaacgcctgcccgggagggaaggcgcactcgacgatgctggagacgaaacccaacgcactactcggcgaataacttaacgccacctatacctggcgcgccaactgtcgaaacaagatttcggcaatactaaaaggcgtggcgatc

SEQ ID NO: 71579 - DNA, 384 bp, Oryza sativa
  unsure (1)..(384): unsure at all n locations
tgacagggatggtagnggaatgcatgacaatgaaacacttttgtctatatcttcatctggcggtgctagtggtgcaggtaaaccgcatgtcttactttatttgttttgcatttgttattatgctgcatggatgacgtttccatttgagcttagaaaatggaggcaaactaagacatggaagcccttcaagggatcgactaatatatgttttgacacaacttattgcacaacatgtggatgtgcatgtgataaatggctctattatctccggaaacctacatgctacaaactctgactaagacttagggacaaatctcgctccatatgctatctgcattacttttgaatccttttaatttcttttggctatcctggtactatact

SEQ ID NO: 71580 - DNA, 394 bp, Oryza sativa
  unsure (1)..(394): unsure at all n locations
agcttatctttatatgtatgnnnacactttataaatgcatctaaattattataaggattaattatggttggtcttattctaacctgaggtgatgttatttgtctttcatttcatgcccctataattattacacatgaatgtctttaggtttgcttagttaaagtatcttttattcatgttcatgaacctaacatgaaatgaaaaccaaaatccaagatacataaaaaaaactcaagtcaaactaacgcacttatgtatatgcatgcacacatttatgtttgcactcttgtcttaagttataattgaaaaggttntaattgttctcaatnttattcatccaagagttcgatcaacttcatctangtgtaaaaaaaaaattttggttcacaaaatt

SEQ ID NO: 71581 - DNA, 389 bp, Oryza sativa
agcttctatttctactggaaaggtggatgtaatgttgcacgggaacgatatatatatatagagagggttggatcggattgcgcttgatcaacaagccggagagattggagcatataaagagaaggaagggagagaggcgcccggagaagaggaagggaggcgacatgccggagaggaggagggaagccggcggcagcgcgcgccgccggagctagggaggagagaggagtccagctgggagcaggccccgccgcgcgcgccgtcatgaatccactttttcaggcaagtgcttgctattcgtcaacctgcgtgttgatccatctgaaatggtgagcgcgtgtgtgttcgtcgtctccgctccggccgggcggtgaacttgaagggctgat

SEQ ID NO: 71582 - DNA, 396 bp, Oryza sativa
  unsure (1)..(396): unsure at all n locations
tgctcacttaccgatcaagggtggttggagttgatttgtgcactcctaanaaggcctatgtttatgagaggatttgatccttctatgtggcatgaggtaaccctgggtcggctggggaaaggctntgtcgcgaacctctgacaccggccagtgtctaaagtaagttcgtgtcttgtgggtaaagtgtacccctctgcagaggttaactaactgttcgaacagccgtgcccacggtcatgggcggatgtgaggtggttcccgttgcgtagattttgttgcctgtgcctttgtgaaaagtgttgtggtgtgggaatcgtaaccagaatcagcctatgtggcagatggacgacctgagtgtcagaaacgaatctgtgtgattcgggatgtctgcgggca

SEQ ID NO: 71583 - DNA, 392 bp, Oryza sativa
agctttgtttatgctgtaaaactcttcgataagctacagtgtgcactggacaagtactacaaaaacatcgctgaagcagctaccaagtgggcgagtcaagcgttggctatgacgaagaccttaaaccagctaaaattctgtagtaatggcccaggctattgattttatgcgatggagtcaagaaaataatatggctggtcatttaccatcaaacacgcctgatttatttataaccaatacctatgaaccttttcacacctatgaaccacataaagagcttgatctttagtggaacctttaagtctcatatatttcacttttggatccaaacattagagtttatgatcgccgtatacatagatttgactgaaaattggccattcttatggatc

SEQ ID NO: 71584 - DNA, 427 bp, Oryza sativa
  unsure (1)..(427): unsure at all n locations
agatgaaatcgccatgccgctacgcctctctttctttccatggtttgcaataaccatggtccgagttccattgatgctgccaaaatcttctacaagccgagaactgctcccgattcatattttatgaacatcaataaagctggaagtattggggcgagtctaacgttggcgatgaccaagttcctgtaccccaagattgatattgatgccggtgatgggttcgcagactggaccagtgaggaaaccgcccttgacctcatcaatgatgcccaaaaagctgctgaccaaaataccgctgatgtaggtgagagggtcccggacaaccatctttaacccactaagtctgataactctgatgatgaanagactgaatctgattgattgggtattcctgatgattatgatgatgatcatggaagcgccattt

SEQ ID NO: 71585 - DNA, 359 bp, Oryza sativa
  unsure (1)..(359): unsure at all n locations
agcttaattaagcaagagctgaaaggtactggaagcttgccagtggtttctgattggcaggtgccagtttttatcatatcagacagaatngggacctaattaataaaccttggatacatgtgcaaaccggaggatctaaagaaagaaaaatgcctcttcaattccatgatagtttaatcactaaaccagattagagcttactatcaggtggcccttacaatccattggagtcgttcttccatttcttggtttgtgttgaccctgatggatcatggatggatgctattattggtaatagatgatctcgatgcgagattcttctacagcgacaagatgataatgtattctaccacatattg

SEQ ID NO: 71586 - DNA, 450 bp, Oryza sativa
  unsure (1)..(450): unsure at all n locations
tcttgagntaagaactntactcgaagagcttgtgttgttccaaagcacgcaatcttattagatcggcttgagactataattttactgccatttgcaacacaacatttgcaaactgagtacaaccttcttcacacaccctcatcgatgtctctggttagttcgatgatgattaatatcattttgccaccagtggcattggtttgatgctcgattacaccagaatctctaagagtctccatgcttgcatcttcaagatcatcctcactgaaacacacaatttgagagaagtgattacggaccctttcatcatcacaagcatgcgcaatcagggtggtcttcccaactttcccggggccaatgatcggtaggacacctggattntcagcaccgggagtatcctctttgagcaggaagttcatgatgtgctccatctccatttggcgaccgaac

SEQ ID NO: 71587 - DNA, 359 bp, Oryza sativa
  unsure (1)..(359): unsure at all n locations
agcttgtatatagatcaccngaatgtgagcaccttaagattgttgaagtcatatgctcggaggatgatattactttgctcaagctcgaggaggacatctttgctactagaggcatgaactctcttcagattaatcgcaaaagccattacaagcagtactattcagatgattttttttagaattgattacaacagttcgactgcacaagaacatgcggaatgacaaaaggatcatgcattcacttgtcactagtcttcaatatgatcacgctgtttgttggatgagcctaactgcatgcatatctatcaattagaatttgaaggcagatcaacttgttaactgcccttcgttgctgatat

SEQ ID NO: 71588 - DNA, 354 bp, Oryza sativa
  unsure (1)..(354): unsure at all n locations
ttgtcctgcttctcacccacttcttcccattcgatggctagcactctcagnctggtcagatggcgcagctctttcacaatgtctacacatttactagttgagatactcgacaactcttctagcgatgtcatttcgcctatcttgtctggcagccttgtgtcaaagctaacacgtaggcacatcaaacgtcgaagctgaacaatagtggcaggcaacttgtttatacgagatccaactaagtccagtgtctgcaaaaactctagtttgccaatttgcactgagagctcgtgaccaacatatgtggcggtatggctttctgcatatttactattccattttataatgtatgtgtct

SEQ ID NO: 71589 - DNA, 367 bp, Oryza sativa
  unsure (1)..(367): unsure at all n locations
agactcggcgcgaggaggctagaatatcgatgtatgccctgctttacttaatgatagcgcttctatggcatatgcccatggacaatacatggcatactgtccttgcactctacaatcgagacaaaacgagacattctctactggcatatcaagctcattgacctgggcggcgaatgctcgatcaatcacataccgattgcggtcttgacatgcaaccattgcgcccaatcaactagactccacgcgcttacttgaccaanagtgtgcccttgttaactctctttatgccaatggtggatcgagacctatctcattaacagatgcctaaccgggaggtcttccaactttctctggcaacatattggaa

SEQ ID NO: 71590 - DNA, 378 bp, Oryza sativa
  unsure (1)..(378): unsure at all n locations
tgctctggagctctccatggattcatctagatcatgatgaactttctttattcgaagaagatctctcaaaagagaaagcttagagtacactttggaaacacaaacccaggcccttttggtgaaacttccttttatttttctatcattggatattttctgagctaatgttgtcttaccaactcccccagtcccaacaattggcagcttataaaggtttcttcccttatgttcaagcagctaatctaccatttgtctgcaggcatgtatgatctccttgtcaacaatgtttggctcaagttggtggaaacttntctcactctaatactgaactgcttcagtagaaccgtactctgagtgtaaagatctctgccttcgaat

SEQ ID NO: 71591 - DNA, 203 bp, Oryza sativa
acaacatactaagctccctgaggctatccaaaaggagaaatgaagacttttttttttgaagcccttggagacactttcaaaaacaaactttctcactcggaatgcatagcacttatgctgcaggtagccttacaccgtcttatcgtatcctacctggaaaggggggactgtacatggaccctctaatactaactggacctcca

SEQ ID NO: 71592 - DNA, 275 bp, Oryza sativa
  unsure (1)..(275): unsure at all n locations
cttctgattgctatttgaagcagagaacggtattctgcttggtatttttctcctgagattgattgccctttgctcggcctggagtaggtcagggagagacacaacttcttccatcgacaacaattctttgctgaggctgtcngtgcaaacaatggttggtgctgaaggtattatcgctatgatttattgcatagtcaagtggatcaggaggagcattggttgtgtggatgatattgaccacgctcttttggagctgactaactgatgagacaacc

SEQ ID NO: 71593 - DNA, 258 bp, Oryza sativa
ccccgcgggcccccccctgccctcctcccctccccccccacccaataaattcattctcgccggcccccccccccgggcggggggtcccccacagcccccccaacgcgcgcccgcaccccagggcaccgccgaagggccccgcccccacccgcaacgcgcggcagccgcccaccaccccccggcagccggccgcgccgacgcccgcgccccccaaccccgcgccgcccgcaccgccccccggcacggcccgcaacgcca

SEQ ID NO: 71594 - DNA, 400 bp, Oryza sativa
taagctccagatctccaatacaagatctggaacacagttatgcacatgtttctatcattcatgcgtcaaccttgaagtcttgaatacacacattattcagcttggcaagagcatcatggcatggaattataattcctgctgcattcacacaccaagagacatgatgacaaaggtcaaaacttcagatttacgaaaattaacggttgaccttggtggcatcaaatggagcagaatatgaccggacatacacgatcaatttgctggtgtgacaaaagagttacttctggacatccaactagaggtgtggccaagcaagtaggtgaggtcacgacagttctagggctttgcggaaatcaggctgacaatgatggcggagttcgtctgatcctagctagaactt

SEQ ID NO: 71595 - DNA, 343 bp, Oryza sativa
  unsure (1)..(343): unsure at all n locations
tggcttgcttgccgatgactttgattgtttttctgctgacatgggtgtcacttctcgtgtaccactgggcgtgtcaaaaacgtgttgatgcgaaaaacacgcactgggctggaagatctgcttaacttcaatgtagggccaaaatcttgcctttatgttcgtgagcgtgctcaatgatttgatcctgcaatctataagaaacaaagataaaataaaccgctgttaaattcatatacgatagccgatcgggcagtcgtccatacatatcatttttcttacangcgatgttatatgtgaatcaatcgcatctgtactatgctagaatggacttatctatctctat

SEQ ID NO: 71596 - DNA, 212 bp, Oryza sativa
ctgggcgcgaagcagcatcacatgctgggcgtctacttgttgtttcatgggtgatcctcaccgacatgagcgtgatcctcctccccatctacctcttcgccaccccgatcctgaccttcttccaccaggacgacgagatcgccgtcctcgcctggcggtattgcgtctacatgagcccccaggtcttcggctacgccctgaagtacctcgtg

SEQ ID NO: 71597 - DNA, 177 bp, Oryza sativa
tggaagtgtgtgttaaagtgagtgagatgatgtccttatatatgtggttgtatgacagttggcgaaagggaaatgtccgaagtgccccgcaaccgccatcatgagtgatctgggacgttcatgccaaaaacctgggatcaacggtgatcaccagggtttggctggatcttggggtta

SEQ ID NO: 71598 - DNA, 254 bp, Oryza sativa
agcttatctttccttttgtgtcacgaacagcgatatcactgcgttaccttgcctcatcagcgtcggatttgaaattattatatacatccgcaacgctacaaaaattaaatctaataataacgcatttaatactgttaatagtctatttaggcaccttttagggtcccagacatgtcaatatcagctagtagccgcaagagttacgctcattgcttggcaccaataataacaatatggagccctagtataaataa

SEQ ID NO: 71599 - DNA, 391 bp, Oryza sativa
  unsure (1)..(391): unsure at all n locations
actctatgcacatcgaagtcgacgagatagaaatcttcctttatcttgcctntgaatgcgacggaggagtcatcccttctaaagatggtcacatcctcatacggtaacaagcaattgtgacccaacttacacaattgagaaaccgataataaattgtaccttacagaattgacgacaagaacattatagagagattgattattggagatgacaattttacctagaccaattacctttcctttaccattatctccaaacacaatattctcccgagttccattctcctaatcaagggctgtaaacatactcctctctccatgatatgataggtgcaccactgtcccaacccaacttgaaccaccggatgatatgcctcaatatgccattagct

SEQ ID NO: 71600 - DNA, 199 bp, Oryza sativa
gccttaaaattcacgcaaccagaaaggacaaaccacccatcttaatcacaaattgtgaacagaatcatataggtcagaggctttccgtactatgtcacaaaagctacttcaatctttcaccttctgattaacaaacattgcagagaacgggtacatgatgaaaataacgggaaaaagcgaactgtcaactacggggagg

SEQ ID NO: 71601 - DNA, 196 bp, Oryza sativa
gcgaatcagccgacccgggaactctaaattgcgtggggcggcttctttcttttacgaccgcctatatgcgtgttgaataccttctcatgccgtactatggacttttacaaacaaaaccacagtttagtgtatgcccgtcaaacaatacaccaggtcatgacaacgtaactgattattgagaaaatgtgctaatgga

SEQ ID NO: 71602 - DNA, 348 bp, Oryza sativa
agcctaaaacccaaagaagctattaaaaactttcatttctcgcagactaagtagaaaaaatcatacaaggcaatgatagaccaagtaagcaaattaaaaaaatcacactccattattatgatgatagcccccgactgacaacttcaagaagaaaacttgatgttgacagtcaagagaacttgatattgacagtcgagatagggaagtacaatgataaacttaagcgtagaaacgacgaagatgttcaatgttcctagagttgtcgacgagagtaccgacttcgcgcttgagtcgataagaacctgggcgggtgacttcagagataataaatggccgctcccatagagg

SEQ ID NO: 71603 - DNA, 386 bp, Oryza sativa
agcttcacatatctatgttgaatccgcgccgaagaggcgcgaagatgacattctcacaaaggcgctcggaaccaaagaacattctggccgaactccgggaattggtagcgatgtgccctggaagcatggactccctcagtacagaatccaatacaagaaacggaaagtctccaaggaagagagggacgctcgtttgaaggccgaacttaaggttgaggtcattcaagaactagaagctagcatgaatgcaagggtggaagaaagggttaacaaggtcctcgccgacatgaatataccccgagtcacaacacctgctgtgcaaccaactcctcgtgtacaacacgacgcgagtccgtcacagcataggagtagttgtgcatccacag

SEQ ID NO: 71604 - DNA, 422 bp, Oryza sativa
  unsure (1)..(422): unsure at all n locations
acactatccacaactaagcttncttttttttgcatgtatctgcttctgaatagctgatcgaatctattcctgtacaacaaattgattattatttcttcaagtgacagcggctttgcgagatcaacggctccagttcgttaacctgatacttggcatagacttcaccaagagcaacgaatggacaggtagattttttttacgagaaataaatatattttttcgataataatgtcctaactgtatcttcaccaagaactccttggtccttgctcgatctgatctgattatttcaactgctcatgtgcttgcctgcattgctttgaaagttctcgattatctgtgtgtattcacggaagcgttcgttcaatgggcacagcctgcacaagatangcagcacaccaaattcatatgatcaagccatc

SEQ ID NO: 71605 - DNA, 394 bp, Oryza sativa
  unsure (1)..(394): unsure at all n locations
agctttactgctatggtcgcaattcaaatgcctctacaattcaattctccatgggtgctaaaatatgtcaaacatatcatattacctattattctatcgacaaaataataagttgcgttcacgatcatatatagcttaaaaaatgcttatatttgtgggtggatataatacgtgatgtccaccaaagtcttatcacattctntnttcttttactcattacttcttgtcctttgtcaaaagtaactagtaaacacttgttagctgttaggaaaatagaaacgacattgtttgaccaagttacgtncagttcctctctctttgcagtctagataagcaccggccatagcttgttgctgcatgatgaccatgagatgacaaagtaaacatgaagata

SEQ ID NO: 71606 - DNA, 434 bp, Oryza sativa
tgcattacgtggaggcctcaaggtaagtacatactttataatattgttcttttgttgggggaattgatggaagtatcttaacttttgcatgatggcttgatcttctaatggtcaagactctgaggagaggatcagtgttttgtctacctggttccagggacaccaggtaaaattttcaatctacactattagctgataactagtattgctctgtcatatgtattgctaatacatgtatagcacgcccagtaattcctgtacttgaatagccactgctaatggcgatatgagttctgactatttgatgtgatactttgctatgtaatctatgtagaagacgttaattgctaaggatccaaacatatttttgctcaattgatgtgtattccaaaattggaagtgttgaattctttttgggtgcctgcgacttgtaa

SEQ ID NO: 71607 - DNA, 392 bp, Oryza sativa
gcttcctttttttttttatgccgcgtgccctttctgaccaacggaaggtgactaccactaacctcctcctcctattttccctccacatacctttccacgtgcccctgctggttaccctccgcatacctttccacgtttccttcctcgttcaagtactggtttggaacctcgctcccctcttcttcataccaggactggctgcttccctacgcgaatgaatcgcacaatatttgatccttatcgcggacagccatctgttgatacaagaaacatctgcttaatcacgagaacattatgctttaacaatctaagtcatgtatactaagtgtaaatgtcgaacgttagaaccctcaccaccttacttgctaagtctaattcaaatcctcaaataa

SEQ ID NO: 71608 - DNA, 443 bp, Oryza sativa
  unsure (1)..(443): unsure at all n locations
caatactaagcttattccaatcagacagacataagttagacattactctccgagctgtcttttgtgtaaaggncggcattgcatgttattctgagaataattgtacctccttttgtcttatcctaccattcctttcggttcagagccctggagatattgtggcgtcagtttgataagaaaatactatgataggatatgaacatgttttcttttgaatgacaaaataaaatcacggggttgcgattcgaatatgtcaagaactctatataatacttcacattgaagcagatgatgagtgcatacatccaacactgtcactttcacatgttgctccaacacgacctctgagtctctgagctgcagcgtctccatccaacccagaatcactcttgcctacactaacagaacctactatgatcaatgcctctcgggcacgatatctg

SEQ ID NO: 71609 - DNA, 280 bp, Oryza sativa
  unsure (1)..(280): unsure at all n locations
agcttacctggatctgggaagttactctttcacggtattgggatccgttgatcgatttccttgatcgctacttatgggctttctctcataagatacaaacagggattcgcaaacaaaaaagggaattcgtagtcactttttcctgtcgcgtaaaaaaaaggctttacgcgagagcaatagaggttgggatacatctatctcttctgagcaacctctnttggattcttaagaccacccttgcagtaggataccgactgctttgggttctttattatattat

SEQ ID NO: 71610 - DNA, 394 bp, Oryza sativa
  unsure (1)..(394): unsure at all n locations
agcttaatttctttaatgaataatcacataactcccagatactcgaataaccagacctggaagtatttcgtagctagtaaactagtagttgaaatcaatattgcatgtgaatgtaacccctccctggggaaaatgtttcaaacccctaaggggatgttccctcattgcgaaaaagtaatgtaaatagttatgaaaagttatggaaaaattagacaacgttacacaatagatacaaaccatcccacagtgtttgagaaaaaacataagatctgcattgtcctgcacaattcgcagcaaaatttatctttttttttcgttattcactgatatatagaagtttggcatgattctnttttgtgtacagtgctatataacacaataatttatgtagtta

SEQ ID NO: 71611 - DNA, 433 bp, Oryza sativa
  unsure (1)..(433): unsure at all n locations
tagtcaaacttganacagttcaactgtggccaaagtcaatacgtcttataacctgaaacggtaacctgaaacggagggagtagtctatataagctactcagctacttgggtgatacttgaatttttgttttgaaattacgatgatttgaatttgttcgacatgacattttgactctaattaagttctcttaaataactttttattgaatttttgcatttaaagtgttttaattatgcagaagatgagagcacatggacatattagtgttggtgaatagtaatatattggttgtaaaaagggcaaaagatctaatatatgagtgggaaacctcttacctcagaagctagattttagggtaattataaagactatttacgatcctacgagtatatgtaactatatatgcactaattttaactttgcacccaagta

SEQ ID NO: 71612 - DNA, 366 bp, Oryza sativa
aagtattctctgaaccggagtctcatgggataaatttttttttggggtatgcttcaaaggttttttattccttttttcaaacctgtaataacatgtactattgaataccagtgtgctcgttttataaagctatacgcaatgggatgagtagaaacaaacttataagctaaaccaaaactatgcttaacagattgcaagccacttcaaaatctttcttaatgtgcactctttgaatttactctgttctttttttctttttgggaatacacaagaattgtacataagagaaaaagggaaattcaccacaaacaacagatttactgcacacacaaaagggcatctagcagaacacttgggttataacta

SEQ ID NO: 71613 - DNA, 431 bp, Oryza sativa
tacatactgcagagaaatactacccctccgtttaaactacttgttgttttagctgtgtcctaagtcaactatttctaactttgataatcaatttctaaaaacgtatatagtttaatatcataagatttgtgtttttagtttcaccatgagaaatactatcgtaatatatactcctaatcatatggtgtttatgtatatgagtttctacaaattgatggtcaaaattagaaattttaacttatgacaaagctaaaatggtaagtaatttgaaacggagagtacaattttacagtactggtagaagctgggaaatttacctgccatgcatcatatgctgcattaagtatgaacaacggtgtgcgcaatgttggcactacattctgcgggaagaaacactgcagttgtttccgaaaattagcacaaattcaacg

SEQ ID NO: 71614 - DNA, 398 bp, Oryza sativa
  unsure (1)..(398): unsure at all n locations
agctttattttatccatggcaatcgagtatgtactcaccagtgttacaagttacaatctggcactggtagtgccatcatgttaatcagaatcaaatcaacgcgattcggtgttcacggaactgatcagtgtcagtgattcgttgagatggactttgtcaaggctaataagttgttacactatcccagatgatntgactctcttgtgacgagaagaatgactgatgcacatcttcaaacgttgcgatagactatcacccacccctgccctcttacgggtaagcttcttccatagtgacttcatcttctcctttgattttggggttgtcgatttgctgtctttctgtcttaacggtgttgccagagcctttacagtcatattctacaagacacatttact

SEQ ID NO: 71615 - DNA, 447 bp, Oryza sativa
  unsure (1)..(447): unsure at all n locations
ntatcgttctatgattggtagcttgctttaccttaccgcatctatgtcggatatcatgtntagtgtttgcacgtgtgcacggtttcaagccgctcctaaggagtgtcacttagtggccgtgaaaaggattctaagatatttaaagtattcctctactattggcttgtggtacccaaaaggtgctaaatttaagcttgctggctattccgattcggattatgccggttgcaaagtggatagaaagagcacatccggtagttgccaaatgcttggtagatcccttgtgtcatggtcatccaagaaacaaaactccgtagccctctccaccgccgaggcggaatatgtttcggcaggtagttgttgtgcccaattgctttggatgaaacaaaccttgttggactatggcatatctttcaccanaacctcactcctatgtgacaatgatag

SEQ ID NO: 71616 - DNA, 449 bp, Oryza sativa
  unsure (1)..(449): unsure at all n locations
taaatgagccagcttgaataactgatacaacatatttacatattattaatagtaggtcataaatttcttcttacatagtgatgtgacactttcacaatgttgttgcagcgaataagggagtgaaaaaaaagttttgcatggagatttttaacatatatatgtctaatacgtatgtcatgtgatcaaactcatccaacatacatgcaaattagatgaaaaaccactttgcaaaatcaccttatggggttgtataaactgtattgtttagtttgggggtttgaacgtccggttttaaagttcaatatgctagatggactctcaatcaaagtttaggtggcggagggtgttatttggactttatgtgttgaacatattcganaatgcctcacaaacataattagatgccaatgataaattatgttagaattgcagaattacatatactaata

SEQ ID NO: 71617 - DNA, 376 bp, Oryza sativa
agcttacaatatgtggagtattagtgccacctttctattagaatcacgttgagaatcgatgtgggtttcaatgtgaacttaatcagaaactctcataaccaaccgcgttaaacatgtctcactcagatgggagatgtgtgaagtgccatctcaaatacatagttctagcacagtttgaagaagttaattatgaagaaaaccataaaaattctagaaatttaaacggaccaaaaagtaacttatcctgtgagaggacaggtgatgcctttctagaacatttagcatagtcgcaactaatcaagcagtagcagtagtctacgtgctctctaatcacatattttaggtacgaggtgtgaattgttaaatatgaatcagc

SEQ ID NO: 71618 - DNA, 464 bp, Oryza sativa
  unsure (1)..(464): unsure at all n locations
cctataaaactcagcttttattagagcctcaagtgccaaatgggggtaattagtggggtgcttcttgggatatgatagttcttaatccacacattgcagttgtcagtggagcacccagcctactgccctggtgttaagggcaaggcaatggcatgcatgatacatgagtgagtttagtgagataatgttcatcgggagagattaaataaagagattagtatacattagcaccttcctattgggctttgctggtgtgccttgcatccaaagtgatgccactatctccacaaatgcaggctttaccccatgatcaccaaatatgcttatgggaaaaggaattaaaggagaagattntggccagttgaatgagtttaattgcactgtttattctttcagtgttggaatgatatgtgacgtcacaattggtctggcgatgattcagtagtagaagattctactctgaa

SEQ ID NO: 71619 - DNA, 353 bp, Oryza sativa
  unsure (1)..(353): unsure at all n locations
acaatcttcaatcattctcgaccaattgaaccccgctctcctaatcaaccaattcatcttatgtgccggatgatgagttccacaaattcccttatccacctcttccatagccactttagattgatcattattcaaacacttcaatagaactcccatagccactttagattcatcatcatctaaacacttcaatagaactccatctatattttagtgatataaatctccatcaagcaatgtatatttgaacgcttgccgccgaattcttcaatcaaccttaagtgcagcgtctttcaaatatctaatcaaaggagatcctcaatcttcttctgtntcttgggcacaaatgtccg

SEQ ID NO: 71620 - DNA, 444 bp, Oryza sativa
  unsure (1)..(444): unsure at all n locations
ctggcttncaacgcagccaagaatccgcgaccgactatgcttatgttcatggcttccatctgttgattaagttcgggtggaatgccgcggacgttaagagtgttgcaatggctctttccacttatggcgtcagcgaccacgttggccttaccatgatgatagtgaattcccacatcgtaatccttgatgagttctaaccatctcctttgccgaagattcacgtccgactgagtgaagatgtatttcaaactcttatgatcagcatatatttcacagcgattcccaatgagataaggccaccagatttttacagcatgaaccacctcagcttacttccaatcatgggtagggtagttgccttcatgaggcctgagctggcgtgaggatatgccaccacatgaccattctgcatgagcacgcactccaagtcttggcgcgaagcgt

SEQ ID NO: 71621 - DNA, 381 bp, Oryza sativa
cagctccaaaagaccatcgtcacagttgcccaaccttcccttacactagctcggctccaccattctgcgacaagtactggacattttggtgaacacactaatggcatccaggagcatgcagtcctattttttctccaccgccactgtgatcggccacaattttgcccctgcttcaccatggtaaaataactctctcctttagaatccccttcattccctacatttcattattcatgtttccttgaccgattgcaccatctagaaccatcaccaccctggagcccttcgctcgtgtcgcttactccctagagcgacacaagaagcgaccgataaacaccgtcgacgcttctccttattcatcctctcaccttgccgctgctc

SEQ ID NO: 71622 - DNA, 303 bp, Oryza sativa
  unsure (1)..(303): unsure at all n locations
tcttatgataatntgcctcgtttgttagccaccattgcccagattatatattgatacttactatgacctacatacatttacatccgctgatgatcgaacaaagagtgtgctgcacagagcctctttgtcattgagtgcttgcattaatgcttttgtgcatagtcgacctgttctatgcatagatggaacgtttatgacacgtaaatacctaggtcacatttcgactgtccttgggtgtgatgggaacaaaccttgcattccctatgggttctgcatttgcacagagtgcggcctctgcccgct

SEQ ID NO: 71623 - DNA, 72 bp, Oryza sativa
gtccaccctaataaaatgatgtttatattttctttggaatttaacagtttccaaagtatttatcttcttgca

SEQ ID NO: 71624 - DNA, 57 bp, Oryza sativa
gacacaagaatactaagcttggggtacatagttcgaagagcgtgttaacggaaaatg

SEQ ID NO: 71625 - DNA, 157 bp, Oryza sativa
tagcaagtgtgagttctggttgtccgaagacaagcgcttacggcttgttatatctgccaaaggagacgctgtggacccctaaacagtgaccgccgtcactgattggaagctagcccttaccgatactctaagtcgcggctttatgggtctggccaga

SEQ ID NO: 71626 - DNA, 117 bp, Oryza sativa
agcctgtgtgtatactaatgtactctgcatataaggccttgatatatgcctaataaatgaagtttcaatttgaatggatatatcaattaatattccttcccgttcacgttataagat

SEQ ID NO: 71627 - DNA, 444 bp, Oryza sativa
tgtacgagcccttcgctgtggctgctcatcgccttcattggagaaagctgcatgtggcgacgacatctcttagcaaattaaaattctctcttctattggtgccaatgcaacctaattatatatctctgcgactagctggtgagtggctacgtctgctgcctcgcgtggtatttatagacagttttgcacaggctgagcaagcatgcatcagcatgacttcatgttggcacacgtcaaaatgatgtaagcatatgcttgcatgatccacgtgtgtgtcatccttccatgattgcctagagtatgtcatgatgcaagcagataccagcgagagtacagacccctaacactcggtgagatggtggccaacggataggccgggtgttcagttcataaccacactttgtcacaccacacctttaatccgcacaatttgttagacatgtg

SEQ ID NO: 71628 - DNA, 447 bp, Oryza sativa
  unsure (1)..(447): unsure at all n locations
tactaccgagagcatctcacagtttcgcgtccagcgttctctctatattagcagntctgttatgctcaaccacatgctctctgctgaaggtttcgttgttccagagtttctctctcttgaaagctgcaaggagccatccgtttcattcgaagaatctgcaaacttcacatccgtcaagtgcctgaggttatgtaattgtgaaatgaggtcaccaccaggaaatatgaagtgcctatccagtctaacgaaactcgatatctatgattgccccaacatatcatctataccagatctgccgtcctccctccagcatatatgtatatggcgttgtgagctcttgaaggagagctgcagagcacctgaaggagaaagctggccaaagattgcgcatatccgctggaaggaattcagatgaattgtgcttcagaatcacaactagagagaaac

SEQ ID NO: 71629 - DNA, 388 bp, Oryza sativa
agcttcatttgcccgcatatttctctttgcttctgatttcaccttaatctcccaatcaaatgagtatttactctgtacatcaactgcacatgagctgatatctgtttggccatgatctttgtcttggaagaagcatgcagagtttttgtgatgttattttctaaaaaaattgacagcatgtccccataattgatggatggagagatgaaaaattgcaatataggaacttgaaacttggagcattcagacaacacagaaacttggaaacagccatatagaagttgataatgttgtgagataagtttttggatcatacatgtcatttaaacaagtttgtggagcatatagaacaactattctaagggtaggccatatacacttgtacaat

SEQ ID NO: 71630 - DNA, 455 bp, Oryza sativa
tattagtgtagaggataatttctgggaacagcctagttgtgcatgttttatccctgatggttgattctgagtagggattaaaatggagaggatatggacggataaagctcgtaccatatccgttttcatattttagttggataaggaaacaaatacaaattatctcaaatacaaataaggaccaaatatgattggacatgaatacggaaacaaatatttctcggaacacgaaaccacctaaacttttaataaaaacaaatacaatcatacataattaactcatattacataaaacgtttcatcatagactaaacaatgctagttaagttcaacatgtacaacattaccggtataaatgcatgtctaactgatattcttatccgtatctggattattccatttgaattgtatccggatttgtttttctctagagcggacggaaactattcgctcgt

SEQ ID NO: 71631 - DNA, 442 bp, Oryza sativa
  unsure (1)..(442): unsure at all n locations
taatagctcgcaaccggctgttgaatccaccaactgatctattctgtggagaggaaagtgatccttgcggcacgccttgttgatgtgtgtgaagtcgacacacattctccattttccgttggccttccacaccatgactgggttggctagccactctggatgaagtaattctctgatgaagccagctttgagaagtttgtcgagctcttctcgtatggcttgttttcggtctggtgcatatctccacagtctctgctttactggcttggcatcgggtcgtaccataagtttgtgctcaatcacctccctgnggacccccggcatgtcggacggctgccaagcaaacacgttggcattatcgcggatgaaggtgatgagcgcgagttcctatnttctcgtctagtgtagccccgattttgacagtcttgtcacggttagcact

SEQ ID NO: 71632 - DNA, 386 bp, Oryza sativa
  unsure (1)..(386): unsure at all n locations
agcttgccttaatgattnttctaagagggacaaaatgtacagtactaaggagaaacttatgattagcatcaattatcaatagaaaaaaatggtgagaaaaccagcttcgaggggactgaacgttgcttgacaagggcacctgatagctcgctccctaccaccgggctataatgccattcttaaccttaccgcaacattgtgttggaagagatttatactacttcctccgttccaaaatgtatgcgttttttaggttggcacgggtattaagaaagtacgtgataatgattggagaatgtgtgtgattggttgaaaagaaaaagtacgtgaaagagaataattgtgattggttgagaggaggacgtacgtgaaaaaaataacttcat

SEQ ID NO: 71633 - DNA, 434 bp, Oryza sativa
tgctccacaggtgtgtgataaatcttcagagaaaagtacttgtattaataatcttcctttttgttttctccaattagcaatgaacaagtagatgatgattataaaatgagttttagatataatttatgtgatggtttctgtaattgttgctgttcctgcagttcttcgcggaaacagggttcccctgtcctagccggaggaacccgtccgatcacttcctccggtgtgtcaacgccgacttcgacgacgtcgccgccgccatgataggatccatgaagctgcgagcagtatgtccagctactgaagagatgtttgtaaatgtgatttttatctgatggaactgaattccgacaatcttgtgtttttttcacgaggcagattttgatccgttactcaagtactccacgtcagagatcagagaacggctggtggac

SEQ ID NO: 71634 - DNA, 384 bp, Oryza sativa
  unsure (1)..(384): unsure at all n locations
agctttattgtaatgtgcactccctgttcaaggtaaattacttgtggttactctgtctaaagctagataccattatatgttgatataagcaactgacgataaatctatccatcttgagattcaaaaggatacatgcctgcctgcctctgcccatgcgtgaattaaaaatctgcacaagtgctgctgtatcaacaagctaacagctagtcgagcatgcgtgtggaacacaacatcgatcttaaatctacttatctccttccttggtagctatttacatacttatccaacaaactaaccacctactcatgtcagattcctttcaggacattaatttgtaccaattgtaaatgtgggcaagctgttagaattgcctcatgtntcaag

SEQ ID NO: 71635 - DNA, 443 bp, Oryza sativa
ctttaaagcctctacatgcatggacaccacgctcctcgagaccctgtttgagctaattgagcctcatcagccagcttatcctccttttgagctcatgcatgcacatatctgtgattgacagaaagcgtacgacgatggcgagatttgcacgggccatcttgtcccctttagcgcgcatttgctgctgtttggaccaatctgaattcatggagataagcgttatcacaatcgactcaagaaagtgtggctcaatccctgtaccatgcgccttatctttgttcctgccggttgggccaaatgcatctaaaggtcattccttgataattagtcattttatgtgacggtacaccattgctccctcaagtgtgcactccattaaccaaagatgatttgccaaaagaggtgtaatgagaggtacttatggaggggcctaatagcggttg

SEQ ID NO: 71636 - DNA, 154 bp, Oryza sativa
agcttcttctattgagcatctttcccatccttgagaaggtaccatgaggtacaaggcaccaatcaaataaaaataattgtattaacacgggcatgattgggggctaaaaaaaaatacgtctctcttccacgtcgtcaacgcccatcgagggtcg

SEQ ID NO: 71637 - DNA, 393 bp, Oryza sativa
  unsure (1)..(393): unsure at all n locations
tgtaaccatcattntgtctgttaagtttatgaagccttcattatctaaagaaatcatggaacgatgcaaaagtgtttacttctgttgttgcaatacacttcagttgtaaagaaatttctcttaagataaacagttgtagagaaagatctcttcatccattgatcttccatgattaatatttctctgacattctgttttatggaaggttaaaataaatacttctagcatgattaagttatgctgtaaaaacataacaaatcctgctgaaatatgatatgttgctgattctcaggctattgctcgacaatgcttagaagctctggtgtatttgcatcatttatatatcggtcactgtgaccttaaaccagacgatattctcattaatagttacag

SEQ ID NO: 71638 - DNA, 390 bp, Oryza sativa
tcaagcttacagttaaaaccggaagtcaccttgctggagaagccagcttacatcataagttagcttatagtgttatccatcaaccttctccgcctataaataagaccctaaaggtccaaggtgatattgatctctctgtagcacctcgcctcttctactgtagtttataatcaaatctagaagaaataaagctttcactctcatttattctttgtgttccacatagttgtgttcttttgtttgtgtacaatcagtagaatagactgttttttaacataaaccactacgtatgtatgttttggaaaaataagaagattaataagagataacgatgcaaggatatgtgctagctgcagcctaggtattaatgcatttgattcatccttcttc

SEQ ID NO: 71639 - DNA, 439 bp, Oryza sativa
tctattaggacacttgaatctcagcttgatatgatccttttccggtgaatacaattaatttcaataattataaggtgttgattccgccagagcaagccgaatctactaatggaaaaggagtggtcattggcgaaccaatgcctaaaatgatagtgccaaagaagccggaggttggcgtttggaaggaaaataagaatggagcttcaacttctaaagcccctatgaagaccaaagagacttttgatatgcttttggaaaagtatgagaagcaaggtggtgagaaggctcgcaacaaacgtaaaagaccatgatcacctcctatggagcgatttggtcattcaccaagacggtcacatttaccttcatatcatcatccacaagacatttcatggggttcttatccaatgccaccgccgggttatacttatccttacttcat

SEQ ID NO: 71640 - DNA, 405 bp, Oryza sativa
  unsure (1)..(405): unsure at all n locations
actcaatattaccgaaggttggtactccaagcaacaacaacccaaaggcaaccgcttttaatccctttggatacactccttctgactcactttgaactctcgggttttatggcctaaactatgcaaactacacggatgtgtatccctatatatgctattcggcacgtataggccacaccacccatagtgaagggcacactttggtgttttttgcgcttcagcttttgattatttgtgtatcagtacataaaaataggttttgttttgagacatgggagcaacaaataatacattaacatangttaaaaggggccacatactntgtttgttccatgcaaaacgaatgcaatgtcaacaattatgctcaacactcacgtactcataaagntgtatgacatatacttc

SEQ ID NO: 71641 - DNA, 280 bp, Oryza sativa
  unsure (1)..(280): unsure at all n locations
aaaaaaaaggaggggaggggggggccccccccaacgaaaaagaaaanaggaaaaaggaaagggggagaaagggaaaaaggaaaaaggaacaaaccgggacggaaaccaaggaaaggggcaaacaggaaggggagaagggcgaacaaccaaagaaggagaagagaaagggagaaggngaaggggagaaaaaaagaaggcggggagaaaagagcaaaggagggaggaaaagggggacggaaaaaaagggaaacaggggagcacngggggggggaaagaaaga

SEQ ID NO: 71642 - DNA, 364 bp, Oryza sativa
agcttgcataattaatcttaaattatatttggggtctaatcctttgaataaaaaaaatacatgcacaaaagagtagtaaaacactgcacaatggcaagttggcagtacacaaaaggaagtttacgacaagaggtcgcgaccatagatacaaaatcatgacgggaacatcagagaaacgcatttagtatttctgatatcatgtctttgcctttatgtactgccatttctgttcattaaacttcatgagaagacatatgtttgagacgactctattcattcgtcattacctctgaactcaagtctaaaggctaaaacagtgcatggcctgcaggcgctagtatagatgatatcatatcactatata

SEQ ID NO: 71643 - DNA, 330 bp, Oryza sativa
agcttcactttctctatatcatttggaacaatcatcaattattttcggccgatgaaaccccactctcctaagccaccaatttatattacgggccgattgatgaatttcacaaataccttcatggactactctcctaaccactttggattgatcattatctaaggaatactccatctattcttcggcaacataatatttgaacgctttgcgcccaatcttgcgatcaaccttaagtgtatgatctttcagatatctaagcaaaaggaattccccaagctattgctaactcatgggcacgaatgtgcgaatgtacaattaaattcggctttg

SEQ ID NO: 71644 - DNA, 237 bp, Oryza sativa
agctcgtgtgtgcttttgttacaatgtgaaaactactttagagtatttcttgaaagaaaacggaaaaattaaaaaaaatgagttcatggacagaaacaactgaagttttaaacacagctaaagctggaatgttcttagatcgatgaagctgacatatttttttttctgatctgcgtgaacgatctcttcatgggtgcttggcttaagctgaagaatgggtagtgtgccggatatttc

SEQ ID NO: 71645 - DNA, 299 bp, Oryza sativa
atagctattctttaaccactgttagtatcttgcataattttgtttgacaggccatagtgtagaactcgtgtcctatgtcaaagttagtgtcactggtttagagtcgcattcttagttctagatctacctgctgcattgagcgagaagctgacttgagatcgagttctactcagactcagactgctagccggattgtgtaataagccggttcgcgagcttactagatatgtcgaaaccaccttatgtatgcgataaccattactccactgtttcaatgaagtatttacatctccacttat

SEQ ID NO: 71646 - DNA, 260 bp, Oryza sativa
gcttgtatgtggtgtggctgtctccattccactgccacagtgatgcaacgaccacgctagaacaccatgttactagtggtgctgtgaccaagctacaaacacctgtgctcaaacaacaggtagctaattactaatttctcaaatgaaacggatgacagaatcatgcatgcatatgaactgataaactgtgtgttcatggcatttcacgcaacacagcacgagaagctcaaatatcagagaattcatggagaggatgaaac

SEQ ID NO: 71647 - DNA, 447 bp, Oryza sativa
  unsure (1)..(447): unsure at all n locations
cttattgtgttaagaaatataagaaacgaaaggtagccttactaaacggtttgaatggcttaaattcaagagtttctgccacggctgatatatggacatcaaatcaaaagctgggttatttgtgcattacttgtaatttcatagatgaaaagtgaaacttgaataaaaggataattaagttcagtttggttgaggcgccccacgacagcaaaactatgttgagtcaatacttaagggtattaaagaatgacatattgaacagaagttgtttctatttcattggataatgtttcggtaaacgaatagtntgtgagtagttngcaacaaaattttgttgagaataatatgctaccatgtaaaggtgatctctntcattctcgctatggtgcacatataatcaatcttatagttcatgatgggctcgatgcattaagtggtggaattgat

SEQ ID NO: 71648 - DNA, 309 bp, Oryza sativa
  unsure (1)..(309): unsure at all n locations
tgatccctcttctacgatcgattacacccctaaaaagcttcaaacttttgcctgctgcatgccgtgtcttcttccagatgcagccttccagtacatacagtacatgctacgtacacactcagattaactgcatctgcatcgtatctaataaggggtgtcactagctagcatgcaaatgtagatacaatacttgaacataaatgccatggcaatatgtgctgcagctagctactatagcaatatatgatgtgaatttgggtgtggctctatacttatttctctgcanaaagctggggtatccatatatgt

SEQ ID NO: 71649 - DNA, 399 bp, Oryza sativa
agcttttcatgttttaacattagtggtacctgttccatgaactctagtccccatgcgctctgaacgtaacgttgtcagcattgtgaggagttctggcgttcccgaagtctttacagacaactgattgtatgacaccatgtcatcgcaatcatggttcacaaagtcacatggccataacatatgcccctggactatcaatataagtatatgtacctgtgcctcggtaaatatcataattgccctgctcggcatataattgcctcctgcgcgaggacttaagaagaaccactatacagaggtatcacctttgctagataacttaatcagctaggtctatgcccatacgagaattgcggtcgtactcgtatggtcttcacatgtacttggcaggcttatatc

SEQ ID NO: 71650 - DNA, 311 bp, Oryza sativa
  unsure (1)..(311): unsure at all n locations
atcatttttgaaatcactaagtgatttatttctttttaaggttggggcgaaaagagacttgcgtctcaaatcgacttaagagatgcttttcaacaactcaaatggtgatgtaccgacctcccgggtcagatcattacttatcggcttccagagccatttcacttgattatgcggctcccagagcctttntcatttttgcagactcccagagtccagctgcccagcagctaagcaatccgcttccactcgggaagcctagtctatgatgcccgcagacattccgaatcacacagattcgtttctgaccactc

SEQ ID NO: 71651 - DNA, 274 bp, Oryza sativa
  unsure (1)..(274): unsure at all n locations
tgcacacaaactctaggtattttgccactcaaacacagntatacaatccatatattcactgttcatccaaccgaaattctgaacacagctcaatcacaatcaaatactctcacggtcttaaacctcgtagcttttgatctataaagacactanaattttatctactctgaactcaatgagctgctaggatcacaatggaatctgctcatattcttctgaactcaccattgcctcttctggttgcatcttgtatgacacgagagctatacaaata

SEQ ID NO: 71652 - DNA, 387 bp, Oryza sativa
gttacttgactcatcaattgtatgggtataatcaaaagatattccttttgcctttctcttttgtgccaaattgttcctgaagctgatggtttccaaccatacctgatattacctgaaaaaggtttaaaatctcttataaaaggtcttctagaattatcaaaggaaccatcgatactcctttgggatgatgtaacatagctgaggatcatgtttcttattctgaactagatagcctccttgtgtagtatattgcagtattatttattattactcttcaaactctcttctacatgaacctttgaaagacccttgacttacagtctattattactctggtctggcactctgatcttgaaacaaatttgagttgcatgcttcatatctata

SEQ ID NO: 71653 - DNA, 297 bp, Oryza sativa
tctcgatgtgtcaagacattttcctctattacacgcctatcacgatgatatcttaagtctgaagctatgtccttgatcataaattatctctgtaacctagggatcaaaggaaaatatcgcaatactttgtgaggtacacgtttcgttcccttgtgaattttacatcttgattcattacaaacagggcacctatcatattcttcaagttgctttcagaacaatactcaatcattgatgcatgcctgtgtgctttcatagaccatccctatatctcttaacatctgttttgcttcataa

SEQ ID NO: 71654 - DNA, 300 bp, Oryza sativa
  unsure (1)..(300): unsure at all n locations
gagcttctcgttcttgacctaccaggaacccggtttgttcgaccccgccccagcggtcccaactattggcatgcgatgtttccctgaaccgactagttacctaaccagggtgtaccattccaccttgtggcagcactttgattatgttcgatgagttttccacatgaatcggtccgtatatgcgaataccggacagtgccacatatgcacatgccgcgcatggcgagttntcacaattcattttattttcaaacacaccgacaccacgtgtcgggtntttgaaagcttcacaaacccatt

SEQ ID NO: 71655 - DNA, 378 bp, Oryza sativa
  unsure (1)..(378): unsure at all n locations
agcttgaatatgattttcgcagattagttggagctgagagcgataccctcaaaataatttttaagaatcaatcctaaacgaccaacttaaggtgctcctatagtcggtatttgctctgataccatgctgtggtagactctccggaccttccattatatntgagagatgaaataaatagntcaagtcatcaaataaacataataaaacatccgacgcctcgagacaaaaatattgaagacattactgggcctttagcctgccagtcaacttcagcctgaaatgtgcccgtcaaaccactcgaaggatgtgttacacattaagaagacttgatataagaggctgaagatctacaacatcccacatattcttaactcatac

SEQ ID NO: 71656 - DNA, 329 bp, Oryza sativa
  unsure (1)..(329): unsure at all n locations
ctagcctatctgcatgcagatgggtcatttcaatgatgcaaaagctttaattcttccaaattcatgtagtctgatcatctgatgggtaacgagttttntgtttaagaatgatgggtaatgaatctgcatgcgtttcatgaatctgcaacaaagtcttgatctgttaagtgcaaataactattctagaagtaggggagatcagagcttggttttgcataccatttaaaaccttgtttggattaagaaaaaacaaaacgcagaaatatagatatagaacaataaacatagaaatgcacgtgttatatagaagaattttaaaaaaaacatgt

SEQ ID NO: 71657 - DNA, 333 bp, Oryza sativa
  unsure (1)..(333): unsure at all n locations
agctntatatgagctcggattgtatagatcaagccgcaaacgggaggaatcgagtcgggaagatctcggactcggtttttagagataaaacaaaacgaactcgattcggatccaaaactcaacgatttgcttagcttcttgaggggaaagaaagaggagaccgagaggaacaaaacccctcaatncaattgaagaaacggaatcggattaggacgaattgagaggagaaagggcggctatggttcgggctcgggcggcggcggcggccggatgagggagacgatcccgacaggtgggccccacctgtcggcctccgcgagatgggcgcgggcg

SEQ ID NO: 71658 - DNA, 445 bp, Oryza sativa
  unsure (1)..(445): unsure at all n locations
agcttccattatcttaaaaaaaactgcacccaaaattgtctcagattctcagtagactgttaactgttaagtcgatgtatgggcatatggcaagcaatgactcaattgtggttgtggaaattgtgggtaacaatgtttgaactttcaagtaatcaagtgtttatcgtaatctgttgctgcatctgaacaaaaccctggaggagggatcgtacacttcggtttggtaatggtaagaagtgcagttcttatctctgccactgccactactatttgccatgcttgtacggngatattgaccaatgcttgtctggttaagtcttttcaattctgttgcgaccagtatccgatttatatggccaagctgaactttactgtgcacacttccatgcaattgtttcaatatatcttcattacatagaaaatgctggcatgctgctatgctcca

SEQ ID NO: 71659 - DNA, 436 bp, Oryza sativa
  unsure (1)..(436): unsure at all n locations
agcttacttgataatatatgcccttgacggatataaatgtctttcgcanggaatgagttcgagatatatatgcttgccattcatggctcaacctacaaagtacaaacatgtcccccaaattaataaaaggtattagcaacgccaaacaaagtcaggtacagcaattcattatagcagcaataaagatggggcaaatgtcatagacttgtagcatgatgaacaaatgaactangaaactacaagagccccttggctgggagtgttgtgtgtgaatttgacggaggggattcatttacaacagagcatacctgcggcaattatgaatccgctgaacttgcacacgttcaccttcaacatcatgcaacgcatcanatagatgcaccattgttaggcaatcatccaagtcacgaagagcatcaacaaaagttggatatct

SEQ ID NO: 71660 - DNA, 168 bp, Oryza sativa
agcccacgcggaaacagaccgaagacagagcaagacaagagatgaggcagaaaaaagaaaaatggcccgagacaaagacagcgaaccaaagcaaacacgaagcaaaagaagagacgcaaaaacaaccacaccaggattttggacgcatcatgaggagccaggcgaaac

SEQ ID NO: 71661 - DNA, 255 bp, Oryza sativa
  unsure (1)..(255): unsure at all n locations
aaanaaaaaaaagaaagggaaaaaaagaagaaaaaaaggaacaagggggggggatgaaaaggggggaaaaaaaaaaagaaaagaaggaaggggaagggagaaaaagaggaagaggaagagaaaagaggaaggagagaaggggaaaaaggaagaagaagaaaggggaaagggagaaagaagggaaaaaaaagaaaaaaaagaggaacgagaaagagaaagaaaaaaaaaaggaaaaaaaaaggaagaaaaaaaaag

SEQ ID NO: 71662 - DNA, 397 bp, Oryza sativa
acacgattgtctgcgacaatatcttggcgtggcgtggagtatggacgacaaatgacgcggtcgccggcgacgagctccggtgtggagcgtggatgacggatgacatgaccatcggcaatgagctcctggtgtggcgtggggtgtgaacggcagatgatgcatccgccggcaacaagctccgacgtggagtgggacatggatggcggaggacgcggccactggcgacgagcaatgagggcacgaccacagatgaagacgtatcggtacatgactcctgatatttagtaggaatcacatgttatctggtagttatcactctagtattaacgagcatcagatggtatcaatgggtatcggtcaatatctataggtatcatctgacacctcacaattatca

SEQ ID NO: 71663 - DNA, 353 bp, Oryza sativa
  unsure (1)..(353): unsure at all n locations
tgcaagcttgtgtccgttcggattatgagatgccgaacgcccaatgctttcgcctttctcaagcccattaacactgcttcatattcggccgtgttggtggtcgtattgaactgcaaccttgcagtgtagcgtatcaggactcctcctggcgaaattaagatcacagagatacccgcccccttgtgagaccacgagccatcggaatacatgacccatggctgtttcaactagttcaagctttggggtggtctctagtgttcattcggccacaaagtcggcgaggatttgggactngatcacaatgcgagcaacaaagtgtatgtcgaaaggtgatagctccgcagcccatttac

SEQ ID NO: 71664 - DNA, 239 bp, Oryza sativa
  unsure (1)..(239): unsure at all n locations
aaaaaaaaaaaagtgaaaagaanagaggggagggaaggaaaaaaaaggggggaagaaggaaaaaagaagaggagaaaaaggggagaggagaaaagggatggaaaagaaaaaaggagggaagaaagaagaagaggaagaggaagagggagggaagagaaaaaaagaggaggggagaaagagaagggaggaaagggagaagaaaggagagaaaagaaaagggaagaaaaaaaggaggaaga

SEQ ID NO: 71665 - DNA, 362 bp, Oryza sativa
agcttgtcatctgttcggcaatgttctattggcgccttgccccgcgttgaatcccatcatcaaaccatggccgtttcgaagttgggctttggatttcattggtcaaatttatcgttcgtcatcaaaggggcataggttcgtgctagttgtaacggattacttcactaagtgggccgaagccatgccgctcaagaatatgactcatacgaaggtaatggactttattttgaagcatattatccgctgattcggtattccgcatatattgactacggatcaaggagcttcctttctgtctatggaagtgaagagttttgccgaatcttattgcattaaattgttgagttcttctccttactatg

SEQ ID NO: 71666 - DNA, 374 bp, Oryza sativa
agcttgacagctatcattgctactctatgagaaagtactttttgtcggtgagtccagtctgcatttctccaaatgtttcgagggatttcactcaaaccaaaaccaagaaggaatgcaccagtgaccagcccaaaagtatttgaacatgccattgcaaagcccacaataccaccatccctgccaaaatttttgttgcagataaagagatcgggttttacagaataaaagtttaaatgaaagcagttatctcaagaagtaatctcaaccactcatggcaagacaaatgtttctgttgggaacagtagtaatattcttggtaacttatgatagcttcaagatattacaacggctaaattatatatcatatgggtcat

SEQ ID NO: 71667 - DNA, 301 bp, Oryza sativa
tacgatggctcaagttgggttgtggacaatggctgcaccaatcatatgacgggagagaggagtatgtttaccagtcttgatgagaatggtggaagtcgagacaatattgcccttggagatgattgttaagaaaaggtggtgggtctcaacgagattgctatttccaagaatcaatctctatcttatgtcggtcttgtcagttcattaagctacaatttattatccgtgtctcaattgtgtaagttaggatattattgctaggttaccgatgtggatgtgaccgtttttaggcgacatgact

SEQ ID NO: 71668 - DNA, 431 bp, Oryza sativa
  unsure (1)..(431): unsure at all n locations
tgatctgagctaaagatgagcctagcaaagcaacattccattctgttcgaacttgcatcaccccacaacctgactgaaatgagacctgtgagaaatggtgagggaatcggcaatatgcgcaatcttaatgagaaacaaagggtattatacatgctatgccactttttggtctcgttgttgtgtggataaatgctgcctagcaacatattatattacagcgtgctaattagcgtattaagtatagtgttcattaaatggcaattcaaaactggcatatgcaatatatatatacctttcctgtatatatntatgtatgtattgatatcttcggctgaaagcatgcatcttctgtggtaattataggcacttcattgaccactctcattcgtagttggatttcggcttcgctcatgtggattataccttatgat

SEQ ID NO: 71669 - DNA, 384 bp, Oryza sativa
  unsure (1)..(384): unsure at all n locations
agcttcatgtgttggtctccgttcgcctctctcccatcggagcacgttgatcttgacggttcctggcgcgaccaatgcgtgcgcgagaagttagacgccatgaattcgtttctcttctctgctttgtttttttttttggctcctgttttgcagttggtgtgttgcggaggtgtcagtttctgaatttgtataaaccaaatgccctcttcttattctttntgctgttcctgatgcaatctgcccgtcttccttacgtattgatcaagtagaacggcgcctcgttctcttctcgaattttaaggcgtttcggaatccgaaatttgctaagattttacctggccgtgatcattnttttcctcctgttcttggcttccctttcccgtg

SEQ ID NO: 71670 - DNA, 279 bp, Oryza sativa
ctcgatgtcctttgcttctgtgtttctatgcctgaatttggtggcaattcaaagacagcatagtgaagaatccatctcagacaacatagagggaatgttttccaacgcaaaaatttgtcaacatacatttgccctgaagaaagcacagagaattaaaggatgaaagaaaagaaaagaaaagacacgttgaagattatttgatcaatcgctgcatgccaattatacgctgaatagacacccataatataagcccatgctgaaagttaagtaaacatacat

SEQ ID NO: 71671 - DNA, 450 bp, Oryza sativa
  unsure (1)..(450): unsure at all n locations
agcttgtgtatcgatatatattgggttttacangggagatatttgccattctgctaaattgtagataaaatgttggtaaagattatttgtgctacatttgatttcagatcaactaaagtaacacaaagaattagttaccaaaattttggtatggttctattntgggtcctaccaattaatactttagtgccaaaccaacgatggatgacaaattctactgaccgtgcacaatttttgtaaatnttgttcacgccatcaatgtaaattcggtgtgtccttttcctcatacaaagaatggcgtggataaatgcacacatttctcaagcttctaaacaatacaatcttcataaaaaaaatcaacatatgaattcttataaaactggggtaaatttttcaaacttataatattaattaattaattaattaatttatacactcgaatgattatca

SEQ ID NO: 71672 - DNA, 338 bp, Oryza sativa
  unsure (1)..(338): unsure at all n locations
agcttgcatgtgctgntgttctgtgcaatattgctggtgaaatactagatcatttgtgtgatgcatcatttgtacctgtagtagagaacggaggtttagctatccttcgcaccatttattcggttgtacaatcagagactggtcaggtagcagccgtgtactgttgtgtacagttgttaacgctcgtgttgaggcagtagtaggtcagcattggtgtacatggtttggtgttaatctgcaggctcgttccgtttagcttgacgtgcatcttctatggaaaatgaagctgagaaataaaatcatgtntataggtttgggtgtatttcatggaaatcatt

SEQ ID NO: 71673 - DNA, 328 bp, Oryza sativa
gcagatctccatataacagcgtttaacttcggatgatcatatcttggtcatacgaactctgaatctacccgttcaagtcttctaatgtttgttattacctaaagaaccctgtgctttctttttatgtataagaattgcgtgcttttaggcttgtagctttgcttgtgtgcttcgcgtatcttctgtcgttccggaggttcccgaagcgtggttcgcggtcgtcgccgaatgttctgaaagccgttctctctgagcaatgcaagtcacatcatccttgagcatatttgatcccagtttataaaatattttgattagataatgcattatc

SEQ ID NO: 71674 - DNA, 328 bp, Oryza sativa
cagatattctgagtgcacgacacttcaaaatttgaaggtcacgtaatccatcgcgattaacagttacttcttgaatgccactcccgagggatgcatcactaactgtcagagtagtcagtaatgggcactcagacaacaactgaaaaaatgcttctcccagctgccctttgcccattattagtgtcttgagatgcctagaaaagtgccatttttgataaatacgatgacaaaattatcacatcaaaggttaatgaaatagaatcggaagaaaaccttgagcatgttatcgcttccatcaccagtaattctgcatgtgggacaccagaca

SEQ ID NO: 71675 - DNA, 303 bp, Oryza sativa
tagcttgcattattgtaccatccgaatgttgtagctttctatggtgttgtactggatggaccacgtggatctgttgcaacaataactgaatacatggctaatggttctcttcgacaagcattgcaaagacatgaaaaatatattagctgttcagtgccatacttatcacttaccatgttgtgatgcatataattctatattcttctgccttcaagatatttgatccgcgtaggcgtctcctgattgcaatggatgttgcgtttggtatggagtattcgcatgagaagaacactgtacactttg

SEQ ID NO: 71676 - DNA, 284 bp, Oryza sativa
  unsure (1)..(284): unsure at all n locations
agcttggcggttcgggtatgctttttctcccttcttcgttcgnttnttttctcatgtgtctcacaattaacattttgttctcttcgcccgttcctgtcctgcatccagattcttgctgctcactgttcgacagagcgaaccgcgcgggcccgtcttgacggatttaagaaccgtcttcgggccaaggatgacgaaattagctgcaagaacttggaagtggaggccctcgccaacaccctcatagaggcgaaagctgaagtcaagcgccttcaatccgagttgga

SEQ ID NO: 71677 - DNA, 419 bp, Oryza sativa
atgctttaaccaagctcttacatagatcttaccaatgcaagtgaaatggtgacatacaccgactcaaccaagcaccccaatgaaggttggatgtatcgatgccttggcaaacacttgcggtacggctgtaatcaaatatgtggagctctgggttggcttaaatatgtagcaaaggaatagcaaatgctcaaatcagataatgcaaagttgaataattgttcaaagtcaagtaccgtgctggtcctaggctagaacgtactatagacgcgagcctagacacaaacgataccataagatagcactaggaacaactcatgcacaactctgatatatgaagttcagctcaaaacataacagattttctcttttctttctttcttctttcttactttctttgtttttctttccttctcttttct

SEQ ID NO: 71678 - DNA, 378 bp, Oryza sativa
agcttagattgaaatatggacattgtatactcactaccataaagataaacagaaactgaacaagagtttgtcttctaccctgtaaagtgccaaagaagaagctctatctaaaattcgtcttgacctgatgtggtgaccaccttggaagactcggaaagttggaagactttatcaagtcaagcatggaatattcttactgacagaccagttcaatcttagaaaaagtatgtggctatcatggtctttcttagaatggaggatgcaagggatgttgtatgtatatgcaaatttcagttcacaaaatccaggtggtatatagaaggccagctaagacaatgaccatttacctacagatactattcctcgtgagcattttac

SEQ ID NO: 71679 - DNA, 220 bp, Oryza sativa
aaaaaacgggtgggaggcaaagcacccgcaaccccaaccacagagacaaaacaccagaccaaccgctagcaataccctaagaaggagcacgggaggctgaaggcaaggatgacaccaaatcaaagccaaaggcgagcaggaaccaaggcatgaagtggagggagaaccacaagaacggacaacgaaaacagatgccagcgacagagggcaaagcacaacc

SEQ ID NO: 71680 - DNA, 203 bp, Oryza sativa
  unsure (1)..(203): unsure at all n locations
agctttcaaaatattccaatgagaacttctccctaatcggagcaatcattccctgaaaagccaagtcnggcaactgggcatcggtcaaactcaaactgtaacatttattcctcatctccctgaacctttgaatatactcatgcaccggctcatcatgcttttgcttgatcgacgtgagattggacaacttcatctcatggacc

SEQ ID NO: 71681 - DNA, 334 bp, Oryza sativa
taagcttatgtttattgacaaattaatatggatatctatttcctcagattttaattatatcttctggatatacatggaactattcgacaagaaggaaatatttattccgtattctgtggattcttgtggcacgtataagcgtggtttcagatggatatatatgctgtgtgcgtccgttttatccttgtcaccttgttgtgtatcaaaaaggctttgatgaacagaagatgattatatatgatggagacaagaaacaattataaaatgatcgatcgatccgtcattcatggggcacgatcgatcttgacgttcagataagtcgatatcgatcata

SEQ ID NO: 71682 - DNA, 435 bp, Oryza sativa
  unsure (1)..(435): unsure at all n locations
agcttcgatgcatagctctatacaagatggatcgtggaggaaattcagctggtaaagctgagatcgatcggcgtatactgggctgctgaatcgagccgctttattccggtatcgacaaacccctgcctgctttcaattcctcgtatacaccgtaaacactgtagcgcacgtatgcatgtgccatgtggctgtgcacagtgcgcgacacatccccactagtggctcgtgaaatcgcctctgcgcgtacgcgcccgacgtcccgacccaagtctgacccccgcaccgtatcacccccgtcgtacgtggtccgtgcgcacagaaccatagcaaacgaccaagcaaaacgtagcagcagcgcgacgctctngctacggcctactgctacngactgcagcatcgcgcacaggctgacacctgaatacttacagagcccgt

SEQ ID NO: 71683 - DNA, 319 bp, Oryza sativa
  unsure (1)..(319): unsure at all n locations
tctagcttngttcttacaaaaataagaacatcttagtaaatgttgacactctcctggtggaacaagctaagaatgtgcatcccaattcagtggagctgacctgttgaggtagtagacctcccagttggagacgagatccgcggggctcatcttgtagttgatgcagtaggtcagcactgcacaaaccacacagcaacgcgcaccgcatcatcagcgcccatatcgaaataccaatgaaccgaagaatcaaaanaaataaagaagaaagaatatcacgggagcatggggggcatgcgcgcgtacgcgtggagaggatctc

SEQ ID NO: 71684 - DNA, 290 bp, Oryza sativa
aaaagtaacgaaaattaacccataatcaatgcaaatcgatcgatttgaggcaacgcaaaaacagatactccgctctaagtagtaggagaatcttctaatatagggcgtggagctagcatggaacaattcgaaggaattaatcaagaaactggaaagaaaccaataattatgcaacaacaaaattcatcacaagaacagcgggaaaaaaagctgcagaagcagcaaaagtaattcacataattggatgaaggattattagagaaatactactcacatattcttgagtaccc

SEQ ID NO: 71685 - DNA, 355 bp, Oryza sativa
tatcttaacaattgtgcctcttgttttcagccttccaagaatagttggcatatcaacatgacatagcaaataagtgctaatatttggcttgtaaatgcagaattgcttgtcaccttccaagactgatctgatggttggaataaaaacattcttccatgctgaaattatattcttgcttgcacttggcttgatcccttgcattctccatttgctggtaccatcttctagtataactagaattcccttgcagtcccaagtatcctgaacattgttgccatccaagtggcttatatcactaataagcctgctctcaataacctcaaaatattgtgccatcatataagaggtgaatgga

SEQ ID NO: 71686 - DNA, 427 bp, Oryza sativa
  unsure (1)..(427): unsure at all n locations
agcttctggtccagtatgtccataaaactcactcggataagctgtattattgaaccagacaaaacaacaagcgattaaaccaaagacagataaagcgcctaaactataagacaagtaagcttctccagaccatacaaatgcacggcgagcccatgcgaagggtttggttaagatatgccaaattccgccaaatacacaaatgatacccaaccatacatgtgccccaattatatcttctaaatcatccacactaacaatccaaccctctcccccaaaaggggattttagtaaataaccaaatataacaccggggctaagggtcaaattggtaattnttcttacattctcctccccaggagcccaggtatcatatataccgccaaaataaagagctttgagtactagaagaaaagcacctatacctaac

SEQ ID NO: 71687 - DNA, 454 bp, Oryza sativa
  unsure (1)..(454): unsure at all n locations
tcactcgtcccgggatccttatatcacctgcagcatgcaacttgttttgtatttatttacttctaatgcccatgaaatacgtatacctagtgggcacactttngngcgttgcagatcatagttacatctaaatgatgaaatccgatctagcactattattgctaaatgatagactaatggcctgattttctattttgaagtcgcgctttcatactcggtgcaaattttggaggaaggcatcatcccagtcaactcaacagatgttcctattgatgctctggtctcatcctctggcatcattccaatcagtcctgcagcattggcgaggatataattgagctgattggttctgcttgcgttgacagcaacctctcttccttgacaacaccttttagattatgtttaccaagctgaaaattttcgatcagtgatttgtaccaatgatctgattctg

SEQ ID NO: 71688 - DNA, 328 bp, Oryza sativa
  unsure (1)..(328): unsure at all n locations
agcttgtgcatggcgtcatgggatgtatgctcgccgccacatgatcatgcagaagaaagaaagaccaacaaatcaaactggttagaaggatgaaagcgtatatataaatatctgtatatgcatatgtgaagaggattaatcgcgttgatcggcgctngttccatgaccatatattcatgttgcatcacgcatatatatataagcccctccttgttggttgttctgctgtctgcacgtgttccctccatgtgactggccgatccggctagtccgcgcgtagagcggcacaacatgaatacgtgatagggatttttttntgggggggggg

SEQ ID NO: 71689 - DNA, 303 bp, Oryza sativa
  unsure (1)..(303): unsure at all n locations
agcttccttcgtcattcaacattttatgtntcttctgtgtgtaccattcagatatccagatgaagaagctggggaactaccaatggctttcatagtaaggcaaccaggttcaaatattaccaaagaacaagtcatggattatgtcgcaaaacaggtatggtctctctttttagtgatctgaatgttgcattctacgtacctgataaatatgcatatcttttaacgtgcctgtcataatcatctttgtattgttttattgtgctctttgagagcaattctctttctagtattttagtatcatta

SEQ ID NO: 71690 - DNA, 230 bp, Oryza sativa
gagccgaacccacgccgtcgagctcgtactccaccgacccctccatgccaaagtcctaagcggagggaggcgctcgagatggtcgaaagatccgcgacttcaccgatcgcgggcgatggagaagaaccgcgagattgggagcgtctgtctctcgtctacggcgactgcagcacagccccaggcgcgctccaagctgctggcgtgctcttacgtcatccgcctgtcgtccc

SEQ ID NO: 71691 - DNA, 416 bp, Oryza sativa
  unsure (1)..(416): unsure at all n locations
tagcttctgtttataactnttatgaactcaccatcttcggtagacctttgtagttgagcccagagccggagccaatatgttgccctgaaatctacctggatatatgttataaatggtgatttgtcaaaaaccacattattcatgcacaagcacagagcccaacatatagcagaagctccttcaagaataagcttgcactctttcttgtccactcgcaaaagccgaccatcaaaaatatgtcatatgctactaaggagatattaaccaaaagagaactgaagagaagctctccatatgatatttgcattgtgaccatctataaaaagatgttgaatagtctcatctttatacaaagcaacatctttaataccattccaattcgtcttgtagattatcttgggtaccacactccttga

SEQ ID NO: 71692 - DNA, 153 bp, Oryza sativa
gaaaaaagaaaggagaaacgcacaacaacaaacaacgcagcaaacaacgagagaaggcagaccaaagaccccatggccaaccagcgggaaaaacagagccaccatgggcggggcgccggcgcaacccccacagagggtggagagccaacccga

SEQ ID NO: 71693 - DNA, 428 bp, Oryza sativa
  unsure (1)..(428): unsure at all n locations
atggtccgtgcggcggcatgattaccacaaataccagaatgtatatccttcaacaattgtctcccttcttccaaaaacacgcagcgctgcagtattcctgatggacttttcttgtacaactcagcctcatgaataatgtaaagtctgctgcgtctggaaatccgctcggcttcatttttgtcttgagggagttcctgtttggtcaaaaactctatgagaggttctctccagtcggtttcgatcatgcttacaccttgagtatccatggcttcaattgtttcttttctgggtacggctggttcgtaaagatgttctacgaacacatcaaatggagctgcttcccgttttgaaccataattggccagtctgtcngcttgctcattgtatgtcagagacatgggtgagctcgagtctatcaattgttttca

SEQ ID NO: 71694 - DNA, 329 bp, Oryza sativa
agcttgtgctctggcatgccgaagaacggaaagtcgatactatgctgatgcacccagcagattcagtgcagtggaggacaatcaatatgatttaccaggaattctcaaatgacccaagaaacatgcgtttcgcaatgtgtacggacggcattaatccttttggtgaattgagcagtcgtcacagtacatggccagttctgcttgttaactataaccttcctccctggttgtgtttcaaaagaaagtacattatgcttgccatgctcattcaaggaccgagacaacctggcaacgatatcgatgtgttccttgaaccgataatcgatgac

SEQ ID NO: 71695 - DNA, 325 bp, Oryza sativa
  unsure (1)..(325): unsure at all n locations
agcttgcatgttcctttgaatgtttntgtgacggctcactttgacctgtgaatgttgtgtacctcaatgaatacaaacctgaatgtttgagcatgaattttctaatcttagccaagtaaagtacacgttatttgtgtgcttcatcccagaaatccacaaattactcaactatcttgttaatatcaggccactgtcaaagaccgtgaggttcaatgtgctgaaagtcattccggcagggtcaaagagtggtgcagggaagaaagttttcacagccgcttaagatgtatatgaggagatattcannggtctgaaagctntgatcatg

SEQ ID NO: 71696 - DNA, 439 bp, Oryza sativa
  unsure (1)..(439): unsure at all n locations
agcttancttacctttcctaaagatacatattcaccatgttgaagcttgactatgtccttcttacggtcaataatttcaaggcaaccatctggatgcaaacgtccaatgtcaccagaatagaaccaccgcatgcctctttcatcatccttcaataaattggtgttgttaaagaaaagttatcatgggcttcacagcacagattgctttggcatattatcgtaacataccttgtagacttcatttgtttttgcctcattcttaaagtagccttttgtcacgtntggacctccaataactatttcaccccgaggcattggtgaatcattagttaaatatccaccttcagcccaatctatcaactatcatatacaattcatattacgttatgaaagaataagatctgagggataagatattaatcttctgaatctcaacatg

SEQ ID NO: 71697 - DNA, 202 bp, Oryza sativa
  unsure (1)..(202): unsure at all n locations
ccacgaaaacatggagccatgtaggcatcttcatcactttgctgacacaccaagcgaaggcctgtttatgacagttgaaaatgaacactagctagaagcaaaaagcgagcattagagcatctccaacagagttgtcatctcactctccaatttaaattttggtaattntgagcaaaanacgggctccaacagacttactaaa

SEQ ID NO: 71698 - DNA, 458 bp, Oryza sativa
  unsure (1)..(458): unsure at all n locations
agcttcactccatataccagtgttcagagactatatttttttaatgtattaatcacaaatgtgtgtacagtaagggactatggatgtatgtgggtcagccacgaacccacttatagatcaaaataaacgggtttgcggcttatcttatcctataagtgggtttcgcatgttagccacttacacccctagcgtacaggatatatgtacatgtatgatgatatgtgcatcttttgtgttaatagatacctgtatattactattaccgcgggattatatttattgagaaacatcaattgacctaattgttgatatttcatcgacactttgatcgaatatggatactccctccggntccatcttaattgacgttttggataatgacacggtctacacaatatatctctaaccttactcttctattgaatatatacaaaaataaatgcatgcttcttttatat

SEQ ID NO: 71699 - DNA, 359 bp, Oryza sativa
agctttatgtttgctgccgccacctatgtgtggggccaccgcgcctcgcatctaacaaagctaaagtaagccaaagctcaccggccacgccactccccaattagcgtcggcacaaagctcatgtcgtggccgaatctgataaccactagctctagcacccctagagttgtggccaccgatccgacaaagagcgatattggatggccatgggaacttgcgaggaatgactccccatggcgtatgaatccaccatggcaagtgccttcctcctcataactaagctcgtccacactttgtgcctaactgcgttggtgccgatggtgcctactctgacaatgccggataagggacatgcaaaa

SEQ ID NO: 71700 - DNA, 271 bp, Oryza sativa
  unsure (1)..(271): unsure at all n locations
agctngacatctggtgccatgatgtccccacgcgtctatgcttttgctttgatatgtcatcaactaactatgctataaacttgcaatattttgcttttgcctttatctcttataatattcggtgcaacgaacgggcctttagctagtgcgcaaataataaagcgtgtctgggttgttggcgtctccatttgcatctctatttaagtactctttatctgtgtcttctgtctaatcctcttacttgagtttcttctgtgctgtgacttgtatg

SEQ ID NO: 71701 - DNA, 301 bp, Oryza sativa
agcttgtcgtctaagcggaatgtgatggatgaagcccaagaggtgtacttggtctgaagatcccacccgccgttgggcttgccgacgccgtatctggcgccggacgccgtctagaacgccgccgccgccaccacaacgacggcgagcaatgccattctttccaagctcactatttgcagcttattaaatggatgtcgaatatattcgaactactcaattaatggcactgatcgatcaatgatcaatctaatcgagagctgatgggaattggttagacgtgtgatgattcatatgtgtctcg

SEQ ID NO: 71702 - DNA, 412 bp, Oryza sativa
  unsure (1)..(412): unsure at all n locations
agcttggcatactattgatgttctctcaattttcccaacaccagacagagatggtgctgatgggcttcctctgattgtgagtatatcacaatgtcatcgatgataaccaccacaaacttgtccaagtattccatgaacactgtgttcattaagttcatgaagaaggcaggagcattggtcaagccgaacgacatcaccgtgaattcatacagtccatatcgcgtattgaatgcngtcttcggaatatcttcttcccgaatacgtaanttggtgatatccggaacgaagatcaatcttggagaatacatgtgcacctttaatctgatcgaacagatcatcgatccggggaaaagagacttgtttttatgggacttcttgaagctctgtataaccacatctcttggttgttttt

SEQ ID NO: 71703 - DNA, 62 bp, Oryza sativa
  unsure (1)..(62): unsure at all n locations
tcctgatctcaaacaacgaggtgaacattttttttcncttttaagaggccccgccctacatg

SEQ ID NO: 71704 - DNA, 389 bp, Oryza sativa
agctcttaaccaagctcttacaagatcttaccaatgcaagcggaatggtgacatacaccgactcaaccaagcaccccaatggaggttggatgtatcgatgccttggcaaacacttgctgtacggctgcaatcaaatctgtggagctctatgtaggcttaaatatgtagcaaaggaatagcaaatgctcaaatcaaataatgcaaagttgaataattgttcaaagtcaagtaccgtgctggtcctatgctagaacgtactatagacgtgagcctacacacaaatgataccacaagatagcactaggagcaactcatgcacaactctgatatatgaagttcagctcaatgataacaaaatgaatttctccctttcatctttttgtctctct

SEQ ID NO: 71705 - DNA, 403 bp, Oryza sativa
  unsure (1)..(403): unsure at all n locations
agcttatattgaggagagatgtaataaaaagttaagggtgttggctctcatgcaagagctagcttaacacaagctccaatacaaatacaattaatgtataagtgagagatagagagaggagaagaaaattgtagccaaccttgtagctaatctattatatgtgttagctntaagatgggctaatagtaggaagtgagctctattattatctttgctctattaagattggctaatagtaggaagtgagcatccttgctctactaagaaagtttcatcaattgctaataccagccttaagttcttgaatgtcgtcacacattgcccgaaaatccatgaagcatatccaaatacacacctcgagactccatctatcaatcttaactgcaatagttcatattttatt

SEQ ID NO: 71706 - DNA, 457 bp, Oryza sativa
  unsure (1)..(457): unsure at all n locations
agcttccatatactcttatcctctcaatataaccattattaattagagctagatacattaacctaatcgagaacatgacattctgatgataattccatctaaagcaatcagaagaaagattcaactggatatgtacaatagaagcacataattcatgccaataaacacgattctgaccaactaagggcttctaaaagaaatattaagcggaacaaatcccatgatattagcaatagaagataatttgattcggacaatagtatataaagatggatatttatctttgaaggccaagtttcctaaccatttatcttcccaaaacctttntgttccccattatggcagtaataaagaaatattctaaaggattgggttcacaccacgcgcatatcgccaagacaaattaaatatgcttaagttcctatcagacacatgggcctttcacactcgaaaatat

SEQ ID NO: 71707 - DNA, 443 bp, Oryza sativa
  unsure (1)..(443): unsure at all n locations
gcttctccatgcgtttctcatttatatgacccaagcgacaatgcccaataaaagtgagattcaaatcattaggacgtcgcctttttgcattaatgttatagactgaacatccatcaaggttcacaatgtataagccattcatcatgggtggatggaaatagaaaatgtcattataatagactgagcaaccattgtccacagatctaaaaccataaccctctgctngcaaacaagaagtagagataacgttcttacacaaagctggaatgcaataacaattatctaactccaaaactaatcctgaaggtaaatataatggcatagtgtcgaccgcaacagtaacaactcttgctccatttgccacgcgaatgtgcaattcgcctcttgctaagctcctacttcttttcatcccccctgcatcgatttcatatctgatcaactga

SEQ ID NO: 71708 - DNA, 145 bp, Oryza sativa
aggggcaaacaacgaaagaaatggcaacaacctagcaacagcctcacggacacacggcacacacaaaaagcacaaaaacaagaatagcacactgcatgagacacagggaaacgaagcaaggagacaccaccgacaaaaaaaaacg

SEQ ID NO: 71709 - DNA, 410 bp, Oryza sativa
  unsure (1)..(410): unsure at all n locations
atgtcttgccggtgctcctcacctttccggttaacactcgatggtaccttgctggatctcaatgaactgaaaatactggccgagctaccaagcttgcgcagcctcattctcctgcaacagtcttgcgtcagaagtagcctcaacttcaacaatggtgagttcagcaagctcaacctccttgttgttaattgctcgaacatcaccagcatcagcttcacagacgaatgagcagcacctaagctcgagaagatcacctggtccttcactaccaagatgttgtccctctctggcatctgctaccttccgcaactgaaggagctcgagctcaacggtaaaattatccctgatcaggtgatacaagacattaatgaacatataaacaaacctatntttaatcaccagtaagatcg

SEQ ID NO: 71710 - DNA, 277 bp, Oryza sativa
  unsure (1)..(277): unsure at all n locations
aaacagcgttcatcactcccgtcggagtattttgncacgtccaaatgcccttccgattgataacagctggcaacacttttcaacgcacgggccatggcggactttgcaattatcttggcaacaatgtcgaggcctacgtctgcagcatcgttgtcgaaaccaagacaagcgactcattgattgatgacctccgggaaacggtcgacaaccttcgacgatatagtctcatgctcaatccagagaagtgtgcgttcggagtaccgtctggcaagctact

SEQ ID NO: 71711 - DNA, 466 bp, Oryza sativa
  unsure (1)..(466): unsure at all n locations
agcttgcagatatgaagcggtgttacaacatgtttagaatgacccctgatatgttctatagtcttcatgatctgttggtcgacaaatatgaactcaagtctagcacaaaatctacaagtattgaggtgttaggaatgttcctttggatgtgtggggctccacagttggttaggcaagctgaggacagatttgagtgctctctatgaacagtgcacaacatgtttcacaaagttttggcaagccttttgaagctagctgctgacataattaaaccacgcgacccacagttcacaactttgcatggaagactaaggaaccctatgttctatccttatntcaacgactgcatcgaggcaatagatggaacccacattcctgttcatggttcgaaagatctgttggttcaacacatgtgccgacaccacattacaactcacaatgtgatggcagtgtgtgactctgacat

SEQ ID NO: 71712 - DNA, 332 bp, Oryza sativa
  unsure (1)..(332): unsure at all n locations
agcttcttatgataatttgcctcgtttgttagccaccattgcccagaggaataataatacttactatgacctacatacatttacatcggttgatgatcgaacaaagagtgtgctgcaaagagcctttttctcattgggtgcttgcatcaatgcttttatgcattgtcgacctgttctatgcatagatggaacttttatgacaggtaaataccgaggtcagatattgacagcaattgggtgtgatgggaacaaccaggttctacctatggctnttgcatttgtagagagtgagaacacttgaagcctggactggttcctagagagagtgcaca

SEQ ID NO: 71713 - DNA, 288 bp, Oryza sativa
  unsure (1)..(288): unsure at all n locations
agctttccacaagcgacataatagttccgacttcgctgcgaagatgccctaacgccaaaacaaacaaacaagtttgacaacccacaaaggacattggcccaagctaccaaagagccacttcctgcacacagctagccaaaaatcgttgccaagcttcattacaccccaacaacaaagcagctccaactctacccaacaacaaccaaagaataatgatggtcactcaccgcanagcaagaaacaccctatgcctatagagcttctgcaccattgcaggagtccaccaat

SEQ ID NO: 71714 - DNA, 387 bp, Oryza sativa
  unsure (1)..(387): unsure at all n locations
atcttcacgtatcttcgagaatacccgcgatcgacgaatatccgataaccgcaactatacgcaaacaattgaaaacctaaacaaaagaccaaaagaaagatcctatttagactaattattagtgccattaaatagatctcgattttacggaattactggaagttgaacggagtcaaacggaagagcggttgggaagaatatgaatttggaagtttaatttggatnttctgggcaaggaaatgatttatcggaattttctggaatacgagaaatggtttatggggtttgtagaaataatattcccaagaatattattaacagtcactgtcatgcgggaccaaatgaaatgggttatgggaatttggaataatgaattgattatgggac

SEQ ID NO: 71715 - DNA, 416 bp, Oryza sativa
  unsure (1)..(416): unsure at all n locations
atctcttatgctaccaagcangaatattcgcacaaaaagatgtcaggatatcactccaacttcacttgcaagttggcgctagtggtcctatgaatcgtccgaacgtatggatacacccttatggttctaagcttttgaagggcattattgtaacttcatgtgtacctcctaaggctatataagctgacccaatcctagcgaactaaaatacatttttactggtacaatgacgacaagtgttttattgacacatcttgatttcacttcaccttaaggctagacgggaagagaagtactttcctgcctatccccaatttcttcatgaccaatatgcatgcctagtttacataaggttaagccccaactaatattatntagctatgtaatgggatagacatgctatgtgagatctgatc

SEQ ID NO: 71716 - DNA, 451 bp, Oryza sativa
  unsure (1)..(451): unsure at all n locations
agcttatctggaccttgaagattcaacatggatgacatatcagacatattttcctcttcctctaaatctgcatcaatcactatatgaggaatgtcatccacagtcgcctctgagtcagaacttgaatattcagaaccactcattggagctacgccctttgaagcgttattactcatagagagagagagagagagagagacgatagtngtatttaggggatagccttaaacaacttgtcaaatatataatactaacacaaaagggtccaaaatagatgttgtcgtgtgtgaatacgtcctgggtgccctgaacatatacagctcatgctgtcaactggaattggtggcatactcgtgtaatgacaaaattaagtggatcgctntaactgatacatatcttncttcatacaaggatgtcacatttaatgcgatatatatttcttcaatatatg

SEQ ID NO: 71717 - DNA, 372 bp, Oryza sativa
gcttcttcaacatagcctatgctactgctgtttgatgggcaacttcgtcatcatagtcgatcatctctgttgctgcttatcatcattattgtcggttgcgtttgtcgtcaccgactattttcttcatcttcatgattggtggatttcgtcatcgtctttgatctgcctcgtctgtcaccgactgattatttcgctgccatggctacacaactttatctctgggcgccttcatcttcattattggctgacctgattgttgccgactggtttcttcatctccacagctgtgcaacttcatcactcttgattggtatcactatcttcactaccaccaactattttgccacctctggtgggcaatattatctctat

SEQ ID NO: 71718 - DNA, 286 bp, Oryza sativa
tcttagcatctcatgccaactcggagaggtgatccatattctaacgtctgcatagcacctatgttgcattctgacagtcgcattgcacgattgcatctgctacacggatatcggtcgaactcgatcgcacccgatgatggcgctcactgacggatgccatccacacgttgccgacggtcggcatagccatgaacccatcccatgaagcctggtgaagcgttgagctcccatgtggtattgtgtctaacaacgcattctgagaccaccttcacgacaccgtgatgcc

SEQ ID NO: 71719 - DNA, 410 bp, Oryza sativa
  unsure (1)..(410): unsure at all n locations
ttggggaaagccggaaagacaaaaggagatgagatgaagctgaaactgaacccattaaaggtgtgttggctgctccttgttgggaacactctttataggtatagaaaacagagtagttcattaacacatgattaattaagtattagctatttatttttttcaaaaatggatcaatatgattttttaaacaactgtcgtatagaaactttttgaaaaaaaagcaccgcttatttgtttaaatagcgtgcacgcggaaaacgagggagatgagttggaaaaactgtgataagaacgcagcctataaggccggtatactcgatcgatgctgcacttggcctgtctgcttnctttccgtgccagccatggacggatgaccggaactaactatatcttaaggctagcccatcacc

SEQ ID NO: 71720 - DNA, 137 bp, Oryza sativa
  unsure (1)..(137): unsure at all n locations
tatctgcttgtttgtctttatttttttttatttattttgattgaaataagcatttcagctgatcacagtgtaatgatcgagtagtgcattctaatttggtatagagttttttattaacataatgaanatggattagt

SEQ ID NO: 71721 - DNA, 370 bp, Oryza sativa
  unsure (1)..(370): unsure at all n locations
agctntatgatttttatattaaaatgttgcagngagtactgcaacagtacagaaggttcttcaatggtacaatttacctcaacatggaacaaaaaattcatcaactggtttaaagagaaggtaatatttatataattacatatatggaataaactgtttcaaatatgtatatttgttgatgttattctttttaatctttttgccctgtagatatatcagcagcaccagcatgataagagtgaggtcatggaagaccttttgtattgtcgcgtggtccgcttgaaaatataacatgctttactggatatgacatgaatgggttcagatatcgcacagaaagaccggacaaccgcaggtgtacacaaaacag

SEQ ID NO: 71722 - DNA, 404 bp, Oryza sativa
  unsure (1)..(404): unsure at all n locations
agcttctaataatcttgaccaagattatagannaatagagtaactcttataacnaccgaattgttccgttaaacctaatagtgaatatatttcaatagtatggttgtttgggcgtaaaaatggtgctacgattttatataaacttagtcaaacataaagatgttcgacttagaaaaatgtcatagtgtctcataatataaaatggagggagtattgtgtaaactgtaaccatcgtttgtctatgcaaaagaaaactgatggtgttatttgtacattataggatagaaaaggtttgtataatgtatgtgaagtgttacgcttaccaaggtaaatatacggtacaaaatccaacttgggtgaaaactcgtgtatgaaagtgaatctagccctaagttctgcatgaa

SEQ ID NO: 71723 - DNA, 325 bp, Oryza sativa
ccttcttctattgcgagatagatggtacattactttgccttagttgtgatatgactggtcatgttggtgggaaaccaaccccttgaaaatacctgctcctaaggcaacgggttgaagtatggtaatggttagaaaccaacttcgtattgggatcctacgccttattttctagtgcttgaagcttgaaattttgattagtctccacgagataaaccatgtcatatggatgatggtggtatgcaacagaaagatcctgaataccggactgatcaaaagaaagcccctcactcagtaacaaaggagccaatgggcaaccatccttatg

SEQ ID NO: 71724 - DNA, 302 bp, Oryza sativa
caagcttggatttcttatcacagatgaagaagtcctggccaccaataaacagatgtcatgtgacaaagctccaatggcttcaccggtgctttctacaaacactactgggaagatattaagcacgacctcctagcagccatccgcgctaatggaaacccaacaaataacaccctaaggatcctaaacactgaaaatgtggtactacttgccaaaaaagaaggcatcgactcgcttgccgactacagccccataaagttgatccacggcatcccgaaaataatctcaaaggttctatccatacg

SEQ ID NO: 71725 - DNA, 307 bp, Oryza sativa
ccttcttaaatgcagctaattagaatattaatccctgagtttgaataatgggttaataatatagaacaaacacgtaaagttaatttttcaccgttgttgaaatgcgatcataactgggatactaagctcgcgatattgaaaaagactatattataatatagtattgtagtcgaatgaattctgcgatgaatgactgactgatgatctcttttatctttattaacctacgacaaaaaatgaaaaaaaaagatcgaagcttaagcctaccgcatacccaatgtgtgccacatacgctgtgcctgtgtgc

SEQ ID NO: 71726 - DNA, 311 bp, Oryza sativa
acaagaatacaacatgggcatccggcgtcattgaggcctttgaacacaagcatatcatgagtggtgtccccatcatctgttcttttgtgtaaattatcccctgctctggaccccaaacatccgatttattttattaaggggggaaatatgacggttgtgatgccactaaatcactaatgactggcatgaggtgccatctggcctcttggctttgacttctgcatgaggctaggttgcaccatcttaatgagcccatgcaatccaagcaagcaatatgcaatccaatgcaaacggagaacatgcttataaat

SEQ ID NO: 71727 - DNA, 366 bp, Oryza sativa
ctatgccatgtcgagtttcacttgtgattagctgggaccgataaaagtctgcgacttcatcaaaagcacacaagaaagcaacttgatagctacaacaacagagagaaaagctacctaatcaaaagcacatttgtataatatatatctaagaaaagtttaaataggggggaaacagtgtgtgcaaggatatattcatacttgagaaacatggcaaggctgtgtccacacgcaaaatttagatacattccatgttcatgttcacaaaataatctggattttataaatacctagaaatccaaatcaattgttaagtatgaactcgtataatatgaatctagtatgaatttgtagagataaatcgtacct

SEQ ID NO: 71728 - DNA, 388 bp, Oryza sativa
  unsure (1)..(388): unsure at all n locations
agcttgctgtatttgttgactatcaacgtctagtcatgtaaaatgatgtatgtgatcatatatatgttcttgatgcatgagtactagtatatatatccttgtaaatattaattttctcaaccatgtgattttccccttttttttttttaaggttgcatgtatgcccaatgggataaatatcatatgtattntaatacatatgatgttgaaaaacagtatgtgaaatattatggtgaattatcaaagaaacttaaggtatatatgcttgttgcatcatatttatatcaagttaatcaagtgttaaaattttgtaacgcttttaaagcattgactactgactaatagctttcttgtattatgaaacagtggatggaagaatatgtgttac

SEQ ID NO: 71729 - DNA, 323 bp, Oryza sativa
  unsure (1)..(323): unsure at all n locations
attacctatcaataacctttaaatcagatactaatcgatagatggctgaactccagcttcttattacatcatcaacagctaaattatagtctaatatactcacagatcaaactaactgatgcaccantaagccataagaagaaacataatatctaaacgagtctatgaaagctttttcaagatggtggatatactatataatttaattcaatatcagtatccaatcctatcggttgttttcgttgatagaagccggccgatgtggttagatagcaagatcgatctagattatatagcatatatgataactcgacgaattacat

SEQ ID NO: 71730 - DNA, 305 bp, Oryza sativa
  unsure (1)..(305): unsure at all n locations
cacaacagctggcacagcaagatgccgcaattgctagattggaacagaaccgactagtccttgccatgaggctagctgaacatcangggaagaagatagagcatgatgagcctggcgnttgaggcgaagttggcgacaagagtcgattcatctcaccggaagatgctcgtgcaactcataaccaaccacgggaggatgtaatggacagtgggagcaacggttcaagtattatggggaatgtgtcatcttgtagtctatctctggccaagaactcatttcgagtggacaaaatcggtagtgctctg

SEQ ID NO: 71731 - DNA, 318 bp, Oryza sativa
  unsure (1)..(318): unsure at all n locations
agcnnngtttttttcgttnacgatacaccatacacacttttttctttccctgaaactatagcatctgtcatgttgcctcatganaacaatctgggacacaatatgtcattgcttttttcgtgtcggcaggctgatgagattgcagccaatgaaagagttggcatcgaggccgaccacctgaggcttgcttgctacgagaatgtgtctgagcttctgaagacatggctcagcgtgaaagaaaaaagcacacggcggcgtcggttgtgcaagttcttagagacagactgtgcaccatcataatgaaagtactaatcaagt

SEQ ID NO: 71732 - DNA, 294 bp, Oryza sativa
agcccgctattatatgtctcggctttcttctccactcagataggttgcctcatccctcactcccactttggaggcccctcataaacccccatgccaaccaccttggcttcttcacttacacccaacggctttcacacaccaaaaatggaggttacttgtactaatcgaacttcatcaccactaaacaactactttccggtgaccaatgatggatatatatgtgatggcattgaaatctctaaaacattctatacctcccacattagggaagacattagttttgatgacatataa

SEQ ID NO: 71733 - DNA, 360 bp, Oryza sativa
tggggcacttgtctttttaatgacccattccttgacaattgaagcaacagatatcttcccggacttggcattttcttttctattatcaggctggttattaacctcgaggttcgaacatagttcctctgaaatgagaccctaggtctcctttgacagtaaacaattatacacataattccatatcagcatcttccaaaataaccctcctagaacttgcttttattacacaggtctcccttattacatgaatacaaggccctgccttaaacaaaaagggaaggtgcttaacatccgtacattgtatcctcaacaggaatcatccataaatatagcaagctcactgtttatagtcatgactat

SEQ ID NO: 71734 - DNA, 270 bp, Oryza sativa
  unsure (1)..(270): unsure at all n locations
agctcgaagtattgtaagancatattcattttcatcttggcctcaagcaatgcgaagttgtgacctatgcaaatacgtggcccccaaccgaatgggatgaacgcgcccggattcttggatgccttggagaacctctcaacgaacctatctggcttaaactcgtgggcatcactcccccagatgtttgggtcatggtgtatgagtaacacccggagctcgactatcacaccagcccggtaagtgacaccttcgatcttcatttgcttgtat

SEQ ID NO: 71735 - DNA, 284 bp, Oryza sativa
  unsure (1)..(284): unsure at all n locations
cactcaannnaaaggggcactcttagagacagccacataagaacagattcccgcaaaacacaaaaagctatgcatgaactaattaatgcttcaaaatttgaaacgatcgaacgaacggacaatgtactccctccgtacttacaaaggaagtcggtttggatagcgatacggtctccaaaacataactttgactgttctctataaaaatatttattaaaaagtgatgtatgtatacgtttataaaattattgttcacgacacatctactcatataattgttatat

SEQ ID NO: 71736 - DNA, 320 bp, Oryza sativa
  unsure (1)..(320): unsure at all n locations
ttttcatgcaaaagaaaatcacaaatcgggtattgcaagaaatcaagaattgattcgattataagcaaaagctcaatcctttcagttcttctcaatattggccaaattctttatgcagacaagatcagaatatatacatacgaacagcaaanattcttgatgccaacaagttcgaaattgaaaagagtaattcacgactaatacaaaaaattaagaagggggaaagggcctgatgctgcaatattgaggatgacgatcaagactgccaacttgcctactgcaaccacgccagtgtcaagatagcacgttggcaacagagt

SEQ ID NO: 71737 - DNA, 298 bp, Oryza sativa
ccacataagaggctgcacatttgtaccacatgtgaaaagaatgttcgcaaaaatcatttgtgtagttgtgatgaaaataattattcatacaattaaaaagttagaaatccctatgtgaaaataatggcacttgtgcctatattattgtttgccaacaatagttagaacttgatagttctttctggtatgtagtaaaattagctagatattttacaacttattattgtatcccgttgcttaaatgcaccagctaactactttctatatgctacatttttaatgggtacctttgtgcatg

SEQ ID NO: 71738 - DNA, 351 bp, Oryza sativa
accacccccacacgaggcgtgcctgcagccttcctgatgagaactcgagctccaccacagcgcccttcccaagtggcattaagctctaccactggacgtcatctctagtgcaatcaccgagctcgctgaatgtcagatgtcgcctccagccctctccaaagatttcaaaagtttcgctggttgccgcctctagcaaccttgcggcatctcgtctgccacattccgactcgaggttagcccctgataaagatatgaacatggatcgagatatatagagaggagagggaaatgagataaatagcggggagagaatataatatgtatggcccaccgaattcttttataaaaaaa

SEQ ID NO: 71739 - DNA, 379 bp, Oryza sativa
  unsure (1)..(379): unsure at all n locations
actttatacctaagagtatgacttatacgctccaccccgagggtagtctacagacggtctattaccaaataagactttgagtgaaacttgcttgcacaagacttgcaattcaaggcgtaatccattgttcaagttgtgaataagtgtagcttggagttctangtggatgttcaaccttaattggtctccatcgaaccgctggtatataaacagtacattggaaaaggcaaatctcagtgggattttgagatttggtgggggattgttggaattaatgaatgggccttagcccactcgaagattaattctttggaaaatcacaaaagcccacctcatgggatggcatgcatgtggagnttantaccaccttgcttattct

SEQ ID NO: 71740 - DNA, 381 bp, Oryza sativa
  unsure (1)..(381): unsure at all n locations
gctcgtacccgggatccttaagtcacctgcagctgcagcnncatttttttatacatttgtcaacacatttcccaaaattgacagatgtaatataggataatcgtagtgtaatatccagacctggatgtataccagggacctatggctaacttcacatattttggactgatagattggttcaagattgtgcaaggtggagaaaaaggcacacacacacatgtgaggatcattccatgacctcgttcaccgaatacatgttacaagagatttttaagtacatacagctaggaaatacatacgattgtctatatttattgttaatttagagaaattgcgacaatgatcgaaagtcaatggcgacgatcgccttacgacacccct

SEQ ID NO: 71741 - DNA, 318 bp, Oryza sativa
acattcgtattttaatcctttttttaataatctagaactatatatctatgatggctatggacttaatgacgatggtatgcatgtatactatgagtggccaggcaagtacatttaaatgatgtgatgtgcgttgcaaattgtaataacataagtttatgtgttagacataatggaattaaagggaacatacaacaacataacaccatgtatgcatgcatgcatgcaccctctattttctttttaataatcagattcgggctcctatgatagttagactgatgagataatcattgtcccaaaaaaaagcaaattaatgtt

SEQ ID NO: 71742 - DNA, 403 bp, Oryza sativa
  unsure (1)..(403): unsure at all n locations
agcnnagtaatagtttacttctagaattctaatcnttaaacaataatacaattgccctgttactatacgataatcgagacaagatgtgtaacgaaactagatccatcatgactattttataacattgttactgtggaaagtagtcgtgttactacatattgactgtcgcgttactacgcatttccagcgagacgagaactaaaaataaataaatctcaacctttagagaacaatatctctcatgttatatattatttttctaatccgtctgcaccataatgttcgtaaaaaagtgcataacaaaactagatccatcatgactatgttttgatgtcgttattgcgagaaaaatatcctgttactgcacgataacagttctgttactacataattcctgcgagac

SEQ ID NO: 71743 - DNA, 343 bp, Oryza sativa
tccacagataacttacacgctcgctggtcctcgatcgagagataattctacacgctcgctgggtctcgaactactacgttgcaatctctcgcaccgcaacttccattggtgtttgaaagatgattctacatgtttgctggtcctcgaaccagtacgttgcaatttttcggaccacaacctcatatggtcgaggtacgactacaacaattacgcagtggtcctcgcaccacgacttcaaatgatcgagagacacctattcactgggtcttaaccagtcaattgtagcgatctctcgtacatttacttatagtggttgagtcacgactactagctgtttttctac

SEQ ID NO: 71744 - DNA, 279 bp, Oryza sativa
  unsure (1)..(279): unsure at all n locations
gggcctgggccctacgttcatctgcctaatcatatttaaatcaccatgcaactttttgaaaaagaaattcaatatctcattagtcgaattatgcatgaaccttaagttttgataatttctggcgccgtcactgatcggtccgagacaatgagttgtttggaacttaattaaaggggtgtctagttcaccgtcaaattcaaagtttgattgaaactggaacgatgcgatgaataagttggaaaattatgtgtgtagaaanaatttaattgtgatgaaaaa

SEQ ID NO: 71745 - DNA, 406 bp, Oryza sativa
  unsure (1)..(406): unsure at all n locations
agctngaggtcatctcgatatctcccccacctagattttcacttgcggtcagaaagaaagcagaaaagaaattctccattggcctnggccattgcaaggacagaggtgaagctcgtttgcatcgacgctggcggagctcgaggtgtagcatggtgccgaccggtggagctcgagctcaagacaaggaccaaagccatggggcacacaggtggtgctagcttggctgacggatgttattgcgccagcgccgataccaataggacttgaggtcgaacgccgcgtcggtgctacggaggctcgatgtcaagaatggaggttgtgagggatgatgctgagtgcagcggtggtgccggatagggtctttcaccggtgatgttcctgaacatggagaagtggngagggatat

SEQ ID NO: 71746 - DNA, 381 bp, Oryza sativa
  unsure (1)..(381): unsure at all n locations
agcttaccattctccacattattgcgcttttcctatagagaagccaaaatattaaatattgattaatcttaaaacctgacatgtctacttctgcacacaacgtaaaaatattgcaaacattttaatctcagatgaaccgaactgtcattttaatctcaaaagaatcaaattacattttaacctttccataatttgcaggcaatgagtgaagaatctttgcaaacatgtctttgagcttcccatttgatgtcattgcttctaatatctggtcattgaatatcactttctgtgaaaagtgaagaatctttacaaacatgtctttgggcttcccatgtgatgtcattgcttccaatatgtngacatcgaaaatcacttcttgtg

SEQ ID NO: 71747 - DNA, 406 bp, Oryza sativa
agctagctcttatcgggcttgatgcttcattactgcgcgacgtattaaattctacgtcagaaggacgtagctttccgcatcgccgttgcttccacatccaaccgcacaagttcaagggaagcgttcctgtcctcctcccattcgtctcatgcgcgatgttcaactgctttcggcccatttgcagaccaagcagagaccgaaaaacgtcgcgataaggaaggggaggggagggtaaggcgagaatggaccgagctcgcgccgtttggcgcgaggagcggacgagcttctctgcagcgcgctcgagcgtgttcgaatgaagagtgattgggcaaaagaggcgaccgctgggcgccggggtgcctgtgcgggacgagtttctctgcaattctatcatgtgcgtatgtct

SEQ ID NO: 71748 - DNA, 426 bp, Oryza sativa
agcttgtcattctggtagatgtcattgttggatgttactatgagcttgtagttaccacattttcaggtaagaacactgcagttatattaccgtattttcttggactaagcatatgtagttatacttagatctacatcagcttttactccatatgatcaaaaaaaattttcttgacatgaaattatctataacattaatatagactatcattttgtcaaaactttaattttcacaatacaatatatgtgtcaactgtcacgtatttttgcttcaattttttttagtgatcagacaagtgaaacggattatttatgttcacttgagtagtgcttgtcaccataataaatatgtagatgcagtggtaagttcacatacaggaaaaccaaaataaactaccaaaccctgcactgcagatatttggaaatg

SEQ ID NO: 71749 - DNA, 369 bp, Oryza sativa
  unsure (1)..(369): unsure at all n locations
agcttctttatatctatatntcnttatgtggcactaagcatatgttctgttcattgatttattttgttcattgatttaatttgtatgtacccgtgtcggctacctttgctgttgccgactaacatcttcaccgaccggccacctcgtctgctaccgattggtgccctcgcctgcacagctggcctattatgccgccgatgttgggtgtctacgacttcaccgccggctggccttcgccgncgccgactgctgtcctcgcctatacggttagttggttacaccacaattcacgggcgtccacgtcttcaccgaccggctggccttcgtcgccgccgactggtgttccgccttgatagctggactattatg

SEQ ID NO: 71750 - DNA, 352 bp, Oryza sativa
tttttttttttatccctacacttgaaacttgaaagggtaactaactcatgccaatgggtaacaaaagaaaaaccctttaaacaatgacgtgactgcctttggaaagatggcatccttactggtctgtagagccaaatattcatttttatgatgatgcactggtacttgaatactcattagatgacatgccatctcgaagagaacacaggtcagaatgggtgtctgctttcgttattacaatctcaatgctattccaaattacattatttcagttttgctccattattttgacattcataacatatatcagaaatcagcagaattaattgtgtagaaaatgtctaaataatat

SEQ ID NO: 71751 - DNA, 139 bp, Oryza sativa
tgttttctagcttggtgtttctacatgcaactttttctttgatttacgcttacagcataagctttaacatcccagccagaaaatggcgtattgtacatggctgcatttggcacaatgcttaccaaagacattttggtgt

SEQ ID NO: 71752 - DNA, 322 bp, Oryza sativa
ttctggagacaagtgaaaagaaggagtacagaacttatttcacatgataacacaagtttttggattaatttgaataaagtttaaaaattccatgtaaaaggtaagtgaataaaagtaaccaaacttgcaagataatttgaaatagttgaaaacaatgttacaaattttgtaccttttaacaacaggtttcaaaagaaagttattacatcaacatgctaaaattaatttattgcagcaagattaaaataaacaacattgtataacttttgctggataatgagcccttagtacaggtatggatgtacagtacttataacactgg

SEQ ID NO: 71753 - DNA, 97 bp, Oryza sativa
  unsure (1)..(97): unsure at all n locations
agcttcanaataaattttctcttanattactcatccggatacaccattatggttcgaataattaaaaatccttaccacaaagaactcacatgaatat

SEQ ID NO: 71754 - DNA, 348 bp, Oryza sativa
  unsure (1)..(348): unsure at all n locations
gccctgaccggaccttggctatatgagaagccaatacagcaaagacaatgaaattgatcgattattgggagccagtccaaatgtagctattgttgtatttgtttgttgaaagaacaaaatngtggaattaatggatgggccttagcccactctaaaattatttctttggaaaatcacaaaagcccacctcatgagatggcatgcatgtagagtttagtaccaccttgcttattctaagagagggggacctccttaaaaaggaggatgccctcctagccacttgaagcatgtgtggtggagagaagaaggggaatacgcgcgcgcttgcctcgtcttgcctcgcctgac

SEQ ID NO: 71755 - DNA, 408 bp, Oryza sativa
caagctggcttatgctaaatatagtgttggatatgattaaccatttcagaaatatctgagaagtcagcatgggcagtgatgggaacaaaggctgttttgctgagaagcaaggatataacagtagagcaaggcctggagcatgttgcaacatggaacgccgcaatgctgagatctaatgacctggaggaggctatccaagccttcctagagaagcggaagccagtcttctccaaactgtaatgatcatacaccatacttgacagaagaaagttatatttgaatcctagtacttcagaataagggaaaggctataaatctatgattgcagttggcaaatatgtgaagagcttacacttagtacagtggaccagaaatgcttccaatcaatgcatcaaagatctccaacat

SEQ ID NO: 71756 - DNA, 413 bp, Oryza sativa
  unsure (1)..(413): unsure at all n locations
agctnggtcagtttatcactgtcaaaacgcgtccatgtggttaggataggaacatgnattgaacaatcttcttaaatccattgcaacaattcttatntcggccagccagccaccacgattggggcaaagttaattctatgctaatacctacagacaaggaataattttcatactgtcagccaatgggtacccaacacattcctcaaatggagttgttttgtcttcttcaatgtaaaagtggggtaattatgtatttattcatgatatgctagtaatacaaaatggaatatagcacagttttaaaaagagacccagtagtggcttcagacaatactacaatatgtgatgtaatcaaagctttggtatctgaaacctgactcatcgattacagcttctgctaactgttcttggaa

SEQ ID NO: 71757 - DNA, 352 bp, Oryza sativa
gccctacccgaactcttccgaagacttccggactcctgatttatactctattcctatgagagagaatatgagagaactaaacttaacttgagagaatatgagagagctttgcttaacgtgtgtgagtgaagtgagaacgtgaggggtttatatagcctcccaatgacggttatgacggttggaatggtcggaaataccctccaaccgtcattgggagctaatccacaccatccagaagaagccctgccttcaacggcgacgagggaggtttggctgaaccttgggccgggccaaccagaccaatggttggctggcggactccttctgtggtcttctccgcagacttgtgatt

SEQ ID NO: 71758 - DNA, 135 bp, Oryza sativa
agctctcaatacataggctatccgaaagccgacacaggtgaaccatatgccgacgagaggggccccaaaccaacacagggtaaggcccaataccaactgggccagaaaccccgggggtccccccgacacccccca

SEQ ID NO: 71759 - DNA, 406 bp, Oryza sativa
  unsure (1)..(406): unsure at all n locations
agctagttgtttctagttgcaatttctactatgagttccgctcaaagcataagttataaaacccaaccaagagattgtattatggtcagttgctgaattgttcagattgcgtacagcgtacantttggtgtaaaaaggtgctctgctacactgccttttgctaagttgctggagcatccaacagtatagattcacttaactgctctttgttgtgctcattccaacaaaatcatgaaaccatgggttatcgcaagtgcagcaaggcatcgtgtagtggagaaaaggaattcagtgtgatttggttctcacattgctatctatttgctagagttagtggaataactttaattgatgagcatgataccgaagaggatttattaatgctatatttttcagtctcaaattg

SEQ ID NO: 71760 - DNA, 301 bp, Oryza sativa
tgggtctaaggctctatgctactaacagaacgcatgaaatctgtaactgagtgtcaattttcaaaacctcaaacttaaacaatcaactggatgaaatatttaacatgcatcttgactagagtgccaactgtaccaaacttcacttagctgcatgccattgagcagcaaattattttgattgctttcccatcaccactttgagctcacaaaccggactaaaaagccgcacagcatccagttaaccactaacactgtacagacatgttcaccgcacgagcaacactcgatttaattcattatt

SEQ ID NO: 71761 - DNA, 392 bp, Oryza sativa
  unsure (1)..(392): unsure at all n locations
agcttgaatattatatagaagcattttctcataaagagtgcccatcaccaaaaaaaattatcagcttgacctttntgtaaactctagcataagtttcccagcgtttcaactggaagcaagatcttcgttcaactacagcttcagaagcttcaaggccaaaactgacagcaacaagcaactcttttccccctttatctatactgcaaatcaactaacataatcaggtgtcaattgcaataacaagctttctgggtaaacaacaaagttcatnttttgattcatgctatacctgacaatgacaactgccagtaactggctgccctcaattttaagactggatgccccattttcatagaactgtactttgaggcataacatcttgtaatgtagtt

SEQ ID NO: 71762 - DNA, 146 bp, Oryza sativa
  unsure (1)..(146): unsure at all n locations
agctnnggctacgtctgctgacataaaaacatcccttgccatgtcttcggatacaacccaaaaaggcttgcctgttcttagtgcataaacccttgtgatcatttcgcgaactttgtgtaactcttccactcctagtaaaaattctc

SEQ ID NO: 71763 - DNA, 303 bp, Oryza sativa
  unsure (1)..(303): unsure at all n locations
agctncatgttattaacttcctttnttagccggaggaactgttgacccatacctttgaccaatatgaaatttcatgtttggattggccttggataaaggccgttggggtgtggggacccagaatcatccacctttgtggccacccgccggccaatactntttgttgccaattgggagaagctatgaatgagactaatnggcccataagcccttaacatgggtggcgcttctttctttggaatgagtgtgatttgtgctgaattcaacaatcaagatttggctattccaggcagaattccccat

SEQ ID NO: 71764 - DNA, 394 bp, Oryza sativa
  unsure (1)..(394): unsure at all n locations
agcccctacttaattaacagggattcctatcatcctgacgcgctccattctgaagcgtgcgaagcccatccggagacctgtccacaacagacacacacgcaccccggtttgccttagtcgccgctgccgtcctaccctctctggacctatgcccccccctcttcgccctccttcagaattntcgccatgaatgatagagtaggagcctaatgcatgccggtgggtacccttacccattccccaaacccatacccacctaaaacgggtagggtatggacaaaagatcctttacccattataaatagggtggatacgggtatgcccgtcaattaaaaaggtatatggagggtgctacccactgtccgcgtgttacccgtccccaatcgacctcatc

SEQ ID NO: 71765 - DNA, 282 bp, Oryza sativa
agcctgcgtttatggcttgccacgtgttggtgtacatcctatgatcatagatgttccgcgcgtggtcacgttcatatgcgtgcatctatctcttgtgttctggacgtgcatgagtctccggatcgaaagataacttgcaccatgtttactccgataagaagtgtgtataataaccggcgcctatgtacttgggaaccattggtgtctgctttgacacataactggagcggaaccaatggctatacgtattgattttacatttacactggtctaatgtgaaag

SEQ ID NO: 71766 - DNA, 423 bp, Oryza sativa
  unsure (1)..(423): unsure at all n locations
agcttaattattatatccgcacatctccatataacagcatcaaacttcggatgatcatatcttggtcatacgagctccgaatcgacccgttcaagtctcttaatgtttgttataacctaaagaactgtgagctttctatttatgtgttgttattgcttctttataagcttgtagctntgcttgtgtgcttcgcatagctttcgtcgttccggaggttcccgaagcgtggttcgcggtcgtcgctgaatgttcagaaggccgttctctctgagcaaggcaagtcacatcatccttgaacatattgaatcccactttataaaactattttgatttaaattattgcattattgctttatttaaactcccgcgttatcactagttttattagccatgcctatctacctttgntaagacattattatt

SEQ ID NO: 71767 - DNA, 353 bp, Oryza sativa
aacaagcggtaatgacaaccccaatgctggcgatgccaagatttaccgaaccatttgtggtggaaaccgatgcttcagataaaggaattggtgccattttaatgcagaaacaacatcccattgcatttttgagtcgagccctaagtcctcgtcatcaaagattatcgacatatgaaaaggaaagtttggctattattctggcaattgatcattggcatccttaccttcaacactctgagtttttcattcatactgatcatcggagcttatgttttctggatgaccaacgtttgactacttcttggccacacaatgctttaacaaaactgcttggacttcttacaagatattta

SEQ ID NO: 71768 - DNA, 346 bp, Oryza sativa
  unsure (1)..(346): unsure at all n locations
agcttgtagtagtttgctacacacacagataccattgtagcacttcccctagagtattccaacgatattgaacacatggaacctgtgtgtatanttaagaatatgattcaacaaaggacaacaactaaatggtatgcttagaatagaaagaaatcctatgtcttcaactaactaacttaagttaaaggtaaaactctttcgaatgctttgggcaccagccctcttctagtttgcccaggtgagtctagccctgagctctatgatgtacccgaacatggacggatgccaaggataaacagggctgtcaccacctgccgcctacctcacttttcatagaacacaccac

SEQ ID NO: 71769 - DNA, 419 bp, Oryza sativa
tttatgcaagcttcccacgtgttattaaaaatatgggcaaatgatgaaacagttagggagagtcttggtgtgcaaaaggtatttgtactatggtactacctatatttgcacaaggcctaagagaaagggtgaaatctgcattaattccatgatagttgtgcaaatatgatcagtgtatattcagaaaagaactgctatgcaatacagggaacagttggagagtggaaacgatgcaatcgcgatatagattacaatagcgatgtccgtagtacagtggaatatcatttgacgctaatgagaaagggataccgagcaatcatatacaggtaattcgtctttcggtactgatttgttggactcgattctcttaatcatataatatatattcaggtgtacatacattgagttaactactacag

SEQ ID NO: 71770 - DNA, 373 bp, Oryza sativa
  unsure (1)..(373): unsure at all n locations
agcttgccctcattaaatagtcactgttgtccaaagatactttatatatctgcatgtgtatctaaataatactatttcttacggcaaaatgagctgttgttaaattaaagcaggatntgcaatatttgcttcgtatccgcatgctaccattcacatncaactctatattcatcagatatctatctatgaactcttatcatatccttggttcaagaggattcgtcagttttgacccttactaacaactaaaaatgggctctgacaaaatctcagagaaatggtagctacattagcctgatgacacacgttcgtgtagaagcatagtttcaatgttcaatgatggcgcatgatatgataaataatcatcatgtgc

SEQ ID NO: 71771 - DNA, 295 bp, Oryza sativa
tacatagtgcatcaagtgtggatatgaacaatgtgtacgtacgtatgaccaatttaagtagcactctttatctacgtgaatgttcaagcaacgtgaatgtggctataaatttgtaatgtgattgatgtgcttgtaaactaatagaaatatgtgaatgttttgtgtgaacatgcattgttgcaaatagggttgaaagtgatccggatattttccgtccgacccgactttcagattcggattagttcggtcggatatatctagaaattttccaattcggagatatttttttcggata

SEQ ID NO: 71772 - DNA, 325 bp, Oryza sativa
atacacaatcgagagctggagctcagctagcttattagagacatatactcggtgttccttcgacaggagccctttcagtgaataagtttcaggcctagatatcagcggtgtcatatccatcacgaaggccatgtataaggtccaacctgcgttggcttcccacaaaagttcgttgtaagtgtgcacctcattcatcatccaattattagtcgaataatgtttccaattagctgaccaaccctttgcctgcatgccaagaatactcccaagtgttgtttgttcagcaataaacatgagtgccgatgttctgcaagcatacttgatg

SEQ ID NO: 71773 - DNA, 360 bp, Oryza sativa
cagtgcaagactaaacataaccaacaaacatcgctggagcttcagtatgtattcgatagaaagtgcagcttaaacatggatcagcatttatggtggcatcaatatctgcagaggccatgtaaaataaaaaacctactacattatgaaaataccgaccatgtaatcgattgtatcgaacttggaaagcgtgatatcatacattggtctaacatcagagaagtggacgattctgctaatttctaaaatagttcaaaacagtcagtactgaaaaactaaattccctaagatcacacatggcatgtcattcagctttacaataaatagatacatgcaatactattctaaggaaaaaggtttgct

SEQ ID NO: 71774 - DNA, 82 bp, Oryza sativa
cagctaaagttaatgtttacatatacagaagtaaagagtgtattttatctaaagacagtggcccttaaccaaaaaaaaaaca

SEQ ID NO: 71775 - DNA, 422 bp, Oryza sativa
  unsure (1)..(422): unsure at all n locations
agcttcgttcttagttgccataattattacccaagaatatcgagaaaaatcgtcaacaatatccaacacataccactttcctccaacagattgcactctagctggaccaacagtgtccatatgtaatagctgtccggtgcaaccgtcatcacagaaacaataggagcatgtgaagtagaaaccatcttagcatgacgacatggcgtacaaaccaaatcaagatctttcttaaatttagacaaaccacgaacaagatccaaaccacttaacctagtgagatgatcaaaaccaaaatgtccaagtctgtgatgccaaaacatcacatctttatcaaacttagtaaccaaacatgttatcacaggtgaaacaaggatntcaaaatcagctttaaacactcttccatagtgagaaatattcaacac

SEQ ID NO: 71776 - DNA, 375 bp, Oryza sativa
  unsure (1)..(375): unsure at all n locations
agctctcaagtctacacacanttcatatatataatattagtggccgtgcataaacctaatacaacttatatgttcaaatggaaagtataaacataaacctaatacaacttatatattttcaaaaagatataaatatttatacatccgtttgaacatataagttgtattaggtntatacacggtctctaatattatnnttttatccaaaatatataatacttcaactattaattttttgaatatgttaaaattnttaaatggaaacaaacgctgcttatatttttaaatagatggaataatgtatattgaccgacttgaaagtcttctcacagtatatactgaagatgcatgcacgaatattgattgcgatctaat

SEQ ID NO: 71777 - DNA, 299 bp, Oryza sativa
  unsure (1)..(299): unsure at all n locations
atggatggttttcatgagcacattgtccaaatatctctgaatatgaaggtgcctgatcatacatgtattttacaaaagacaacgcctaccaagaccttcagcatgctttcaacttacatttttcttgaccagtagcaagacctttttttctccatacgtngccattgatgcaagtttacaaggtggcccaaaggagttaatctgtgacatcttcaaagggaaaggaaagaaacacacaaaaataagtctttagtcacaatgtgcatcattggcgatgtacaacaaacccactttttttt

SEQ ID NO: 71778 - DNA, 378 bp, Oryza sativa
ttggtcgtcagcatgatctctgttcttggaactctatgatcatggcatttgctgtgcatgggctgtggagggaggcccttgccttgatctataagttgcgggtgaggattctttgcttgaatagtcttgtgttcttagtagtcacactaattcaaagcatttacatgaaatttggttgccatgacttcacttggcacttggcaagtgaaaagcaaacttgtcttagcgtaaaattagcagaccatatagcccactataacacgtcaagagccatccacatttttttatgttgaagctataaactgatttcgtgtggttagatggcaagggtcataccagatggtattactttcgttggggtcatctggcttgtaccat

SEQ ID NO: 71779 - DNA, 309 bp, Oryza sativa
  unsure (1)..(309): unsure at all n locations
agctngctcattcattgtcatatcatctgngctcatttgctttgcttcagcttactgcaactaaagtccgttctgcatgttgggacattgaattcgtcttggctctgagaatggcacaccactcatgtgtcatgattggcatattcaggaagtgatggtgttagctaattgccaaccatcaaccataaatcaacttcattatctattacaaacaaggcgttacagattcttgtaaaaattcatgagtagggaagtgcagctcagactgagttnntgaagcagttgaagtgttgtctaacattaaacatg

SEQ ID NO: 71780 - DNA, 354 bp, Oryza sativa
ttttatgttagcttaggtcttaccgtctattgcaaatcaaagcttggcttgtagctaaaggctattctcgaaaagaaagcgaagatttgtctgacacttactcacctgttgctatattgaccaccatttcagtgctactttttctaggctcatctcctcgtcttctgtgtcatttaatggaccggtacacatctcttcttattggataactcgatgacgagatctatattgatcaacctgatgggtttgtagttgaacgtcaacaacgccatatgtgcaaattgttgaaggctttgtatggtctgaaacaagcttctaagccatggcatgagaaattttaccaaacattgacat

SEQ ID NO: 71781 - DNA, 372 bp, Oryza sativa
ggaccttaagcaccgatttgcaactcatttcctggaacctacaaggtttaaacaatcgataaactcatgatctcaaaatagacataatttgaaaagatattctttgtgagcttctgtcagtaaattcatgcttaagaaagttcgaaagcatacccgagtacactacagtaacaaggttgagatcccatcctagcatccaagcattcttgtctctccttaatatgattccaacaaatgctgtctgaaatcctccgaccaagcatgtcaccatggaagaccaatatttatacgggtacactttgagaacctttgactgccacaacagttataagatgacatggtctagaataagttaatatactctgattttta

SEQ ID NO: 71782 - DNA, 293 bp, Oryza sativa
  unsure (1)..(293): unsure at all n locations
tatgtttgcaagcttaaggatcactaagatgcgtttgtggcatacaagactggagcgcaagtgccagcacagatagaaaagaacaaagccaatgcagcttagaagaaataccatcaccggcttgggtcaggtggatatggaaaggcaatccccaagtgggacaagttggaagctgacttgatagcaaggggtatcgagccggccatggctaattggcctgagcgaatcgaagaactggttctatgcacagggtggatcgctcaatccangtgatggctccctcatattcagcg

SEQ ID NO: 71783 - DNA, 401 bp, Oryza sativa
  unsure (1)..(401): unsure at all n locations
ttgtattcaagcttgtgtcttgtctcatcaactgtacactgctagctggtccatggccaaggccaactcgagatgatatgcttgtagcaatgccttattattatttttttaataatgaatgactaattagtttttctatataatgaatgcatgattaattaagatgtaccactccatccacaaatataacttgtccatgttttataaccaaaattgttgttttactgatatatctaatggtataagcaaaattctattntataatttaatggtttgtatcttttatactaccacttcgatcaactagtatcaaaatagttttttttttcaccgatagtacaacccaaaatcaatggttgagaattcacacttttaccggtgataatacaagcaatacttag

SEQ ID NO: 71784 - DNA, 397 bp, Oryza sativa
  unsure (1)..(397): unsure at all n locations
agcttaaagccatgaatcccttttatgcatatctggatctggatcgtacagaacgaacatatagatgttaatataatactcgatgaaaattcaagtattntaaaatgtttataaatatgtatttctcctctcgtcaattttgatttccccgagcagatgactcgttacgtttaaacactctgcccgactagtcatagccaccaagcaccgggagtcggcctaggcacttcccaaacatgcatatgagtgacatgagttcgttattaatggaacaaagtttcatggatcagaatntactacttgggtacttttacaattattaagagcagaaaatannattatctcatctctatgcttatgatttattccgaagtatacttagcaccttgcattactc

SEQ ID NO: 71785 - DNA, 424 bp, Oryza sativa
agcttgtcaattgttgtcacacataatgttatgcaagtctaattaagctaatgttaatgatatgctctaaagataatcatagagatgattataccgcatactatatctacatattatcatgtgttgttactcgaaatagataactcattattggctaatgaatatgtgattcgttcagaagactatttatgttgtatgttattatttctacaggatccttgatcaaatatcatatatgaaacaaataaagttcaataatcagcacatagattgattaattatcgtgtctcatggatcatgatcgatacatacgacgtcttaactatagtcttagttatgctaatgacttgatcacaccagctgagagcggtgttgattgagccacgatgtttgctagtacctataaatatattgattctttgtc

SEQ ID NO: 71786 - DNA, 427 bp, Oryza sativa
  unsure (1)..(427): unsure at all n locations
agcttantattttgaaaggtaaacatttatctgtccagggaaggttggtcttgattaattctgtactttcaagtttagctatgtttatgatatctttgttcgagatacccaaaggggttcttcaaaagattgattattatagatcacggntcttttggcaaggtgatgatcataagaaaaagtacagactcactagatgggatattatttgccaacctaatgatcagggaggccttgggattcataatttggaattacaaaataaatgtcttttgagtaagtggttgtacaagctaataaatgaggaaggggtttggcagaacttattgaaaaggaaatatctctataacaagtctataacctaagtggacaagaaacaaggtgattcccattttttgtcangacttatganagtcaaaagtacttt

SEQ ID NO: 71787 - DNA, 135 bp, Oryza sativa
gtaaaatataccaaaatttgacactaataaattttataaagggttaaaatagctaccaagtgaattaaccctcaacattacttaaacctcaacattacgaaaacttaaaataacatttgacaatctttcaataaa

SEQ ID NO: 71788 - DNA, 158 bp, Oryza sativa
aaaagaacaggaagaaatcttgaaatcatgcagtccacactgcacaaactctagtttgttggcttctttgttttgtctaattgattagaaaaatggcaaagcattggagggacccaatgaatgtgatgattgttgttaactgacatccacttctagcg

SEQ ID NO: 71789 - DNA, 309 bp, Oryza sativa
  unsure (1)..(309): unsure at all n locations
ctcttgaatcttagatttgggatccttctaagcccaactgtttttgttctgcaagattgtacaatttcttcatgtttgttacctatattttacttctcagtgacgctgtcatgttgtattcttcttgctgaattctactataagtgcacgctgctgtctctggttttcttcttctgttcacttcatactctgtgtcgaattattgagagtttaatacaccgaagaggtggccataccgcgaggaaattgattgtccctgtacaatacgccttttctgnttgtttcctcttcatttcactttggaatttg

SEQ ID NO: 71790 - DNA, 412 bp, Oryza sativa
tgtgcaagctggaatttctctctgataacaaaatacaacaatcaggaaaaggctatcattttcaacaatcacataaacagctatgaaacgtactagagataccgcttagctaacattagatccgcgatcatttggaccatgtttgttcgtctttgaacctgcatttgaaggcaagctcatgcttgttgttaccatcttcacagagtcagaagatcctatttcaatcagacagtgatatcaaatgagtacacaaatgttgacaacatttcagataaacagacacatttgtgaagcacgataatcaaggacaccttcgtgtacagtggacagttttaaccgctctgctacaatggccaaagtacgtgatggcaaatctatcaagttcttcgcaacctaccatcaatgacgtatc

SEQ ID NO: 71791 - DNA, 376 bp, Oryza sativa
  unsure (1)..(376): unsure at all n locations
tgctcccttggccgtgattggtgaaagggctggtaacaaactcgaagaagaaggttcgccaagcacataaaagacggtgttattggcaagctctggtgagggttgatggatgcggatcgacccaactgtatcttgatctggctacagctagttgaaatttggaggtatctctccttcccgatgtcgaccagagtacgagaccgacgtgtggttcttcaattctctcctccatgaagcctttgccgtcccctcctacccaagctccaccactaccggcgtcggcactctcctcgtcaagctcanggagctcgtagatggcttcctatccaaacgccactaccaccctagacccagcaacgccacccccttccccttc

SEQ ID NO: 71792 - DNA, 243 bp, Oryza sativa
taaaatcttacctttcactaggaattctcttgtcccgtgatctacccttaaaccccacaccatcgagattttcatgcaagataaccttaatcttctccacattcaaacaaccccaatctcccgagcccacccgcccccaagaaaaaagcctggcgattgggcgattacaaccctggctgctctttcccccccagcagacaggcagccgagacacgtggaaatctcactccttactactcacgc

SEQ ID NO: 71793 - DNA, 283 bp, Oryza sativa
ttcaactggatttaatatgctttgcacacctatatgcaagcatctgactctgaacgaacaccactcgtcttctaattcagaggggttaacctcttactgaacggcccacgccataaaattgttgaatggagtttccagtcatcatatattcgcgagtaacaccatgccaactggaacatacttgccaacgcaatttggtatgtcaaaacatgggtaaggaaatttatttcctagccattgaacctggcaaaaatgtatccgagaacttctatttaattagcgg

SEQ ID NO: 71794 - DNA, 121 bp, Oryza sativa
atttagagagataattgaaataactgggtcctgacccacaattgttatgagatattacatctctagagttggatttacttagctcttaggtgcttccacaatgtattgctgcagggaaacc

SEQ ID NO: 71795 - DNA, 405 bp, Oryza sativa
  unsure (1)..(405): unsure at all n locations
agcttgcatatcatgatagtatgaagtaatagttctggtatcttgttttaaacattgcagtttgttgaacaaaatgtcagcataatacatgggaacataaacatttctgaaatatcgtttcaggtctttccaagattgtggtattttgttatgcctacaaagatgtttccaatcattagaagcatgtttaattaaaacactagaggcacacataaccttttgtttctcagacaagatatgcttttgaaattcactatcaaccgctagctcccaattaatgtaagcatgaggatcatagtttccctcgaaataaggcagtgcagatttgatcttacctagaacatcatcacttacctcataatggtcatgttgatcactcctcatgtctngatgaagatgtcgatg

SEQ ID NO: 71796 - DNA, 363 bp, Oryza sativa
  unsure (1)..(363): unsure at all n locations
tcatacncggtagacaaagcgtgaatgctttcacttatggtatttatagccccaagtaccgggttgaagtacttattgngttgcattccacaataagcatattgtggatggaaaaaagcacttggatcatacccatgatgaggaggaggaggggctgcacttgaacttgcaccttgatcaaaagttggttggtgcacaagaggagctctatgagtggagagttggagacgaagctcgtacttcttatgttcttttaaattgtgaccaattngtcccaacttgctttgtcaacctcattatgtagggagcataatagattccttatctaatagttgcctttgagatggcaatctcctttatcat

SEQ ID NO: 71797 - DNA, 284 bp, Oryza sativa
taaaaacaggaattcttctgattcatcttccaacccggtcgactcgcaaaggttgatagctcttcttccctggcttcaagaatattttctgtcttccaagatcaatctgcttatgatgtatttacatcttcaatcgttcatgattccactgtgtaaaacttcgtatcaccctgaaacaggaatatcgactcatttcctaccgactgcgttggaaactgagagcatgattctattctctagagcatggcattgcctataataaaaccatgaagcatacattgtat

SEQ ID NO: 71798 - DNA, 78 bp, Oryza sativa
gggctggacgttaatcaatcagatatcaatcgaatgactctgatagcagtgatgctttacacctttggtcagaaagct

SEQ ID NO: 71799 - DNA, 415 bp, Oryza sativa
  unsure (1)..(415): unsure at all n locations
agctttaggttattatgtagagctgtctctctctgtcccgcacaatgaccctggccaacgggagacaaacggtggtagtgtttggcttgtgatgctcccttgatggaacactagtggccaccacgtttgataatccttttgtctttaggggaagccatgtgatttatgaggatagcaaaaaatgatgcgagagaaggaaaagggcatgacccagccgtaacaaatcaagaatgcgatgcgcaagcgcaaccatgtcggcatcaaatcacgaccaaccaccatgacatgggaccacaagtccacaactcgtaaagactgtactgacattgaccatgatccaagtgtgatgcaaggatantttgacttggaccaaagacatctagaatagtgctgcagttaaacattcattgaaatt

SEQ ID NO: 71800 - DNA, 419 bp, Oryza sativa
  unsure (1)..(419): unsure at all n locations
agcttggcgcttatctcacttatatatgtacaaaagtaatagcgccattcgagcaataattagagcttagtgcggtggcgcgaagtttgtgcatatatgtggacgaggcatgtntgacactacagcaatatttttggtgttgtttctatttggagacatttctttttttacactatactagccagtgttttttttttaattcttggatatcatatataggacagctttatcctacaccccctcccagctaaacagctgatcttttgaaagagatcacacaaatagctaagttgatattagacaaccatttaaagttccaaaaataaactcaattccgtttatgagatataaaattgagaaacattggagaagaagatgatagtggctctcctctatgatgtggtaattttatatctcat

SEQ ID NO: 71801 - DNA, 419 bp, Oryza sativa
cagcttaattactataatccgcaaatcttcatgtaacagcattaaacttcggatgatcatatcttggtcatacgaactctgaatcgacccgctcaagtctcttaatgtttgttataacctaaagaactgtgtgctttctttttatgtgttgctattgcttctttataggcctgtagctttgcttgtgtgcttcgcgtaactttcgtcgttccggaggttcccgaagcgtggttcgtggtcgtcgcccaaggttcggaaggccgttctctctgagcaaggcaagtcacatcatccttgagcatattgaatcccagtttataaaaatattttgagttaaattaatgcattatcgctttatttaaattcccgcgttatcactgttttatttaaccatgcctatttacctttgttaaacatta

SEQ ID NO: 71802 - DNA, 254 bp, Oryza sativa
  unsure (1)..(254): unsure at all n locations
gacaataaccaacattgctatcctactaaaatttatgtagtttcggaagtgttcactccttaaacctcaaaaaaaattgatgatggtataaaccaaatccatctcatcacatataaaaaatttgacatcaccaatttttgctatggttagtntgaacaataaaacaaacatacttggtgacatttgaaattattaactcgattacaatgttnttttttagaaacattgtacaaacacaaagctttcacaacatg

SEQ ID NO: 71803 - DNA, 392 bp, Oryza sativa
aactctcatgcgtggggagaagaccatcaaattcaatcgggaaacccggattaggacagaacaaaaacctagctagattccgagcagcagcagcagcttgaccgctacaaaacgccgacggtgccgccgttgttcgctagcaccggaatccgcacggctccggcgagcgatcgcgactccgcttgatccgtcacgccaccttcaactccaacttctccgcttccaaatccgcactagagtagaccactccagcgggagctccggatgcaaccgacctcgaaacttcccccgcgtactcgtactccacaaaccaaataataaaaccacatatcctcatttcacagcacacacagcgacacccatcgtctccaaatcccgctgcagagaaaact

SEQ ID NO: 71804 - DNA, 412 bp, Oryza sativa
  unsure (1)..(412): unsure at all n locations
tcaagcttatgttatttctaatttaaaatgttgtaacgagtactgccatagtacagacggttcttcaatggtacaatgtacctcaacatggaacaaacaattcatcaactggtttaaagagaaggctatatttatataattacatatatggaataaaccggttcaaatatgaatatttcgtgatgttatatttttaatcttttttccctgtagatatatcagcagcactagcatgataagagtgaggtcatggaagaccttttgtcattgtcgcgtggtccgttgaagaatataacatgctntactagatatgacatgaatgggttcagatatcgcacagagagactggacagccgcacgtgtacacaaaacagtggtgtgatggttcttggtgatgatgtggaatattatg

SEQ ID NO: 71805 - DNA, 91 bp, Oryza sativa
  unsure (1)..(91): unsure at all n locations
atgtaagatctgttgtgcctcgatacgaatcaattacgntggttgaacatcatatgaagtcattgtaacctatttagaaccggaaatttaa

SEQ ID NO: 71806 - DNA, 392 bp, Oryza sativa
acacaatacattaaggaatcattatgtcgacaaacacaaaaatggaaagccaccatttcgccgataatcatacacgggcctaaaggccagcgggcatggggtatctaagctaacgaagccgctcgtctcaccagcgtcccgcatttagttcaagaaacgaacctcacccttcttttcttgcagcctagattatctcccatgtaaatcattcgttcaaacaggacaccaacaattcaacatcatcattcacaagacatgaacacatggtgtggtactatctagtatctactcaaaaagctagaggtggcatgcctctagcaacatttaacgaatcttggccaatccaatcccgtgctattcacatccatatgggaccaaccaacgggaagaca

SEQ ID NO: 71807 - DNA, 368 bp, Oryza sativa
ctcttcatccctctcctctatacttgcttgcttgtgccgctattggtctagatgctgtatgtgccttggattacaatgtggagacctctagaactagatacttctttttgtgtgcgctgctagctctgtgcattttctgaagttccgaaaatttccaacctcattcccaaaattactgcttctactgtacttaaagttttaaaataacctattcaccccctttatgccaattgacttttactttacccgaatcttagtttgttgagccacatatacggggttatatagcatttcttttttattatcactatggtacaatcattctttcttattatactcttgcaccatataaacaacattcttatttg

SEQ ID NO: 71808 - DNA, 376 bp, Oryza sativa
  unsure (1)..(376): unsure at all n locations
gcatactactatagagagatagagagatagagagagagagttgtgtgagttgtgctggctaaaccaagccaaatatgggggaggaattttatatagatggagtggaggaggggaatttttttggcgattcagtgggcgaatggagggaggaagaaaacaagaggactggacgagaatatccgagaaagaaagatgagagatgtggacgcgtggtcaccaccgcattgaggggcatagggtcgacgtgaggctattcantgcctgcctcactgtctccatttctccacatggaaatcatccccactgatcttcttggggaagaagttacaaaatgcaactagtaagactgcttgatntgggactggtttagttctca

SEQ ID NO: 71809 - DNA, 206 bp, Oryza sativa
aaaacctttttccaacttggttgaactcagctaagccttctctcttaggcaattagtataaagtctaacctacctgatattgttttcagtgtgcaaggattgtaagtcagcctatatttccattggcctcttatttcctacttattgtcggttttgcacatcattttactctgcaatctcaaagacgataaatgtgtatatactat

SEQ ID NO: 71810 - DNA, 280 bp, Oryza sativa
gtagtcaccgagtgagttatcaatgtcctctgaaaatgaaatatggagcattagcaccaaaaccatttaccatctaaactagagagtaactaagatagtggagacagacctctttccatggagacttcagctagagcagaaaagatatttgctttctccaaagtgtcatctgggctcttctcaactataggccttgcgatatccaacattttccaggcctgatccaaatcagaatcatcttcatctcccaccatctcatcatcatccttgtcactgtcac

SEQ ID NO: 71811 - DNA, 379 bp, Oryza sativa
tggaacataagtatacagtaaaatatgtagtgcaagcgagtgccttatgcttgtgcaaacatttgacattatgaatatgtgcaggccaatgtgcattactactaaaatgctggcagaaaatgtgcacattggtaccaaagtatcaaatataatcaggaagtcatgttacaatgggccacacatctgacagaatgaaagaaagatagtgtgaacattgtaaacataagataaactgcatatgttatattctttgtagatgagcacatttttgttcattctctctatatacatcacaaagaaagtgtgtacagctagttgaatatgtattaacatgttcctaaatgacttgtacaagatctatcctaatttactgatacac

SEQ ID NO: 71812 - DNA, 382 bp, Oryza sativa
gcttcacatcgtcaagcggtcaagcgaataatgaggtatttgaatcatacacttgagtttaaaatttggtattctacttcattttctatatacttaagtggatattccgatgctgattttggtggttgtagaattgataggataagtactagtggaacatgtcattttcttggtacatcattaattgcatggtcttctatgaaacaatctagtgttgctcaatcaactgctgaatctgaatatgttgctgctgctagatgttgttcacagattttttgacttttatttactttgaaagattatggtcttactttttagaaagtacctctctctcgtgataatacaagtgctattaacattgctaagaatactggtcaacact

SEQ ID NO: 71813 - DNA, 363 bp, Oryza sativa
tcactgcagatgctgtcatctgttttaccgctactggatgaaaataattgcctttcagctagatcttcttctaccaaagcttgctgcaagttcacaatacaggtgtcagaaaattaatgtgcctaagacagctcacatgatcttaacaaaggtgcaatataacataagttaacatgatttacataagttaatcatggctccacgtgttatgtacttatgtcatttcaatattgaatgttaagctatagcaacaaatgtcacatagaagaaagggagtttatgtactatattaataataaaagttcacaaaattagtttcttcaagcatacaaacagatgcatcattttgcacaagccaaacaa

SEQ ID NO: 71814 - DNA, 320 bp, Oryza sativa
  unsure (1)..(320): unsure at all n locations
agcttcactacacgctgctcgctggccgatggagccatcactcctcttcgctgcgcaccgggcgccgcgccatcctgcgcatgcaaccgcggggcctgcgcaccgcgcctccctgatcgctggccgcggggacgccgcacctccctgtgcgcctgcccgccggtcgatgccaccgcaatgccgtcgatccactctgccaagcctccctgtccacgcctgactccgcccggcccggcctccctgcctgcgcccgactctggcgctgctctccaccgntcctacctgcctcaccgcntcctcctgcctcgcgctgaccgtga

SEQ ID NO: 71815 - DNA, 242 bp, Oryza sativa
  unsure (1)..(242): unsure at all n locations
agcanctctttatgttttattctaaatttctactctccctcctcaatttgccttggtgctcttgaagaatcttgcttangcgagggactctgggcaattaataaatatatttgaattaacgttcaacttacaagctagcagtgtcttttttacttttatgacaacaagtaatctcccacgaataaagatcatactccgtgctggcaattataatcgtaagaagagcccctgtctgattatgt

SEQ ID NO: 71816 - DNA, 296 bp, Oryza sativa
  unsure (1)..(296): unsure at all n locations
agcttgccagtgatctctatatagtgctcgtcatggcttcgccggcgtcngncgccggcggaggtgaggatagcaatggcttgcatcacctcatcgacccgctgctagtgagccgcacgaacagcatctgccgcgcggataggaaagcggcccgcggcggcggcgtgcactccaaagggaagcacttggccgccagccataaaggggagcggctctccgcaacgatgtctgcttcgaagacagacgccggccgcttctgtcatgccgtaacggaaatggctccttcacacccgtac

SEQ ID NO: 71817 - DNA, 138 bp, Oryza sativa
gaaagcccgggacaattggatttctccgcaacagggaaaaactgccccccaaattaaaaacaaggccggggccgggggaaaaccccttagcctggaacccccaggcaccccacccactgcaaaaagaaggggcggcaa

SEQ ID NO: 71818 - DNA, 425 bp, Oryza sativa
  unsure (1)..(425): unsure at all n locations
agcttgtactaaagttgaaaccatatcagtcactactggcgtacctgcacgtatcttacgccggacaggcgcggcgtcacgcttcggtggttggtgatgatgacttggtgacgtactcgccggctgccaaagcggcggcgcgcggcggcaacgtttctactgtagattattatatagatgactgacttcacgcacgtcggatgattaagttccatatatatgcatggcagaaaattctagatgaggactgaagaacagctggtctatatacgtatagctatatatgctgtctttgtggagtactgaattaaccaaccattaattaattcaactggaagatacagaagcccaatataccgaagcctcacgactacttaacaaanataaaattaaagaatcagagcctttgatttcacgtgacaaat

SEQ ID NO: 71819 - DNA, 415 bp, Oryza sativa
  unsure (1)..(415): unsure at all n locations
tagcttcccattctatatcaacatacctcaactcggtgcaagttccgtgccaatgcaaaactggaaacaagaagtgcaacatatttgtatgaaagggcagaaaaatcccttcctgatactgactttgaatcagcagattgaagacactccaaccaagcagcacacatagcttcagatgtattccacctctgggccctctcaatatcacctgcagccctcctttgtcctgaagttgccatcgctacagcactaagaccccttctcgagccaatcttagcactgcgctcaaggtcacgagcagcagccaaggcagcagctnttgcagctgctttatccttaggtgcagatgttggtaggtatggtgttgcatcaataggcttctgaaaacttgagaaagtgtgtagtttagcagatc

SEQ ID NO: 71820 - DNA, 379 bp, Oryza sativa
  unsure (1)..(379): unsure at all n locations
ttgcttatactcacatatttcaattctttggttatcctcggatatgtatttggagattacaccgatatgcttatttgatatcaggcctttgttgatacgaatataaaccactcggtgggtggatatttatcctgactatatgctgggttgtcattaacccattgtcggggcttcactttatggcattagtcgtgccctgacttatttccacctcccagcttcaatntgtaaagactcggagacctgacaaatgatgagcctcgctttgagaattggtcgaagaagatatctttccactgcaagctacgggtactgggtattatggtacccatcccatccgatgggtatcactagtatagggatactattttatgatatt

SEQ ID NO: 71821 - DNA, 400 bp, Oryza sativa
  unsure (1)..(400): unsure at all n locations
tagcttgtaaagtatatcacaggataggtactctgcaatagctctggatttcaacagaaaatggcaacaaaagccacacagagaatgtttattagtacaaacaaggattttcacttttccatatactggtgaaagactatcagcaattgcttaatcatgagacatgcgtgattaatttaaatatgttcccgcattctttacatgatttcacatacagtattcatccccgttctttaaatatgtttgattaatataagtatgtgtgattattatgtttgaatcgaagccatatagactgattaatatgccaatttaactgttaacggcagtgaaggatntgatcaaaaagaatttaataagctataagcaagtgttgatatttgaatagatcaaatatact

SEQ ID NO: 71822 - DNA, 211 bp, Oryza sativa
tcgccgggcgtcaccattctatgttgacactataacaattctgccttatccgctattatactattcagctagcaccaggcgtaaaggaccataactgctaaaaattctcccgcctgcctcatcgagactgtgtatcataacttttcgactgggcaccaacgctgtgacctatctcacgaatagactgtgctgctttatattgcctggaaac

SEQ ID NO: 71823 - DNA, 281 bp, Oryza sativa
ataattatatttcagactgaactatattattattatttgatatgagcacggtttcaccattggtgtattggtgataagtgcattaacacactccacatttaatacacaatatttttagtaggccgagttaaatctaaatttatgttcaaacttccaacgtttctatcacatcaaaacttttctacacacacaaactgttaactgttctgtcacatcgttccaatttcaaccaaggattcaatgttagcgtgaactagacacactcttaggttaagttatac

SEQ ID NO: 71824 - DNA, 231 bp, Oryza sativa
  unsure (1)..(231): unsure at all n locations
ccccnnaaaatttggggggaggtttctttttttttccaaagggggaggggttgtttgtaaaatccctaactggttggtaaaaaaaaagtcgctgatgccatgggaccagtattggttactctcactacatttcttatctttgtccaataacttccgccggggattgtaccgtactgtcgtgaacacctgcgtacctgttggtaattacagataccccttgtaaaagaaggg

SEQ ID NO: 71825 - DNA, 397 bp, Oryza sativa
  unsure (1)..(397): unsure at all n locations
agcttctgaactcttgcttcactaattcttgatcctagctttgtcagaccaaccttcaattcttcaaccgtgattgtgccacttctgtctgtatccatgttattgaacatctgtntcaagcccttgattttctctggtgataggttctctgcaattaccttgagatgaaaggaggcagcgtgtcaatttgattttagccaaagcatagtagttattcctgttaaagaggattctcaccttaagagctaattgctttaacttgttcattgccttgaattgcttcattcttgataggactgcgctatcgataagtctgtcagatgcaccgccttcttgagccatcgatgttctgcagcatggagacatccattaaagaagtggctcactgtatgttata

SEQ ID NO: 71826 - DNA, 341 bp, Oryza sativa
ctcactttccaacgctaattctgctctaaaactaactcttgtgaatcatctttatcacggcatgtcacctattatagcaatatacgagtatctattatgatcaaaggtcaatgaaaatatgaacccggtaatttgaagcactttccagtttggagatgcatactaacaataattaatatcttaagtactcccctagtttcaaaatatagttttctttcgcattccaatattaaaaaaaactagaatacttatgcggtcataccttatcaaatcctaataaaacaatttctcgttttatctattcctaataattattcactgggctttacaaattcaatata

SEQ ID NO: 71827 - DNA, 238 bp, Oryza sativa
gcaggtcatgttcatgttcatactgcctcatgagtcatgaataaagtctcttcggtctacttttattgtcagatattcatttgatgagttatgagccttcagatgcataattggcgagctggagccctggaaggtggcgcgtctgtatcaaagagcccaatttggctcttttttggagtgggatacattcaaaactacttttatacaacttctgttgtgcaattgattgatcgatcaa

SEQ ID NO: 71828 - DNA, 398 bp, Oryza sativa
  unsure (1)..(398): unsure at all n locations
tatcttgaatatcatggtattctcaaattgtgaatttactgggccaatgccatccacaattggcgatctcactaagatgcagaccttggagattgcagcttgtcggttttctggaccaataccttattcaattggacaacttaaggaattgaaggcgttatttattgaagggtgcaatatgtctggtagaataccaaattcaattgtcaacatgagcaaactgatatatttggggcttccagcanattatctgagcggcaaaattccagcacggcttttcactctttcagcactactcttcttggatctttttggtaatcacttttctggtcctatacaagagttngatgctgtgccttcatatctgatgagttagcagtgacccatcacgaattgac

SEQ ID NO: 71829 - DNA, 372 bp, Oryza sativa
  unsure (1)..(372): unsure at all n locations
tacaatagagattctagcatgtattactattgaaagtatatgcacaattttttctagaacttatagtgacatttatttgttggtgtgtatggagtgtgcacgtgaaacttatgtgcacagcctatgttctcttctgaagataccctatggaaaaactgaaaatatatgtatgagatcggcggcctctaagaattaagataactangtcagcttgacaacgatgacttgtgaggagtcacaatagctatgtcaatgcagtcttttatattcgctcttcgtatgggtttatatcggtatttagatgtaagatttttttatccaatttntcaagcccaaaggactattcaactnccttgttttttttcttaatat

SEQ ID NO: 71830 - DNA, 362 bp, Oryza sativa
  unsure (1)..(362): unsure at all n locations
ctttgcgggcctcccaatggattggtggttcgttgcctctattttaaatagggtacggcatacttgcctgaatcttctctctcggttactcagtggagtgatctctctcttaaattcccataaggataaagataagtagacggttcgaaacccgtgcttaaatcctactcaaggcccactacgggtagcgagcaattaacaaatagagacaaggatgatgagaaatgacgcatatactgccggcctgtgtcactcatgatgttggtagttcaagtgaattgtcgtagtgtaaggaagaatcgattggtntctgattgctacttggctggcataagaaagaaggcgccccggcacgaattctg

SEQ ID NO: 71831 - DNA, 423 bp, Oryza sativa
  unsure (1)..(423): unsure at all n locations
agcttgaccaatgcagcaagccaaattggcttgctttcgttgacaatcatgcaaccccaagagaaaaaaaacactctgttggcagttactgcttgcgaggatcttaaaagacatggccataacaaacaattgaaaagatattgatgataagaatctcatcagacttgactaaattaaagaagctgtttaaactaaactgaatccagaattattgatatgctactgctttttcagccttcccttgcacaatctactttgacccatatagctggagctggtcccatgacaatgtgtgcatatgatggtgttgttattagtgtatcattggaatctccacttcttatncgctntctggttntacttttggttactgctaaattctaatgaccaattgaaaatatgtggggcctttgttcctttttg

SEQ ID NO: 71832 - DNA, 358 bp, Oryza sativa
ccccttctcaaaacgttgaaaccaaggaacttgtgttatccctctcctggccagacatatttccaaaagaaatatttaggtggtagtgttccaggaattgaattggaagcctcgagacttttggcttatcagagcgctccagtctgtttgtcgggggactgtatgaccatagcgggtctcctatttggaaggaaaactaataacgggttttcaaatagccgtcaagagtggcatggcgctatcttttttttgggagtttatggtcctttctccaccggttaggccgtaagctctatttcttatcttaaaattttttgcggaatccttttcgatgtttatgccccaggttgtttcttca

SEQ ID NO: 71833 - DNA, 427 bp, Oryza sativa
agcttctccagattatagcaagaatgagtccaaattcaccagtgcagcctgttcaatacctgctacaataaggaatgataagttgctctgcagcaacataaatgagcccgacttggttgtctctccttcacctcttgtatcgtggcgtgccggagcatgtatggtcgatagtggaaagcagttgtttctcttaacaccattgacaaaaacaaagacatgctcatccagatgcccaaaatcatcgacaacgcagttgaagacaactaccggcctggatcagctaaatcttcccaatatacctgttttgaaactgaccatttctgatgacgattgtctcgatctggagcaaagtgcgaaagcaaatgaatcgaatacttgtgtcatgacacctaattttatcaaagcaaagaaggggtcatcatgaaac

SEQ ID NO: 71834 - DNA, 359 bp, Oryza sativa
agcttactgctattacaagtttaaaatctagattccgtttaaaaaaaggtttaaaatctaaataaaaaagcatatgaaaacacaaaccgaaggtttgatttaattactggatttaacatgacaaacaagtatagtaaattgcacattatacaacatattttgactgggttgcgtaatacaaaggaattatcaatctttgagcatagaaccacctaaactgactccacactccacagaacaccagtttttgaccatttgatgggaaaaaaggtttataaaaaaaaaaatatcgcatctcaaattgcataaagttggtatttcttcgagctaactcttcaaatgatcaaaacccagtttgt

SEQ ID NO: 71835 - DNA, 87 bp, Oryza sativa
attcactgatccccggaatacagtttctgcttacaacaaaagacattacttctaacactataatttggtaaatctctgtacactcta

SEQ ID NO: 71836 - DNA, 412 bp, Oryza sativa
  unsure (1)..(412): unsure at all n locations
agcttcaagtattttctttagggcagcaacttcagattcagcttgttcccaacctaaaaaatgtatatcaatgacaagattagtaatatgcaacaaagacaaataaaattacctaaatcaatttgatctcttacaacaatttttacaaacgcaattcagtactcagaagtaactttgcagattaatgaatggaagtgtggatcaattaagtgcacagtttctaaagtttacctacaaaataactaacatggaggaatcatttagttaatatgcgtaaattatagaaaggatnttgtgtagcacagccacacaggaagtgatgctttcaagttgcttttctagaaactattatagctntatcttttctttctagtcattatcagatctcanagcagcagactatccagccatc

SEQ ID NO: 71837 - DNA, 156 bp, Oryza sativa
agcttggagtgtgtgagtgaagtgaaaaggtgaagtccttatatatggtaggtatgatggttaagaaaacgcgaaatgtccttttagcccttcaaccaccattaggaggagatctggactgtccacgccaaaacatggatccgacagtgcagctgg

SEQ ID NO: 71838 - DNA, 377 bp, Oryza sativa
  unsure (1)..(377): unsure at all n locations
agctttacaattattntgtaatgaatatgtaaaaatgatttggcttgatcaataaaacaacacttaagttctgaatcatttttagtacatattatgtttctgaagattgttcctgattacatacaaagaaagtgcttaaaactggaaaagctagcaactgaaatatttcatgttagatgatatcagaattggagtaataccacaatcctcancaagtttttaaatttttttagaaaacgcaggagagctgcacttcatttcattaagaaggaaaacaaaccacccatacaaccaagggctcatgagcccttcacccagaacacatccacaactagcatcacacaaggcgatacacgaccaataaccaccgtacaaag

SEQ ID NO: 71839 - DNA, 411 bp, Oryza sativa
agcttaacagtagcagcagcagcagctgtatgtgtgggtgtggccatggtgctttctttgcattgcattgcattgcaatgcatgcactgtttgctgcagctgctgcagctgcaaagactagtctagctctctccatctctttctttctctgcttctttggttctttctctgtctataaatacagaggcctctccttttcacccagcccttttcctctcctcctcccgtcttttacaccaccaccaccctcgcgtgccctaatttctcgctgctccttgtcccccacctcctttacttgagcttgctcaccactgactccatatacagagagtcttctctgtatttctctctctcagtgggaggctcacaagaatctatcagctcacatctcactgtccttgcctttctcta

SEQ ID NO: 71840 - DNA, 386 bp, Oryza sativa
agcttgatcgatttcccctctgaaacaagaagttctggaccgggaggtataagatcaatcacttggcgtccatccgatgcatcgactatggatatttcatattcccccttttctttacgcaggatttttcttactacacctgttgacgttgcattatagaccgtattgttactcttgctaccatcaggatagatctgtccccttcctcggtttccccccacatatatgggatattttaagaaatgaacgtctttcttcatagcaaggtcgggggaaagaatgggaaagacgatttactatatttcttaccgggaacagggcctatcacaagaatatttttttattgggacgataactctgaaaagagagatttcctatcttttctt

SEQ ID NO: 71841 - DNA, 439 bp, Oryza sativa
  unsure (1)..(439): unsure at all n locations
gtcctacagtgatggatataagcgcaattgatatttctgtggagttatacatctgtgtattgataagaccgctcacaatntcttgaagctcgatctcccccccagatgaaccatattgcccagagaaaccatgaaccagaatagaagagcttgccccacccatgagtaaatatttcatagtagcctcattagaccggagatctctcttggatatccagacaataggtaggaacataaactgaaacattctggagctacaaagatagttattaaatcgttagcaccacataataacattccccctagagtagctgtaatacgataacagaaactctgtatagccattctgtcattcatgtctctcggtagaggatacataagttgacatataaatatgaattgagattcgtgaattgtcgttggaattcccgaagctaat

SEQ ID NO: 71842 - DNA, 335 bp, Oryza sativa
tgctggaaactgtacaaacttaatcattatgtaaaagaatttatagcatatgagccgtgcagggcgtccatagctccatacttgtctaggattaaatcttcgatatgatatatatagcatgcagacaaaaatgtatctgcaaggtatcttgtcttcactgttcatatgcatacatgcatcatgcatggtcccacggctatacataagatcccgatgctaaatataatattaggctgtacattgaagaatttccaagatcaaactctttaattctgttcacttatggaatcgcaacatatatattttgtaataatactaagaattgcgaggatatt

SEQ ID NO: 71843 - DNA, 370 bp, Oryza sativa
ctacttgagtattatacttgctctaatatcttaatataaagtggtatccgagtattagctgatacatgctagatctatatgatccgctacgctatacatatatataatcttggtgttaatggatatttcgatctaagtaatatatactgtctcggcgtggtgaccgatctatcccaatcacttgatttaagtatacatcgagtttaagattatatattgttaatatctacaaccgatcgaatagaatttgtttcttgctcttattgatgatcgccgatcgaatcacatatgacatcggctcaaagattaatgatatgtcattggcttctaaccgatcggcatcatttatagatttaccacggttctttgt

SEQ ID NO: 71844 - DNA, 393 bp, Oryza sativa
  unsure (1)..(393): unsure at all n locations
agcttcacttgttctctcgtccgctttctcgaaggccctgcctcgtcctccaccttttggggattcgcccagggaagcagttctccattgtaaacccggttcgcccgcccagccgcttgatgcgttaacagctgactatactcgaccgcccgaacatcggcgatcattctgcaggctttggccttcgcctggtcgatggttaacactgtaaaagtagagtgtgaaactattgtcaaagtcaattatgcgaaataacaagcacatcagtaatgccaaacacagtcttactgtcgcccctctgaagtataggttngcaaaccgtcactcttcccttgttcaccgcgactgcatgatgggaagggaaaattcaagctacaaattctccccaatcac

SEQ ID NO: 71845 - DNA, 411 bp, Oryza sativa
tttaaatcatgattttggatttgcagcggtgtattatagactcgatcgatggagtcggtctttcttttgaactgagtgacaaagtcagtctttttatttcaggcagaaagtccgtctttttatttcaggcccatagtcagtctttttttttctctataattaagtattgaaaatgaccatactcttatatatatagcggtcggaagcacgagattatgagaagagttgtttcctttttacgcgcacgctctcccaactactaaacagtatgttgtttcgaagaataatatatgaaaggtgctttcaaaaattcatattaatccacttctgaagtttaaaagagtttatactcaaataatcatgcgctatgagcaaggataataatacaaccagctacttactgtctagatc

SEQ ID NO: 71846 - DNA, 84 bp, Oryza sativa
tttgagggtgagttttttttaaaaggggggtgggggtttcaagggataaaggagtttttggaggttgttgagttaatgtttaat

SEQ ID NO: 71847 - DNA, 412 bp, Oryza sativa
  unsure (1)..(412): unsure at all n locations
agcttccactggactgttgtccgttgaattgaaactcaagcaagcatagcagctctcaccaacaggaaacatatatagcagctctcacatgccagttgcgtgcctcctgttaccgggagttccaagaagaaaaaaagagaaaaagcctctcccttcccttgccgtagcagctgcccatccaaacaaacaatcaagcagagccaatggcagccgtggcgaacccgaccacgcgcgcttttcactcctcgcccatgccgccgccgagatcactacgccaccaaacgcgccgcgtgggcgacgacagcgacgcgtagccaataatacaccgcgcgcgacatgacgaattgacgatgacgagacngccgcggtcaggacgccctcgcgcgcgttggcgcctactgcgaggcgacac

SEQ ID NO: 71848 - DNA, 423 bp, Oryza sativa
  unsure (1)..(423): unsure at all n locations
agctntatgattattattacactaagtttgttgttaatgaatatgatatatggatgatggntatgatgaaagcgctataacgattcaaaggatattattttctagtggcttaatgtatgtttaatgtttggttccaactatatatgatgtatagataagttgtgtatctattaataatctctgcaattaaatatacattgctgggatggaattggatcagaacttgtggctttctcatgtgattttactacatttgtgtatcttctaataagtcatgtttggattgcttggatagtctgcttatggtggattcataatacgcactccgttttttaatagataacaatattgtgtttttacatgatcttctgaccatttcgcatattataaaattgtatataaatatcatgtatttgtcgacat

SEQ ID NO: 71849 - DNA, 427 bp, Oryza sativa
  unsure (1)..(427): unsure at all n locations
agcttgccaacttgacagataccantcatctgagaaatctggaaggtaaatgcagttagaaaacacggagttctcattgtttacctggtagtgaatgttcctaagtcctaaaccttattattatgtttggcaagcgtagatggctatggtcccgcctcattacccaaccttctacctattctccggtgcaggggctgtatatgtatggaggtgttggtactgggaagacaatgcttatggacttgttctatgagcaattgtaagtacctcaacctanaatctgtaggctnntgtggtgcatccttgagaagtngagaactcgagatnaaacagttatgtttcatagtgcagataatagataaaactcgtccatagattgcttgcttattagtaattcatcagtgtgcaagtatgtgtaatgctcttc

SEQ ID NO: 71850 - DNA, 185 bp, Oryza sativa
tttttttttttaaggagagaggggagatggggttatatggtgtaaaaaaatattgtggaaatattgaggtagatgtataaagggaaaatatatgggaaagaattgaaggaaaataataggagataatatggaaaaataatggataaaagtggtggaaaagtggttgagttgagattattggtagg

SEQ ID NO: 71851 - DNA, 244 bp, Oryza sativa
gacccgggacctgagaggacctgctgtttgcactgggttttttgatgagctactacataacgcggtcctcactgcccttccatcggaaccagcagccactgcttatgaagggcaacgcgacccttgttgcgccgccgcgacctttttttttgaagctttctcgaatgccccctcatccttattccctataccggcatatccaagttgaggttctttactcgcctacaaataccacactggccta

SEQ ID NO: 71852 - DNA, 371 bp, Oryza sativa
  unsure (1)..(371): unsure at all n locations
tgcacctttgtatgtgggtccttttcgtatccttgctcggcgccgagaggtcacttaccaactggagctgcccgccttcttgggcaacgtgcatgatgtgttccatgtgtcgcaacttaagaaatgtcttctagtgccatccgagcaggccgactcagagcaaattgaagttcgcgaagatttgacctacgtggagaggccagtgaaaatcctggacaccatggagcgctggaccatgaaccgggttatccgtttttgcaaggtccagtggagcaaccacgctgaagaagaagctacctgngagcgtgaagacgagctgaaagcagtccatcccgatctcttcgccagttcttacgaatctcngggtcgag

SEQ ID NO: 71853 - DNA, 407 bp, Oryza sativa
  unsure (1)..(407): unsure at all n locations
agcttaataaattcgtctcgcagtttacgtgtgaaatctgtaatttgttttgttattaaactatgttaatacttccaatggattgtcatattttccgaggtgaccccccaaggttaattttttttttgccacctaaacagggccttaattttggagcaaacacaaaaccttattctggctgccccagaacccaggaatctgcatacggcaatggcgagagtgatgtgagcttccgctattacaaatcaacattgacttctactccaacattgctttcggacccgtttggtagagctccaactctaaaatttaactccagaanttggatttggggtgatgttgtgaaatagcctaacatagctccacctctttagttattttgtgagagcgctntatccggctatact

SEQ ID NO: 71854 - DNA, 383 bp, Oryza sativa
  unsure (1)..(383): unsure at all n locations
ctgctttacgtgccttaaatctcagcttttcctggtaaatgagttcgtgccagattcatatggttgacttatcgctgcactactgaccattcagcccgggtgctacttggggagctttcggtagtagttcctcacagaataaaaactcctccaacaattcggtgtttcttttagattctgagaagctgtagttgtagaaataaaaaaaactactacttccgtttaggttataagactttctactattgctcatattcgtatagatgttaatgagattagacacatatnnttttttatatctagaatcattaacatttatatgaatatgggtaatgctagaaagtcatattacctgaaacggaggtagtagaagtcacgaactg

SEQ ID NO: 71855 - DNA, 368 bp, Oryza sativa
  unsure (1)..(368): unsure at all n locations
ctttaattataatatagctaaatgtcaaataataaagtgggaaactctntacacgtacgtgtgggtgtatccagctcaagaaaacaagagtttattgttgctgccaaaaatatacttattatgggacacgttcacacaatatataccgtttaaaactactttnttttattgccgctacaaaaaatgcaatatgggacgtgttcacacaatatatatatatatatataccacttaatttgttactcccttggatatatagataaaanttggtttcttataaaggatggaggaagtatcaagtgttcgctagaccatagtatagacggtctataccgtgtctagacattataccatgggttatcgtccag

SEQ ID NO: 71856 - DNA, 312 bp, Oryza sativa
attggcgatcgtacaccttgtaccgaaaattctggaacctggtgatatgattgaagccgatggttcagatccaagtgttgcttcacaagaacccaagccaccatcacgtctgttgctacgctgcggccggcgtgattgagcgcttcggtcatataacccaacacggtttacatacccagaagttggtgtcactcattacccgaccccacggagctctcattcgtgcaacctgagagcacactgttcgtgtactgacgaaccaccatattctgagctagtaatgaaggctcttgctcctcatcctctggctct

SEQ ID NO: 71857 - DNA, 220 bp, Oryza sativa
gtgttaaagaaaatttttttttttaaacaaggaggttttgtaaaagtgatttaccacgcttagtgttaacaaataaaacttagctgtgaatagttgtcaaagataaggatgcacaataacgaaacaatgcgctgaaaagaaaaaaaaaggatggaggtttgtgtttatttatgtgcgatgaagaactttagattgtataaacgttttttttttttaattg

SEQ ID NO: 71858 - DNA, 295 bp, Oryza sativa
tgatgcctaattattgtattttatccaattgtgtataaccaaacaaagtcacattctatgctattattggaattgcattaaaaaaaagataagttagcattatctttgaggacttggagggaaaaacatattgtcatgtgaataatggataacaatgtaatgcgtgataatgagctccaccgaagtgaatggatgagtatccatgtatccattcgatggataagtagctctttgatcccacgactaataaccctatactaatgcgatatgatgacttgacattgctgattatatg

SEQ ID NO: 71859 - DNA, 426 bp, Oryza sativa
  unsure (1)..(426): unsure at all n locations
gatcctctaagtcactgctgcatgcagcttggttctctctttcccctcctatctcttttnctcaaatttacttgaattggagctattttcacgcttttttaaatcaaggagaaattactccccattcccttattttttaaaattggtggaattaaattgcatctacagtatatagacttggtacgtgggtgcgatctaattaaaaaccttgaaaaaatgagcatatatgtgcaacaactgggctagtgcgtgcatattgattaaaaatctatattccacaccatactttttatgccatataaaaaaagtagccacctatggcatctcgacaaggatctacatgttgtattatgtattccttttaatattgtagttataataataaaataatctatcgatatgacctgatagttgtatacccggttc

SEQ ID NO: 71860 - DNA, 244 bp, Oryza sativa
  unsure (1)..(244): unsure at all n locations
aatgtgaaggcgatcaccacgaggggaggaaaatccacttgggatccgctatacccctaccatgtagggaccaagcaagccactgatgaagcatagtcttctgatacgactgaaatagaagaggtggcacagctctacaagaccatgccgtangagtgctgcgacaccttgctattgccttttcctcataggcagaagaagccctccatggacgagcaatatgctcgtttcatggatgtcatct

SEQ ID NO: 71861 - DNA, 352 bp, Oryza sativa
  unsure (1)..(352): unsure at all n locations
acacaattgcnacaccaattacagtggcgtggtacactgatgacgtggtatgtataacacaatgtggcagtactgccacgccaatatacatgttgcgtggcaaagttaataagcaacgccagctagcttggtggtggcaaaaagttcacattttaaaataaaattttagatgggttagtattaatatattatattaaaaaggtataaaatattaaaaaattcctcagggtcacagacacactgacttttacataacatcctttgggcgtgcttcctccctttcatattataagatgttttgactttttttcctagtacatctttaaggtttaccaaggttctttactattat

SEQ ID NO: 71862 - DNA, 364 bp, Oryza sativa
agcttgctatataaccttcaataagctggggtagtggtcatatagtttggtctttctttcatgcgctctcccaaaatgtagtgagtgggaggagtagatgtttatagggtgctagcattgtctactgtctcgctggtctgtgcatggtgtagccttcgtgtcagctccatcttcccttgccctcctgccttgttagactcgaatgatgtgtatgtgtagattgctgattgttacacaaatactcttgttatacagaattttttagaggtgttatacatatatcagaagtaaatattagtttcgcgttgcttaaggtgataactatagtaatactctattccttttgatgtctgttgatttatat

SEQ ID NO: 71863 - DNA, 408 bp, Oryza sativa
  unsure (1)..(408): unsure at all n locations
agcttcctatttttctgctangttaccctgcttgttagattgacctcaagtttgtatatttcttccgtgctgatatattggtataacgtggtatccgagtactaaccgatacacgttaagtttgcttcatcgtctatgctgcgagcgtacataatcccaactttgaggcacatttagatattgagtgaattatattgtctcggcgtaacatccgatctatcccaatcattcggtctaagtgcgttccattggacggattacgtatcgttaacatctacagccgatcgagtagacctaataatctctaagttttatctgcctttgccgatctaatgtgagttatatcggctaggcttcggacgatacgttgtcggcaatccagccaatcggctaccgatgatggattta

SEQ ID NO: 71864 - DNA, 390 bp, Oryza sativa
  unsure (1)..(390): unsure at all n locations
ctttctgatcaccggcctgtgactgcagtcttcatggcagatgttgaggttctctgccacagaaaggtgcaaaaagcattaacatttactgatgcagaggttgagtatcatctggtaacggaagaagatagaacttgagtgaaaatatatatatttgattgtgcaggcaagttcttcagctgaaagtcgctgaataacctgcctgattgtgctgttcacaattgtaaaaaaaaaaggagttagtactatgtaaatgcatagctggatgatttactatagctatanngtttcttctgnaaagtgtatagcgttctctttttttgatcataagtgtatagcgttcttggttcttttgaaaactgtaaatgattaccacacgggtgtacccct

SEQ ID NO: 71865 - DNA, 411 bp, Oryza sativa
  unsure (1)..(411): unsure at all n locations
agcttgaggctgcttctgaagaataatcttgttgttcaaatgttcttcccaagctcgaccttcttaaccagccgcaaggtgttgtggaagatggaatccagtattccagcaacctagaattcgcatgtcatttcattagccatgtacacttgatggattcagagaaaaggaaaagataaaaaaagggtgtgtgctctcaccgtgaaaactcctccaatgatagcacaaacatttgtgatgaaatgggagaaggaatttggaagttcagttaccaagaccttggaagtgatgataaaataagaattagttnttctttcagttatgaaccaaacgaagaaaaggtgagatgccaacctgcatgggagaagggtcataatggaatntcacaacaggaacatagaagctgtgcac

SEQ ID NO: 71866 - DNA, 186 bp, Oryza sativa
actcagccaccattcccatctctctcctgcttttttgactcgcttcacccttgtctaacattttttgatgacacccttattaccaacagaggacacgcaaacctggcgagggatggtcttcacacccctttctctttcacgttagcaatctatctacgtggatggataataccacacgtcatatgt

SEQ ID NO: 71867 - DNA, 289 bp, Oryza sativa
  unsure (1)..(289): unsure at all n locations
ngacaacaactatactcccaggattactcctcaacaatttctattgatagtcaacaattctggagtattcatcccttctagactcatatatcttcttcaagacatatgcttttgctctcttgcactaagatgcactgacatttgcaaacatttgctcagagacacgtgactgcatgctctgaatactccaagttgggttatctatgatcgtcttctcatatttctgagcaattctcttgtatgtgaccaggttgttatccctccttggaagacaattgtgctcattaac

SEQ ID NO: 71868 - DNA, 389 bp, Oryza sativa
  unsure (1)..(389): unsure at all n locations
agctttgagcttatttaagattaacgaggcaagttggcccattaaggtaatgaaccgagctagcacattacccacccctacacctaaccttgaaccaaacagcctataaaaactgagctcccccatcctacgaaccaagcacacctaaagttaaatattgaatgatgaaaacatgactagagtacaaaggtagcacatattgcttcaaaagcagtcatcgaactcaaacaatgcatacaagaatccaaaaaggcaaacaatggttgtgaccataatcgcaattaaagcaagtgttatggacatcaatggaggatgtcctttgttctaccaacatggcttaagaagactagacaacanagagagaatataacaatttggtaaacaaactt

SEQ ID NO: 71869 - DNA, 313 bp, Oryza sativa
catgcttcttataacctcagatgtcaagtccaatctgtcatctttgctttcataaattctgcgtgcaatcttttcctggatcttgttaaacgaatattgccaagcttattattgcttgttgtgctattcccagctaagaacccagaccaagatttttcaaaaatataacatgcttgtgttatctgtgtaggcatcatgaagaccatgttcacataccatgcaacattaacaaatcctctcgatgtcaacactcacataagtaattatctcccctgaaggatgtttctgccttgactggcttgataaataaaag

SEQ ID NO: 71870 - DNA, 215 bp, Oryza sativa
  unsure (1)..(215): unsure at all n locations
tggaatgctttgttacctggcgaccgggggtcaccgcgaggctggttctcggcgtcnaggccgtggtggtggctcctctcctctctcgcgagacggggttaaaaaaggccatgagagatacgcatgggggaggatgatgatgccccttgcccacattctgcttcttgctccgctccacagtcctgaacctccgctggtggggtgctgctctgctt

SEQ ID NO: 71871 - DNA, 357 bp, Oryza sativa
  unsure (1)..(357): unsure at all n locations
cagcctgccaccttgctggcgcgaacctcgccagtaccttcaaatgttcaagatatttcgatacaaaagccagttataggtttctttatggacaaacanaatgttcctttaccattctattcaaactgtcgtctgtcacagggtcaccacagtacagtgagaaattggagtagttgttgatcttacaggccaacagaagagccagggttgtgaagttctcattccgtccataatcaaccacagaatgattagtccataagcttgccgagcaaacaacattccaatntccaagtgaccattgaattgagaacagttgaacaacgatcattattcataacaagatctatgctctaagct

SEQ ID NO: 71872 - DNA, 69 bp, Oryza sativa
atcgccatggagcgataaatcttggcgcgatcacgcggctggaaacccggcgtacccaactatccctgc

SEQ ID NO: 71873 - DNA, 280 bp, Oryza sativa
agcttataatgatgaacttgaattgatccatgacaagccattcgattagaccacaatgcttcggccaaccgggtatgccattgccgaggataatcagaaatctcccatttaattaatttgatcaagctcttgttagatgcctcggcctgcccattagcttgtgcataatatggagaagaattcaacaaattgatacacacactctcgtgcaactaaacaaacttatcggacatgaagatcgaaccttgatcagttgtaatagtttgaggaataccaaatc

SEQ ID NO: 71874 - DNA, 240 bp, Oryza sativa
ggatcttaagcaccgagtttttcttgcctaagtcaacaacctcttacccgcggttcccagaactaccacagactaacgaaactccgctgcaggccgtcgaacctcccttcgtaacagcctgtcattaccaggggaatgtgtcctctcagtcctctccaaaatcagtttgacaatattactgtgcgagtctaccgctgcacccaggttgcgcgtgcgttaataatctgccacaactcccaa

SEQ ID NO: 71875 - DNA, 334 bp, Oryza sativa
  unsure (1)..(334): unsure at all n locations
atcttttgtttgaaatgattttggaatcactaaatgatntatttctttctatgtttgggcgaaaagagacttgtgtcttgattgaactttaagagatgctttttaacaggtcatttagtaatgtattgacctccctggtcagatcattactgttcggctaccagagccattctacttgattagtcgggtttcatagcctttgttattttctcggactaccagagtccatgtgcccagcaacacaacaatacgatttcactcgggaagcctagtctatgatgcctgcagacatgccgaatgacacagattcgtttgtgagcacttatggtcgtca

SEQ ID NO: 71876 - DNA, 213 bp, Oryza sativa
atctcgatagaccaagttgttgactaccatggttccgatctcgtccggagacatacttcggtcgggttggatgttcccacagcgaaatcctcgagtagcttgttgtcggagagtccatcttttgaacccatctcgtcgaaatcctagagcacccaaatcccgctacctggcgcgccactgtcgacgtttgatgtcgcgactaccgtatttgga

SEQ ID NO: 71877 - DNA, 239 bp, Oryza sativa
tataatgtgcccgattgatataacaacaacccgccaccgttgtccgatcattggccgtgtccgatatctatgtcacactccacatactccaccgcaccattctctcgagtgatcccactattcactattttggtgggacgattgacgggatgaattatcgagtcttttctcaagacaaactataaattcataaaaggaactgcaaaatactcatcgcgtatcattgaactagttatact

SEQ ID NO: 71878 - DNA, 281 bp, Oryza sativa
  unsure (1)..(281): unsure at all n locations
tcggacccgggatccttaagtcgactgcagcatgcagcttttatattgcttgttgcctgcaatctttgtcgaaatattctgaacactaggactattcttttgagtggatcgaaagaacttgtgctcgattccacctacaaatgctttcaacaagcaaatggtatgaccgacctccgggtcaatcattacttatcggctcccagagccatttcactngattaagcgggttccagagcctttntcattatctccgaactccagaggccagctggccagccaca

SEQ ID NO: 71879 - DNA, 350 bp, Oryza sativa
  unsure (1)..(350): unsure at all n locations
tcatttgttgcgctagatgcaaaacagcactnggattactttatgatggctttcttgtntcatgctcatgcgctttgtcctcaaaatattacttgacatatctttggagacatggaccatcagcagatatccttccaggaaaagatattttgcatcaccacccttgaagaataaagtgatggtgtgcaatgtatcttcagtgaacaagatgatgcttggcaacttgagcaatgaaggttctgctcataattctagtctttggtctgaaaaggatggatgtgtgtacaagccagtaacttgtcagacttgctcttgcacaaacgcctgtgtcacaaccctctgagcacaaa

SEQ ID NO: 71880 - DNA, 403 bp, Oryza sativa
  unsure (1)..(403): unsure at all n locations
agcttatttaagttatatttctagatntgtatataccacaagctgcatgaagtgcatgctntgattattattaaaatttgaatgcttcatgagccaaagtagaccaccatatgcgagaaacgagaaaaaaaaactcatctttttagaagcgacttgtgcttcacacatatgccacagttgtctgacacaagcccaacatactcgttgggggataactaattacatggtaattatctaggatggactggattgggttcaatgcctcccagaccatttaattattcataatgcaacagaatatgtatagatatcatcaacataacccggccatagctaatcaaatggtntgataggcataggacctactgtcagctctaacgagtactgacttagctaggttcta

SEQ ID NO: 71881 - DNA, 302 bp, Oryza sativa
  unsure (1)..(302): unsure at all n locations
tgtggcatggtccacaagctgtgtgatcgcagcgttatttctacctttttttgcgcatagcctgatggaactcaccagagagattattaaaactgatttccaaaaactctagattcactatagtgccaagttcttgaggaataaatccaaaaagttggttagatacaagaattatggaataaagtttattcaaattccctaaactgttcnggatggaacctgtgagattggtatcagcaagtgataagttatttatgttcaccacgttacctatttgtttaggaatgtgtctagaaacgtta

SEQ ID NO: 71882 - DNA, 364 bp, Oryza sativa
agctttttgaggcatgttttcacgtttgtgtattcagtacatccatttttcttcatctccagctcaaggcatctgtacttgacaaattggagataaactataggaaattatattgtagtcccatgtaatgtcagatgcacaagcacatcgtgttcataatagaggagagctcacaatacattttattcctctaaggctttgaaaactcaatgatatgcttttttcgggccaaaaatggatggcataagggcattgccagaatccttcctgctattaaaatagtcaggcgtaccaatatatgcaacgataatttgtaacctatgttgcttcacccatggagaattatggcaatggttattcactt

SEQ ID NO: 71883 - DNA, 101 bp, Oryza sativa
ctaagctctagatggagagaaagttcttatattcaaatctttcttaatgaatcacttacataatcgggtagggtggaaaaaaagctcgggctcgtgagctc

SEQ ID NO: 71884 - DNA, 316 bp, Oryza sativa
  unsure (1)..(316): unsure at all n locations
agcttgtatttttctcttctcgagtaaaggatgaaaggaaacaaagacttggttattgatcacgagctgttgcaatgctgtatatctaaaatgtacaaaatgcatagtatgggtacccttaccagaatcaagtcagccagcacggtggcttaaccatacgcctaaactgtgaggcatcatgcttcaccttgtcttgggtgtttgagagacagaacggttagtaaagcactactcacccattccttgtctaacttttattcaggagatnttctcaaatgatttgtgcaaataaaaaaaccagttgctcaaatgattc

SEQ ID NO: 71885 - DNA, 117 bp, Oryza sativa
agcttgctttaataccttagttcccgtgacttgctgagtacgaaagtactcacccttgctctatataaatatatatatatagttcctccgccctgaagagaagacaaagtgaagtga

SEQ ID NO: 71886 - DNA, 254 bp, Oryza sativa
gcatttggtgggttacaagaggcgcagtataagagcgcgctggctcagttcctcggcgggcgggacctgcgactgttacgccgggcatctggcgacaagtcggcggacttctccggcggcaaagcggccccacggcgtcttcatccacggaggttagatgatcatgatcctcactaaccctctactccaccacacatgcggtatgtcctcgcactgccagaatggccgaacaactgattatgagacacgtgttg

SEQ ID NO: 71887 - DNA, 296 bp, Oryza sativa
cggatcttaagtcactgagcatgctttgtttacctgcactcatcggctagtagaagcatctaataagcataacacaaaaaggctaccttgtgcacgctcatagtgaggtatgttcccatgtcaaggcttggaggcctaaaatgatctgaaaaaagaaaagcttgaaaaatcaacactgtcaacctagagacaaagaataccatgtatttaatacttctattaaacacacaaaataattatgacagcctatctccaataagtcgcttttaccaaccgaattatcttcaccatctagc

SEQ ID NO: 71888 - DNA, 338 bp, Oryza sativa
actcaattgcccaaagcagtctcatcactagaatgggctatatcggaaggcaaagggcgggtatatgtccattgcactgctggacttgggagagcacctgcagttgccattgcttacattgtttggttcgagaatatggatgtaggtttcatcttcttgaaatcttaacttgtcagggttataagccaggccacattcttatcatttatgctttgcttgcagcttaggacagcttatgagaagctaacttccaaaaggccctgcggacccaataagagagcgatccgtgctgcaacttatgatctttgctagaatgatccacataaagaagtctttga

SEQ ID NO: 71889 - DNA, 190 bp, Oryza sativa
tcaactcatggctttattcatttactccccaatgctgagaacaattaataatcgcacccccattcccacctatcaacaactcattcgtactttcccatcgtcaccactccaccgagccaactgatcttctcttcttcactacaactatgccgcatagtcacccaaccgataaaaacactactcgtctacc

SEQ ID NO: 71890 - DNA, 463 bp, Oryza sativa
  unsure (1)..(463): unsure at all n locations
ctaagcttgacaaacacagaaaagntgctggaacggtgataggaaatgttaatgtgccttanccccacagaagcttgatcttggtaaggcgccagtagctcctccaaagccttcagccaaattcacattgggcatgccattggtcaaagacgatgccttgttcaagatgggccctgcatgcaaggagttgcacgggtactacatggagaagtccaacgcgaggaagaagaatagagagacctccatgttgggccagcacgatgggtagccgttcctcgggcctactgccttcatcgccgtagacttcaaagatcaatgggacctctacagggtgcgagcgatcgacaccaaccttcttaagtgctactccttgtagtatttcttggtaagtgataatggatgactgtcacaaattaccttacctgactcttgcttgctcgaagttacctgaagcatgccatat

SEQ ID NO: 71891 - DNA, 191 bp, Oryza sativa
accggtgttcatatttacgactaattattttttcagccgtagatgatgtaccgatcgattacgagatattttgggtaactttattaaattcaagatatgttgggtgagttatattgtgtttcttcaacaacaaataaatatgttgatgagttgaaaaatataactgcgtggagataagagagagtcagaaa

SEQ ID NO: 71892 - DNA, 460 bp, Oryza sativa
  unsure (1)..(460): unsure at all n locations
tggggcgactaatatcagcatcagttccgtgacctaagcgcttctcctatttctcaccccacgtaaacacctctccttgcctggtagtaagagctacatgtctcgtaccacatgctatctgattaacatctaacacgacatcagattcttaaggtttggggatcaaaacatctacttttgaacatgaagagcttgtgtgcccatctgatggggttacatcagtccatacttcaccccagacataaacatcaccaagggattctatgtcatctgttccagaaccttgactgtaagaactaagggcactagaaatactaacccggctactgtctgcagcactttgtcttatcatatntagacgatcaaatcccacatctgattntctgaaactaaatgaattggtccacagtaaccagctgagttaaactgcgtgaaatattgaagcatatctagtgttaat

SEQ ID NO: 71893 - DNA, 292 bp, Oryza sativa
  unsure (1)..(292): unsure at all n locations
ttcttttttctctgaaagntctagntggctctgtagtgtatccaaattaaagatccagcattttcctcttgccattttctttaatactgtcggtgtgtttttttcttaatgcaatacatatcaataaatgtcaaataagaaaacacgttcctgaaccaacatcaagctactcatcagctacttacaagtgtctttctttgcagccttctctctcttgaaacgaatgaaagcatataccgacagtctctacctcaacacaaacgatacaagcgactcctgcacagatccctgt

SEQ ID NO: 71894 - DNA, 439 bp, Oryza sativa
tgaacagcataacatgatcacacaagctacttatgcatatgttatctatacaaaagatcaaactagcataagagttatacatgcatagcatagtgatgaccaagagataacaagccaagctcaattgaagagtgtgtaatacaatgcataaagtgaacatgatgcaatatgttacaaatgcatgtgaaagaaaaacaactccccctcaaatcaagccataggggtggatcacccctaactcactccgcaagaactcaaaatgagagcgatcaagtggttttggtaaaatgtctgccaattgattttcagattcaacaaactctagcacaatggtacctttctcaacattgtctcggagaaagaggtactgtatctcaatgtgcctgggcctagagtgttgacctggaatatttgcaatattgattggcacttgtttatc

SEQ ID NO: 71895 - DNA, 372 bp, Oryza sativa
  unsure (1)..(372): unsure at all n locations
gcttattttattggcacctttggtcagggcgtatcactacaggagcatgaaaggatgaaaagacaaagataacggaattatgtgtaaaggttgcatggatatttattttgcaaaaggaattcaattagttagtgtggtggtctcaatattttgctgtccaaataataatattttcacaacccggtatcagattctaacacccaccttagataatactcccttcgctccataatggatgttctagttntgttctaagtcaaacttatctaattntaattaactntataataaaacataacaacattnntcagtactaaattagtttattaaatcaacacttttatatatatntttaaaagacatatgtttcgt

SEQ ID NO: 71896 - DNA, 289 bp, Oryza sativa
tactaagctagggatacgggctgtaatctgtttagggaaggactcatctgtgatggagactcagcacaaaacatatgtgacgagctcacatatagacccgttacagatgatctcttgtatgttacaagtgttgagtttacacccgtcacggatgaagtactcatctgtgatgagagtattttttaacacgttagtaatgacctataaaatcaaataaaacaactcccctcccttaatgagtctctctctccctccccgactcgaacttaatccctctttctccattccc

SEQ ID NO: 71897 - DNA, 102 bp, Oryza sativa
ctaacaaaaatagattaattagccaattaagtacgtgacactcgagctccatcatcacaagcctaggtagctactgcaactaattaactttcgtgtgtcaaa

SEQ ID NO: 71898 - DNA, 374 bp, Oryza sativa
  unsure (1)..(374): unsure at all n locations
ttgctaatgtattggtagtactagtgaaaantttaactatgaactattacctcatgatagcattgtaagacaatccttatgccgtggtaaagattcttcttaactttgcccttgaaaagaaaaagggaacaaaggaggcgtggttcacttgagacagcatcaatcagtgttgtaaatatcctttgacagccaaagcatctcaatgacaatcaagcccatgttgaccacgcgacagctcgcacgtgcaaaaggtaggaggaataaccgtgcatgctctccctccaatgcaaaagtcacctctgcctaatttacctttccttcatagctacaagttaccggcttactctcancttctaccatcagtcacaaaacct

SEQ ID NO: 71899 - DNA, 397 bp, Oryza sativa
agcttgttatcatcttctctgaagccggcatcccctgcagcccgtgactcatggcattgtgagtttgtgacactggactactgtgtatttgtgacaaaatcgggacaccaatatatgctgtgtatgtactgtatatgtgcaagctttgtgactttgtgtatcccaaaataaaatgctgcctggtttgtatgatacttaacatggtgatgtctgatgtaacttgtaagtgtggttgaggcagctggtgtggttgggtttgtggtcaattactcagttcacgtgtggtttgagcatgtgaagtatgtagatatgcttatctgaaattctaagcagagctgcctgattgcctgtatagcctgacagagcagctatctgctgtaattggactactactact

SEQ ID NO: 71900 - DNA, 474 bp, Oryza sativa
  unsure (1)..(474): unsure at all n locations
cagcttaatgtgtttctcttgctgtcatccctcattctgtccaatgactcataagccgtattgcctacttccacacgaagagtggggaactgcttcagctcctgcagagaactcactcacatcttttaggacgcttacacaattacaagtggagtaatgacatattgacaagcatgcaaattaattatcatgctgcttctcatcttaagtcgagcaaaaaagatccaggttcagattttattagaaagacaaaatattgaaacaacagaaggcaaaaatttcaacagtattaattgattacctnctaaactcctagtacaatcagtatacctcatgtaccatcagaatgcacatattccncagtataaggtacatgaaacattgtgcaacagtgcgaagacttacatgtgcttcattgattgccttgtgcactaattccttgagtatcgcattgacctgtcagtacacaaacat

SEQ ID NO: 71901 - DNA, 286 bp, Oryza sativa
  unsure (1)..(286): unsure at all n locations
agcttactttattttattattntccttaacccgatatagcaagaattcgacaactaacgacttgacaactctcatcggctaatctcaggacttctaagccgatgctgactctaagccgatgactactccgggcttaccacatgtcactattaacacatgccctccactttagaagtatgagaactcatgcttcanaattatcttctttctctatcttgtaatcggctntcatgagccgatactgatgtactccaccatgctgaaactgatatgctttgcccccgag

SEQ ID NO: 71902 - DNA, 314 bp, Oryza sativa
  unsure (1)..(314): unsure at all n locations
cgcgccggtcatgttgcctccaccacccacttgttagctcaatataacttactctccctcctatcctctttggcgggaaagagagaaaaacggaaagctattaagagagatccatcggttcgatggcgagagacgtcttctaagccgcggctgcagccgattgtcgtcatcatcacaaagcggttgtttccgcngaccgcggccgcagccgcagcgccgggacagcggcgcttgtgtgggactgcagcaacgcgctctactactcgtacgagctcaccttcttccgccgccagctcgacgcccgcgtgctctcc

SEQ ID NO: 71903 - DNA, 360 bp, Oryza sativa
  unsure (1)..(360): unsure at all n locations
agcttcattacgtgttcttttatatattgattttagggtctttcgtcaatttatagctttctttgntactcaccaaatggcaatggctatgttccgatttcttggtgctattttgaaaacaatggttgtggccaatacttttgggatgtttgtgctgcttattgtcttcatttttggaggatttctcatatctagaagtaagtatgttcccatgtaaatatatntatatntcctaggaataagcaatgaagaatcaatattggccatttaatatttatggatgatactaatgtccttgatttggcacgttcagatgacatcaagccatggtggatntggggttactgggcatctcctatg

SEQ ID NO: 71904 - DNA, 291 bp, Oryza sativa
  unsure (1)..(291): unsure at all n locations
tcgatatccaaattctcactttcgtgtcatgggtgagtatgagatgggcaaactgagtacgaaaaccagcttatgattttgagagattctatgagattgaatcacaactttgagattatgcagggaacctagtgcaaaatcaggtcttctacggtatgcgctttgtcctgtgaaatgtttaatggcatctctctgaagagagtgagttcttaacaagtcgtaaaatccaactgggactgtgggaagctgggtntacttacactagagggatcatgatttgttaatgtgttg

SEQ ID NO: 71905 - DNA, 354 bp, Oryza sativa
  unsure (1)..(354): unsure at all n locations
atcttntctctattttccaccgttaattgcgaggttgggcttgagcttattggagcattgaaaacatgacgggtcattaacacagtagtaatcaactagatgattccccgcgctttactacggaaattactaagtaattttcaatatatantttcttgttacaatcaagctaggggtaaaaagaaaatacatgaaataacagagcttattaatatttatcttgaaacaaacaaataaaacccgctttaatatggaacatattgataagttaatttaatttaaatattataaanatgatagatagatntataaaaatgttgtggaaatgatgtaagggagtgataattggatatg

SEQ ID NO: 71906 - DNA, 352 bp, Oryza sativa
  unsure (1)..(352): unsure at all n locations
tcagtggacccgaccgcttncgttcaaaggctattacangggtactcccggcgacccaagcagtctatatatgtggttccatggacagtctgatacctactggagcctttctgccttcagcagccgaaggcaacaaagcggagcatgctgagaacagttgtcagcatatcggaggccgtccgttttcgggagcttctgacgcggatcgtcatgggttttgcagctggactctatggtcccactctgcagccatgggtgatgctctggccatccctggtgcccaatacgcccacgcctcgcatcttcaccactggcttcgacgacgaccacttcaagaactgggacgtgtact

SEQ ID NO: 71907 - DNA, 403 bp, Oryza sativa
  unsure (1)..(403): unsure at all n locations
agtcttttcttcatccggatgggtcctgatctattctgcagggctggtgattgtgcatgaccacctgttgacaatgcaaagcgggggtcacgcgctccttcgatcctgccagagctgtattccatggtaataactggtagggggttccggttgtcaaaaaacccagaatgatttgagcttctattccaccagctaccactaccgctgtcaagggccagggccccatggtagtcatcgtactggtcacacgatgagtccctgtggctgtaagaatcatcgcaagccgcctccgcattcattgtaataagcttcagtgcctgcactacttcacccatgaatggcctctgtgacngatcattgtgaacacacatggaagcgatggatgctactctagctacatcat

SEQ ID NO: 71908 - DNA, 424 bp, Oryza sativa
  unsure (1)..(424): unsure at all n locations
ctctactggccacacgggtgtgaggtggggttcatgtgaaactatgcataatcagaggtctgtcagtaactgaaaaagtagattaaaatattgaaaagtaatacatgcaaatttatggatagaagagctaatagctcattactgtgtatgttatctttactagttaattgtattgctgatgtggatgtttttggagccaaccgtagactatactattgaccttgctcttatgatcagttnttgtttgactcgaaccttatgcaatttcaaacttaagtgacactatagtattgacttatctgcttagtatagctagttgttattccttcacaatccctcatcactaccacgagaagatggcacttcatgatgaactaactatcttaaatgcatccttttatccttgtgattcctactactttat

SEQ ID NO: 71909 - DNA, 309 bp, Oryza sativa
  unsure (1)..(309): unsure at all n locations
tttataagttggtagaataaagtatagntgcatgaaaaatttgacaatgatctggtggaaaagttctagattgcaaaaaaatgctaagaatataagtataaattgagatccttgtaccattcaatgggagcctacagctcaaatttaaaatcgtgtagggtttgaccataccaaagataatgtatattttaaatatatataggtagaaaacttttctaacagtgaaaacacttaattttgtacataagtttagtgccatgcaaagataacaaaacttatattccctgtaatcataaatatttaatgtta

SEQ ID NO: 71910 - DNA, 380 bp, Oryza sativa
  unsure (1)..(380): unsure at all n locations
tgcgtaatcacacaattggggttgctatgacaaaagtcacaatcctcacaaaggcattcctcataatcagcattaccacttgtacaactataccaatccccagatcgatcgtgtactctgacaaatgcatccactattaacggcataacctcaaagacaggagtccggtgcccataattntctagccgcaatgaaatgagattatgggcagaaatacgagtgcgggatatttggctgaaagtgcaatgtctgatattgaggcatttcatggactgtgaagtgatcttcttggcatctgacaagtcacagaagaagatatctagatgttccagcaccggacagcatgagaaatcgggaaaactgtgcatcatatggacacc

SEQ ID NO: 71911 - DNA, 377 bp, Oryza sativa
agcttgtcttgtggcatagcttctctacagatccatcttgtggcccatctacaggccgtagcttaatttcatagatctttggccacaattttccggtcactgcaagccattgaataggattagccactgccccatgatcagaagaaccttagatggcttcactaggatgaaaccagcgcattagaatgctaaaagctcaccaaataatctttgattttcttcatcccaagctataccatttagaacatcgatttcctggaacatggaatagattcattaatgtcataatgctatgtcttcctgctaagctacaatatgattttgaacatcatgaagctcactggacccaacaatgatcaagaagaagtttaaaaagt

SEQ ID NO: 71912 - DNA, 375 bp, Oryza sativa
tgtcgttcgccttgtgaacgaccatcgggttctccagccactcctgatggatgacctcgcggatgaatccggcctccagaagtcgcgccaccttctcgcggatgaaagcttgacgttcccgggcctggcgccgcactttctgccggaccggccttgcgcccggccgcacggcgagacggtgctcaatcacctccctggggaccccgggcatatccgccggtctccatgcgaagacgtcagcgtttgcccgcatgaaagagacgagcgcgtcttcctatttgctcgtcagaagaccaccgatccgtgtggtcttggacgggccgtcgcccagtgcaaccttcttgaccgggacctcgtcgcatgtgactattcact

SEQ ID NO: 71913 - DNA, 326 bp, Oryza sativa
ttctttattatgttgagaatggaagcattaatcagtcgatttcctgaaattgcctttaaggcttcaagtttttgtctagttgtgttttttgagaaaaaaatttgattagctcttagtatctttctgcttgtatttaccagaatttctgcctttggttagctggtttgtacttcgtatcgcgccttcattgaagttcctcagtagcgcattgttatttctatgttttaggtcttctctgatttgcttcctttagcaagaatgtaatattcttccctgagacttttctcagtactcttcatgctagaaatgagtgtgtagaacatcca

SEQ ID NO: 71914 - DNA, 462 bp, Oryza sativa
  unsure (1)..(462): unsure at all n locations
tactctatataaaaccttcataanaattggtttgatctattaatagggataataatcccgaactgggttacgtttgtaatttcttactgttcatttatgctcagtggcttgttatatattctcagatgattgaggatgtcacgcgagggacttgatcgacaatccaaggtgattgagtgtttaactgcacgtacaacctccatccaaaaaaactaaatcctaacaatgaactcggacacatatccaggttcaagtagtatacggctatgaaaggctatgtagctactcctggcagtagaaaatatgcatgattgcaaccttaatcagcaacagctagctttgttcttgagccatcagaangttcagaaatcagtcagtcactcagtctgagtgaagggtaactcacaaatgactctgttagttcctanacttttcttcaaatttcaacttttcatcgcatca

SEQ ID NO: 71915 - DNA, 267 bp, Oryza sativa
caattcagctcgacccgggatctctgagtcacctgcagcatgcagcttgttatattagtttgttgattgcctcgttcccatgcacaggaaaaataaaaagaggttggagtggattgtttgttttcctgtggaatggatggccaaggaaattatccttcgaatatcctctgattttcctacaggggattcctttgatccgaatgctgctacagtacccgaatccataagaatgcagatcctatgtttttcctgagtttaccctccgat

SEQ ID NO: 71916 - DNA, 418 bp, Oryza sativa
atgggcctatagaatgatctcttgagaattggaaaccgtgcagctcgtatgcttcacgttcgaagtattcgtccgagaagcacgcttattagctttgtatattacacatgtgcccttttctagttcatattgctaccgattgttgaaaaaatagaagatgtttctggtataatcttgggacgttatccgtgtttgaatccgctttaatattatgtgtttgtcaaatcctttgctttatgttcttacaccagagtgtgcctctgatccgagacgcgtgcaaattaattgggcgcgcaccttcttacacgcctcttgttgatgcagcaatcgggcccgctcctgaacttgttttcacacatgcccttgtgcgccgctgcgattggccccaacagcctcgtcttgcaattttccatgcctg

SEQ ID NO: 71917 - DNA, 440 bp, Oryza sativa
  unsure (1)..(440): unsure at all n locations
agcttggtttaattggcttctccagatgcatgacattgtgagggaactggcaatttcaatatctgaaaaggaaggattctgcatgatttatactagttaagaagcacatacatcagtggttgggtgcgagcctcgtcgtttatcagttcatgagaattatgacagagtccagcaaattataaatgctcaacgtattcgttctttctacccatatcaattggatagtgattattccgtgatgtcaaatgtgcaatgggtgtcaacaagtgctaaatacttgaaggtctagaattaagcaatatttcaatcacaacactgccgagagacattgngagcttgttcaatntacaattattaggattgagacgaaccaaggtcaagcaacttnctgaatcaattgcaggctcaaaatctccgaactttgacatctacttactgaa

SEQ ID NO: 71918 - DNA, 462 bp, Oryza sativa
  unsure (1)..(462): unsure at all n locations
gcttagtttgacccagattggattaagcagctacaatggtccactttgngtctgtgttaattgcttatttggccattccttcttgtatatatcaatatatgtatagctgatccatgatctgatctggcatcattcttaggttataagactcaagctatcatcaatgagttggacattgaaagcgtagagaggcatctggcaaacttattgatagtggtgagctatnttcttatcttacctctatgaatatttttcttaatataacaacaatattattcgactcctgtaggataaagaggagaataatgatgacatggaacaggatgatgttctgatggatgaaatggatgaataatgatgttgcagtcttcatgcatctgactgcaagtgtactgaaaattagcttgggctaaattactatttgatcttantctgtgtacctatagaactccgactcaatat

SEQ ID NO: 71919 - DNA, 294 bp, Oryza sativa
  unsure (1)..(294): unsure at all n locations
agctntatccctatccattgtactgntngtcanggttatagataagacatacctcttatccttatggttgtgaaatatacgaatacgatataccctcatgtgtatgggaaggtacctccgaaatgaggaaatcggatgatctataaggaaatcatcctcttcgaatagaacgtgttagagtccttttccgaggatataaggaattttgtgatatcgtgtaagggcaggtgtctctgagttctactttgaagtcaagataatcgacagtataaatagaggacccccggatggggg

SEQ ID NO: 71920 - DNA, 454 bp, Oryza sativa
  unsure (1)..(454): unsure at all n locations
gcttcgnctcatcgcaagaaagagaacttgttcgcacctcggcttcttttgcttctaagattcgcgcgaggggtgaagctgtgcccgatcgtgctgtacctgtcatcaacatcataagtgattatgaagaagaggaagaccctgatgaaagagaaccagcttctctccaagaagaagatccatcgccttctttcgacacaaagcgggattagcnccttantaaggcgatgccgtagttccctgtgttagattgcttgtgtaaatttgcttgtgagtgtgtgggttttaattgctgcttacatcatctgtggggatgtacagcatgagtgtattcttttgcttgtagagtgtagaaagtggtgagatatgttatgccacttaatgtctccacccgttagaccctttaattaattattaatactcgtcctaggggttctgcctcttcctgtgcctg

SEQ ID NO: 71921 - DNA, 244 bp, Oryza sativa
  unsure (1)..(244): unsure at all n locations
gtgatgcatangaacttctccgaagcgacacccncaaggaggacacgacgcgtaacgtcgccgccgctcgtccgaaatcggaacaaggttttcacccggagatttgtggggaatatgaaagaacgccatgacgacgcctccaagaatggtaatggcgcccaagagcgtcgtcgtcgtcgaaccggccaaaggcacngcaaggctntcgccagcgtcttcacatcactcacacaagcaccccacg

SEQ ID NO: 71922 - DNA, 403 bp, Oryza sativa
  unsure (1)..(403): unsure at all n locations
ctaagcttgcacatagacaccttccttgcaagnnttgagcctacttatttctttgtttacatttccctcttcattctcattcctctggcttttggcttcagattgtcccagatcattccctggcttcactacaacgagagaagtgcctggaattgcatatttcagtccctgaaaagataaagttaagcaacaattagctcgagattggatcttttttttaaggcatgacaactgaaataaactcacccgtgccacaatctttaccccctgtgcagctttaagctccttgtgatgcttatatatgccctgcagaatagaagtggacaaattaaataaacacccaacatatactgtcagattatcttgccacatattaaaattaaattcatatatactgtacatg

SEQ ID NO: 71923 - DNA, 275 bp, Oryza sativa
atcttgttatcttgccaccgacggtcattaatgtaccagtgccatttagcttttgggagatggacagattgattgcttgtctggaaaggtttggggaggagattttctaaaagtgtccgattgtgatatacattcgattgaagacagagagcccaaattattattttgagggcgtcgtggagaagtcaaatgtctacaccaaggacacagtagatgatctcgatgacaagcaaggacagggtttcatgtcagccgatgatttggaggaagttgat

SEQ ID NO: 71924 - DNA, 385 bp, Oryza sativa
  unsure (1)..(385): unsure at all n locations
aataggaagagagttgagtagaagaggtcagaagaattctggagttttcgggaatcttctctcatttcttttattctatttattactctgatttcaatataatattcttcctaagtaatttagatttatcctatgagaattatctcttggttagttcctaaatagcacacgagattattgttcactataatcaactaaaatatagtgattgctttggtgagttataaacactaaagtagatattaattgcttagacgtagtgtttaggtaattgttatccagtaattgctgcgtatcctacagtacgtttgaggtatgtgtagaggtggtgacagncctccagatcactcaagtcctccctgtccgggtcgtagtagagcgacat

SEQ ID NO: 71925 - DNA, 335 bp, Oryza sativa
agcttgctttgattgtactagtacagaaagcattaaggcaaagcttcaaggaggagggtatcaattagtgcaaagttataatagttattaaactatatgccctggtagctggctttacttaaaaatgttgcttgctaaggtgtctttttgtcaagctccttaggaaattaaagaaagcaaccattattcattcatggtctaatgatgtatgtctcccactattagttagccgatgatgatgagaaactaaggcatgatgggaaacttaattaatacaagttaattaagacttgatctccaatctaaacatcctaatagagcttggtagtatttga

SEQ ID NO: 71926 - DNA, 436 bp, Oryza sativa
  unsure (1)..(436): unsure at all n locations
tgtagtggaccgttggtccccgggttntttactcctcacaccgtagaggttntgtccatgtaaattgctatatcctgtgtgcatgtgtttattgttgntctgttgctgatttgctagttaaaactatgctcaaagttcatggcaagatgagggattgattgtgtgaaatatgtatatgtgtatgtgtacattctccgcgtataatattgtaccaaagactctacaccttctccaattctgcaaagccattttaccttatactccctccgtactcgtaaaggaagtcgtttatgacaatgtctaagtcaaaccttgggaatataaatcatgaataactcctaagttggtgagtttgaaaatgtaaaaattatatgaatagatctgtctcgaaaaatactctcataaaagtatacatatatcaccttttcattaatat

SEQ ID NO: 71927 - DNA, 314 bp, Oryza sativa
ttcttctgtctatattcgctatataagaaaaacgtccgatccaatcttagaatggttcgttgtacgatagacggagtatgaaggggaaactattctaatccctcgacgggatgttccctcctttgctcaaataccatataaatggctattaaacattctggaataatcttacaatattcatacaacacatatatacaacttcacaaaatcttaagtccaaactcaactcacacgtcgagatataaaatagacacattcagcatatgaatagtagcgtactgttcatatctaaatctgtcttgttgtttctcgat

SEQ ID NO: 71928 - DNA, 231 bp, Oryza sativa
tagcttaatttacagatatatcacattatcatccactaacaattattacatttaattatcataataaacattgctatattatctattattttattcgacattggttgacatatgttgtgttgatgtgcgtgtaagctggagtacaacttccgcaactacttctgccttacgaccggcgagacgatcgccgtggcggcggaggacaagttctactacctcgacgtcgtggag

SEQ ID NO: 71929 - DNA, 371 bp, Oryza sativa
atatattggggccttattaatcaccacaatatttgaacatatttaaacgttctagcttcttcttcttggctagcttagctatttgcagagaaagcacacaccggtttttttggttcagttggccaatagactctctcgtactgtaactgtcttgctcgcttctgaaaaattgctaaaacccagaaaggattttggagaaactcccatgctctaaacttgagttgtgatgtatcttgagctgagaaatagaggtcgaccaaactagtgaagctgtatatataagcatacaatgatatatacaagggtatacaatgcagtccggccatgtatggattgcactataaatttaaagcatacagttcatttaatca

SEQ ID NO: 71930 - DNA, 273 bp, Oryza sativa
ctgaccccgccggtcttagcacggctcactttttttattgtacgattgccaaccctgccattgcataacgaaaataaactgccaaataatggggacatcataaagtaaccttaactggaagctcctgtcacttaaaaattctgtaggtataaacggggtgtttattggtaaaaccaatattacttaagaaagcttgaacggatctacattaattgcctccttttgcgatctgctgtacttacctactctgtcactccaatcctgcttgctcat

SEQ ID NO: 71931 - DNA, 278 bp, Oryza sativa
cacatattcgcatcgagccttattcgctaaaatatggcttatacagttgtagctcctctggcccttgatgaatttatggccagttcacactggtgtcattttcaacctcaccaaatattggtaaaggtgctaaaaatagtgactatatttatgttcctcgccaaatttggtaattatataaaaaatcatgttaaaagtttggcgagttacctaaatcttagcatgttgatatgccaaaacttgataatgttctattacagcaagatgaacatgccctt

SEQ ID NO: 71932 - DNA, 246 bp, Oryza sativa
  unsure (1)..(246): unsure at all n locations
acatgctgattaaatgcataccttttcttatatacatttatgtatgaatatgactgaaagctatcctagtcctacaatcctatgcatgagtgtggttgaatgatctccgtagcaaggtttaccttaccgcgcggtaccgggcttaccacggtaacctccttaaattcaaataaattttaaaaataatttgaatntttgaataaatttgcacggtttttcacggttaccgccgatatcgtgcttacc

SEQ ID NO: 71933 - DNA, 400 bp, Oryza sativa
gctgataagctccatggaaggaagaacactggtaggatgcattatctacctgctttatctgcatggatccaatgtcgccctggccgtcctcgaactcgaccagcagtgacagccagaagttcgtcgagccctcgtttacacggaaggctatgttcttcccgccgtacttgcacgcagtcctggtatatttgaacactgcactggtcagtttcgtcgaaaagaaacacaaaatttcgggggtcgtactaactgttagttgaatggacggtacacgtggcatgcgacagcttctctatgatcaggtagactgatgaacggagaagcagcattggccaaggaattatagacaagaggttaaatgccatttggatatctgttgctctgacttgagtatatcaag

SEQ ID NO: 71934 - DNA, 437 bp, Oryza sativa
  unsure (1)..(437): unsure at all n locations
agcttgtcttctctatgttagactcttaacactntctattccggcaaagataatttcctttcaggctcactttattaacttgtttggatatacctttccgctctcgtataacattaggtatatggtacttccacacaatacgaacctaagtataggaaatatgacttatccgtaacactgacaataatgaataggcttgaaccatggtattctcttttcaatatatcaaaagtactgctccttccacttcatcttgtaagacactntgactctctttntttttaatcaaaacttttaaagcttaatcacatttatagaaacactagcaacactgtaaatatcaaattagtcttattaaatataacattgaatagatgttgatcctatggntgctnttggtaaaagtgtactctatatctctataaatcgatttactc

SEQ ID NO: 71935 - DNA, 339 bp, Oryza sativa
agcttggttattgttaatggagagagcttgagctcgtcgtgctccgccacaccgagctcgacatgggccgtggcgccgtcgagctcgcgctgccgaacttgagctcgccctgtgcccccgctggcactggtgagactcgacccggcccgctcgtgccttgcttggcgacaccttcccccaaacgcgcaagacggggcggagacaccttttccccggttcgcgcttttcgccccactactttggcagccgtgggccccacatgggccattgcttccgtcaagctcatggctgccagcttgaacttggcctcgcgtccattgtcggggtccttctaccgca

SEQ ID NO: 71936 - DNA, 377 bp, Oryza sativa
  unsure (1)..(377): unsure at all n locations
gcttgcagcctncagtggccaggaaccgatgtttggagatgaactacatggtctaatgtcaccaatcatgagcaccatatcactgtcagatttcgatgatcagatggggtcattcaacataggaaacgacacaagcccagcagagatgatgcatgacaacttctcacttggtagtgactcgaacatcaggtcttcaacaccaactgattcaagcttcgggtctacatttcctgactttcatctcgacagccctgagatgccggctcagatgctgaatggtggggatgaagatggcattcttctccctgtgctcgatgacacnagtgatcagcaagatctttttgatcaactagatgaaaacaatggtagggaaaaac

SEQ ID NO: 71937 - DNA, 276 bp, Oryza sativa
  unsure (1)..(276): unsure at all n locations
agctctactctatccctcttatgaagtgcaaccctcatgaatgggagcgactgactggtcgagccattaccaattaccagccaccaggccttttccttgggctataggtacctgggggcatgaactggccccacctcanaaagcaagttcgtcatgtcacgctccaaggagacctgttcagttacattgtcaccaagcctcgaatcatcaacctcgcgaacttcggaagccatatcgacattgggggaacgcctgagaagtcattgatattctgca

SEQ ID NO: 71938 - DNA, 142 bp, Oryza sativa
tggctgcccatgggaagattgatcgtgtcttagctgcttggtcagtgcattgttattttcttgcacctgagttggcgcaagagcgtctcatatttcttgacctactcctatgtgcgatgattggttgcattctttgaagctg

SEQ ID NO: 71939 - DNA, 455 bp, Oryza sativa
  unsure (1)..(455): unsure at all n locations
tagacggctcgccagtcgcctccctcactatctactcgtaaacggcgcgagggggaaaagaaagagaagaaagaagttngacactgatatgtgggcttcacatatatttctttatttgttacttctcactttacacgtgggtcatgttttttattttctttttattgattaggatgccacgtcagcgaaaccaaccatccataccaccacattcattctgccatgagatctaatttaacttggtttagggatatgattttaacttcattgcatgtggacttattcccggtcgatatcccattcgaaacatgtgttgatgcgaaaacacacacactggcctgtgagatctgcttagctccagtgcagatccaaaggttgatgagatgcgggtatgtcagtcagtttgatcctgcaactaacaagatatgtatacagcagatcaagtatccgatcgg

SEQ ID NO: 71940 - DNA, 403 bp, Oryza sativa
  unsure (1)..(403): unsure at all n locations
gcaattcagctcggacccgngatcctctgagtcacctgccgcatgcaatcttgtttatgtgtgcgggataatccataattcatcacctatagcaaatgcacattangtttttcaattaggcttccaaaaaatgcggtctccctaaactttttcaatcatcaattcatcataccttaggtttttttttcaaaatattgattatctttatatcctataatatttaattaaaccctataagagagataattcatcatccaccatttaatctgtttcatcacaagttttaggtccgttccaactaaaccttgtgacctaggaaatcaataagataatcctcacgtttgtgtccaaatagatatgcgtntatgtccaattagacatgccgtcgagtcatgccttcatg

SEQ ID NO: 71941 - DNA, 463 bp, Oryza sativa
gatgtgcccttgcttggcagcccgaagaatattgctatgggccgtcttatactggagactgtagtacgttctttccacggcatgattgactcaaggtgcactaataaatggcagcttatcatatataggcatgtagcattgccgagtaccgtactagtgttcattttatttttccaattctacagaaaatgatacgtgagtgaccactatgcacgcatacgtatcaacgtatgagaatgtgcccccttgacaaaactaaaaaatgacaacaacacccctcacaaaaataggcacactcaaaatgactccattactatacaccactcgattattttatgtttaagataatggaagaagctagtgtataatctctgcgatatgaacattttctatgagatggacattggtgagattagatgaaccctggttgttcacagacctggtgtatatagttcttgactgg

SEQ ID NO: 71942 - DNA, 251 bp, Oryza sativa
ttcttgttggtctgcacatcataacagaagtggaagaagatggaccgtctattgcccccgccgaagccgccaagaactatgtacgtcacagcggttgggttgtgcgggataacctgcctgtcagtacggtgtactggcgaaaaacaagggcacgaggagatcatgagaagcttgtcccacattcggagaaagagatgctgtggaccacaatgctcgagacattcacccttcctgcgggtacagaggacaaa

SEQ ID NO: 71943 - DNA, 433 bp, Oryza sativa
tgataggattgcatccgcagcgcctcctctgtattacataacatggaggagctccattcaagccggctatgacaaaatcacatattgatgcctaaattaataccgaccgcatgctaaatcgatgcctaaattaataaaatcattctatctaagaactgaatcaaacagaagagatatttcgttcagaagagatatatcgttcatgtctcactcacaccaaagaaacacataaaaaagaatcgtcatgcccgtgtgggcagatagaagggaagttgatgtggcttatagggagaaaaagagatatgggaggagaaaagataggctcgatgcttgggctgtgatagcacagtacagttatcccatgaaataactaagctggtgtattctaacttttcttctactctcactttccttaatcaaacttctgccatca

SEQ ID NO: 71944 - DNA, 403 bp, Oryza sativa
  unsure (1)..(403): unsure at all n locations
agcttncttgctgaaaatacatcgacgtgtaccggagcgcgacaccactgtatgttaattgcgaggtacaatctacaatcactttgccagtgtcttcaaattatttttcgagtattgtgaattctcatatagatgttgatagacctaatttcaatggatatctgcatcggttaatgattgctcaaataattatttgagatctttgaattatgatgaaaataacatgtcgcagctttaaatcttaataattcaagatatccaatatgttcacacaccttttaattgatcgggtaattatttggaacctattactacacaataaaattttgccgatgaaagacatgcatgggcatatggccattgcagtatgtattatctagtngattctattaattcattacat

SEQ ID NO: 71945 - DNA, 385 bp, Oryza sativa
ctggagaagatgtcttatgtggagtcctggcttataccccagttgagcgcctgtgaagatggagccgtaagcccgctattccgctgctgtttatttttgattgtcaagcctgaagcgcctctgtaataatgtaaatattatcgatataataaagatgtgtcttttatatcatgattgcgtggtgtaccccggcttttcctgggacggggattattacactagcgttcgggaaaaggcaagttttccggtcgcgacatatttgccgaagtcgttggtaatgaagtcgatgctgccgaaccagaacgcctgcccgggagggaagacgaagtcgtcgattgccgagacaaaacccatcgcactagtccgcgaaaaacttggcgctccc

SEQ ID NO: 71946 - DNA, 238 bp, Oryza sativa
  unsure (1)..(238): unsure at all n locations
agctnttttttttacnagaagagcgactcgagcgatacccacactgttccgaactgagagtccagactaggtctattccgataccactggctagatcctactcgactaaacttgacagaagagacatattgtttgtttgctgtgtgcgagtgaaacgagaagacgagctcattctatatgcatgtagtgaccgatgtgaccgcctgtgtagtggctaacagctgtatacgcgtctatg

SEQ ID NO: 71947 - DNA, 314 bp, Oryza sativa
  unsure (1)..(314): unsure at all n locations
aagtgtagcaaccatttcaacataaaacaaatatactacaaaaatacatatgatggtggttttaataaaattaatatatgttgctacatttttctataaactgggttaaactttaaaaagtttggcctagatacaaattctactttggttttcgttagcatgcttttgaaacttgctaacggtacatttcgtgcgaaaactttctatacatcagatgctttaaaaatatcaaataaatctattntgcaagttgaaatattaaactcaattatctacactgatacttctcgtttgataatgcacttcttactata

SEQ ID NO: 71948 - DNA, 423 bp, Oryza sativa
  unsure (1)..(423): unsure at all n locations
actcagctggagaccttgctaccaatctacccggctagaagtgcttcntctgtgcatggtgaacttgtccagcaatggcgaacggtggtgcgacgccatggccaagttctctccaaatcttcaggtcattaacatgccatactgctcactgtccggtcccatttgccggtcactctcgtccttgcgatcactttcagtgatagaactccacttcaatcagttgtctggtccaattcctgagttcttggctgcactctctaaccttactgttcttcaactgtcaaataacatgtttgaaggggtgttccctccaatcatcttgcagcatgagaaactaacgactattaacctcaccacaaatcttgggatctccggagagttccctaatttctctgctgacagtaacttacagagattatctgt

SEQ ID NO: 71949 - DNA, 251 bp, Oryza sativa
  unsure (1)..(251): unsure at all n locations
tatctttgctcatgggttccttgcggagaacattcttccccttgacacaagcaagagattgaaggcatctctctagatccgaggcatgtatcgcagtatcttgttcgatgtctntgtatgttaacccatctgtagaattaaacagcatgagaacacacatctgataagtggatacatnttagtcatgcttctgacctttcccaaatgtggcttttatgtcagctgttcccatgtttgcttgcattgtcatc

SEQ ID NO: 71950 - DNA, 151 bp, Oryza sativa
gctgctagcttctgtgtgcgtgtgagagatccacactatttatgtgtgtttggtcatgttcatccccagctggtggccggccgggtgatcttagagagagaaagagagagcttgagagtatgagcagatgaccctatgtggctatgtagcc

SEQ ID NO: 71951 - DNA, 368 bp, Oryza sativa
  unsure (1)..(368): unsure at all n locations
agcttctctgctctgttctcactctcgtgttttgtgtgtctccgatcttggccatttccaacacagacaacaattttattttttgtctgtaaccatctggaagcacaaaccatatgtaatccgttgacagttcgtgcaggagaaataaatagatatgttagagtgcatatacatagcaatagatatgttagaaataaatatatggtactattcaagcttctgaaatttgaaacacaactttgcatagaagttacagtggattaaaatttctcattntttaatgcatatagtcaatggtggcacaccgatggggctacaataagctggctaaagtatgaaactggcccgcctaactcagtccatgaatt

SEQ ID NO: 71952 - DNA, 466 bp, Oryza sativa
  unsure (1)..(466): unsure at all n locations
gctttaaccaagctcttacaagatcttaccaatgcaagtggaatggtgacatacaccgactcaaccaagcaccccaatgaaggttggatgtatcgatgccttggcaaacacttgcggtacagctgtaatcaaatatgtggagctctgggtaggcttaaatatgtagcaaaggaatagcaaatgctcaaatcagataatgcaaagttgaataattggtcaaagtcaagtaccgtgctggtcctaggctagaacgtactagagacgcgagcctagacacaaacgataccacaagatagcactatgaacaactcatgcacaactctgatatatgaagttcagctcaaacataacagnnatttctcttttctttctttcttctttcttcttttcttttttatatctttccttatcttttcctgtcttttttggcgcggcattatttttctatttcttattgcacctttct

SEQ ID NO: 71953 - DNA, 327 bp, Oryza sativa
agctttctttataatggctcgggcagccgggacatctccagccagccatttctcctttgcactcataagccataaaacttctgcacgtggattgtaggtaacagcctttctgaggagattataaagagactccttggttccatggctcttctcaagctgagccgctttcagccaaatactcttcttggaaacgaagacactgagtgcatgcgcatagatggcacgggctgtctcaattgaaccacgcttcttgcattcctcaacatcggcaacccatgtgcgttttctgtcttcctcatcaacaccaatgccaatagtgctcttaac

SEQ ID NO: 71954 - DNA, 296 bp, Oryza sativa
  unsure (1)..(296): unsure at all n locations
cttacattattgcttatactcttccaaagacttatcatntctttgctacactgtgtcccattcaaaacacatggacagatgtggctttttaagtgagggattgtgctacatgatgtctacataatatattcatagtctcaagatatgcatgtttatttgtgttacgaaatgttgcattgcccctaatattctgttttgaaagtggatacctaaatatattttaactgtgtttctaattaccaatcacattttgacggccatatgcaggatgttctatggacctggtggaccctatg

SEQ ID NO: 71955 - DNA, 122 bp, Oryza sativa
tcacttgtgcgggagcctgagaacctgctgctgctgctttttgtcttttaacacctgctcattctatttctataagtgctccagaacacggtcctttgtgctggctgagagaaacttaactc

SEQ ID NO: 71956 - DNA, 469 bp, Oryza sativa
  unsure (1)..(469): unsure at all n locations
gcttgaccgaccaccactagaccaacaaaaggacacaggcgagatcgtcctcctatgtgatgccaaaacgacgtcttcaagaagagaagcgaccaaccgccgccgccgtccatcggagctcaaatgagccaagactgggctttctcccggcaaccacctttgaggggtgagacagcacgacaatgccctcatgatggggaatgaaccatctttggctgtccggccgaggccagactatgttntcacccgccgctcaccacctgcgaattcacagctgacacaccgatgctccaccaccacacaagctctgccgacatgtggaacccctgcaccggcgttctcccgcggccaaccttcgtgcgcaaagaccggctatcctatcggcactcctctccacctgagtgcttctcaacgccgcacccactacgcaaacaggctctcaccgacccctttggcattcggctcctca

SEQ ID NO: 71957 - DNA, 356 bp, Oryza sativa
  unsure (1)..(356): unsure at all n locations
gctgcatgcagctgataatcaaagtctacatgcacgcataacgtacaagaataaaccgtgatagttacaagttggtttaagtcttttntttagcaaatttcaaactactttttctcttaaattacttctccaactaataatccaattgtaccattaaatttattgtaattaaatctttacaatcagaccacacatggtnttatcntcaatgttttcgttagcattttatgcatattcttaaatatacacatggcttctgctaaaagtttcaactaatatttatatgatgctacacttattattntgcaaatgtacatgtggatactaagaatctttcagtagtatttaaaactaat

SEQ ID NO: 71958 - DNA, 454 bp, Oryza sativa
tctgcttgtgcatgaactctgtacctctcttgagctccctcattgattgcactaataccaactccacgcgagtggtttggctttctgccaaggactaatgcaaagtgttcaaccattgggatttgagcagctgcaatcctttcctggtttgtttcagctgttgtctgcagattgttctaaacaaatcaaaccaaatatgtaagtccatattaaaaaaaactcatgcagtaaaatgtaggtaacaaacattattgtttaccagaatttcttcgccattatgaacagaccatgttccattcttcaaataagttgccttccaaacatctatagcactatgccattcacctgtcactgggtttctctgcaattatatcacattacaaagaagccttataatttatatatacaagacatgtcaaacatatagttaaaagatataagtgaatgacaatat

SEQ ID NO: 71959 - DNA, 295 bp, Oryza sativa
  unsure (1)..(295): unsure at all n locations
ttttttcatgctggtgtcaagatgacatatggacattctgaaataaaatgaaatctctgaattccacctttgttctgaacttctgatattagattgacagaagttggtgttaaattttcagcctgttctttgttccttccaactttcaaggattggtgtagctatattccttgaggaatcttgaatctgtctttgaaggcttgaagctgtgtaagactgcattgtcgattcngcacacttctgggcccttggtctttgaatctgtcttgaggaatcgctgatctgcaactacctg

SEQ ID NO: 71960 - DNA, 383 bp, Oryza sativa
tttccttcacttcattgcgcatagacgacattatgaagatggctattccatatgccggaacagcacccgttatcaccggcctgtggaagcttattcgttcttcatatcggttaaccaattcattaaaattctgaggtggatcgtattcaaaataattgtcccagcgccgccctgtaggagcttcagtcttggcaaatgttgtgccgcccaacttattattatcctacaggtccatcaaggagagggataattataataataataataataataataataataattataataataatcataataataatcataataataataataataatcataataatgataataataagtataatattattaactacgatgaataaacatca

SEQ ID NO: 71961 - DNA, 308 bp, Oryza sativa
  unsure (1)..(308): unsure at all n locations
agcttatttcgatgactgatgcacaattaaatagaagcttcgatagaagcgagcaaagcataacggatactagaaaattaaataggagcatggctatagttgagcgaaagacaagacttgtacgacatcttgatactaaagattggtgggccataatttaccaatacatctggacggacaacaaattaaggcnacctgggctatcgatttaagaattcgttaattgggccataatatgattaccgcatataatatntaattttatattatgtccgtttaggttnttaatctgaaacggatagatctat

SEQ ID NO: 71962 - DNA, 335 bp, Oryza sativa
ttgaaagtatggacctataagttatcgaccgtgagctcggtgtcgagatttcatgtgttgaggcagatacgttggagccaaatcccgtggtgatgcaaacattgttaaaggggcagtgttaaggtgcttggcgcccatgtctatctattgccggcgagggcccaacttctaaaccatgtgtgtcaatgcccaacttgggaccaatggaatggatgtctacacggttcaccaactggacgaccatcgctagcggcgatgcttgccacttgcctttctcctccatgagcatgcctatgtgatttgacgccaatgattcttgatttaactgcatcctc

SEQ ID NO: 71963 - DNA, 349 bp, Oryza sativa
  unsure (1)..(349): unsure at all n locations
ggctgcaagcttttctatangctcctagctagtttgtgtggcgaagccaataacgagccgttgaacctgaacgatcattagtgttttctagcaagctatgactattggtggagtctaatgaccgtcttactaacccagcagctacctttacataggaataaggttgtgttcattgctcttggttcccagcccctctccctcatattccgcatgcatgcttttcaaactgttaaacagtatgtgtttttgtaaaaaagttatataggaaagttacttacaaaaatcatattgatccattttttttgaaaaaaatagcgaatacttaattaatcacgcgctaatggactac

SEQ ID NO: 71964 - DNA, 445 bp, Oryza sativa
gaactctcaatactcaagcttaaagagtcgaccatgctgttgcgcaaatatttatcgtggcataccaactgaggacgagagttcctgctccaacctgtaacttcttgtgctatattctgatgtaaaaccagcagtatggatgaaactgctctgagcatcagagctaatggtctttggacaaataaaaggctcaatctcttcatccattacagaaatgggttggcacttttttatgtctgtagttctaagaaactgcaatctcatttctacttctttcatagtaagtctctctccttctttagctttcaagcatgcttgtgcaattgaagcgatatcatcaatttctttctgtccagcctcttccacaacttgggagtcaagattccatcgaactccctgctgaagccttctaagagcattggataagtttggttgacctacatca

SEQ ID NO: 71965 - DNA, 293 bp, Oryza sativa
  unsure (1)..(293): unsure at all n locations
tagtcttcttcaactgctaaaacggtatatattttttatataaacattctatagaagaaatgttttaaaaaatcatactaacttatttttaaagtttttttaagttaatacttaattaatcgtgcactaattggttcctaatccttaccccagaacacagcggtttgaggtcgtttcanaagccaaacgtacgcgtgaaaaaaaaagaaagaagaaagcaaatgcacacatttggtatggaagcaaactaaatatgaccctacgatcagtgtgcagcaaggcatatcgtaccg

SEQ ID NO: 71966 - DNA, 398 bp, Oryza sativa
  unsure (1)..(398): unsure at all n locations
acaaaaacctcattcgtttcactctcgcaagcaatgtactcgttatttacagacagcccaacaaagttcttttcattcttgtgccctctgaatggccttacctgaaaaaggtaaccattttaaacaaaaggtcaacaatctgttttctgagaagcctagcatgacgtaactactaaaccaagccagactaatagatgagcttaaaaagaaacaaaggtgaaaacaaatgcttatccaagaattncggacctaaccaaaggtttttcaaggaccagaattcttcgaaaaaaaagcgaagcttctcaaatagttcttttccaggaaataaagaaacactatagctccaatttttatcgatatgaaatagagtatatcctanaacatcaccttttactaat

SEQ ID NO: 71967 - DNA, 301 bp, Oryza sativa
agcttactttgcctcatctagaagtgcaataacaccaccaggtttctgtcaagggacaatttaaacaaactaattaaatgtcgtttattgacaaattcagtaaacacatggaaaataagcaagtgaaaatacatcacaaaattattggatatattacttagtcaaaaacaagtagaagagaaagaatgaacctccctatttaaatatgtgacaatgttgatattaatcaatcttttgtgtgcaatattaaccagtatttttctattagaatataatgataatatctaacaaaactataata

SEQ ID NO: 71968 - DNA, 406 bp, Oryza sativa
  unsure (1)..(406): unsure at all n locations
cttgaaactgtacctgacaactcgtttaatcttaaattaaaataaccacagcttggtccatcttcgtttctataaacattgatttatcaacgaatcaaagatagaaatacttgactgtcaactgcagaacacagagaatttacccttgaattcatgcaaccacccacacacttgatacacacacagagagagctggtccacacaaactgagctagtttaacactgtttcagttctaagcgctaaataatctatcaaatcatcttaaaatatanttttgaactgaacaaagcttaatgcanataatcacttggataatcaagattgctaaccaccaacanaactgtaagctggtcagctgactagttcacgtgatgacctcgatttggaaaaagaaagcatgtgatg

SEQ ID NO: 71969 - DNA, 213 bp, Oryza sativa
  unsure (1)..(213): unsure at all n locations
ctcacatttgcgcgccatttgccgnctgatgtcgttatttttatcatgggcccatatgctacttagcataaaatattggccttaatatgtgtagtgcttatctttatatggccattaaggtaaaggtttccactctggcaagatgccgttgagccctaaaatattatggtgagcaagctaatcgctcattggctcttgaaaatattgggtgtg

SEQ ID NO: 71970 - DNA, 310 bp, Oryza sativa
  unsure (1)..(310): unsure at all n locations
acccccgcaggaccatccccngccaagtctgtatcttctacctatgacttgcccaagtagcaagttcagttgtttgtgatactcctaaggtcttcgcctgttgccctagcacaaacatgtttgcgaagctccactacatccgtggcgaaatgcgataggcttagaattatggatatatgcgaaagctcttgtggtaaagaactgtccatagcaatacttatggcgttattctttgaaatctatgaacagctcatgaaactatcacgggaaaatttattgaccttggaattatatctcgtaattgacgttc

SEQ ID NO: 71971 - DNA, 150 bp, Oryza sativa
  unsure (1)..(150): unsure at all n locations
atactcagcttgtcgctgagatagagagagatagccgagcctgtttatattgttaatcttgccttntcctatcgattttcttattaaaatattgttgagtgaactaccacatatgacgagaaacactcccgattgagtctgggggagggg

SEQ ID NO: 71972 - DNA, 334 bp, Oryza sativa
atgtatataccccaagatggtatatctctttcatcactattaatcataccaatttccaagagttgggcgcctacagacgattattcggtcgacgcattgctacacatgggagaaagaccgatctttctgttatacttgagataccaatgacttcatttcaatttagggggatagacttcctaccgtctaataccacgaatcttctggagactacttcttaaaagccagggtatttcattttcaaattatatattctgcgtactcttttcctaataaatatcgaatgcaacctttttcgcgttgcgagtttttcttgaattataatttgccctgt

SEQ ID NO: 71973 - DNA, 270 bp, Oryza sativa
cttgcaagctacagtttgtgggttccgttctgtttatctagagaatgtgttcaacggttgcagatagcttcttttgccctgtattttgtgcgttatttcttcagcttatagtaatgctgtattggctccacgtgtgtgaacaaccacatccgttgcatgtcaagaatatggtgaaaaatgtgcttgatggaaagtctgatgatgcgtgctctgctctgaagcgattatatgatttgggctactctcccactgacataatcactactctct

SEQ ID NO: 71974 - DNA, 327 bp, Oryza sativa
  unsure (1)..(327): unsure at all n locations
tatgtgcacgatctagtgtgggttccattatatgttcaattgttgcgacccgaacatggcctgagatccacaacttctttgtagactcattgcataccttgcacttctttgatatgatatgtggaatttttgcaattacaaaacgggtcatgacttatggtgcgctccatgacattatccacatgcaaaggcctttganggatctgacatgcaacttaacatttctagaggcttatgacatgactggccgagttcttggcgtcacagattgctctcctagaagaaatgagccacaccagtgcctcaactacctgacatcaccacatg

SEQ ID NO: 71975 - DNA, 244 bp, Oryza sativa
agcttggtctctcttgattgggcttcaccgcctagagagaagatgtcgaacgagatgaaccatgtatggaaggctcccatgttcaatggaacaaactactccaattggaaaattagaatgtctactcacctcaaagctatgagcttccatatttggagttttgcggatgtaggctttgctatcaccggcatgctcttgacggagattgatcaccgtaacctctaactcaatgcgttgttcaact

SEQ ID NO: 71976 - DNA, 472 bp, Oryza sativa
  unsure (1)..(472): unsure at all n locations
agcactgccaggaaataccccagattattatggttagttttcttaataacacgggagctacatcaactgtacactttggtgatccttggtattggaacacactctatatgagaatctgacatcacacacttggttttgatgtcttgcgacacaaaagtccaagtgtggggggaaggtcgacgagcttttcatgacgagttccatcaaccaaggccatcttggtttgaagttggtgttagtcctagctttgcttaacattaaaagaaaaataaagaagactaaagagaggagaagagagagaaagaagaatagaagaaataaaatggggaagaagacaagagctagagagctgacgagctacatttggaacacagaccgcattatgtgcatgtctttganatatggctatacacctggctagtagcaatcatgctaccttgctacacctagtccctctctcgagctcatgtgc

SEQ ID NO: 71977 - DNA, 125 bp, Oryza sativa
cagactgtatgtcttcaacgctctcacaggtactgcactgcattagctgcttcaggaacacttgatatgcttcaccactatgatgtttgggagttatatttgcatatacaacaggcacatgcttg

SEQ ID NO: 71978 - DNA, 375 bp, Oryza sativa
gacgtggctgatccccacaggctgggagatcctggttagtaatgtcgtgtgggtaaagtgtaccccctctgcagaggttaacaaactgttcgaacagccgtgcccacagtcatgggcggatgtgaggtgattcctagcgtagttttgtttgactactgcttgtgaaattgctattgtgaaaagaggttcgatgtttgaaaaatctgcagctgacgggatcaactgggcccgggtggccgtttgaaagttgttggcccgggtggccgttgaaaagctgttggccgggtgcaaccttgatcatttctaaagactgaacattgcacatactccgaccggacgagacgcactgtctcattcgtgtcgtttgagaagcac

SEQ ID NO: 71979 - DNA, 289 bp, Oryza sativa
gcgtttttgttatcttttgccacgcgcctcttttgccaaaggaggtctctaccacatacctcctcatcctgatacactccacaaacttttcacgtgcactgctggtacccatcgtatccctaacactgttcctttctcgtcaaggactggtgtggatcctataccctctttttattccatactggctgttaccttccgcatgcataacaacactctgtcctattcccgtcaagcatctgtgatgcagaaacatctgctagtcacgagacttttagtttacaactaagcc

SEQ ID NO: 71980 - DNA, 434 bp, Oryza sativa
  unsure (1)..(434): unsure at all n locations
tcaaaaagaggggagggcatgccaaaatttctattgtatttatttttgtgattacatacaaatccgaagggcccaaaagggttgnnannttattcttcaatgttttttttgncaaactacannngcacctatgttttgcacacttnttttgtcttcaaaatttaattgtaaggtgatgagagagaaaatgtgtgtggggaagaaagaatatatataaatttagtcatttgctaaacaatgtttataaaatagttgagaaggaaactctatgaaagtaatcttaataatagaacacaactaaatataatttaagaagtagaccattaaattttttaaactttcaatagttttaaaatattgtgtatatttatgattttgataataagaatctataatattgatactgcttatgaagataattattggccgttttt

SEQ ID NO: 71981 - DNA, 206 bp, Oryza sativa
agcttgttattgttatttaactgcattaatactgtttcacaaaagaaaaacaatttaacccttcataaaaacaaaagcagcacttaatcttagaaaaattaacgagatatagccatacctcacatatcaactgaatattacaaccaattgacctcttccacaacattaaagatggggtagatagtggaaatatataaaatacatat

SEQ ID NO: 71982 - DNA, 368 bp, Oryza sativa
caacatgcaaatcttagagtttgatgggtaattccagttcttatatattgtataagttaaaaattctcttatctctcctttttcctcactacatacgaatagagtttgatctggctgttataaattttcttcagttttgtgggcatccttatatctactaatcagactccccatatgatcagcgattatcagcttatactctattctaattctatgaatgaacgactaattaacttaattgactcctcgctgatttaatccaataagggtagtgtgttgggcatccccataatgctagccaccacatctctagataagaatcattagtatcacatattttgagatcttctcactctaaccattgatca

SEQ ID NO: 71983 - DNA, 395 bp, Oryza sativa
atcatgtgaagagaagcatgctccccgctaaattattgtcatcacttctctgcagcatcattagttccccactagtactgcacacagtacattagccaggggagtactccatttatcttggtgcgttcattttaacgcacaatttagattttggttaaaattgaagatgatgtgactgaaaaggtatgtgtatatgacaagttgatgtgataaaaataactgaagtttgatccaaactttagatcctttcttatataagtcgcttgaatttttttattaagtttaactcagttataaagaatatatactatgtgtacataaacaatatattattatttgaaataatgtagatttataaaatagttgtatttagatgtgataaatttttataattg

SEQ ID NO: 71984 - DNA, 171 bp, Oryza sativa
aatactgttagcagtcatatctctaacatgcttgcttgatccacatgtaagaatagaccttttctttctctttgcgagactaaccttaatgcaaatgcaactaacagcccaggtagaaggatgtcaccgaatccaatgatgctgtatcctccccatggatcaaacattcgt

SEQ ID NO: 71985 - DNA, 283 bp, Oryza sativa
  unsure (1)..(283): unsure at all n locations
tatagccgtcggaatacatnnggnnngaaatacatgcgaaggagactgcactgcactntgncttgaatgcatatcttttctttaatcttcttttgacgtgcataccctcttcctaccggacgcgtatattatactgttctgctccttcttctcgttctatttgaacgtacctgtagaatatatcgacgactgtatatatagatatggggaaaatgcggttatgaatcttgtatatactggtaaaaatgtctactcttggtatatcttgtccttgcatgtactc

SEQ ID NO: 71986 - DNA, 345 bp, Oryza sativa
  unsure (1)..(345): unsure at all n locations
cttctntataattgagacagtattttcccagcacaagcaacactaataattcatggaaagagtagtccagaatcaacaaagattactatggtctattatcaatagattgcttgtcaatggacaattattgtctgctgcagtgaaaggaaaaggaaaccatccatgcaccatgcatcatatagatatcaccattgtaaatactttctcttgtgagtaggtgatttgaatatagcagtgatctgaaatgcagatctaccaaacttctgaagtaaagtgaatgcaagtaaattagtttgacactcaaattgcaaatataatatgatgggggtgacagtaccttctgat

SEQ ID NO: 71987 - DNA, 276 bp, Oryza sativa
gcttgttctgtttgggaaggggtgttttgagagaaaagaataatctacttctaccgatattcccttatgcaccgccatacataacatagaaatcacacgtggaaggggtgggcaattagcttgagcagcaggtgctgtagcgaaactgattgccaaagaaggtaaatctgccactttaagattaccatctggggaggtccgtttggtatcccaaaactgcttaacaacagtccgacaagtgggtaatggttgggtgaaccaaataatgttgggtag

SEQ ID NO: 71988 - DNA, 352 bp, Oryza sativa
  unsure (1)..(352): unsure at all n locations
tcttccaagcatacagctntctagatgtatatgacgatctctatacagatggatcttatatgaatcgtatgatgaagtaccacatgagtggatatatatgaaaggaatccaaatctgccgaatcgctcatgttatgatcttctacatcctaagtctccgcgttccgtcatctggcttatgttcttcatgtagcattcagatcgaatgactctatgaaattacgtcgatacttctacatattatgggtaacgtaggagacatccctattttcccccgggggtcttaattaccactgcttagctttcaattcgcctctgaccatcaaattaaatgtgaataacccgtccttctc

SEQ ID NO: 71989 - DNA, 259 bp, Oryza sativa
  unsure (1)..(259): unsure at all n locations
atcttgattgtgtgcgaatnttgagctgccctacctagttctaatggaacgccatattttcgtgcatgtttcttggtttctactaacaatggcagggatacgcaagataatttgggatagctgcgctcaacatcgacatcttcgtcgagacatgatgacggatcaacctgaccattatgagggaagtgatgatgttctatgtaagatcaaatctgcactggcttatttcgagggaaactattgatccctctgcttacat

SEQ ID NO: 71990 - DNA, 92 bp, Oryza sativa
taactgggcccacaaccgaacccagctaataggagaaagggagctttaaattttattgacagcagaacaatccggtggaaaaaaacacaccg

SEQ ID NO: 71991 - DNA, 189 bp, Oryza sativa
  unsure (1)..(189): unsure at all n locations
tcttcttcttcgtgttgnntttaatggcggcgtggtggtgggtttggtgcatgaaactggccgacgaaggttaccggaagagcgcgaataagtgcaaagagaaattcgagaacgtgcacaagtattacaagcgcaccaaggagagccgcgcggggcgcaacgacggcaagacgtaccgctttttcacgc

SEQ ID NO: 71992 - DNA, 323 bp, Oryza sativa
aatctttcctaacattctctgtcttcataaaccacggtataaagaggggattcaggattcctctgccgttaattgatcagtatcactgccgcttgtagcaaacactacgacgacacatcgctatctaaaattctgaaatcaaatgcgagtttcagcttaccagccacgtatgttaacaacaagaatcgtgaaagaatatggccgcaggagtacatgacacatgcgtgttggctgtacacatcaatatgggcctaacaagtagtatagtctcatctgcatctcttacgtgtcaacgttaaatcggcagatgatgttgggtctct

SEQ ID NO: 71993 - DNA, 290 bp, Oryza sativa
aatactcgccggtcttagcactgtgctcactttgcccaaacaagatagctgatactcgagtcaccgaagaggttaagactacatatatttttctacatctaacaagtcaagatagcactatactcattattatagcatctatactattctcatagtacatctcactatatacagtcactgctaaacctggctgtgtcggtcacctgtcaatctgaccgtgtctcttctctaatatctttaacatgttgactactaagctgatgactgttatactgatgagagactgtata

SEQ ID NO: 71994 - DNA, 273 bp, Oryza sativa
  unsure (1)..(273): unsure at all n locations
ttanagattcgtctcgcaantacacacaatctatgtgattagttatcttttcctctatatataatacctcatacatgtattccaacattctatgtgacaaggtgtgaaaatctaccaccgaatataaacaagggcctacctcattttaacttcgactttcatggcgtagtccggagtattccattgccttttgttctttatgtaccgcgtcttatcatggcctgatgtgaatccaatgccaatatttttacatgactgctcatcttgacacat

SEQ ID NO: 71995 - DNA, 88 bp, Oryza sativa
actcatcacaaaatgtcatgttgtgatctcttttcttttgatatcattgatgaatatagagatctcactgcgttggaatggaatttca

SEQ ID NO: 71996 - DNA, 435 bp, Oryza sativa
  unsure (1)..(435): unsure at all n locations
cgcagcctantgtgcaaagtagagagcccaatggagagaatcctttgtatcccgggaaatgctnttcttctagcctttcataccacgtggagtcacgtactaagcaagctcaaggctagaagagtttgaatcataagagaaaagcaccgatgcgaactgaagaagaagtacgttagatgactattaccagcaccgaatggcctccagcacggataactattcctagacgtcaaagaggaaataccttccgaggtgcacgacagttgatccagcacctcctaagccatggcggcagagtatctgatagtgaagggtcagatcaagtctcctcggattatgaagatgagtctccccgacatctccgcgaggaagagatggaatcaaagcatgcccccgctgtggagaaatgtgacacgtgctgcatgtgtttacact

SEQ ID NO: 71997 - DNA, 427 bp, Oryza sativa
  unsure (1)..(427): unsure at all n locations
tcngcgcatcagcaaaaagacacccaccaccaaccggtagttcttctattatgagtagctacgtaaagctggaggaggttgcattcatgatccatagatcatcaaacgaggccactaggggggatggggtttttntnttttcctcttttcttttctttaatgtctccttattcttccttttttttcttcctcctttatttcttattttctactatttatacttatgcctatattatttttttctctttcgctttcttctatttctattcttctaatttctataatcctatcttctttctttttttccttctttcttcttcttttctactatctcttaccttattttatctctttttatttcttcttctctactctatctcttttttcttctttcttctcactctctattttctttactttctttcta

SEQ ID NO: 71998 - DNA, 307 bp, Oryza sativa
tagactcatcacaagtctacaagcttgataaacatatcaaccattcaaacaacttcaattagaaacaacagggggaaatgaaggaatatggaggaattggatttttatcacctcgagcaccagcttcttactggacatttcgtcaaacatgtggcttgccctacattcccatcttccttggcccttgcatcaagagttggccagaaaaaatccaaaacaaaacaaaacaaaatatagagctgcatacggtgcggcaacggtgttggctatcagctgagtataggcgggaggtgctggtgttggatgc

SEQ ID NO: 71999 - DNA, 182 bp, Oryza sativa
aaaaaaaagggaggcacgccaaaaaaaaacccggaccaaggggaaaagaggatatcacccgaaaaaacgacagggggggaaacaggccccgacaacacaaaggggccggacgagaaaagaaaagcaggaaatcgccgaaaggaccacgaaaaaccccacacaacagacgcctggcggagggg

SEQ ID NO: 72000 - DNA, 290 bp, Oryza sativa
  unsure (1)..(290): unsure at all n locations
catcaaaaagctcacccgttctaacttggtcaagtcgaatgatgactttgagagacaagtgaagttgctcaacaaagtgcgacaccacaatgtcgtcgcactaagaggcttctactggacttcgtcgtgcagctactcatctatgatacctgcccggaggaaattgcacaaacaccttcatgagtgcacggacgacaacttgctctcttggatggacaggtttgacattatacttggagttgtangggtctgacacatcttgaccagcgtgagatcattcattcaatctc

SEQ ID NO: 72001 - DNA, 392 bp, Oryza sativa
  unsure (1)..(392): unsure at all n locations
ataagaggccaatgaattaaatggatttaatgctgacatgccaatgagtaattccaaccttatcaaacctggtggtcagctcttggctaaatttgtcaatcataccaatgtacacttctcttctaaaatgatcattatttgtttggtccggataaaaccttggagatatttaatgaggcacatatttaccatcaaaggttggaacttggatactatgtttattgcaaaatgaaacaatagtttcttgaaaaaaaatcttcccaatcttcagatcttanatttttgcattctttccttgggcaaagntacaattgatattgcattaacaatatcttggtctctctttttgcaacacaaacacaactttatttgatatgtaagaatgacaagca

SEQ ID NO: 72002 - DNA, 377 bp, Oryza sativa
  unsure (1)..(377): unsure at all n locations
agcttgctctcatgtacaccaaacacacacttatcggggttcagctttatgcgggcggagcggagggtttcaaaagtttccgctagaactgaaaagtaagtttcttggttgcgcgtttttacaaccaaatcatcgacataagcctcaacattacgtcctatttggctacccaaagaaattcgagtagtacgttgaaaagtaggacctgcattctttaacccgaagggcattgatgtataacaataggttcctacgggggtaatgaacgcagttttctcctcatcctccctagccatgcgaatctgatggtaaccagagtatgcatctagaanacacaaaatgtcgcaccccgcagtggagtcgacgatctgatctat

SEQ ID NO: 72003 - DNA, 396 bp, Oryza sativa
  unsure (1)..(396): unsure at all n locations
agcctgttgtttagtgagcacctcagnttacacgtaccacctgactggcaggctgaagtgctgatcatgcctaaatttgatttgatcaagtctctttgatccctcaattggatatctgtgatttggcaaatcatgatctttttcagtatgtctttttctgctgagttagtaatttggttcagttcttaaattgtgtcaaacttatagatataccctggaggaacaacagataaaatntacgacaaactagccaattgcacaccaatataaaatcttttcagggtacagagattgacaattcattttatgaagaccagtacatgaaaaagagatgaacagaaagccccagtgaganaagggctaacatttatccaccagtacatccaataatctaca

SEQ ID NO: 72004 - DNA, 348 bp, Oryza sativa
aatacgattattctcaaggtccaatgactgtctatcgttgctccattatgtttgctccaacaccactattttcatgtgtacacgccaacttgcgaacaaaaagaaaaaagggaactttcagcaccacaaaataagattatcttttgattcagaaagtgtgaatattatgttatttttctatctagcataagaaacttatatatgggtcaagaactaccatatgcaagtaagccataattactttagtggtgcatgctactattaaactcgaactccatttgataaacaaagaagctgcacaaaatagtgagactacagtatataatgtccttcaatccctataatatg

SEQ ID NO: 72005 - DNA, 390 bp, Oryza sativa
  unsure (1)..(390): unsure at all n locations
aatgaaatggaaatctattgtaaatggaagacagtcttcttcaaagttccaacagcagcaagtggagattgtgaccatgataagtatcagagtgactctctgcgtattccaatgatttatttcaaatgtgtggctgctaccacatgtacattgagttcattagctgatcatcacagtgctcctgcttccttggatactctggctacactgcctaaacagctgctaatgggccagtaatgtggtgagcccctctgctgattccttacaaagttctgaacagcaaacaccacatgcatgtatcctctaagcagattngcagacgccgcttctgacgatgctatgcatctgtgatgcaagtcgcagcctgtacagagcagcagatcgggaata

SEQ ID NO: 72006 - DNA, 423 bp, Oryza sativa
  unsure (1)..(423): unsure at all n locations
agcttatttatggactgtaccatgacagtactcaaaatcatctgcagtcattatcatccttcaggacactagtactggcttcaggaactttggtaccacagatataaaaatatattacaaaaataagattcccagttccagaaaaagtcaagatgtcaacatgcatcaacaagccaacaaacaagcatgatgaaaataagcatatgcattttgctgtactcataggttcatgaaaggatgattgattgttgactagtgacaatctgccttaagggaaattatgtgatcaatataattagaaaaaaagcaagcttaatacctatnntcagttaagtgtagtattcgaaaagtttatcgcttataagtgttaactcttagttaataaatagcactcagttaatgccatatgaatagtggacatga

SEQ ID NO: 72007 - DNA, 383 bp, Oryza sativa
atattggaggaccgtacatggaaatgtacattctgcctgcccatgcgttctcacatcagatgtgttctttgcctatagggaagaaataggccgaacataaagcggatttgccgaaagaaacatgaaaggaaaaacgaactagtgcctgcacactatgggtcatatgataaccataaccaatgctttggcaccactgaaaaggagcaaaccgaacaaaatagctggtggtgcaacctagtccattcaatataggcagctcgtgatagatgttcactgagaccaagtaaccaagaagaccatagaattctaacatatcaatgtaaactgtaagtgagttataaaaagctgatctctattgttctaaggtggttcaagttaacatt

SEQ ID NO: 72008 - DNA, 396 bp, Oryza sativa
  unsure (1)..(396): unsure at all n locations
aagcttcctcatggctagtcaaaaaaaatgccaaanaaatgtcggagcttaagtttaatccaagcttttaagaagggacgaaacataattaagtggcataattgcattttgtatcaccctaacttaattcccctgaggttaactattgtggggttgcaaagaagatgcctggcaaaattaaaccttgacagggtggtttcctggaccataactgttatctgtgaaaagcacaaaggacaagagtgtgcatgtgcacatacatatctggtgtacgtgcgagactaggcatgaccacaccaacatttatgtcacttttaagaatatatctataattatctatatgtgctntacatggntntatacaatgatacttaaaccaagtactcatctgatgtg

SEQ ID NO: 72009 - DNA, 446 bp, Oryza sativa
  unsure (1)..(446): unsure at all n locations
caacactgcccggatcttaagcaccgcggctgcagcttttgatacttatggatgtccaatctatataggttgaagaagaagtgggctattgtctttcgtgactcttttaccgctgatatgacctcgactcaaaggagcgaaggtatgaataatgtcttcaagaaaagatttcgtaggaaacttggtctttctgagctccttgtagaatgtgataaggttgctgccagtcttcgtgaaaatgagttggatgcagattntaagtcaagaaactcgagccccgttacttgcatcccaaatttacctatgttgaagaccgcagctgactcatatacaacgaagatgtattcagagttttgagagggagttacaaaacaattttcattatcatgtaagtngttgcaaactgaagggtcaatattgacatttcatggtatgcccatggaatc

SEQ ID NO: 72010 - DNA, 402 bp, Oryza sativa
  unsure (1)..(402): unsure at all n locations
ttactccagctgtttaccttgagcagcaccaatacaagctagagaaagccgaattaagactggccgaacggtgagaacgtaaggacattgagggcactattcaagccaaccgtcaacttgtgcatgaagaaaaatccaagctcgatcaattatctgaaagtccaatcaaatctaacattgatcggcttgaagctcgcaagattgatctcttagcacaacttgaagaatgcaatgctgagctggatatggaacgcaagaagctagtcgatcttccccagtccattgaagagcagaaagctatgctcanatcggctattaagcatgtngctgaactgaccaagtgcttaaaagttattcctggaaccgatgcgcangatgctcaagccatataggaagtagagc

SEQ ID NO: 72011 - DNA, 392 bp, Oryza sativa
  unsure (1)..(392): unsure at all n locations
ctcatttcggagcgctgcaacatatggttgaagtaaccccatactttgaggagcatttagcgaatgtccgacaggacaatattgatcgatcagatatttggatcaacagagaacatggtgctcgcttcaacgaatggttcaaggatcgtgtagcacggtcgatcgatggcccaagtgagatattacaaacgttggcaaggggtccatcttgggatgtagacacatggcaagggtacgatatcaatggatacacattttacactgtcacacatgatgagaanagcacagtgcacaacagtggagtccgtatagatgcatatcatgatcaggttggatcgagcacatactactgccgcatagagcagatatgggagctgaactatctgaacttc

SEQ ID NO: 72012 - DNA, 423 bp, Oryza sativa
  unsure (1)..(423): unsure at all n locations
ttgggccagcaatggctacgccttccagcgtggtaaccctcctgagggcattgttgaggtacccctcccccctcggcaagaagctctatgtgaaaaccttgtccaggattttggacggatgatgacggcgtcttttggcgtcgcgaccctcatgagggcgttgttttagagtcttcgtgtcgtggtggtattattggcccagtggcgatcggtctcgcatagcgatggtcggttcgacgcttagcttccctctctgtagcgtgtgtttgggcggatggcacatggttcgaggcgtgtgctctggtgcataaaacttttcttgtaactttntcttcctatcttaattacattgaatgacctncttcggtcattccggcaaanaaaacaattttacttccgaacttaatttctcggagtaaatat

SEQ ID NO: 72013 - DNA, 334 bp, Oryza sativa
  unsure (1)..(334): unsure at all n locations
ggatgatatgcagatcccttcgctcgagtttaaaataagcaatgggcctttccctggagtaattccaggattatccgcaactacactcggtcagaacactctgtcggtcacttttggcactcgggagaacttccgcacagagaatatcagctttgaagttgccgatttcgagacagcataccatgccatactcggacacccggcgttagccaagttcatggccgtnccgcactacacgtacatgatgatgaagatgcctggtccccgatgagtcctaaccctactgagcgacatcaagcaagctgtcacatgcgacaaggagagttgcgacatg

SEQ ID NO: 72014 - DNA, 368 bp, Oryza sativa
agcttttactatttctttactggcttctctcttctcaagggaaggtaaatatcgggagcatataaaattgctccctgcaaagtatcagttttttgagggagcctggcaagattaatacattgttgtatctgaaattgtttcaacatgttgcactctagagtttcttctgctcccacgggaaggaaaataacctgtcccccaaaattctggcattgattattttattgttggtgtcagtaatgtgttgcttgtgttgaaatcgtgagcttgtcaattgctctgcataccttttatctgttgttattgaatgagaagctagacagcggaggtcaaatatacttgtgcattttaatacgacacttctgatg

SEQ ID NO: 72015 - DNA, 279 bp, Oryza sativa
ttggacacacttgattatcaaacaatatgtactatatctaacccactaatttcgatgcaagtgctttattttgatgcatactattgatactctgctatttctagagtgtatgtatatacggtgcgacatggcatgcgattgtttacacagtacaatgttatagctacacgccgttacaccgacagacgtctacaaattcttcatgcaaccggaggtgtacatagcatccgtgtgacgagtgcatcgagacttcgtgttgaactaggcgcgcgcattcgg

SEQ ID NO: 72016 - DNA, 308 bp, Oryza sativa
  unsure (1)..(308): unsure at all n locations
aatcggcacctctcgantaaatctttgatggtccttgaattactgttcgtcgtgtttctactgtatctttcgtggactgataagtttgctgtgccgctcgtgaccttcctgatttgatgctctgcttctagattctcctttaattaatcgagggttgcgagcaagattaaatgactgtttcttctattgtattgcgtaattaagtagataataacccgctggataatctggcctaagcttgcaagctgcgtcgtgtggtgctgttgcattctgcagtatgtgattaagtacatgtcgacgtgctcgtg

SEQ ID NO: 72017 - DNA, 469 bp, Oryza sativa
  unsure (1)..(469): unsure at all n locations
agcttattctatgtttacttagaanaaaaatcgaatgggatgctcatcagccgggataacaccagataaaatatgacaagctcacagccatcaagaaagaatgttaatggcagcggcatgcatgccangagatacttaacgatcttcttcaccaagaaacagcacaacccatgtcataattaacatgcagcatggatctggctaggccattgaatgaagaataccctgagctaaatcttagcaagagggaaatatattatgtacgaataaaggttttatcctaatgaaattatgttgctaggctatcgagaaaaataaattgtatttaccattagcttccaggtgttgataatccatcaatatatgcatatttccatccaaatagttcccttttgaatatcttctggtgggttttgatatctctcactannatgatgcaagaggaaatactaatagtggatctcatagg

SEQ ID NO: 72018 - DNA, 421 bp, Oryza sativa
  unsure (1)..(421): unsure at all n locations
agcagtccctatataggaattccttgcaaataattcatcagtttatagacttatccaaataacaatgaaacaagcaatatttttttgaggaaattgctggcagcactgcttatatagaaatttctgtaaaataattgctcctgagcttgtgttcgtcataaatgttagatgttactgtagatgtttctttccttaaaagtttccctaaacattcttgcttgtttacaggaattcctatatgaacactgttgccagcaatttgctttttaaatattcttgcttgtttcattgtgacattggtatttggacctgtctataaatgaatgtaattatgttacaggaattcctatatagggactggctgtggcaatntaagtcactacaacaaaacatgtgtttagagacatcttatttatagtct

SEQ ID NO: 72019 - DNA, 398 bp, Oryza sativa
  unsure (1)..(398): unsure at all n locations
cacgatgtatacaggcatgagacatgctatanttggaaacttgattttcgctttattattgtcaggtctacctcttgcataatttctttttttttatttttctccgtgcactcttaggccttattaaacatttttctgaacaatgtatgtctatgcggctctcttctcacttacatgttaatgtaacatcctaatcaacacttaaattagcaggattagtcttgtttgtgtgttctttggccttggttcacatggacctggcaagttcatgtaccanaatgagtgtntactagttcatgtactacattacatccatctaaaagttgtgaccgctagtgtaattactcttgtgcanacatgggagggatgnacgaagcgatatttcatctgtatgggga

SEQ ID NO: 72020 - DNA, 373 bp, Oryza sativa
  unsure (1)..(373): unsure at all n locations
ttccatatactaccataagcaaaacacgtattttgtatatacgggcaggtcctgggtgctcacgtttataaatatgtgatatagtaccattgagaaattttatgagattagtggatttgttcatggacattgtctgttgagaccctgagggtggtagttaaggccttaaagggacatggctcatgtcactagctaatgtgtatacatgtggcatgtgtgtttatgtgggttccatgtgtttgccaaacagtgttctcatcggcattntatgtctggacaaaagcaaccaccaagaatgtaccatcacctggacatgcatggaaagtggccctcgatgatgtgcttgagatggaaactaatgagcggtaacaca

SEQ ID NO: 72021 - DNA, 314 bp, Oryza sativa
  unsure (1)..(314): unsure at all n locations
tcttttatagccggttcatcagagagtattcatccagagtggctgccaacccagtcatggtgcggaaggccaacaagaaatggagaatgtgtgtcgatttcaccgacctcaacaaggcgtgtcccaaggatcactttcctcttcctcgaatagaccaactgatggactcaacagccagttgcgagttgttgagctttctcgacgcttactccggttgccaccaaatcagcatggcgaaagaagacgaggagaagacagcattcatcacaccgttcanggtattctgctacgttaagaatgccgtcggactaata

SEQ ID NO: 72022 - DNA, 398 bp, Oryza sativa
  unsure (1)..(398): unsure at all n locations
gaagtactagcaccaaactagtgtntgccatttaaggaagagcaaagagggagagaattcatgaaacaaaaaaaaatcactctttccaaacaaatagatacaattaaaaaggtagaacgcacagcataaaacagaaaaggcaagttttcattaagacgtatgaatatagatttaccaaatacatcagcatcccgattagaatgtaagcaatcaaatgctatacctttacaatactgctaaatatagataaacagaagacacatgttatgaagcaatgaatacaaccacagctagcagaccaataatantttagacaaatatgtacttgtttcaactacaatgcacattgtagcaaagtaggcaacagaattgcacagaggtgacattcatcaagtgca

SEQ ID NO: 72023 - DNA, 439 bp, Oryza sativa
  unsure (1)..(439): unsure at all n locations
agcttctctttcnatttttagtcccagcttctaggaaatttatcagggcaaaagcagataatagccatgtcctcccaattgctacaacatggatccatttgcttggcatgacaggagtccatgtcacatcatacactacatcttcagaaacactgcaatatacaatgctgatttgatgatagtatagcaacatcatatcaacaccatcaatttgttgctttatcattccttgaaaatgaaacccttggtaagctggagccacccacaatatatttctccattgataaggcttgctcaggaaataattagctgataatttgaaccgacaccagctcatagcttgctgaatcagtaaattttcatntctcaaatgagctagactgtagcttggaactagctcgtccaatgactgcataggcagagcaatatccatcatatc

SEQ ID NO: 72024 - DNA, 428 bp, Oryza sativa
  unsure (1)..(428): unsure at all n locations
agcttgtttctacttcttttgtttcacattataaattatcttcaagccagtgttctattaatgaagatgacaaagattaccaatcgcatgttccatatgccagtgctgttggcaatcttatgcatggtatgatttccatttgcgcagatttagctcatgaagttagtgtggttagcacattcatgcataatcctggcaaagaacattgaaatgttgtaagtggattcttcgttatttaaaaggtacttctaactttggcttaatgtttgatatgaataaggtgaagatagatgatgctngttgggttgttcttaataaaaggtctatatccggatattctctttgtgtggntctgctgtaagttggaaagcctcaattcagtctgttactgctcttttcaccatagaagcagaatatatttctactac

SEQ ID NO: 72025 - DNA, 381 bp, Oryza sativa
  unsure (1)..(381): unsure at all n locations
caattcagctcgtacccgggattcttagagtcacctgccgcatgaagcctgatattcttttgtattaccttattcaatgcaactggaatggtacaaaatctgtggacagtatcatgccagaatcacatgaactggatggcacaacagtaattggtgaccgcgccacttctaagggacctttggttcaaagcacttggcattggtggctgcatccaatagtatcttatctttgaagaggctctgtagtaggacattctatttactgaagtagttatgtactttgtaccacctgaaatccatctgaaccaggatgaagaagtcagatattcttcaagcaggggggcatctcanggtggctatggtgcatataatgcatacatt

SEQ ID NO: 72026 - DNA, 433 bp, Oryza sativa
agcttgttttggcaggtcgtcgtcttcctcctcagatcgtgctccaccaccttccatggcgaccacgtgtacaccacgtcctcctcctccgggtgcatcgccaagaacctcacctcgcctcctccatgcgcgaggtgttccaccttgacggcatgcttcggccgccattggtcgtcgtcgtcgagctcccagaccttgagaagctcgccgtcgcggaagatgtagtgcagccggccgccggagtgcgcgacgtgggcgtcgccgccgtccaccggctcggggaggtcgatcaccgccgccgtggatgagaagtcggcgaggtttagggagacgaggcagtcgggttcggaggcgaggatgtagaggatgccgtcgtggtagtgcatctagcctgagagcgagctctcctggacgccgccgaactccgtgtcgc

SEQ ID NO: 72027 - DNA, 388 bp, Oryza sativa
tgggaacgaccaccgggttcgccagccactccggatagatgacctcacggataaatccggccttcagaagtctcgcgacctcctcgcggatgaaggcttgacgttccggggcctggcgccgcactttctgccggaccggccttgcgcccgaccgcacggcgagacggtgctcaatcacctccctggggaccccgagcatatccgccggtctccatgcgaagacgtcagcgtttgcccgcacgaaggagacgagcgcgtcttcctatttgccgtccagaagaccaccgatccgtgtggtcttggacgggccgtcgcccagtgcaacctccttgaccgggacctcatcggacgtgactatccgctgcctcggggcggcgggggcggatgt

SEQ ID NO: 72028 - DNA, 418 bp, Oryza sativa
  unsure (1)..(418): unsure at all n locations
tttcatgaattagcttttggcccaaaattccatgaatgctaaccttgggcccaaaagcgttttaatattaacctttgaccaaataacacatctagtgttagcctttggccaaataacacatgaattagcctttcgccctagaacacatgaacattagcctttgaccaaaatttgtgggtattagccttctggtggcccaaaaatgtgattgttttccatcggcccaaaaacacgcacatattagccttcggtcccatgagtattaaccttgggcacaaaaatgcttgctagccttcacctataaacatgcaagtattagccttcggcccanaaattaatgacccanaaatgcatcgatattagcctgtcttgaaatacatgaatgattgcctttgccgaagatttgtaagtataacat

SEQ ID NO: 72029 - DNA, 424 bp, Oryza sativa
  unsure (1)..(424): unsure at all n locations
caacctatggttggtgtgtctttcgagtagacttggattatatttggtgtcgtctatccataattagtttaatttgccctacataattaataagaactttggtttcgttatataatagtgcagagcatgtaggaacatgtgtattattaatccataaaacatgttcgaacaatatgaccatatgtgcacggcacaagaaaaatcaaagaaacttcagttgcaaataatcgaattgactaatatggtgcttcatttattatttccctaagagatcatggttatcacattcatgaacatattggtaacctttctataagtacgcaaatgcacaaacctaatgtacaatatatagtcatgcttggttccttggcatgcagngtcatttgcaaatgtgagctcagagctcattggtaaatggagaatc

SEQ ID NO: 72030 - DNA, 424 bp, Oryza sativa
  unsure (1)..(424): unsure at all n locations
agctttatatgccactgcgaaagttcttgccagttaattagctcttgcacaggatgtaaagttaaacattggtttatacagctccttatttattgatgaaagatacaactttgttttcacgatgaaataattcatccacatggggttagatgccaaatagtaacttatgtacccaacagtagctgggggtctactgttaggcaccattattaatggatgtttcatgatgtcttctcatacagcaacattcgggtacagatacacctagcagcaatgttactatgatgtacagaaatcataagtaggcatctcatctgtcaagagaaatctaactactttggctccttcgtgcagaanatgaactgttagtcacttganagacaggttcttttctgggaacagaagaattcactagatgcttatg

SEQ ID NO: 72031 - DNA, 451 bp, Oryza sativa
  unsure (1)..(451): unsure at all n locations
agcttgctcaagtggagggcggccaccttctcgtcgaggtgcttgggaagaacgtacaccttcttctcgtacttgccagtgctcttctccttccacagctcaagctgagcaatgacctgcaacaagcacagaattgattcaatcatgtaacttacagctatactcagcatgtttagtgagacaatagatactggtcatcatattttacctggttagtgaatgagcaggacatgacaaaactggggtggccagtagcgcacccaaggttcatgagacgaccctcagcaaggacaatgatgccagtgttggtctcagggaagacccagcggtcggtctgaggcttgatggtgatgcgctngacaccagggtaggtctcaaggccgagcatgtcaatctcattgtcaaagtgaccaatgtngcatacgatggcattgntcttcatcttnctcat

SEQ ID NO: 72032 - DNA, 354 bp, Oryza sativa
  unsure (1)..(354): unsure at all n locations
agtctgtgtcaatgctcatttgcttaagtctaatgtagtaaattatatgtggcatatcaatggactcttgtgtcttgttcttactaagatgagattattaataatggattagtgacttctcctgcgtttgtagtgcgtgctttacttatttatattctctaaaaggaaaaagtctgcacaggaaatggcaagctccctgtacttctgaagttttttctttggcaactatccacttaatttatttcctctttatttaatttattgaacattanttaacttcccacttgcccttcctgtacttctgaggttgttttttcacagctaaccacttaaatcattccctcttatttaatc

SEQ ID NO: 72033 - DNA, 317 bp, Oryza sativa
aagatgtctactttttgggtaagctggagatgctttgacatgctccaccacctttacagctatcttggtattattccttgtgaacctcaaggaattcgataagcatattagacaaatggtgacccttgttctgccaagtctgagtagacaatgacacaagctctacaaatcttatttcccacttaatatctgtcgtgtattcatagtgaaacacaacgaaatcaataaacatatatttaatgatgtctacaatagtggcacctgctcttgaaagcttgaatagacgttggtataaatgtctcgaatcttgtttccta

SEQ ID NO: 72034 - DNA, 367 bp, Oryza sativa
  unsure (1)..(367): unsure at all n locations
gggatcctcggatgaacgaagcaacctagatgcttgacacaccatctggaccaaaatgccctcttgttgaaaagggggaactacatgtggaatgcacacctgttcaccaaagtgattcaaatgcttatcatcgtcactcatttggtcctgacagggtgcatacttgtgtatctgatttcagggaatagaagagccatggcactgggcataatattagatggtagtcatctactgctctgaatatgtgcgggtcaccttangacactactagtgctattttagttagtgatagatattttctgcacttcatcctgactgcacagtagacggatgcaacgtgttctactcgctaataattgcacatcat

SEQ ID NO: 72035 - DNA, 331 bp, Oryza sativa
  unsure (1)..(331): unsure at all n locations
taaattttgaaatatatagttctgtgataacaatcaataatattgtatgttttgtgataacaatcaatattgcaccagtgggttgatgatatttggtattaaatctaaatctatagttttgtgaaaaaacggtgctaaatactccctccgtcccataatataatggattttaagtttgtgattgcaatgtttgaccactcgtcttagaaaaaaattgtgcaaatataagaaacgaaaagttgtgcttaaagtattctggataataaaacaagtaaaanaaactaacatataattctaaattcttgttgaataagacgagtgatcaaagagt

SEQ ID NO: 72036 - DNA, 350 bp, Oryza sativa
  unsure (1)..(350): unsure at all n locations
tatttccaatttattattccgaattattggacacatggcctggccnccatggcccattgtgtttataaaaacatttgcgacctgcatggggtgtgtgatttaattaaacctgcaccgattggcctgtttcgtgtggttttcccgttcgcattatctattatatactaaaagtccattaaactttatattaacgctcttagatcgtcacgtgtcacttctacaaacgttnttaagccaccacgtggcaatgtataatcacaccgtcgattttacctaaatcggtgacccaataatttggaccattagattaaatgtattattatatatttaaaaagaaacaaataccttac

SEQ ID NO: 72037 - DNA, 452 bp, Oryza sativa
  unsure (1)..(452): unsure at all n locations
tagcttggtgtctccgaagtagacgcactcgccgctggagaggaggcagaggtcgtccaaaagggcgaagacctcgctgctgggctggtgcaccgacgagacgatggtgcggccgccgtcgactgcgagctggcggagcgtctcgatgacggagaaggcggaggcgctatcgaggccgctggtgggctcgtcgaggaagaggagcctgnggcgggtgaggatctccagcgcgatgctcagccgcttcttctcgccgccgctgatcccccggaggtgccagttgccgatgttccggtcggcgcactcccggagccccatctcgtcgagcgtgtcgtcgaccacccgccggacctccgccttggacatggtcgacggcagccggagcagcgccgagtaggtcaccgtcttccggaccgtcagcgtccccagcagcacgttctcttgtgtcacgt

SEQ ID NO: 72038 - DNA, 414 bp, Oryza sativa
gttatatatggccagagcggtatgtgtgcatggtgtacctaagaagatagtgtctgatagaggtagccagtttacttctaagtgttggcagaaattacaagtagagatgggtacccgtttgaatttcagtactgcttatcaccctcaaacaaatggtcagacggaaagagtaaaccaaattttataagatatgttgagagcttgtgttctagattttggtggaagttgggataagaatttgccgtacgcggaattctcatataacaacaggtatcaagctacgttgcaaatggctccgtatgaagcattatatggtcgaaagtgccgtacgccgcttctttgggatcaaaccggtgaacgttcagtattttggacagacatattgcgagaggcgcgagacaaagtgaagatatt

SEQ ID NO: 72039 - DNA, 339 bp, Oryza sativa
tatatatattccaacatcttagttcgtttttgggttcaaagctctgtgctaactggtagcctttaacctttttcatacgaaatcagacaggcaactaaaatatggattctatctctttttactatagatggaggatggcaatatacatgagaattccttgaaaaccttctacggaatgatgctaggaaaattccatgtacatcacagaattcctatgaaaatttgctatttgaagcacacctcacatgcatagaattaggctctaggagttgaaccgtagtggaccgagttatgcaacccacatagttcacaactctactactgtgccttactgaacct

SEQ ID NO: 72040 - DNA, 408 bp, Oryza sativa
  unsure (1)..(408): unsure at all n locations
agctngtgctccttgtattntgcatggtagaaaaggagaacaaggtaagttcatacgtgtactgaggcttcgtcctgcaaattaagctttgccacacgttggcaagttgagatggcctccacgctaccggtggcatgacattcaggcattcaacgctctttaacttggcaccaacacgtgaactcaatgtgatctcccagtttagttttgaaacacgtattggtcatggtaaatattcgaaataagttttcctaaagggctaagttagaccagtgtacgtaggtaagaaacagtatcatcactagagtaatggtgtacttattgattgtngattattactgatctagtgtgtgaagaattgttgagtgtttcaacaatgaaaacgaagcgttcggcatgtgataagcg

SEQ ID NO: 72041 - DNA, 446 bp, Oryza sativa
  unsure (1)..(446): unsure at all n locations
agcctctttaaattatacaagatgttctattagcatattagcaacaaaggacatcagcagatttggttntgtgttactccgaataacagggagcaaattcatggtggaaatgtacatggagctcgcaaacattggctaattatggagcaattcaagttgggttcaacgacggctggatgttaatacatnttggttcattatctaatatttaacaacaataatagcaggtgcaacagcacaatgtacatatgtaggtgttgaatcaagggtgatgctacctgngtagctaactaggctttagacgccaagcctcacaggcagctaatagccccgttagtgtgttgtatttttcaaataccatatangtgtgatgatgtaagaatggagctntactcgcacattgtgcacactacattttaatgcttgcatatatgatgagatgaaac

SEQ ID NO: 72042 - DNA, 431 bp, Oryza sativa
  unsure (1)..(431): unsure at all n locations
agcttattctgtatgttattgttatttcacagtcctcttttttgggcagaaagaatgccttttcaaagccaaatactttttacaggaaaggtcaagattaccagctcctggagatgcgaatgagctctctgtcattgaaggacagctcacatggctagtccacataattgaagccattctcaagattaggcagaccattggttgtaggtgagaaattaacattccttgcttccttatattctgtttgatttcctttntttttcacctacaatngctcatttttcatgcagccaagaatcacaggagttaattgatgcagaacttgcagcccgtgtgttacagttgataaacgttactgacacggnggtgcacgcacaggttagatgaaaatgaatttgtcatctaacatcaatgctgagtgctgagctagt

SEQ ID NO: 72043 - DNA, 444 bp, Oryza sativa
ttatctttatttctggcataatatcattctcaccggtttgcagttcccattctctactttcgaggacacttgtccaatgctccaagtcaaggtgatttctcaataaccgtcctacagtttttgctgccaaaggggagcccttcaatttttccgctatcttcttcccagtgacaagtaagtccacgtgattgcctattgatttctcatcaccaaatacacatgcttggaatagttcccaaaacacttcagattctagcccttccaactgtattgaatgatcaattgttttaaccatttctgcgactgctagaaaacgagtggtgactagaattatatttcccgttgattgtgcttttcttaagggtgctaagagccttctccactcatcctcattaccacaattccacatatcatccaagacaagtaagaaccctcttttgattc

SEQ ID NO: 72044 - DNA, 335 bp, Oryza sativa
  unsure (1)..(335): unsure at all n locations
aggttataatgtgtgtatttctatatataaagcatacacacacgatttttcaatgttataagtacagtatttgtttctattttctctcttgttcttgaaactatcttttaatggaaaaagtataaaataccccctgaactattattgtcgaccgaattaccctctaaatttgaaaactagaatattttacactctcaactattaaaatctaacaaataattaaccccctaactcaattcggagtaattatggtcctatgtggtatatgcataacagtccagtcaacaattattntttaaaaattagtggtatatgcgtggcagtccggtgagatc

SEQ ID NO: 72045 - DNA, 434 bp, Oryza sativa
taagcttgtttcttaatgttcgcaagatattcatggatcatgaccctgtacttgttgaggagtgcctcaagaaggttgaggaagatgaagcaaaagaaaccgcgttgagatcaaaacgtgaggccacatggaagcgcctagaagagattgcctcgtcaaaaactatcagcagtgagccagcagttcctccagaggctacagttcattagcagcgctcctcagcgttgcttgctgaatgctgacgtcgtatgagcagctcgtttgccagatctagttagatcactgatgtgaatgctcatggattcctgcatgcctcatgttacttgctcctgaacattttcgcaggctgacttgtatatacaaggtagatgatggacttcgaatcttcaacagggctcagagctgtgtctgttccgagatcgtagcacctgttc

SEQ ID NO: 72046 - DNA, 328 bp, Oryza sativa
  unsure (1)..(328): unsure at all n locations
tggagaagttaacaatgctggtagttctggaaaagagctcgaagctaaagtcttagagggagaaaaacatagcaatgatgaacatgatgaaaacaagttcagtattgacctaaataaacctgctgccatagatggtgatgtagcaaaggaggatgataccaccaccgcattgccacatccttctgttgcgatcaagatgcataaagagaaaccatctgaagaaaacatgagcaagccaaacagcccaaatacgacggaagagatgaataaacaagatccatcccttgacagcgccacgcatactgaanagatttcacttgaattagat

SEQ ID NO: 72047 - DNA, 445 bp, Oryza sativa
  unsure (1)..(445): unsure at all n locations
tagcttgtgttttataaagcagtagaggcacagtaacatagaacctagaagagttgtgttatgtttaggttgtacagaaatctaaccacaccttctaattctataagttgatgtttaataaacttgataaaaattagagtattatgtacttttcagggcaaatatagacatttgtacatcgaattactttacttaaattatgtccaaaatatggccggagtgagttaccatctctntgtttacacgatgtctaaaacaacagcaagtctccaataaacatgtttttttaatcatgcattctataacatgcttaacttataaccatatgaaaacattntccataacaatttttgtcaaatcattgtgttttggaagttgttttatgttggctacatctatttaaaatggtgcaatttgagacttatttcattatttagaataaaat

SEQ ID NO: 72048 - DNA, 427 bp, Oryza sativa
  unsure (1)..(427): unsure at all n locations
agcttgttatagaggcgaggttgttttgcaaatgttttgtttgaaatcantttggaatcactaagtgattatttcttttcaggttttgggtcgaaaagagacttgcttctcgattcaactttaagagatgcttttcaacaactcaaatggtaatgtaccgacctcccgggtcagatcattacttctcggctcccagagccatttcacttgattaatcggctcccagagcctttttcattttctcggactcccaaagtctagctacccggtagcacaacaatctgcttccactcgggaagcctagtctatgatgcctcgcagacatcccgaatcacacagattcatttctaaccactcaggtcatncatttgccacataggctgattctggtgacgaatcccattcacaacaactnttcacaaagcac

SEQ ID NO: 72049 - DNA, 324 bp, Oryza sativa
tactttagactatgcttgcctctcctagaaaatcccttggcgtatagaaattgagaaaagaacgcctttgcattgctcttgtagaaagaattgtcaggaagtacgcttgcctatttacgcaacgaacaaagatggtcaatgtctgctataaaggtagagccaatgctttagtcatccttccacataatatattacttttccattgtgcaccacgaatgatcacccttgatctaggagtgtgactgatgatcttcgtgagaccatattctctgctttgcaataaaaatgatgtatgtatctcactatttattcctaacgagctca

SEQ ID NO: 72050 - DNA, 393 bp, Oryza sativa
  unsure (1)..(393): unsure at all n locations
atgtactggttactcattctctattctatgaaaatggcggcttcccgattcattcaaaagaaaagaactttgccatcacgatagactaccactgccacacaaccttcggagagcagcacgaccacgacgaagatgcatcggcatgtcaagctcctgtcgtaataaaggattggggctggggcttggtggacagcctactgggtctccatgtgcattgtgttgctctttggccagatgaagagaatatcagtggccatgtgtggaggatcttggtgattctggctgattgaattatcatgagatacangagtttctgatgccttctangccaatagccatagcaactagttcaatggatggattggccttttcttcatgaaacactgtccatca

SEQ ID NO: 72051 - DNA, 349 bp, Oryza sativa
  unsure (1)..(349): unsure at all n locations
ctggacttggactaagaattatcattggaacgtgtgaagttatgaacatatccgattaagtgatgtcctcatcacatatggttgagtcgagactggcccaatggacgccagaattgataatagtactcaacttactaattaccgatgcaatcgtctttgagggtgccgatagtgaactangaataaataaacttcctataaacgcttctaaacccgcacgtggcgttcctacaaatactcttaggccgncatgtggcactatctaatctcaccatcgattttcacttaaaatggtgtaccccgttatttataccattagattagaaattattataaaatggtgataact

SEQ ID NO: 72052 - DNA, 281 bp, Oryza sativa
agcttgctctaagtcttcactacggcgtaagcgagctgttccatttcgatgtatcttgtcttcgccccttacaaagcttcggagacgaaatacactggtttctggcctgactctgtctcttggacaagagctgcactgaccgccaccagcgaagctgctagatggagcagcagttcgcttcctggtgttgggctgaccaaggcgggtgggctttgcagatactgctttacctcgtcgaacgctacttggcatttgggtatccagctaaactttcccgcgcc

SEQ ID NO: 72053 - DNA, 388 bp, Oryza sativa
gacaaggacttgtatcaacccatgggtataaatatgtacacccggggtctatgtaatctatctccacgatcaatacaattcggcgcatcgccaccttttaccttttccactttattttatcgtccggcgggacttggcacctgacgcggggctgcatcggtgttcgatctccggctaaggggtaagtccaatgttctgccggcccaggcaattgtatagtctacatcggcgtcgttcaaggctgcatcagtacattcgacctcttggattgctctgggttggatgatatatttgcctaacctattatcatatgtctctcttaatctagtcttagcatatcaaattagctctatcggctgcttctcgctttatgggttctggcgatatc

SEQ ID NO: 72054 - DNA, 405 bp, Oryza sativa
  unsure (1)..(405): unsure at all n locations
ctgccaaagcctcgggtgctcttcttgctgcttgcaagaaatatggggaggtggggttggcaaatgttgcatggagagcattgtttgagattgaaccggagaatgcaggtaactntgtttcacttgcgaacatctattcacgcatgggtatgcatgacaaggcagaacaagtgagaagggagatggagcagcgaggtgtgcggagattgcctggaagcagctggatgatacattgcaagtcaacgtgctagcatcattttcaatgaattcctctttgcatgcccacgtgcctatatgaccattacagctctattatcacccanagcatgaattaactgactgttctgcttgctgcaatgaactgttctgaaagggaacacactttgagactgcatacagactcac

SEQ ID NO: 72055 - DNA, 274 bp, Oryza sativa
atatactgagttggaattgaattcaactcatttctatatgctgagggatattcgacctgatttgctggtgtaaatgatagaaagtatatggacatgtatttttgtacatattgatgcaggctttaaaacaattatgtgctcaatcatgtgatctgaatatgtgtgtgtagtgtgtctcgatcaatcttgatattaacttaaaatatgctacttgaaaagactttttggatatctatgtctacatgtagatatgcacctatccaaccatgaatac

SEQ ID NO: 72056 - DNA, 327 bp, Oryza sativa
atatgcatgtagcgagaaccagagataatacacgtgtgacaccagaagagaggagatggaggagaggatcccatactgggatgatggaacgttccaagctgggttaggacctattactcggccactttactcgggctttgctgcgtgtgtgcgtgcactgatgcaaagctctagctagtgtaatgtttcagaatagaaggaacatgtgtgcgtgtaccgtagtagtgtactatgcaatgctgcgactgctgctgtgctacttgcgatgctataataagggtatgttggggtacttggatacctcctgtttctaacgaggttacaaca

SEQ ID NO: 72057 - DNA, 365 bp, Oryza sativa
gcttgttggtgctggcactccggcgtgacggagccctctcccgatgtgatgcctaccggattcacacttccgttaggcagggtagctaacaccggtcgtacctggagatcatgaaatgctatgttccgatgctcactatggtttcatgttcatggatcaaagggacttggaactagacaagagtctacaagttccgatcatcttatccatgttcagcactcctaaatcatggagattgatggaaaacaaatccaactcaatgatgggtagtactcctatgtgggaaaattctcgatatctgtaggattaagtccattattaggccatcagaactaatcatacatataatcttggtgggtcaaatc

SEQ ID NO: 72058 - DNA, 311 bp, Oryza sativa
  unsure (1)..(311): unsure at all n locations
taattgacccaaagttacatggtgattttagacttgaagaggctgaaagagtttgcaaagttgcatgttggtgcatccaaaacaatgaatgaagttattatggttcttgaaggactatatgagctagatgtgcctccgatgccaagactacttgcagcaataacagaatgctccaatatgtctcagtgtgatagttcttaagtaatntgtagtcaataataatatttgttcataaaaggttgatgttttaacctgattggaaggaataaaggaatgcaatcttgcaaatgccaaattgtgccgccacccta

SEQ ID NO: 72059 - DNA, 288 bp, Oryza sativa
tttattaccctcaccaaatttaagctctcaaggcgcggtgttagacatcgaaccatattttttactgacgatcatggtcgtaatcaaatcaatataccattggacttgttctagtaggaaattctgaaaaacagattaagaagatagaaacttgttccttgtaatcatgcgacctgatatgatattaaattcagacttctccctctcggaagtgaactattcagcaggagaaagtacatcttccattcataaatgataattattttaccaaaatggctgggttttcat

SEQ ID NO: 72060 - DNA, 423 bp, Oryza sativa
  unsure (1)..(423): unsure at all n locations
tgtcttttttagtcgncgncactatggatattntgacgagggatacttcaactactttggatctgggaagacaaacccaaccagagtacgtgccccgacaagatcggaaccatcattgtcaacaatttggtctatcgagatcatccaagcctcaagatacgcggcgtactaaaagacgtcagatcgtataatgtacaatgagtacgcagtaaggggattggtggattggttttttaaattaatctactaatttcgtagatacatccggcatgtatctataaaagtacgcaatattttatatgcaacttatcgtacatattcagatcatacaacattgtcagatctataagttattatgttacctagagcatgtttttatacatatcattatgcgagtgctctgatgtatgccactaccgttaa

SEQ ID NO: 72061 - DNA, 390 bp, Oryza sativa
actgatcacacacaaaaaaatttcagcagcatgctgatcaagcacaataaaaattgtcttctccagcagccttggtcaacgccaattgccttgaataaattgagtgttagttaaaacataaagcaggatcaacaataccattcaaatagaaagatcttacctttcagagacaggtccaagactagcattgctggaatcatttcttgaaactttttgtcttttgggtgtgctagcacccgctgcacaactaagtgaacctagtggtcttccttggttgtcactattcttccttgaaatgtaaaacaagtaaatatattttcaaaaggaaatggacaataaatatgctagaacaagtaaatgtgtgatcttacattatttctgggaattaaa

SEQ ID NO: 72062 - DNA, 442 bp, Oryza sativa
agctttatatgtttatttaactccttcgactgtgactgtgtgaatatgttttgagttatataaaattacactgctcggcaaagccctggcagtatttcaggtcaaaaaagatttcatatagattgaaacgacaaaccaatcgacgtcagagattagaatcatcgatctcattgagattgccctcgagcaaaaacaatgcctttgattcctgaagttgtttccattgcacttcttgatggataattcgacgcttcccctacctgtcgcgccaactgtttaaactggaattcggcaatatgaaaaagagtatcgcacgagacataaaagtggatggatgtgaagacaagaatttagacaggttcaggccctctcgatgagaggtaaaaccctacacctcgttggtgatttgtatccgccaggtggatattgatctgatgatctg

SEQ ID NO: 72063 - DNA, 316 bp, Oryza sativa
tttttttttttctacacacggggatttggcccggcggtgctcggtctccggacgatctacaacttgtagccccagcgaacatctgcatcccagagagtattgcaaacacatcattggtgactagattgttcttacatgtgagaaaatcgtatcataaggctagcgatagaaagctgcgttcataagatggtaaatcagacccatatagccgtaaagtgacaagaccaaaattatggtaacttattctggtttggggtaacatttgaataactaataaacttaatacttaataattaatcaaattgtggttgaactc

SEQ ID NO: 72064 - DNA, 225 bp, Oryza sativa
aaggcgtttctgttgcatgcaagctttaaggatgtgcccaacacagagaaaaataacctgttcgtaaaaaaactgaacttgtgctgtgccacatttgacttcacagatccaacaaagagtgtaaaggagaaagaagtaaagaggcaaactttgttggaacttgttgactatattgcctcatccaatgggaagtttccggagataattatgcaagagatcacaagg

SEQ ID NO: 72065 - DNA, 270 bp, Oryza sativa
gggtggccctaaatggaaggtgaagcccaaacctcaacatttaaatttggcgctttggcggcttcaattggtctcgcattttccaagtacagggaaaacccttggtcgtggcccagactggcatttaaattgaaattcgggaccaaacgccggaaacctccattagccaggacgaactcggggctcgggctaaccaaatttctcaatggtttggaccagccttaatcaatccgaatattcttgcccatctcatacccgccttatatatat

SEQ ID NO: 72066 - DNA, 202 bp, Oryza sativa
agctttgacaaataaactctgatctaaatttctgaattacggaaaaaattataactgaaaaaaaaaggaatgtttggccccattcaataggggtattagtgtatattactacatagctagggaatgggtgtaatatttttcctatggacaggcccgagaacgtagcgagcagcagttgggtaatatttttgcctataggtaa

SEQ ID NO: 72067 - DNA, 202 bp, Oryza sativa
agcttggagaatggaagacttgagaagaataatgtaatgttgatatattgtttgcacaatattgaacttatcatgcatacattgcatagtgttcaggcttaacagaaatgcactatggttgggcggattgactatagggtatcactgcgtcgagatcctatatgcagctcactgtagaacacatatcagtaaagtttactac

SEQ ID NO: 72068 - DNA, 199 bp, Oryza sativa
agcttaatcaaaattttgttgctagattcggcctgtccattagcttgagcataaaaaggcgacgaattcagcaatttaattctaaaagattcggcaaactcactaaattgatgtgacatgaaagaagccccttggtcagtagttaaagtttggggtatgccaaatctatgaataatatgctctaatacaaaattaatca

SEQ ID NO: 72069 - DNA, 199 bp, Oryza sativa
agcttagcaagtgtgagttctggttgtccgaagtcaaattcttgggacacgtgatatctgctaaaggagttgctgtggaccccgaaacagtgaccgccgtcaccgattggaagcaacccaagacagtcactcagattcgcagtttcttgggtttggcaggatactaccggaggttcatcgagaacttctccaaaatcgc

SEQ ID NO: 72070 - DNA, 199 bp, Oryza sativa
agctttccccagccccttttcatcaatggactcctgacgtctacgaaggagtgtggttcgttcgacaaattcctacctctatatctatctctgaggtgtttgggttttgcaaaactccatagatatgcagaagagaaatgctatccccactccgaccaagacagaacttttaccaaaagtttattgtgatctttttgtt

SEQ ID NO: 72071 - DNA, 199 bp, Oryza sativa
agcttgggagtggctagaaaaccctaaaacatgaaagaactgaagtggaatggccaaagggtaacctggggacgaaatccatatatataacggctaggtgacgtcatctagccgttattcacaagtttgaattggaaacctgccaggaggttccgagcaaaagtgccaggaacttccgggcagcacttaggaaattttt

SEQ ID NO: 72072 - DNA, 194 bp, Oryza sativa
agcttgcatacttctctctcccttatgtatatataattttgggtaagacttgcgagtacaatcttgtacttaacccggtgtctgcaatttcaggagaggattccggttatgagttatgtttcttatgtggtcattgctctgccgagggcggcgagggcaatgagtgatcccttgcagcttggctcttgcccggt

SEQ ID NO: 72073 - DNA, 216 bp, Oryza sativa
tttgtttgcatgcaagcttcttcgctgcacctcgatgcccgcgtgccctcttctgtccaacggagggttgactaccactagcctcctcctcctggttcccctccgcatccctctctatgtttccttcctcgttcaagtactggtttggatcctcgttcccctcttcttcattccagtactggctgcttccctccgcgattgtatcgtacaatatct

SEQ ID NO: 72074 - DNA, 217 bp, Oryza sativa
ttctgtttgcatgcaagcttaaggataagatgggctcacttgtcaggtgcaaccgtcccggaaaccgccataattgccacaaccgtcatagggacccacctgtcagtgaccctgggaagtgtggaggcctgctgggccggcccaagttcgaccgaaccctggtgacgccagctccagttggccttacatgtggacgtccaggattgcttgctgatgg

SEQ ID NO: 72075 - DNA, 195 bp, Oryza sativa
tttgtttgcatgcaagcttggcgttgattggcaccaccaaccatcgtagtgcaactcaataatatcttcagagtacatatacctttcttgcttcatactcttacataatattctatccacttaagtcatgctgatcttcatgtacagttaagttactactccctccgtttcaaaatgtttgacaccgttgacttt

SEQ ID NO: 72076 - DNA, 199 bp, Oryza sativa
agcttggcttaaattgatgttcccgcaactttcccaataccagacggagatggtgctgatggtctttctttgattgtgagtatatcaaaatgtcatcgatgaaaaccacaaccaacttgtccaagtattccatgaacactttgttcattaagttcatgaagaaggcaggagcattggtcaagccgaacgacatcaccgt

SEQ ID NO: 72077 - DNA, 200 bp, Oryza sativa
agcttttcgataacctcgcattggccttacccgctccatgaacttttcatcctcatgcactctaggcgtacacggtttgtaacagcgagaggagttctggcgcacccgggaagggaagactcacacatgcattaagttataattatgttttagattctcacatggcagtcctaccgatggcgacaccactgtagacaccc

SEQ ID NO: 72078 - DNA, 199 bp, Oryza sativa
agcttccgctgtatgctttcaaggcgagtccgaaaaagccgtcttcgcaggaggatgcttccaacgatgagttctttgtcaatctcctgctcggcctggtaaatactaaatagaagcttacactttaaatttcgcacaggagaagttcaagtatttgttctgtattgcgcacaactacgaaatcttgttagctctctgg

SEQ ID NO: 72079 - DNA, 199 bp, Oryza sativa
agcttggctttccccttagccgagagttggctactgatttgattctccagtcgctccctcccagctttgagccgttcataatgaatttcaacatgaacaacctgaataggaccttcgcagaattgcatgggatgctaaagactgccgaggaaagcattaagaaaaactccaaccatgtgatggttatgcataagggcaa

SEQ ID NO: 72080 - DNA, 196 bp, Oryza sativa
agcttgggaaaagttggtagtttgaggaaagttggtagttagaggtgatacctataaggtatcaggcgattcctatcacgtatcaagtgatacctgtcaagtatcaggcgattcctaccacgtattacgtgatacttacgaggtatcagaaaccgggcaccgaagcgtcgtcgccggtggtcctaccgttcatgtc

SEQ ID NO: 72081 - DNA, 200 bp, Oryza sativa
agcttgaagatcattgcatacttacagtatggccatcagcaatttgcgcaagcgatgggtcacggataatggagaggattggaacaacaaatgcatatgagcccccaatgatggtaggaagtcgagtgccgaataatgtctggagcagtgtttttatcccagtaacaaatagcagtgtttgaacaactcttgccttgtca

SEQ ID NO: 72082 - DNA, 194 bp, Oryza sativa
agcttctcgatcatatcgcttcttgctgttgcagttgcacacgcggctgtttgctgcacgacggcgtccctctctgactttccgataggcgagcggcgtagggcgtagggagatgggagggaaaaaaaaatctctgaatgttgcaccaaaagacaaattgggtaaagtcatggatgaaataaattctgtatgta

SEQ ID NO: 72083 - DNA, 193 bp, Oryza sativa
agcttaacaagggtgagttctggttgtcccaagtcaaattcttgggacacgtgatatctgctaaaggagttgctgtggaccccgaaacagtgaccgccgtcaccgattggaagcaacccaagacagtcactcagattcgcagtttcttgggtttggcaggatactaccggaggttcatcgagaacttctccaa

SEQ ID NO: 72084 - DNA, 202 bp, Oryza sativa
agctttgggtgcatttttttttgttggtgattgcggtctcctagttgactaggagtcgcttgtgagaaccccaaggattgcggtgtgtcgcggtaaagtttgtgaaagttagatctcacctccacaaggaaagagatacccttagtggaataagtatgaggaataggtgtcacacctcaccctgatactaatggtgacacca

SEQ ID NO: 72085 - DNA, 210 bp, Oryza sativa
ttgcatgcaagcttatgcaatcatcaaaacttatggagtatcattttcataatatttaaatatgcattgatttatagtacttaaaggacatttatctatatagtattcagcatcaaagatatcatttagtttgtattgtgataatacttataaaacctgacttactaataaaccatgatttctcatcaatttttttccatatctctcgtt

SEQ ID NO: 72086 - DNA, 203 bp, Oryza sativa
agcttcacacacatgtgagaagaggaaaaaaatattgtccactaaagatatattagaagataagagtaagttacttgaggagacaattttatgagtttaagtgacttcacattagaaactacaactccatgcatagctatatgaaacaaatcagaagtttcagggaatgcgcctttaagctagttaactcattcacatctaac

SEQ ID NO: 72087 - DNA, 204 bp, Oryza sativa
agcttcagacctccttatttaggttctgaaggaaaacaaacaactggatgtttagccagcaccaccagctccctttcatcgcatgcccagttttagcattgtctgtttattaatatttatttttgcaccctctccaaagaaaattatgtttttgattgcttcatgacggttgaattctgttttcattccgacacagatgatcta

SEQ ID NO: 72088 - DNA, 199 bp, Oryza sativa
agcttagaggagtggccggggaagcggtgtgtggtaggcaaggatgggcatcaaggcggtgggggcaaagcaaacatgagtgaggggaagggggaaggagagcgggaggcagacaggcagtcatccaagtgtgcctcgccgacatgttgacgcgcctttcaacggtggcaaggccgagtggcgccaacggaaggtggtg

SEQ ID NO: 72089 - DNA, 199 bp, Oryza sativa
agcttcatgctatgatcataccatcatgtgtcaagacccaaccttcttaataactcaaaagacagataggctagagttatagtaatggattccccatcaccaagcacatggcttgttccccccacttgatcacaccaggttacaaaaatattgtgctgatgattaacaaacatgttaacttaccagataccataataat

SEQ ID NO: 72090 - DNA, 199 bp, Oryza sativa
agcttctctattgaccccttctacgtcgttgtgtgtgtaatgcaacttcgtgatccttcaatctcttatattatgtttgcgtttcagctttagttactcttccgccttcatacgtcgggctgaccatgtcgatccatgaagtaaaagcacacatccttggattcccctgaacaatcaatcaaattagataatgggaaat

SEQ ID NO: 72091 - DNA, 193 bp, Oryza sativa
agcttggggggttttgttgacagtcgttatcgatcagtttcgaccgtcaatattaccaaaatagaggagaactagtgatgcttgcaatgcataaatatgttagaataataatattccactagtattaggtataataacctcttgcagggaatgacactaaagtggaggagaatcgacatcaacacaaacgata

SEQ ID NO: 72092 - DNA, 202 bp, Oryza sativa
agcttaagcatagaaacggcgaagatgttcaatattccaagagttgtcgacgagagtaccgtcttcgcgcttgagtcgataggaacctggccgggtgacttcagagatgataaacggcccctcccataaaggagataacttgtgccgatctcgtgtagtttgaattttcctcaaaaccaggtcgccgactagaaaggcacgg

SEQ ID NO: 72093 - DNA, 223 bp, Oryza sativa
aaatccatttgtttgcatgcaagcttttaatacgcatcttggtgcataaggttttatttgatatatgcaacaacctaaagaaaaaatctggctggtatgccatcctgctcttgtctttgattctgttctttgagttggcttcaaattacatgtcgcattacagaaaattttttcttatattttgctaatcattatataaaaactattaattattttctgagaa

SEQ ID NO: 72094 - DNA, 201 bp, Oryza sativa
agcttagcaagtgtgagttctggttgtccgaaatcaaattcttaaggcacgtgatatctgctaaaggagtcgctgtggaccccgaaacagtgaccgccgtcactgattggaagcaacccaagacagtcactcaaattcgcagcttcttgggtttggcaggatactaccggaggttcatcgaaaacttctccaaaatcgctc

SEQ ID NO: 72095 - DNA, 217 bp, Oryza sativa
ttctgtttgcatgcaagctttatggactagtgttttagttctgctcctaatttgttctgtctttcaaattttttggctagcatatttaatttggagtaggtgttaaaacccttaaggtgattcatgttcccaccttgagggaggaggaagaactggagaagtcatggtgttggactgttggttctgcaattgtgtaactgagtccaccttacacaat

SEQ ID NO: 72096 - DNA, 203 bp, Oryza sativa
agctttacgaatcagtgattgttattggataatgatatgacatctttatatattaagctttagaaattagtgggttataactttatagtaagaaatgattcatgccaagtcaccgtccggcaagaagtgttgatcggaaaaacaggccacctcccgggcactgggccggaaatcccatgagctttttctttggaagtgatccg

SEQ ID NO: 72097 - DNA, 198 bp, Oryza sativa
agcttcttttgtaagatgcaatacatggatgatgagaagacaaaggaacttatcggatatctggataccacaaggatctgtcaaacacaacataccatgacgctaccatcaaactccgagcagctcaaagacaagatgcctgaagagatagcggcatactagaagggctttcacaagaccaagttgcttactatcgta

SEQ ID NO: 72098 - DNA, 198 bp, Oryza sativa
agcttgaaccaccatcgatgcaagaggaaagctaagcagccttgaggacattgcagatagaattgtatgcgttgacacaaagcttaaacttctcttcggccacggcctgggcacatgtaaaacagagtatgcagttataccctctgtttagtgtttaccaacttaccatccgttgttttgcacattgatttgttacag

SEQ ID NO: 72099 - DNA, 199 bp, Oryza sativa
agcttatcatctttcaaggttcagacttgcaggaaggagaggactctgaagaacacacttagtggagggcacattttcagttatctttgaaattcttgctcatggtaatgcaaaagcatgtgcttgtcactccggtttcaacacagttcacttgtgacgtcagaaagaccattctggtcatagccttcaggctactgca

SEQ ID NO: 72100 - DNA, 193 bp, Oryza sativa
agcttgcaagtaattacgccgtgtttagtggattttccaaaagggaattgattaaaatggaccttcagtcgttcaggcaatcgtttctattcgtctagcgggtcaagatgttgacattacagcatttattcagaattaacttcagatcggaagatgttaagttcagggtaacatggagaaaaagtttgtaaac

SEQ ID NO: 72101 - DNA, 193 bp, Oryza sativa
agctttagatacttgatgataactaagtccttttccttcactggatgttttacttgaagggtgtttcttgatggcccattgaattatattagaagatgtatcactttccgcaccaaatatgtcctgtataccgatgtagaatttagtaaattgatttaacaatgtcaagcaaaaaaccaatgtgccactgatg

SEQ ID NO: 72102 - DNA, 217 bp, Oryza sativa
gcgttttgtatgcattcaagcttctcgggtttttgatctctgcccgaggcattgaggccaatcccgagaagatacgagctatagagcggatccgcccccccagcaaacttagggatgtgcagtgcgtcactggttgcatggccgccctaagtcgtttcatatcgaggctgggagagaaggcgctgcccttgtttaagctcctcaagcgctcagggcc

SEQ ID NO: 72103 - DNA, 214 bp, Oryza sativa
ttttttttgcatgcaagcttatagtaatcggagtccgaacgaagttccggggattgaattaatgtggttcgttcgatctttagtagcctctctatttaaccaacataaaaaagggggggatcgctcctgcggccctagccgccacaccctcccccttggcaccaatggaactcacatattcttttctcccctggtaaccctactccatggatct

SEQ ID NO: 72104 - DNA, 222 bp, Oryza sativa
aaatccatctttttgcatgcaagcttgactgcacaagactgacaatttaaggtatagtccatgttcagttgtggtcaggagtagccgcttttctaggtggaagttcaacttaacagtctctactgaaacactggtataacaaacataaacaaaaccgataacattgagccttgaaattcggttgggattgttagaattaaatgggctaggcccaaattaatc

SEQ ID NO: 72105 - DNA, 203 bp, Oryza sativa
agcttggtgggctaccccttccatccacatggctcccgaagtgccgccgccggctctcatcgtccatattggggtgaaaacggagcggattcggacacatagtgttcataacatatcctaaaccatattattaaacggatgcggtgtaacatactgaaaattagctatgttctaattatgcatcatgccagttcttatgttct

SEQ ID NO: 72106 - DNA, 203 bp, Oryza sativa
agcttgtcagtctctttttgttggctgatgcctgtagatgagtgtggacgtttctgacaatgagtgcttatcactgaatgttgattcccaagcaattatttttgccatgaaatctcataacaactgtgcatgactgaaagaaatgagtacatcactactggatttttccagagttttggacagtgatgaagggaacaagctgg

SEQ ID NO: 72107 - DNA, 216 bp, Oryza sativa
tttttttttgcaggcatgcaagcttggatcaggggaaggccggagaaatcaaatatgccctaaagcttaaaaagacatatgtcagatttacaagctagtagtgttggttgatatttatctctttccaacagaaacaaagtattaagtcttttttacggttctttataaacaatttaaagtgtcgtctgataaataaaagagatgaatgtgctgata

SEQ ID NO: 72108 - DNA, 198 bp, Oryza sativa
agctttctaaacctaatgggaacatgtgtgtgttcacttttactagtactccctccgtattataatataagggattataagtttttacttataacatttgaccactcgtcttattcaattttctttataaatataaaaaactaaatataaaaaacaaaaagttatgcttaaaatactgtagataataaagtaaatcac

SEQ ID NO: 72109 - DNA, 199 bp, Oryza sativa
agcttacagtccataatgatccaataatgatgaagtgtgctatacaagttgcattcatcgttgttgcaatataagaggtacgtgctattattaacacgagaattaaaaaggtagtaacagttcaacctatactaggtgatatcccgcgctttgttgcgggattcacggatgagtatatgttaaatattatcaaaataat

SEQ ID NO: 72110 - DNA, 193 bp, Oryza sativa
agcttggattggataatgtgatatgcggctcccttcaacacaacagtaagaatctaccacataagattgagttagcctcttgcaccttaatggagtattgaagtctcttggcctatcatgtagcctatatgcaaagtactccaatggggtcattttggtgcatttaatggcttgactacgtgctgttgtattg

SEQ ID NO: 72111 - DNA, 194 bp, Oryza sativa
agcttatttaaatataaaattgattgctcgagttataaaattcgactaaattttatactaaacatcaaatattatgacaggagtattatgttcttgtttatggatattttgtatgtctcatcctcacaaataagtacagtatgtgatcttcagtcaaacacagtaaaacagtttaagcagtcctaacttgactc

SEQ ID NO: 72112 - DNA, 202 bp, Oryza sativa
agcttcgttcaagcctgcattttaattcagaattgctatatttgtgtcgccacaaatttgttagttttatagtcacatctcatacgaccatccatgttttgctaatattttgcagtcgattatcttcaagatttgttatagtatttgctttcacttagagattaaactatatcactggtggataaattattcatactaatta

SEQ ID NO: 72113 - DNA, 216 bp, Oryza sativa
tattgtttgcatgcaagcttgcacagttgcactctcaaagtgatctcaagttcattgttgtgcagtgctgctgctgctgctgcttgatcgatcaaaattatctagctatgacactatatattaattgcgattggaaggcatcaggaactgaagcttgccacaaatctccggtcgccaatctagcgtattgattcttccaccattgatccttgtacc

SEQ ID NO: 72114 - DNA, 218 bp, Oryza sativa
tttctgtttgcatgcaagcttccgctgtatgctttcaaggcgagtccgaaaaagccgtcttcgcaggaggatgcttccaacgatgagttctttgtcaatctcctgctcggcctggtaaatactaaatagaagcttacactttaaatttcgcacaggagaagttcaagtatttgttctgtattgcgcacaactacgaaatcttgttagctctctggaga

SEQ ID NO: 72115 - DNA, 203 bp, Oryza sativa
agcttaatagagaaataactatttagtttttgtttatagcaggcatgcatgttcttgatttagaagacctagtgctcataccgtcagtataaaatattgtgatccattgtgaatgaaccagataaaatcacattttagttagaactcacactgcaaatggggagcattcatgtctcatgccttcttctggataacgctagcta

SEQ ID NO: 72116 - DNA, 220 bp, Oryza sativa
atttttcttttttttggcatgcaagcttaatcaaaagggatatacatgaaggttatcctaatggttgacctgtggttatatgcatgtaattagatcagttaccagtgattgtcaaaacttatggtgtgcagttgcttgtacttgcgtgattatttaatactacgtgcatatgtgcttgtttattcaaagtttagcccaaataattccaacacctgaaact

SEQ ID NO: 72117 - DNA, 213 bp, Oryza sativa
tttctgtggcatgcaagcttttttagcatgtgaaagacctgcaaagatggcaaaagtgagttataagaacattttattaattatgataatcagagtgctttttcctacgaaggaatgtgatgaatcggtggagtaaatcataccagttcattacccaactagaattgcatacctacttcagaaagaagctttaaaaaatactcccaccaatca

SEQ ID NO: 72118 - DNA, 199 bp, Oryza sativa
agctttaaccttccaggtttatctttcaaatgaaaagcagggatttaagacttcaacatggggattactattgagaagaatgatttaaaaactggcaaagataatatgatgttataggagaattgctcatccagaacaagcatgatgttcaattttcatccaacagaacaaacttagttcagttaaactttaattcaat

SEQ ID NO: 72119 - DNA, 199 bp, Oryza sativa
agcttgaaacaatgaagaatagaaaataaaagaatttgctagctttccaatcgtatccgatcattgcatagatgatgaccgtgtacaaaatcccttgtatgatattgtaaatgaactccacgcttgcctgcgtagatcaaccatataaaatcaaccaccacaccaaaaataatggttgattctgctgcaactctttctt

SEQ ID NO: 72120 - DNA, 218 bp, Oryza sativa
actttctgtacgcatgcaagacttcatcgactacggtaccttcttccccagccaacgtgagagggcatctacatgccaattattacaaaccaatgcacacatagcttttcttaatcaaatgacagggaaaggctccacgtatgattagatattcctatctttcaggaatatatatatcataagctaatgcaaaatgctcctgttactgaccttcaaaa

SEQ ID NO: 72121 - DNA, 194 bp, Oryza sativa
agcttgtgtacctccctatcatgagaaaaaaaatacgaaggttgagatgtatacgaagaaattatagtcatctatcacaagaaggatgattttatgatgtatataggggtatttatatctctcgttgcaacaaaaaataactacttattacacaaagataaaatacgtccttatgtctcacaaggatgggaaat

SEQ ID NO: 72122 - DNA, 195 bp, Oryza sativa
agcttgagagtagaacgtgaaagaagcccatggctcaccagccagatttgaccatacagggatatcagcaatcgttaaaacatgaccaaccagaaaggtccgagacatcaagtatccatcaacaaatgagcaggcaacctcaaattctgatcctaaaaggaaggtgggggcgtattcaagccattcaacaacctg

SEQ ID NO: 72123 - DNA, 221 bp, Oryza sativa
agccgttttgttatgcattcaaactagcagttttgcaaagctgttcttggttcattcctgttgagcaattctgacatgttctgtattcacaagatgattgccatgaaaaatggttctgtgccgaatggttcgaaaaccggtggattgaatgacaggtaaatagttataattaaccaactatctcccaatattatttctccttaataatgtaaaatgccccc

SEQ ID NO: 72124 - DNA, 217 bp, Oryza sativa
ttcttgtttgcatgcaagcttgacatgaattttgaccttgtttttacatgcattttaaaatggaaactgaagttcaaaacataggggagaaagcaatagcctaacaaacaaaaccattttccccctccaattggacctaatttgaaacaacacccaattgaaaatggaatatgtctactttgactcccttaactagtgtcttaacctaatttgtatc

SEQ ID NO: 72125 - DNA, 203 bp, Oryza sativa
agctttatgttcggcgcagtactcatactggaacttacgagcaagaattgctctatcaatcaccatctactttagacatatcttcttcaactttttgaaaatccaaaagtccagtatcttcctacaaattagtgaatttgcagcattctgaattcataattcgaactgatcagcacagtctcgtgcatttagaagatcaacga

SEQ ID NO: 72126 - DNA, 194 bp, Oryza sativa
acaaaagtggaaaaattggaggcctctaatatacgtattcttattgaaattaatctcccataccattaaatcttatgggttggatatccttttcggtgtttaggtgggcatcagataataattttactgggaaaataccagattatatcgggagctggaatttaacagacttgtaagattttttttctggaacc

SEQ ID NO: 72127 - DNA, 198 bp, Oryza sativa
agcttagctaggtgggcgtaaagcggacgtgaactgaaaagtctgaaaagggagttcaaaaggagcagcttgagctactgaaccatcaaactattttctgagctagtagagtacttgcattaagaaaaggaagaaaggtagccagagtaacctatatagctagtactagatattaaacatatcatgaaaagtaatata

SEQ ID NO: 72128 - DNA, 198 bp, Oryza sativa
agcttgagataaactaaacattattataagcaaagtgtgttacacttttcactgacgtgctagtgacaaaaccaattcgaaaccagaatcacttcgcagtgccaaaagctggggcttttcttgcggggaaaaatatatgggtgttgtcatccatctgatggctatgctagtgaataaacgtacttcatcatcttccgg

SEQ ID NO: 72129 - DNA, 199 bp, Oryza sativa
agcttggttatgaaaggcgcaagctctgttcatatttatttatgctggacacagatcaaattatgctaatatgatcccaaagcttgtgatgtcatgttatttttacaaacatctgatgaaaagtataaggactgctaatgtattttcctcagttaaataaatcatataatatcagatatttgatcgtggatcttgaaga

SEQ ID NO: 72130 - DNA, 198 bp, Oryza sativa
agcttgatttaatcctatcgtaatacttgagacactggctcgctcgctgctaccagaacgctatctaccccatacctggacagggaggactttgctaatctcaagggctatcactacctctacaccaacctctaacaaactgtgagatacgcaacaaatacaggtactcaatagtataggcatcacgcctacactatt

SEQ ID NO: 72131 - DNA, 194 bp, Oryza sativa
agctttacctcttgttgaagttcgaaaccgatgcagctcaacccgagagcacgaactcgtcgaaataaaagtaaagcataaagggtggcgatgcgccgagattgtattggatgtgttgttctttttacataggactcgggtctatttatacccgagaattacaagatacgttcataacagacacgactattatc

SEQ ID NO: 72132 - DNA, 218 bp, Oryza sativa
cttttttttgcatgcaagcttatgccattttcaatccaatcgtggattttatgcctgtcatacctgtactcttttttctattagcctttgtttggcaagctgctgtaagttttcgatgaaatctttactactctgtctgccaaattgaatcatgtattcattctaaaaaaattcgaaaaatggataagagccgagaagtcttatattatgaaccttcc

SEQ ID NO: 72133 - DNA, 223 bp, Oryza sativa
aaatccattttgtatgcatgcaagcttactacccagtttttaactagtaatcattgtgggaagaagtagtaattactacctggtgtttgcgctattgccggcaacaaccaaataaaatatgaagattcttactggaccaaggtaaaggagggttgggatggaagaatattctttaagtggaccctaccttgtttaccactatactccatataagctttgtaag

SEQ ID NO: 72134 - DNA, 203 bp, Oryza sativa
agcttgtcaacggcttggcaatgttcaattggcgcctgccgccatactgaatcctatcatcaaaccatggccgttccgaggttgggctttgaatttcattggtcaaatttatccttcgtcatcaaaggggcataggttcatgctagttgctacggattacttcaccaagtgggccgaagccgtgccgctcaagaatatgactc

SEQ ID NO: 72135 - DNA, 215 bp, Oryza sativa
ttctgttgcatgcaagcttgagtgggtgcgatttttgagctgccactacctagtagttaataggaacgcacatatttttgtgtatgtttcttgttttctactaacaatggcagggatacgcaagataatttgggatagctgcgctcaacatcgacatcttcgtcgagacatgaggagggatcaacatgaccattatgaggtaagtgatgatgttc

SEQ ID NO: 72136 - DNA, 195 bp, Oryza sativa
agcttgctggcaagtcgttcagaatgaaggtcgagccgctgatcgacaaaactaaggtgctggactgctggagagatgaaacaaaaagtttattgataaaaattgcgcgagtcattttgttggctcagttgtgaattttctttctgtaacttttcgcaggaagtgggtgcatatttggtgcgagtgtcatttggg

SEQ ID NO: 72137 - DNA, 198 bp, Oryza sativa
agcttctcaagaaaaataaaactatcactttcttaatatctagttttgatcttggtatggatctctgcatataagctcaaagtttaagcaaaccaattgataagctgacactgtccatacactgccgctggtggttttaaaaaacatcaatcaaagtgctcccatatctgtagatatcttgggcacagaaatacttta

SEQ ID NO: 72138 - DNA, 198 bp, Oryza sativa
agcttgacatcccctgattcctgaagaagttaactggaggttacaatagcattctatttttactctgctggttcctttttgctatttagctgtgtatatttctttcatcttcgcgtaattttgtaggagattttcaattggttcctttgtttacaggagcatttcatttggagcattagagcttgtgcagctcggata

SEQ ID NO: 72139 - DNA, 199 bp, Oryza sativa
agctttgtgtctctaaggagctcagggtgattcacaaggttttcaaacaaatgttccttaagatattcagcagcaagtgatcctccatgacctaatgtatgaaatgttaggaacaaagacatattagggaatgaaaataacttaatgaaagaaaattcaaggacagtaccatcaaatacaccaaataggctgactgtct

SEQ ID NO: 72140 - DNA, 198 bp, Oryza sativa
agcttgctgggtttttctcaacgtacaagctgaaattcatgcttgcaaggagcgtggaatccagcgtacttctccaactcgtgatgtctattgtcctattcacaagacgaagaatcacgaagtctcaagctgcaaggtctttctccgtgccatgaaaacgacgcatcctaaggtctagtagtcaggaacctctcttaa

SEQ ID NO: 72141 - DNA, 195 bp, Oryza sativa
agcttgttagagtatatggtagtcagggatatattaggataggattgatttgtgtgaactccttccatatatgtaatcctttcttatctcattcccatgtactcctatatataccggtcccctaaagctcaatataagtgtgttaatattcacagtattcctcttcctatactatccaacatggtatcagagatc

SEQ ID NO: 72142 - DNA, 195 bp, Oryza sativa
agcttgacatttatatgtacagaaactaactacttccacccagccatagcgaaccatgcttgtgctactagtgatacacagggacttatataataatgactagtttttacaaagcaaatgcgaaacatacagcctgttggaagggaatgtgtcatgagaacatttacatctgcagtaaactatatctaaagaaca

SEQ ID NO: 72143 - DNA, 374 bp, Oryza sativa
tcactcgtaccgggatctctaagcacctgcagctgcagcttattttatttactcataataatccactcagctcttcctactctaaaatatggcgattgtttttttctgtcacccttaattgaatgactatgaaagaatgattgatgtgttagctaataatcataactgatgggcagacgctcaaggtgagttgaatcacctcttccatttcactccctactaacttttagactgtaagggtgtttttaaaaaatcattgaaatgctataaatatattattattcaacttttaagtatactattaatttgcctatatactatgcatgacacctttatatataatctaggcagacactcttatctatataggaaaa

SEQ ID NO: 72144 - DNA, 367 bp, Oryza sativa
  unsure (1)..(367): unsure at all n locations
gcttgctatattattgtccaaattttgtggtgtcgactcgtgtccgcttgtctgacgcggggagacacgcatctgaccctgctaggcgtgtccaaattccanactaaaggaaaggatttggtgggggagggggggatccatggagatgtacaaatgtatattcttctgctttgtggtggttttttggtacatcacaggagagaaatcttcatgagagagaaagctaactgccccctacctttagcctaaccacatttgcctgttggtagactaagacctgttggagacttttaccctaactctaattaacttggagttgattggatggatttcgatctatataccaatccacctttagtaattttaa

SEQ ID NO: 72145 - DNA, 339 bp, Oryza sativa
caattctcttgttgataccattccgatctgtttgcaaagcttggaggcggcgtttggagggtgtaaaagcctggagaaagctctcttgggcttgggatgctgttccagattatctgccagcattctattgtgtatgtgaaggcctcacatcacttaatctgagttatgctactgtgcgaggtcctgagctcatcaaattcattagtagatgcagaaatgtgcaacaattatgggtatgcaactcttgtcaattcttttttactactatgtattcatcccattcgaatctgttaacttttgaaaaactgttgcatatctctttgcaatacaagcacttga

SEQ ID NO: 72146 - DNA, 272 bp, Oryza sativa
  unsure (1)..(272): unsure at all n locations
gggggcggctgcngcagccgggtgttctacccgttcggcacgaaacaagccgtgtcgtcgctgcggaagggcgggcggctgccggtgtacgtggctggcgtcttcttcgtcatcttcgtcatcatcatgtacggcgaggacatccggtcgctcacgctggacccgatcgcgcgcgcggngacaacgccggcgcggatcgtggagccggtagtgacagaggagcgccacgtcgcccgggtcaacccttctcggcgcgaggtctcgtccgcgga

SEQ ID NO: 72147 - DNA, 408 bp, Oryza sativa
agctctcttactacgagatcgatctttcacttcagcctcatccataaggttcttgatcctgcgcgactggcgacgacccttaatatcaactaataaatttgagtcaggaacccaattggcttgccctggacgaggacgagtgaaatcgcacacggcacgccaaccacgcaattcaccacgccaagttgcctcccactattcctttctaaagtagggagaaacaaaaatgtttccatcaacacccccttttgcggaagcagcaagaacatgggaacatggccgatgtaacaggtaacgcttgttgcaatgcattgccagtgtgatactctggccacacgtgcattccatgtgatgttagtagcccaatgccgcaccactcttgcacgaagtcgatctcaatacaactct

SEQ ID NO: 72148 - DNA, 313 bp, Oryza sativa
  unsure (1)..(313): unsure at all n locations
agttttgtttctcatgaaccaagccggaatataaaatcccaaactaggcaaagaaacaaaaaagaagaagagctcaagtaggaatacaattcaaaatagctgaaattcagaattaaaaataaacactggttagattaattaaaatttagaataagagataaaataatatccaaaattagaaaaaataaaagagagtncaagtaggaatataattttgaaacaactaaaattgaaaattaaaaataaaaatattaaaagaacacgatacgatattatttattttttaaaagaaataaatttttaattagaaaag

SEQ ID NO: 72149 - DNA, 410 bp, Oryza sativa
agcttgtctactcaatcacaagcacactgactaagggtttaccccattaagttctcatcctagaagaagcaatcggaacccgcatcactcaaagactaagtctatacctgcaaacaaaagggtatatcaacagcaagagtcagtacattaaacaggcaagcacaagttaatcctaccatactacatgtaaggcatatattcaaaggaaggcaatatgtagttcaatttcagcataaagcaagttttgtttcgcaattcttttgtaaaggtgttgatgcttcagttaacaaaaacaaattttaagtttcaatattaagttcatcataattccatcataatcaatctcttgttgtcatcctttgacaacaagtcataatatatcacctcacacacacaactcaacacattta

SEQ ID NO: 72150 - DNA, 389 bp, Oryza sativa
  unsure (1)..(389): unsure at all n locations
agctttcttatttgtgaaaaggattctgggtcaacatcactaaactttgaactcttgtaggtactgggagaagtctttggtgaatgtttcactttgacctgctgcggtgttgatattgaattagatgtgctacttcttgcagcaatcctcttctgcctctcttgcttaagcctttccagccgnttaatctgttcctcttcctgaaaatgttaaaaaatagcttctaactcgttacaatcttgctacaggacagcaaataacaaatttatctttcgtactttgcggtggtagtcatttttctttggtgtgatatgtggtcgctgaataatacatgtgggacgaagacgtatgaattaatgctaggcttttggtaagatttcaaaatatca

SEQ ID NO: 72151 - DNA, 338 bp, Oryza sativa
  unsure (1)..(338): unsure at all n locations
cagcttacaatcgagttcattgaagaggccccaaagttttccttggtgctgttcccgtggaccatgcccttcttaaagaaccaggcaaaatctttcttattccagatgaactcttgcctgaacatgacataactgcagaagagccgctccttgcgcgggcaccacccacacatctncaggaacacgaaggtggcgagcagccgggcgtcgtaaagccggcacgtaaaagccggaatctctagcttcccgtccttgaactntacttctgtaaaccggtaggtctccgcctgctttagcctcacgccaactcggacgagttctttcaacggcgggatctc

SEQ ID NO: 72152 - DNA, 365 bp, Oryza sativa
ctcgacccgggatcctaaagcgactgcagcatgtttcttatttgctatgtgaagaatagtatgactcaaccgctaactaagactaaatccaccgctatgatatataaccaataactacctaaaagtctaagccaataagccctaagcccaaacaaagaaggccttagtcgacgacactacacccgaatctgggccttcccttgaccgaacgccttctgatgaaaagggaaatcatcattaatatacaatgaattcgcacaaaaaaatattgtaaatcacgtgatgactgaggtctggaaaaatcacactgacaactggatatccaaacgtggaaatcatcgtttcattggaatacatgggaaaaa

SEQ ID NO: 72153 - DNA, 201 bp, Oryza sativa
tcttaaccgaatatagcaagaatccgacaactaacgacttgacaattctcatcggccaattgcaagacttcaaagccgatgctgactctaaaccgatgactactccgggcttaccaaatttcactgttaacagctgggggggagggaatgccgggaagcgtgggggtcctattcaacccggtcccgtcccgcccgttaccc

SEQ ID NO: 72154 - DNA, 388 bp, Oryza sativa
  unsure (1)..(388): unsure at all n locations
agctttacctcttatatattaatanggtagaagaaaacaaccataacaaaggtctatttataaggctatgtccatagaaactggagcccgaacaaagaaattacggggactcttccaaaagagttaactcagcaaactttgaggctcccgccttggcctaggtcatggtctctttcttgatttttgcgacgatggtggctggagtggcggcgatacggcgaanaatcctagcatttctctcacaccaaagttctcaggctattatgattattatggattntagagatcttatggggttacgcggcgtgtgtagcatccaaggtctatgctatcccaatgttgcactgctgcccatacccttctggagagattgcaattcgcaaggagt

SEQ ID NO: 72155 - DNA, 429 bp, Oryza sativa
  unsure (1)..(429): unsure at all n locations
agcttcgttatcacttcatcatcaactntcaaggtaccttntagtatttcaccaattaacttattattaacgcaaaagggcaaaaaaattacaattagattaacaaaataaacttgttttaagagttgtacttggtggttttaagaggcaaagcgggaaacacaaacaccacaacacgaccttggcaacaaacatcatatgaaacgggctcggcttgngttgccccatatgccttattaaccccacaccgtagatttcttcaggtcgagaaatattgtttgtttttacaagtaaattgtattggtggtacacanactngttagatgggtgcaatttagtatataaacttgtaaaatattcgtttcagtacatgaacttgtctagtttgtgcgaacgaggaccaaaataacttgacaatgttaattttat

SEQ ID NO: 72156 - DNA, 336 bp, Oryza sativa
  unsure (1)..(336): unsure at all n locations
catcaagcttttttcgatgtgaacgaactttcacttcagcttcatgcataaagatcttgatcctgcgcgaatggcgacgaacccttatattaacttaataaattgagtcaagaacccaatttgcttgccctggaggaggacgagttgaatcgcacaccgcacgccaaccatcgcaattatcacgcccagttgcctcccacgatttctttctaaagttgggagaaancaaaatgttttcatctacaccctcttttgcggaaacagcaagaacatgggaacatggccgatgtacacgtaaagcttgttgcaatgcatttgaagtgtatactctggcac

SEQ ID NO: 72157 - DNA, 361 bp, Oryza sativa
  unsure (1)..(361): unsure at all n locations
agcttattctataagggttgggttaggtttatgcagtttgtatttgtttatgcgaaaagggttgggttaagtttatgcagtttgtggctgtgtttagatccaaagtttggatccaaacttcagtccttttccatcgcatcaacctgttatacacacataacttttcaatcacatcatctccaatttcaactaaaatccaaactttgcgctgaactaaacacagccacttgtgtttagatccaaagtttgaatctaaacttcagtccttttccatcacatcaacctatcatacacacacaacttttcagtcacaccatctctaatntcaaccaaaatctaaactntacgctgaactaaacac

SEQ ID NO: 72158 - DNA, 383 bp, Oryza sativa
  unsure (1)..(383): unsure at all n locations
acctaaccccttttaaaataatccttaattctgctaggccttcaatttcaaacagaaatcaactaattttaaagcacataaatatgtgtgggaaacaatggctatgacgatgcccatggtcaatggatcaatacctctctgaaatttccagccaattgaaatggattagctcgcgtgtgttgcttgtacttgcacatgcatgtgccggcaggtataccaatagctacgacggtcgtttccaagaaaatcatgtgaaaagtgcatttgtgtcttctacaatctatgagacatatnttagaggctgtccaaattcataattctaattctaattctaaagtagcttcaaagacagcacatcagtgaaccaactacaatngcatata

SEQ ID NO: 72159 - DNA, 181 bp, Oryza sativa
ctcccatttaatcacaactgcctcacatgttgcacctaattcacaatgctttcatatagctttactgacaaatggtgtgtatgcaccctcattaactgcacagcattcaaatgtaaatgaagatccataattggctaacattattcacatatggtacctccctcaaatgatactcataacc

SEQ ID NO: 72160 - DNA, 242 bp, Oryza sativa
atgccggacttaagcacgagctgacttttttttctgttacctaccgaagacggagtgccttactcgacactgaactaagacggtgacgtaccaaacgccgttacgagcgccctttaccagcatgcacacgctcctaaccacgatccactaaccccgtcgacgccctccgcaccagccacacatcgaccgccgtacgtgtccccacgtcggaccaagacagggacaagcgttctcacaccaag

SEQ ID NO: 72161 - DNA, 330 bp, Oryza sativa
  unsure (1)..(330): unsure at all n locations
taaaactgatactccggccctttcatgtcacccacgacgaaaacaacattgctgcacagcgtagaataactaccatgctggcctgtatggaacataccgacggaaaaacgagtgaaccatggctactacagaatcttggctggctgatttctatagctacctggacagcgcatnttcgagtactagtatatgagtatagtactctatgattatgtggatagtagctttttgcatgtgtgggagtgtttagatcacgttaaaattgaaaactcggttgaaattataatgatgtgatggaatantaacagttatgtatgacgaaagtttgat

SEQ ID NO: 72162 - DNA, 289 bp, Oryza sativa
  unsure (1)..(289): unsure at all n locations
tgctgaaactgtcatcgacattcgtagtgatgaggaaaaagaggaaaaaccttgagaaagagagccagctactccagaggaagaagatccatcgcttcgttccgacgcaaggcgggattagtcgcttagttaagtcgttgccgtagttcgctgtgttagattgcttgtttaagtttgcttgtgagtgtngtgggtttagttgttgcttacatcattggtgggatgtaacagcatgagtctagttcttttgcttgtcagagtgtaagatagttggtgagatagtgttaat

SEQ ID NO: 72163 - DNA, 296 bp, Oryza sativa
tcactcgaccggatcttagagcacctgagcatcaacttgtttttatcagtaggcacgttgccccaagtgatgtagataagtcaaaaagaagcgacacacctgaagtgtttgataccaaaaaactacaagcacaaaaggtggatacgcgtgggtgttaatccgccagaccttaaagtgaagtgagggaactagtcttgcaaagcattgttactatccttgctcaatttatcactttattgattatcattgatagaattccaccaatgccgatcatttttcagaccgtggacacatgc

SEQ ID NO: 72164 - DNA, 340 bp, Oryza sativa
  unsure (1)..(340): unsure at all n locations
agctttgctatactagacagcagaaaactgggagaggatagcttacatttaactgaatcatattgccacgctcnccaaaaatgtggtgtttatcagcatccatgcctagaaaaagtacatggtcaggtctaccatatagatcagcttataatataagaaagttgtgaaaatggttgtgcagaatataccatgttgaaaagaatccatganatacacctgcatggagcatttaacaaattaaattaacaaaaaaggtaatcttaagaattaattaaattattgtagactattcaaataataccctttgctgagaaaggatcaatatgtccaatcattaata

SEQ ID NO: 72165 - DNA, 413 bp, Oryza sativa
  unsure (1)..(413): unsure at all n locations
agcttcatagtatatggacttctacactcgtttgattttgaatcatttgaaacatgcgaatcttgtttacttggcaaaatgacaaaggcacctttcacgggtcaaagtgaaaaggcaagtgaactattgggactagtacatactgatgtatgtggaccaatgagctcaactgccaagggtggttttgggtactttattacctttaccgatgactttagtagatatggttatgtctacttaatgaggcataagtctgagtcctttgaaaagttcaagaaatntcagaatgaggtacaaaatcatttgggcaagacaatcaagtatctacgatctgatcgtggtggagagtacttgagcctttgaattggcaatcatctaaaggagtgtggaaatngtccacaactcactccgct

SEQ ID NO: 72166 - DNA, 404 bp, Oryza sativa
agcttgtctccatcttctcccacttcggcatcgcgacgctatagccgcctgaccccaagtggtgatggtacttcttcttggcggcattttctttatttctttccatcatcgcctgcccttgttgccctgtcttgtaagcaacgaactcgtcccagtgatcccttatcttcgggaatatgttgaagttcgttgtctgccccttcacgatgtatttctggtagagatctccctcgaagctctgaaactgttctgccattttctttagagtccaaccttatgtgatggcataagggtgtaaaattgagtccaagatctgcttattaattcatttcatctgtgctcattgctttcgagaaagaaatatgctgttattataaaagaagagattgctcctgtagatttct

SEQ ID NO: 72167 - DNA, 304 bp, Oryza sativa
  unsure (1)..(304): unsure at all n locations
agcttgtctctctccctacctggcgcgccaactgtcgaaactagatttctgcaataataaaagggggtggctatcaagctatgaaagtgtatgggtttggaaacacaaagatttatacaggttcaagccttcttataaaagaagtaataccctactcctgtccggggatgaatccgccgagtgtattattgattgtatgattcgggaaaaaatcagcatatgcccctagaggcgcccggaccccccctatatatgggaaggagtccggattacanaagataatctatattcctaacggaatatg

SEQ ID NO: 72168 - DNA, 352 bp, Oryza sativa
  unsure (1)..(352): unsure at all n locations
cattcttcttgttttaccattaacaagnaatcctaatgtgggagggtttggtcacggggatgcataaataatgcttcatgatccattacgcgttcaaagccttttgttcttcttcgcatccgttattttggcacaagtttttttggttctcaaaaagaaacagtttgaaaaggttcaattgtacgaaatgaatttctaggtcccgggatttcttaccatcaaagtggtaaaaagccgcgatttattggccattgctaaaattctctatgaaccatcttagaaaatcttctttttttagactatattttgtttgcgagatgtcttgtctgccattccttatttctatcatctc

SEQ ID NO: 72169 - DNA, 286 bp, Oryza sativa
ctgtgaactgtgatatttacgaaaggtgatttgcccgcgcgtgcgtgcaagagaagaatcgttgcagcgtctgcttccgcgcgggttggggtttccggacagctggattatagcgttattaataactgcccttgaataatgacgagaatcgcacacgtgatgaacaagcaaagattatactccccctgcagcagcagcagcagcagcagcagcatgcattgtgtcattttttaacataagatcaactaggagttaggcctctttgccttcatcaattaatcatagg

SEQ ID NO: 72170 - DNA, 341 bp, Oryza sativa
  unsure (1)..(341): unsure at all n locations
agcttgtatgttctaccgtgagcacatcgccgcctacggcgacggcaacgagcgccgnctcaccggccgncacgagaccgccgacatcaacaacttcgtctgggtaggacaagatcgctcgtcacactcatctctagtgaaaaatnttagtcttaataggtaccaaaaaaaaaaaattgagccccactacgttactctctacagttagtagaaaataatctgaactattaatctcatttgatcgaagggtttagatctatntgtactacaaccctaattagcggtagtaaaaatatggagggacattattataaaaaaaagacgcggagaggtatataatc

SEQ ID NO: 72171 - DNA, 300 bp, Oryza sativa
cagattgctcaaaatttttaatgcaactctgtattcttgccaatccacatatgattcttatgatacagaactccatccttaagatgaaaatcagggattgcctatgcactgaaacttaacacctgcactttgcttagagcatctgcatcatttgcatatcccagccacacctcagatatccattcagaaacacatacaggacaagccgacagtttctcctgaccaggaacaagataacgcgtaagggcatcagcagccttattatatagcccttgtcgatagcatattctgtaccggagt

SEQ ID NO: 72172 - DNA, 338 bp, Oryza sativa
  unsure (1)..(338): unsure at all n locations
gggtagtctacagaccggctaattccacataaaactttgagtgaaacttgcttgcacaagaattgctatttaaggcgtagtccaatgttcaagttgtgaataagtgtagcttggagttctaaggggatgttcaaacttaattggtctccatcgaaccgctggtatattaacagtacattggaaaagggcaatctcaatgcgaattttagatctggtgggggattgtggaattaatgaatgggccttatcccactccaagaataattctttggaanaatcacaaaacccacctcatgggatggcatgcattgtgagtttagtaccacctttgctattct

SEQ ID NO: 72173 - DNA, 336 bp, Oryza sativa
  unsure (1)..(336): unsure at all n locations
agctgtttttttatgtntggtctaccatggatatatgatagcattggtttggctanagatattgctaatacatacacatttaggcataatggctaaaaaaataaaattggtaaccatgagtaaatttgaaattttcataaataatctcgaaaggttgaagaatacaattcataatattgcgatgccttcaactaactctgagttaataaaaaatgaatgtattggtgtgcctcctgctntggatactaatattttgcaggtgtctgagaaccacanattgtactaggaagagaagaaacacatagaggaaaagacctatccatagctccatgcatg

SEQ ID NO: 72174 - DNA, 409 bp, Oryza sativa
  unsure (1)..(409): unsure at all n locations
ttatttaaatacacagtatgtgtattttatgaaactaatgagactaaataactagtatagaaaaatnttgaccataaattttggaaaataaaaaaataaaataaaattaaaaaattttattttgaaattataataaggacaatggattntttttcaaagcattcataaaaaaaatattatgagcattggtaggtctatctttgtatgaatgctcctcatttttatgattntttaaaaaataaaataaaaacatattttttttatttcattatctaaaactaaatnttgtcatcacatagcaaactcataactattatagtttcatgcgacaaaagattgcattttcaataatgtaattcataaaattttatgttcatccaaaggggaaaatagtcatttatagcaatgg

SEQ ID NO: 72175 - DNA, 397 bp, Oryza sativa
agcttgtttgttttcttgggaacgacgaccgggttcgccagccactccggatggatgacctctcggatgaatccggcctccagaagtcgcgccacctcctcgcggatgaaggcttgacgttccggggcctgccgccgcaccttctgccggaccggtcttgcgcccggccgtacggcgagacggtgctcaatcacctccctggggaccctgggcatgtccgccggtctccaggcgaagacgtcggcgtttgcccgcaggaaggagacgagcgcgtcttcctatttgtcgtccagaagaccaccgattcgtgtggtcttggacggggccgtcgcccaggcaacctgcttgatcgggacctcgtcgcacgtgatcatccgctgccttcggggcggtggga

SEQ ID NO: 72176 - DNA, 353 bp, Oryza sativa
  unsure (1)..(353): unsure at all n locations
gtgaacgcgcaaggggaatggtcgggaattggcgcctgagccaaaaaggggcaaagctgcgacgtcgatgccggtgagcaaatctgtgaaggtcgtgagggcgccaacccaatttgagctangcatgccattggtggaggacaatgtgttagctgtgatgggtattgcttgccgagagctacataaacaatacatggagctaagcaatgccaagcggaaaatgagggagtcatccatagttggacatcacgaccaccagcccgtcctattcgtcgctgtatatataactctatgctttgatgacctcttcgaccttttcangatccngaagttgacactggtcttctaaatgc

SEQ ID NO: 72177 - DNA, 380 bp, Oryza sativa
  unsure (1)..(380): unsure at all n locations
agctnatcttattgtttcttacgacaatagtctctataggtgaaactctcattgttagagcttataacgagtatcttagaaccctgaactatgttaaaacctataactacaaactttgtcgagagatacagttttcatataaagttttcctcatctaactttatatgagaatatatatctatatatttaaagataggaatggttaaatttcaaaagtggttctcccatagaaccgtatcttgaaaatgattttcatatgcagttttagaccacagagcgtactcacgggcaagtctaagagttcgatgtttttcattaaatgtggaaggggttaaagaacatactacccacagggctatatttgacatggtttactccct

SEQ ID NO: 72178 - DNA, 379 bp, Oryza sativa
ctccgcccttaatatcactgctcttggtctaatttacacttcaccttgaaatagaatttcaaaggaaaacacaactaccttttgaagaatacacctatacctggtttgaaactttgccacttgcaacttacaaacttaaaaacctttctttcatggttgtggactagcctctgtgcagccagccatgcccattcacgctagctgagacaagggttggcgggtttagttcaatgtgtatctatatttagataagcgtgaatattaatcctatctatagtttattggttcattagaattccttcttcagtgactggctacataagcacatgattgccatccctttggattaagcaataaaaatgcattgtaagcactttca

SEQ ID NO: 72179 - DNA, 234 bp, Oryza sativa
  unsure (1)..(234): unsure at all n locations
aaaccgcgtcgacacccctggctacactcctactccaagtccaggtcacaacgagactggggtggaatcgaatagctcccttcttcatcgaaaggatttggagggggcgaaggcgctagtatcgttttccgcangcaaggcggctaatggaggcccagttaaaaagatctccaaaaagaaaggactcgtcgatgtctctcgcgttttcagcgacgacgagtcttctgacgagac

SEQ ID NO: 72180 - DNA, 84 bp, Oryza sativa
gtcaactgcagctgcgaccagctttttctttcatcaccaaaaaaaaaagactaccacccgttagggcaaacccaatcaccgttc

SEQ ID NO: 72181 - DNA, 392 bp, Oryza sativa
  unsure (1)..(392): unsure at all n locations
atctcatatggttgggttgcatatatattcaactcttggatttgattctagaaaccaccaatcagtattttacacgcttatttccggttcgaggacattgcctttttttagaggatctgatcacctgaatgtgaaaacatgaaatggggttcttccttggttgttatctcgcgtgtagaatgtggtcgggatgataatgatgatcatgaatttcttactcattggtgagtcaacggatctgcatatacttatttatgtagtagattcaatttcaatgtagaacttagctcctgaaaacatgaagcatctcttggtagattatgcatgctttactgatgngtgactttcttaacattctaacagatcaatggtcctcaacatagataatgata

SEQ ID NO: 72182 - DNA, 362 bp, Oryza sativa
agctttgatctaatccctgaagagatgcaaaaacttggccacctccatgctgtgaaacacatcgtggagataatgattcaggtaatggctaacaacatatcagttataattcacataagtaaatcatcaatcacagactaagttattattgggtctgttgttgcaagttgcgacataccttgataaccttggaaaatttggaacagaagctgattgttccacggaataagaaacctaccccatcaaattacaatgtattctttcttaggtgcagtgactggccaaacctttaaataccctgcaatgaatgcctcttccaaaaaatacctagaaaatgatttgacaaaaaaaagggcccttca

SEQ ID NO: 72183 - DNA, 280 bp, Oryza sativa
ccctcaccttgacccaccctaaaacatattgggggttttgaaaaaaggggacgggcgtctatttctacataatccaaccgttcctaatgtccagatgaatgacaattcccgagtctaaagcataacacgcccttaagctgcctaatgaaccatcgaagcttctacctaaggtcatactcattggaaccatagataggatatccactaattgggatattatttttctagggggaacagcgcactagtaactataacaattataatagtgtcataacaaagg

SEQ ID NO: 72184 - DNA, 392 bp, Oryza sativa
actattcggataaattacagaatttaaacaaatacaggtttaaccaagtatattatgcataacaagcggttcgttcttgttgagtagataattggattatgattgagttatttttctaaaggaaaaaggaaaaggacgattcaaaatccttttttcttcggactttcccaaacacaaaataccttctttgattcgcactctcaaatgagagtggaaaaaaattcgacttcatataatatcttaatagaaattcatgtaatgatcaatggcatttttggattctatattattcgcatgtctagaatcctaccaagaggaatacccccatttttatgtaaattgaagtaggattgacgaataagaaataaacataatacttgttattagtgtcg

SEQ ID NO: 72185 - DNA, 266 bp, Oryza sativa
tctatcgactgcttgcatagctcactaacgtccgtctacacaacaaggtggacgaatccggtgccgtataatacttgccgtaaaagtggatcacgcttccacttcccaccagcgttcattgtcatcaacaagcatgccttcttattcttgtcccgcacatacccgagagctactgtgtgacacttccacattgcagctgtgatgaccttcaatgctgtgcttgagtacttgagttgggcatggtgttgcagagctgcaatctctct

SEQ ID NO: 72186 - DNA, 76 bp, Oryza sativa
gaacaggaccctttaaataccgcggcgcggcttttttttttttttattgccaacttggcaccttcttctaaaacac

SEQ ID NO: 72187 - DNA, 238 bp, Oryza sativa
  unsure (1)..(238): unsure at all n locations
tgctcaacactgaatgacgggaatggtactaaaccaattgtatttttgatgatgcagggagtagcttgctgattcatttaagtctcttgtagcaatttagtgtgcacttgtgctattaaaaacaagttgttaggatgctgcccactgactgagtggacatgctgcgaacatcttggatctacattgacatgacaatctatactgaacatgatgtgctgngtgtgaaaccatagtggtt

SEQ ID NO: 72188 - DNA, 272 bp, Oryza sativa
ctgaaatgcaaatattaaatatcttttcctggaggtaaattagaattaatcttcgtgagaaattatcttcttggttagtttcctatatagcatacgggattatttttcactataatcaactaaaatatagtgattgctctggtgagttataaacactaaagtagatattaattgcttagacgtcgtatttaggtaaaattatccagtaattggtgtgtatcccacagtgcgtttgaggtatgtgtatatgtggtgacagccctcgagatcac

SEQ ID NO: 72189 - DNA, 302 bp, Oryza sativa
  unsure (1)..(302): unsure at all n locations
acatgaaccttttcattttggagcctgggacaatgtattaatttcacccaaaaaaaacgatggtctaagatcgtgagaattctttggttaacatgttcttggcaacttatgatagactctactacannaataatttntcatggcgtcaccctataattttcgctagcggttatacgcgaaaaccgctactaaaaatgtaacaaagggtgaggggtgaggggtgagggttaccgaccgccagcgaaaatcggttttcgctggcggccacgctaagaggtccgccattaaaaatagctctattt

SEQ ID NO: 72190 - DNA, 92 bp, Oryza sativa
agcttttgtttttcttgagtggcgccgctagctgatgcgcagcgcggcgttccgatcgatcagattcgcgtgtgctcccgtgtgcgttctga

SEQ ID NO: 72191 - DNA, 323 bp, Oryza sativa
  unsure (1)..(323): unsure at all n locations
gtctttggtgtgcatttttttgtggggattgcggtctctagttgactatgagtcgcttgtgagaaccccaatgattgcggtgtgtcgcggtaaagtttgtgaaagttagatctcaccttcacaagggaaagagatacccttagtggaataagtattaggaatatgtgtcacacctcacccctgatactaatggtgacaccanagaaggtgcatcctangaaattatgacgtaccggaaattaggacgttccaacctcctgtggaaccgtgtactcggtatttcgtcccaagacacaattgcnggtacccgtggcaactgagat

SEQ ID NO: 72192 - DNA, 356 bp, Oryza sativa
  unsure (1)..(356): unsure at all n locations
ctggctctggcagcggatccgcttgcttacttggtagacacagcgctcatcgggcgcttaagtgagcatgcgtcacccctgacatgtatgaatttctctgacgatggcatggctgatcttgtcacctgttagtaagttccatcaacacagcgttcatacttaatttgctcggtatagataagtcatacagagggatttcttccaaatgtcagtgctaattatcagacaaatcatacaattgattttaaaatatatcgagcttgatggtactntatacttcatttgcattnttgtaagtttggcagcgtaaccaacttagtacagggatgtccctttccattttttaagagcggaat

SEQ ID NO: 72193 - DNA, 396 bp, Oryza sativa
  unsure (1)..(396): unsure at all n locations
gaacacatctgcgcaatatatacctagattgatcatcactacccgtagttatcctggcatatatagataatactacctggagcccgctgcttatgtttgggggtaaacagacgcatgatgccagagtgtcataggcaattcaagcagtgatgaagcaaccgaatagtagtaccttattcngggtcaagttggtccagtccagtatttaaacctagacttgcgaagtactacatcttctcataatcgcaatcgatctcgttgtcgaatacacaagggggagatacttgctagcgcggtgattccctctgtctctccgaaagatcgaaaaaaaggcattcatacaagtgttcccccatctaatactaatctgcctatctatctggattattcgcactt

SEQ ID NO: 72194 - DNA, 361 bp, Oryza sativa
  unsure (1)..(361): unsure at all n locations
agcttatcttctcttcaggctgacccatgaattacacctacaccacatggaaaggaccgagcccatnaaatatttgctgaaaaagaaaatgaaagctatggatatcaaatgccttgtatcgttcgaatcctcttggatataaaaaccatcatgcttgtcaaacacaaacgatggatcccccaggtcagactgttaataatcacacatgatgttcgcgttaccgttgagatatattaatggctttcactatcatcatcactagatatcgcgggaagttttgacaacttgacataactaatgcatccaaaatcaaaatcaatagctgcatgtgcangaccaaaaactgaccatcagaaacact

SEQ ID NO: 72195 - DNA, 411 bp, Oryza sativa
  unsure (1)..(411): unsure at all n locations
tagcttgttcaatattgctatgatgccaatgccaaattgctatcaatttattactggtctaatcagtaaaaaggaaaaaacaatccaggctttctgaacaatgcaatggtcaatgtggaatgtagtagcatttcaattagcttgctatcgctaatgcttttctttgagcaatatgcagtactaccttcgatacatttgccagtgagaaatctgcacctctaagatcagcatcagagagatcagcacctgaatttatcaccagaaaactctgaataatcaatgcaactagaaccaaaacatcagttttgccatttcagaacttcacattgnggaagaatcactacaactactgtgataaatggaacatctaacanattcacaagcacagcatcagaacctgtcagatctgca

SEQ ID NO: 72196 - DNA, 416 bp, Oryza sativa
tctttcttgttctcgctttcaaatgattttggggctctttaagtcttaagagaatttttgagccatagcatatacattttactagaaaggaatataatacaggagagcccctgccgtcagggaagaaaatactagttacaaattatctagaggtggaaaggagcttaatacatagctagacattgtcatttctaaccttatttttatgaattcaccactaactcttctgaagatatcttcgctgtttccgagcctacattaaggggaagtaactgtttccatagtgacctgtctgccaaaatctcatcttaagacaaatctgttccattcaatccaaatatgcctgtgccaaatcacgttctgttgaaatattgtgtcagagaacttatcacagattttgctctaatacaagtgaa

SEQ ID NO: 72197 - DNA, 406 bp, Oryza sativa
  unsure (1)..(406): unsure at all n locations
atccttaagtcactgagctgcagctgttttattcatcacgcacgaaagaatatatggcaggaaaggaacaaaggctagacggttgggcaggtgaattggagggatttgcatgcaattggactagtatggngattaatatcaatacaagtgcttatgtacctacagttntaacaatactggatgaatttgctttcgtatatgtccatggcatggctggtaagttcctacagtagtcagtaacactagacatggtcaccactcagcacatcaaatcagaaattatattaagtgtggcacatctgtaatctaaagtgaaacacaggtgccaagtccagtatgcaattctcaagtttagggatccacttgaccactgggggtaagttataaacctatgaagcattactat

SEQ ID NO: 72198 - DNA, 418 bp, Oryza sativa
  unsure (1)..(418): unsure at all n locations
agctntttttctttcatgantggaatccattagcaaacacgaatagtacattttgttgtgcatatttgattgttgttgaatattgggttttctcgcgtattatagaccttgtgtatcggttagtcgtgaggcaacgtctgcaacttctatgaggagaagggtgatcaagattatatcaagaataaggactatcctgagcaggcaagtcatcactattccttgaacatgttgatccaaattgcgaaattatttttatttacaattgagaatgcatgcaatgatgaacatcctactttcgattatgccatgcctcgattattngttacccttaaatccttgtaaccatgattacgtatgagtccctagtcaattatgacacttgcttagaaatgctattctagaatcttgcatattaata

SEQ ID NO: 72199 - DNA, 360 bp, Oryza sativa
  unsure (1)..(360): unsure at all n locations
caaaagaacttaaatacgtaggtttggaagtaaattggccttccgtttgcaatgcttgggtacaccagttttaaattggacgtcttttggtaggtttggccaagtatacgtatattttataaagaagattntaatcattttttagtcaactgttttaataaagaaaagggtccaaatacctctgaacttaaggcgatagtccgaattattccatgaatgacataaccagacattttacacnctgaacgtctcanactggacgaataacccctaagcactatttgtgcggttntaacatgagctgacacacgtggcgacaacgttgtaatccggtcaccataaaaatagaataaatccata

SEQ ID NO: 72200 - DNA, 412 bp, Oryza sativa
  unsure (1)..(412): unsure at all n locations
agctttgtttctgctctctcagtttccaaatataaatattggttgggtgtttaagggagaatacgaattaacaaaaaaattgctaaaaactgtcgcaaaaagctttaaaatgtaagtagtgtaactacaacgtaattatactgttgttacattataatcgctatataacttgggagcgtatcctatacacacaggtcctcgcgtgtacacatcatgtacaccaactaaaaattatcacaaaaaattctaggaaaattcatacatgtacttttaatagtattacatctacgtgcaaagtcatatcttcaaattcattctacatagagaataaaaaaaagataaaattctgacaaaattacaaccttanaactgtcagattttatggttttttggtatggctaanatataatga

SEQ ID NO: 72201 - DNA, 410 bp, Oryza sativa
tttttttgagacaaaggcggcatgccattcattgattaaacaacatcatcacaaagtatggcccggatataatccggtattacagaacggtacacaatacaagtagacagctcggcattccgagctagagaatgaaccgccaaattggacaaccggttaacatgcataaaagagcatataaacaaggtggacgccaacttcttgatatcttcaatcacgcattccacccctgagcgatcccttccttgaagttggatgcgtctgattacagtgagacaatcagatgccatgacaatgtgttccacgccctctttctttgctagacccagtgcccgcctaattgccagcgcttctgcaagctcaagtagcaccacatcgctgatcatctccgagcaagcaaacaggcattt

SEQ ID NO: 72202 - DNA, 388 bp, Oryza sativa
  unsure (1)..(388): unsure at all n locations
tctcatttcttctccatttatggattaatctctgcagacaaataatactctaggtaccaatggaactatattattcttaaataaatatgccttgcaagcatagctaagttttctttattttagttatattgacaggcgaatttggtgtataacgaccgtcaacagcnttggtttattaagataatcaacggggctccataattctgtgtaaccatgcatgtttaatattagttcgtgagtatttggcagcatctaatgccttattatttatatattaattggaaaaagccgatgtatatcacgtaccaaatgggccgatacattggcacactggaaatcgtgtggataacgtggtccangtcaaggaccccatcccggactacaagca

SEQ ID NO: 72203 - DNA, 263 bp, Oryza sativa
tttcttcttttcgttcctaaaccggaatactaaatataatacatccattatctttcaaaaccgagtcacactaaaggtgtgtttagttctaaagttttttttttccaaactttcaacttttcatcacatcaaaacttacttttcaatcacatcggcttcaactttaaccaaattccaatctaaacacaatctagggagtaaagcaatgttgcttcccggttttaacaaacttagcacttctaagcaaaattataaaaacataa

SEQ ID NO: 72204 - DNA, 411 bp, Oryza sativa
  unsure (1)..(411): unsure at all n locations
tatcttcttttgtaagatgcaatacatggatgatgagaagacaaatgaacttatcggatatctggataccacaaggatctgtcaaacacaacataccatgacgctaccatcaaactccgagcagctcaaagacaagatgcctgaagagatagcggcatactagaatggctttcacaagaccaagttgcttactatcgtagagtacattggacgagccttcttgaaattttaacacaaaagagtcttanaggctgcatacagcttgcagtagatttctttgtacatatctgtgttatttcatccgtgactaactgcatcgttgttactatgtagcgatcattatatttatttgctgatctactcgaagtacgacaccttgacaatcctagaccccttgattataatcacaag

SEQ ID NO: 72205 - DNA, 314 bp, Oryza sativa
acggatgcagatcgatgccacgattgactgcttaccggccctcatctttttgcttaagcatcttattagccaaaatttgaattttcaatcttaaaattggagttgattttggagtcttttcatataaatttatttctcagcttttgcttttagatcactaagaacacgtatataaaagttttaatttgaatttttaatcttaaatttggagttgattttggaagtttttcatctaaatttatttttcagcgtttgttttagatcactaaaacacgtataaaaagtttatttataaatatttttatttacaaatt

SEQ ID NO: 72206 - DNA, 380 bp, Oryza sativa
cctagccctatttttactatatgacacacacagtcatggccaacaaaattaaaccatgtcacatttttcatagtcactgatatgtgggtcttagattatagaagatgaatcttgctacatatatttgtagtagccaaccaaacattaacttagttagcataatcaaatttgcttaaccacaaatgttcatcgaccaaacaacctctaactacatggttagtatatataagtatacacaggctaagctagccaccttaattatcatctgtgtgctgtttaaagggtgtgtatgtgtatggacagaagaaaactattaattaatgaattaatcgatcttgcagttgctggactgctggcttgtcaacggatcagatatacat

SEQ ID NO: 72207 - DNA, 349 bp, Oryza sativa
aaagctcgaccaacacatatgccacttaagaagggacttatcgaacacatatggcacgcttcggaacaaaaaaattgacaaaagcgttgaactatatataatataaatattatatatatggtttctaaaaaatattgtaatcgcgtttctattatttaatcttcatatttattctatcaattagccacacaatggtacatacaaatacatttatagttgatctaagctacatgcaaagcattaaacagcttacagatggcccctctgtttggggttgatgagctgctttatatctatctgtatgagaatttaaggtttgcaacgaccaccgctggggtgtcatgcctac

SEQ ID NO: 72208 - DNA, 171 bp, Oryza sativa
ttgattcaaaatttcttatcaaacttctaactttgtcatcatattaaatagttgttcatatgtattaaacattaaatggggatgaaaaaagaaccaattgcacagattacatgtgaattgcgagacgaattttttaagcataattacaccatgatttgcaatgtgatgcta

SEQ ID NO: 72209 - DNA, 378 bp, Oryza sativa
tatcttctaatgagatcactagctgtgttactgttaatttattcagcacaaatgcaaggcacgggcagatatatataaagaacaaaagcagcagattattctagaacaaaaaccaagggcactgtttgaacgatcaatagacacacactactaaccgattccccatcacatagagggtgggaggcctgcagatcggataaagggaatggtgacgcggcggtggcagtggcaaagaggagagagaggagcggctattctgtgggcagcgcttcagtaagaattatgtaagggttttgttccttcaagattttctgcataaaccctctagatgggcagggcacttggggctggaactgcccacccaagtattatgtggta

SEQ ID NO: 72210 - DNA, 243 bp, Oryza sativa
agctttatagcagaatgggagtggcaacctttcccacaatggtttcaaaaaagacatctcatgagacagtgaatgatttcagacaccattctctcatggggatcagcttaaaggttataacaaacgtaatggatgatagattgcagtgtgtgattttgaagttaataagtgaaaatcagtatggtttcatcaaatgaaggataatccaggactgtcttgcttggtcctttgaatatattcatc

SEQ ID NO: 72211 - DNA, 190 bp, Oryza sativa
ttggcatgcaagcttgagctgaattataagaggctctgttgtactattttgtatactagaattaggaagagagtagagtagaagaaatcggaggaatttcggagatgtcggtaatcctctcatgtttattttattctgttaattactctattttcaatagaaatatctttctgagtaatttagatttact

SEQ ID NO: 72212 - DNA, 198 bp, Oryza sativa
ttttttttgcatgcaagctttcacctagttctaaggttgaggggattaagttgaagggtggtgttatgcttgcaacgaaatgtgacattgctgatatttcaaatgatgatatgtgctattttttgatatgcaaacaagcctggtttctttagatgatattgctagttcgatacctcctgttgttactaacctcttgca

SEQ ID NO: 72213 - DNA, 182 bp, Oryza sativa
agcttgagccccttgacaagggcgcccaaatctgacggattggagggctcaattgcgaccttgagcatcggggacacctggaacatcatgcccgagaacggctggcagttcttggtcgacgacagcgtggcgttcttcagcacgtgatgcccgagcccttcgatcgcgagcacgtcgccggc

SEQ ID NO: 72214 - DNA, 183 bp, Oryza sativa
agcttgtgcttgggcttgggtagcggcgacggaggctttatcatactcagcttgaattgcttgccgccgcttggaatcctcttccccccttgcgtacccgtcaatgatgcgaagcaggtgttcaagcgtctgcggctctttgttggcgatttttcttgtgagttcgccctcgagtagcccggc

SEQ ID NO: 72215 - DNA, 180 bp, Oryza sativa
agctttttttcccacacattaaacgagaaatatcattagcgtatggttaattcagtatttacttcctttgttaaaagaaataaaaatttagtccagattcatactccctcgatcctaaaatataagcattttagacttcgacacagttttcgagatgttattttgaccaataatatatat

SEQ ID NO: 72216 - DNA, 178 bp, Oryza sativa
agcttatgaaattgtgatgatttttttttctagaatctgattccttgttttgctgttcagaatgatcgaggatgcagaagagaaagggctgattactcctggtgtcacaactctagtcgagccgacgagtggcaatctgggtttaggattggtgcttgttgctcttcgcaaaggttac

SEQ ID NO: 72217 - DNA, 179 bp, Oryza sativa
agctttacctgggttcagttgaattaggtcatgtcgccgttgttaaggctacttgattagtttatatagttgcttttgttcagagtgtttattttgttttagatgtaagtattcaatttcggccgaactaccaatgtaataaatttgcacttcatctggatctcctgggaatataggag

SEQ ID NO: 72218 - DNA, 181 bp, Oryza sativa
agcttgttaatcatgcaattatgataaatttacagctatatgttcccttctatgtaataatactataccaatagtcaaaagttccagaattatatcttacaaattcataatataactaccccgcagcaacacgcggggtatcaactagtttatactattatgggacctaaaattgcacgat

SEQ ID NO: 72219 - DNA, 180 bp, Oryza sativa
agcttgcaagggcgacacatggatagaagatcttaacctcctaatcagtggtggcatgcccattgaactcctggaccaactagtgtctctctggagcatggttcaaaatgtgtatttcatcaactggccagaccaaatcatttggaaacttacagcccacggggaatatacggtgatatc

SEQ ID NO: 72220 - DNA, 177 bp, Oryza sativa
agcttgctcacaatgtgtatatattgatataacgtacgtactactactactgtgtagcgcccgctcgttggagacgaggatcgctgtgaaataattggaatacatagctaaaatatgctccccacccctaatcagatcaggtttgggttccgtggagcagagtttggatcggatccg

SEQ ID NO: 72221 - DNA, 193 bp, Oryza sativa
tagttggcatgcaagcttagcctgagcttgagaaaacagagtttacacccttcagaaaaaaaaaagagagtttggattacaaacaggacacccaataatccaatccaacccggcgccgcgccacattatattcacacgcaatgcatattcgtaagataatgacattgtcgaaatgttcagagaatttcagagg

SEQ ID NO: 72222 - DNA, 177 bp, Oryza sativa
agcttgagctgttgcagcagggttttcagctgcgccttgcccggctcgtccagcggcgaaggcgggcggcaccacgtgcgtggaaacaggaacaaccgaaaaccaccaacccccttttttattaactttaacaaccgggtattccactggatcctttggcgaaattggaacaaaggt

SEQ ID NO: 72223 - DNA, 183 bp, Oryza sativa
agcttaatcattatgcccacactttggttgtatttaatcattatgcccacactttggtttcattattacttatgttatgactagcaaaggtgatcaaaaagtaatgaattgaaagcggagcagtggaggccaccatcccttctctgcaccacatcaacttggcatggcagattcaatgcttac

SEQ ID NO: 72224 - DNA, 184 bp, Oryza sativa
agcttcctcactgtaccacatcgtataaactatgattgatcaatataaactactacctccatcctaatatataactatttctaacacgataatttatttcaaaatgagactattttttcacgtaccatcttctcttaaccaattataaccattctctttacctactttcttttctccactaatc

SEQ ID NO: 72225 - DNA, 179 bp, Oryza sativa
agcttagcttacactttgcctagcttattttgtactataggctagcaacctatggctggaggctggtcaaataactcctactgccttttgttggcacatattggaaacgactattcacctaccaatggaatatatatacacaagaataatatatgaaacatgttgacaatctgggtagc

SEQ ID NO: 72226 - DNA, 179 bp, Oryza sativa
agcttcttcgtcacaccaagatgggctcggaaagtcgcgtcgtgaacagcggcccaatccggcctatcatgggagtgagtggacccagtagtgactgactgggccacatgtaagggagagagatccaatggcacattgctatataaggatcggcagagaagagatgtgaattgaacgat

SEQ ID NO: 72227 - DNA, 181 bp, Oryza sativa
aggcttgagaaaatgggatgatctctgaatcaagcaagaagggtaaagggtaactaaaaacaagggcagggctgggcaggacggggaagggttttctgatgtgttttttggtcaggcgtgcatcgtcgccgtcttcttgaagtcgatcttgtcgaccttgacctcgccgtcgatcagctcg

SEQ ID NO: 72228 - DNA, 182 bp, Oryza sativa
agctttgaagtaaatctaacccaaatatgctggctattgtgctagatcaaaatacaaatatatactcccttcatgtcgctactctgcgagtactttttgctcatatattgagctgagcggtctgacaaatagagttcatctctccctcccccctttctctcattcatccacagcaaaaaaaa

SEQ ID NO: 72229 - DNA, 182 bp, Oryza sativa
agcttgctcctcagcgaactgtcatccatgcatcccgaagcagtcctatagcccgcgttgcaacagctccaactccagcgagtgcattaccacaaggtgtcaatgcccaatttcagccccagccatcagttgacaagaccgaggccagtatcggcattgtacctttggatgttcgagcacag

SEQ ID NO: 72230 - DNA, 162 bp, Oryza sativa
agctgaacaaggccaacaggaccaacggtaatccggagagacccaaggcgagtccgagtcagaatctctcgcaagaaaaacgacgaggaggacgccaaggaggaacacaacacggtggtaacagtagcggagaaccctgcaaaggggctcaagggataggga

SEQ ID NO: 72231 - DNA, 171 bp, Oryza sativa
aaaaaaaacggacacagaaaaaaaaaacagaaagacaaaaacaaaaacacggcacccacaaaaaggacgcacgcaaacagaaaaaaaaacagaaaacaaaaaaaaagacgggaacaagaaaaagaacccaccgaaacaaaaaaagaacaaaaaaacaaaaaaaaaagaaag

SEQ ID NO: 72232 - DNA, 196 bp, Oryza sativa
ttttttaggcatgcaagcttgctgggggggcgcatccgctctatagctcgtatcttctcggggttggcctcgatgcctcgggcagagaccaagaacccgagaagcttgcccgcaggcacgccgaacacacacttatcggggttcagctttatgtgggcggagcggagactttcgaaagtttccgctagatccgaga

SEQ ID NO: 72233 - DNA, 180 bp, Oryza sativa
agcttggcctcctttggtacggtgtaacacctaacaccgcaggcaccattgcttccttcctttcctagctacttcgatagctagctagctctcttcccctttcttgccatccatcttcatatatctatctctctatactacctagtttcttgtcagttgtcacacaaacacatatataca

SEQ ID NO: 72234 - DNA, 241 bp, Oryza sativa
tgtaaggataatcgacgctcggctgaagctgatactgttgatcattttttttgcgaggccacgatctgctgtgtgaaagaagatgagctgacgaagcacgcgatcatcgtggtggaatatatgaccgatgcacgtggtgcgtgagatctcctactccttgagcggagccaccgggaagactgacgacacctacacgcacctggccaagtatgtcttggtttgtgggagcgtgagagtcctg

SEQ ID NO: 72235 - DNA, 185 bp, Oryza sativa
agcttctagaactgatatggtttgcactttccccttcatttatctacggctatttactactgatattccctttacaggacgctttcctgaaaatggattgctctcttactatagaaagccagggttagatttatttgacccaatgcattcaatcacctaatgaattccccaagaagaagaaaacc

SEQ ID NO: 72236 - DNA, 223 bp, Oryza sativa
  unsure (1)..(223): unsure at all n locations
tatctgctaggcantgcaagccttggtctctcatgngggagagactcgnnnatcgggttcaagcccaaagaatgtgatctctcgatgaacgtcnnattagggcaagttcaacaangagccagagtcaagttcgcgcgcgtgttgaaggggcggcggcggcggctccgagtttcggcgggcgccatcaactaccgcacgggcaaccaccgttgttggagactcc

SEQ ID NO: 72237 - DNA, 180 bp, Oryza sativa
agcttatcaagtttaaaagaaattatactaaaaaagtcaaaatgagttataatatgaaactgagatagtaaactacaacacaaaacatcaaaggtgctggttggtaaacccacataggtgccgaccggcaccatagaggcggcagtgatgagtgcaccggcaccaatcccatttaaaaac

SEQ ID NO: 72238 - DNA, 180 bp, Oryza sativa
agcttcttgatctggttattgaaactttcagaaacattgtttgtgaggtagtcacacttgctagactcagaaaagccacatctgtaccaaatccttgagtgatgcttctcaagatactctattgcatcagacctcacttggtatatttgttgcatgtaccacctaaatccatcctcagta

SEQ ID NO: 72239 - DNA, 181 bp, Oryza sativa
agcttggcagagaggcaaggttgttttgcaaatcttttgtttgaaatcattttgaaatcactaagtgatttatttctttctaagtttgggacgaaaagagacttgcgtctcgattcgactttaagagatgtttttcaacagctcatttggtaatgtaccgacctcccgggtcagttcatta

SEQ ID NO: 72240 - DNA, 235 bp, Oryza sativa
  unsure (1)..(235): unsure at all n locations
ttttttctgcannggcattgcaagcttnggattggttcataccatcattgccctcccaggaacatgatgtnntctgtggaaatttcagtcnncaactcatatctnnctactatgtacnnatgcccaaagttgacatttagcttttggaaggggtaatttggcaaacattaganagtccatatttcctgcnttgaatatnagattacattctatcatatgatgntctggacattac

SEQ ID NO: 72241 - DNA, 174 bp, Oryza sativa
agctgtacaaagagcgagctggcgcaggccttattggagattcttacttaccatatagtataagggccgaaatatgggcgcagcctataagtggaagaaggaaaggttgctgcatcaatcggggaacggtgctgtgggatcacgcactggagttacctcgggagaatgaacatg

SEQ ID NO: 72242 - DNA, 179 bp, Oryza sativa
agcttcttcgaacaaggcttgagaatgtgattataaatgatttgtgtcccaatggcagtgaaaattggttctgttgcatccaaaattcacgaatatgtctagtaatactgaattgatcatcaaatacttggctgtgtttgaagctgagggttggaaaacctatgaaacgacgaattact

SEQ ID NO: 72243 - DNA, 181 bp, Oryza sativa
agcttaatagatttaagggtttgatatacttatataagatgatagatataaaaaattaagcaaatgacagtaaacaatcttaaagcaaaacatatatattaggtaaaaccggctgaaacccaaatgctacccctatcagcaatcaaatagtaagttagtccttacaatttcaactactatt

SEQ ID NO: 72244 - DNA, 197 bp, Oryza sativa
ttttgcttgcatgcaagcttgccacagttgcggcaggcgtcgtctcgtgccggcttgtggttgccagtggcaatgccctgggcgcctctgcgggcgccaccctcggcacgtcttcgcgcccaccgtagctggacacctccccgcgccttgcgcggcttacggccgcctgtcggggaagatgactcccccttcctccc

SEQ ID NO: 72245 - DNA, 183 bp, Oryza sativa
agccgagcccgagcctctccctaagctcgcgagctttgtcaagccgaggtcaagcttccaacgagcctagtaatatatgatttttgttgttatttaataaattaggatatcaaatatgttatttgtatgccttatattgacatcatatatttattttattattttttgccttttctattaata

SEQ ID NO: 72246 - DNA, 185 bp, Oryza sativa
agcttgttagagcataatccaacttatcaactatgggccaccgagatcacattaggcctgcgctccaatagaagtcacaactttatgttttggacctacacaatccaaaaagactaaactggtaggtgtgaatctttctcaccttttaagttatgtttctccaccatcaattttcgatgtaggac

SEQ ID NO: 72247 - DNA, 178 bp, Oryza sativa
agctttgaagcgcagcaagaagagagtcaggaatgcccttcagactgaactgccctacctaatatcaacagaattttcatataaccaagagaacgaaccatccgttgtacattcttctgatggtggatctactggaaaaacagttccagaagcgcatgtggcacgatggcggtctctt

SEQ ID NO: 72248 - DNA, 179 bp, Oryza sativa
agctttgttttgttccccacgagtattagtctttgcctccaacttttttttgtctaggagatgcttacttgggggaacttttgtaatgttttgtttgcatgatcatagtccatgtgttctttttgtatataatatataataacacttctaagttgtacagttatttgccatagaactga

SEQ ID NO: 72249 - DNA, 180 bp, Oryza sativa
agctgggcaggccgatgcccaaccaggaaagcagtacaaagaatgcgagcatacacacccaaggagaaaactttcggacttgagagaatcaagaatagactgcgacgcaagacagcaaataccaacaaattaagcttgaacaaacaggggaaaacaatacaattaggcataaatcaacat

SEQ ID NO: 72250 - DNA, 181 bp, Oryza sativa
agcttcaataaaacgatagaaacccagctagctcagttagcatctttagtccctgcaaatgaaactgggaggattccaaggcagaccgactcctccgttgaaaatgttaaggcgatcacgacgaggggaggtaaatccactcgtgatccgccgtatcctaaccctgcaggaactaatggga

SEQ ID NO: 72251 - DNA, 181 bp, Oryza sativa
agcttgtccatggagatgttttccggcctcctcgtagcttggtgtttctttctgcttttgttggtattggcactcagctggcggctcttattctgctcgtgattgtattggccattgttggcatgttatatgttgggtaagctctaaatcagctttcttagtatcctttttttctgcatcg

SEQ ID NO: 72252 - DNA, 178 bp, Oryza sativa
agctttgagtgctattccttttatgaaattacaccgggaaggaattgagcaagccaagtcatttaactgactccacttaaaattgaacaaccccactcagtgttggcagctttcctataagataatcatctttcctttgcttagacattcgtttgagttctttacatgtacgtacaat

SEQ ID NO: 72253 - DNA, 179 bp, Oryza sativa
agcttatgtgctacagtatcagaaaccagcaaagtatcgatctcagttcttacgaagcggtgtgagattatactgggtcagtttttagctgatgaaaatgatctaggtaaatggataatgatataattttgaacttccttatatataatatgtaaacctgcttcattttctggtttcct

SEQ ID NO: 72254 - DNA, 207 bp, Oryza sativa
gagaagcgagcacggaacccgggggaggaggaaaagactttttgtttcgcgaggaagacacaggggggaggcgaaggcaaccaaaagaagaaaaaaagaaagagacacgaaaacagaggggaccagacaggaaaaagcgaagaagaaaaaaacaaaaagaagaagggaaacaaagggaaaaggaaaaccaaacaaagaaagaaaagg

SEQ ID NO: 72255 - DNA, 181 bp, Oryza sativa
agcttgggctttctattaatatttgtattcactgggtcttgaacatttattgtaggtatatagtcgtgtacttgttttcatttaaaagaaaggaaacgatttagctttaacagaatcgatttcatttaaagtaaatttgaaaaactatcattgtcgtaccttgcagggcttgctttaggta

SEQ ID NO: 72256 - DNA, 196 bp, Oryza sativa
tttttttgcatgcaagcttcagacttcgccttgtaacctgtgcgaaactatcatccaaaatctcagtgacattactaaatgaaccatgagtttattctctaagctcgctataatccaatacaaaaccctgcaaataaaaggaacatatatatttgcactaaggtggtcaattgcctgaagtaatgcaactaatact

SEQ ID NO: 72257 - DNA, 183 bp, Oryza sativa
agcttccttgcgctttaactctaagtaattattccctccgtttcatattataagtcgttttgactttttttcctagtcaaacttctttaagtttgaccaaatttataggaaaaatttagcaatattttgtacataaaatgaacatattaacaaaatatatggaatgttagtttaaatgaaact

SEQ ID NO: 72258 - DNA, 183 bp, Oryza sativa
agcttgtaatatttaatactcaattgatcttgtgctaatgacttgtgtcttttcgtgtgccctagataagctacgtcaatgagctagatcgaacgaaggctatgtaggaggaaaaggatattgacatggtgttaaatgaatatatttaaacttcaattttctaataatgtatgaaaagagtaa

SEQ ID NO: 72259 - DNA, 180 bp, Oryza sativa
agctttaggactacacttagcactttgaaaattccaacttactatcccaggtgatcgttgaaaatcaaaatgtattgcccagtccttcggatcatgtccaagattgtgcaaaaacgtggctaccatttcttccaacttcatattgctagtatgtcccacaaaattctctaaccaaagaac

SEQ ID NO: 72260 - DNA, 180 bp, Oryza sativa
agctttaggttttattatagtaagagatgatacactcatcacatgggtagacacagaagcgtaggaaacaaagcccaatagatccaacaatttttcacgaagtatatgtgatcttggtccaagattccatgggtcggcctgggcctatgaccaaaccaaatcccaagctgatcagtttac

SEQ ID NO: 72261 - DNA, 181 bp, Oryza sativa
agcttattgtggcttaatttgcatgcatggatggttaatactactccctccatctacttttgataatcatatttcatttttgcacacagaccaacgataagtgattctacttatcatccatttaaacatgctactagtcatcctcgtgaacaagcgattcattaatatttacatttctcga

SEQ ID NO: 72262 - DNA, 182 bp, Oryza sativa
agcttggaagtgtgtgtgaaagtgaagaaagtgaagtctatttataggataggtatgacggttggaatgatgcgaattgtctgaactgcccctcaaccgtcattaggagagcatctagagcgtccacaccaaaacctagatccaacgccgttcaccagggttcggccgaaccagggctgggc

SEQ ID NO: 72263 - DNA, 178 bp, Oryza sativa
agcttgtcgaggtgtggctctggaaactaggaagagaggcagtctacacctttgcgactcaatccctcaccttctcggtctcaccgttgcgtcgtctccattggttatatatatattagaagtttaagtggtttatgtgttccgaggaaataatattttcgtatttatgtctgattat

SEQ ID NO: 72264 - DNA, 178 bp, Oryza sativa
agcttatggatatgtggagaagattgtcacatttcagaagtcagctggtcagattcccccatctctctctcactccgcacacacatgcatagttgatatggatgttacttagcagatgcatgtgaatggcaaggctgatttatcaattttataaactcaataatttccaatatgggta

SEQ ID NO: 72265 - DNA, 182 bp, Oryza sativa
agcttctcctaatgtcaggagaattttccctcctctatgtgtctcgaaagctaccacggtggtcctgcctatagccatgggcctatccttgacaccaacatgatggcttggatatcctcttcctcctgtaaccacaaaaaccgaaccccctcatcaaggaacacatgatgctccctcgttct

SEQ ID NO: 72266 - DNA, 196 bp, Oryza sativa
atttttaaggcatgcaagcttaagctagctagttagacatcttgttaattttggcctcaaataggtctagaattcatcaagaacacgagctagctaactgcactgtcttgctatatatatatatacactgctcatatggagctagtggtgcacgctttggcggccgcagctgccctcctcgccgtcttcttcctct

SEQ ID NO: 72267 - DNA, 199 bp, Oryza sativa
tttttttttgcatgcaagcttagagactctgaagagtattgaattcaatggtatgctgagcatggtagaatgggtaagtggaaacacttggcacttgttttctcagctcgagcaagtaaaagtttcaaattgcccagttcttaaagaactgccgttctctcatgacttgaagctgttgcaaactccagatgcacaagag

SEQ ID NO: 72268 - DNA, 182 bp, Oryza sativa
agcttcagaggcacgaacaaggaacgtatgaatttgtgaaaagcaataagagaaaaggaaaaatgctagcatatgagtttgtcaagacacggacagtgaagtggagattcatcagctggtgcactccagatgacgcctgtttcaggtggttgtagcagcagttgtgctgttattgttgtgca

SEQ ID NO: 72269 - DNA, 188 bp, Oryza sativa
aagccgtaacggtacaaagatgccacattattatctactaacaattatttaatttaagcataatacaaccacgatatattatttataatttaataaaaaatttagagatttaaaatgtaagcatgctaaatcatcccatataattcaaaaaatatttcaatatatctctccattatttttttaatatc

SEQ ID NO: 72270 - DNA, 180 bp, Oryza sativa
agcttgttagcttgcagggcatgccaagctaagatagataatttgaacaatagattaatcatctaatgactaaaacaattgatgcaacataaactaagtgaaaatgaactatataaatatatacgatattataaaagatgatggagagatatattgaaatattatatgaattaattatgt

SEQ ID NO: 72271 - DNA, 180 bp, Oryza sativa
agcttttctttttctcgtcgccggccgggcgtcacgagcggccagctcgtctcgtggcgtgcatggatgcatgcatgctgctcacgcgtgaccgatcggtccgatcgaatcgccattggcgtttgcacgagaaagcaactcgctatcacttgcatgtgtatgtgctggccttgtgccacg

SEQ ID NO: 72272 - DNA, 181 bp, Oryza sativa
agctttggagggttacactcagtgcttattatattttctggtttgttctggatatatccatttaggacaagggcaccttccatttagatcgatacatacgtgtaaagcaaactcttttttgacaattcaagcataaattagtgactgaagaatcaataatcatttcagtggggaaaaatta

SEQ ID NO: 72273 - DNA, 198 bp, Oryza sativa
ttatgttttgcgctgcaagcttgccggttgtgattattgctcattaccctgtcacgccctgaagttcccctacccttgctctaaattcataaaataaatcgtccaaagaaattgtttgatttaacctacagatgaaaccctaattaataaatgcaaattgtaagcggaatagacatgtggaatttttcttggattcta

SEQ ID NO: 72274 - DNA, 174 bp, Oryza sativa
agcttctcaaacatattccttcagtgcggagagcgaagtcgaatccctcccgccagaatcaaagcacaaaccgaaagcaaaagaagagcacgacttttcccgccaaaaaaaaaagaagccaacgacgcggcctctctagtagagtagtagtctctacaaagcagagcatgcagt

SEQ ID NO: 72275 - DNA, 178 bp, Oryza sativa
agcttgtcgagctcttctcgtatggcttgtttccggtctggtgcaaatctccgcagtttttgttttactggcttggcatcggttctcaccatgagtttgtgctcaatcacctccctggggacccccgacatgtcagacggctgccaagcaaacatgtctgcattgtcacggaggaaga

SEQ ID NO: 72276 - DNA, 180 bp, Oryza sativa
agctgggggagatatccctggaaaagaactgaaaaatggcgtgcttgaaggatatagattggctagactggcctgaagttcacggagcaaataaacatatacaggcatccgggtgacaaaaagagccagacgtaacaatgtcgccatatacaaatagctgaattatgaaggtgaaagaaa

SEQ ID NO: 72277 - DNA, 183 bp, Oryza sativa
agcttattgcatgataatatccaagtgaaatcactattttgttctctaccagttcacatttggaaactgaaaaaagtgtagtaaaaatgtccagaacttgcttgatcaattaccaatcttaggataaaatctcaatggcactgatggagcgacagtatagacattgcatatcagatggcatga

SEQ ID NO: 72278 - DNA, 186 bp, Oryza sativa
  unsure (1)..(186): unsure at all n locations
angctttggtacgtgccccatttgtgctttaacacagctttgcatcctttgatcaacattgtattaagcagtacatctagttcagtaaatagatgcaatccctctataaagtttttcatatagcagttctgaataaaaatattggtctgtagaaacctctagttatttgattaattctgattgaac

SEQ ID NO: 72279 - DNA, 179 bp, Oryza sativa
agcttatgaaattgtgatgatttttttttctagaatctgattccttgttttgctgttcagaatgatcgaggatgcacaagagaaagggctgattactcctggtgtcacaactctagtcgagccgacgagtggcaatctgggtttaggattggtgcttgttgctcttcgcaaaggttaca

SEQ ID NO: 72280 - DNA, 180 bp, Oryza sativa
agctttaatatgcagtggaataatactccctccgtcctaagaaagtattgtccagggtaaaaagacgtgttctcttctcagggtgtatggcactgctaaaaaatttgactttagaggtaaccaaaatcaatttttgctggcaatcatgatgaccgcctgcgactgaacgcctatgacagt

SEQ ID NO: 72281 - DNA, 181 bp, Oryza sativa
agcttttgtaggaatcccacgtggcggtttgagagcgtttgtagaaagtttaatggacctttagtatataatatataataatatatttattttttggctagacgattcctcaaatttacattgcacgggctataatattgatactataggattcctcgacttatgagtgtttatagagtgc

SEQ ID NO: 72282 - DNA, 179 bp, Oryza sativa
agctttgatttcctaagcaaaataaaaggaaattttgaagtatgacaactttgttaatgaactagttaatcacagaccagtgacgatataaacctttggataatctctaattatcaccgggcgcccaccaaaagcaacttctgtgatatatctttcatgctcactttgcagatccaatc

SEQ ID NO: 72283 - DNA, 243 bp, Oryza sativa
tagtttttttttgctaggcatgacaagacttgtccttttacgtctggaaaacctgtgttacaccctacgcaaatgggcgttgactccgaagcattacaccaaaatcggtccacctgtcgaatttcccaggtcaacggtcggcaggtttattctgcaataacttttatctgcccggagactgtgaccacccttttagattaatcccgaaatgatttctgcactttaggcttcagccttcttctc

SEQ ID NO: 72284 - DNA, 197 bp, Oryza sativa
ttttgttggcatgcaagcttggccctgtggggggccctcgaggacacaatgactgggcccactcatcaacaagtgacaaaacattatgtacctaatccctgtatgctaggacccaactgttagagcttagccattgtagtattcaccagctaactataaggggagagccaaggcctccgaaaagaaggatcaaacct

SEQ ID NO: 72285 - DNA, 184 bp, Oryza sativa
agcttgatataaactcgaaccgagtctatactaacatcgagtttacggttaggtttgggcttggctcgaacgagcctcgagcctaatcgagcttgctcaaaaacaataaaatacaagcttatttataagggaacatagcctatgtacacaagctttctatacacactaattaacaaatgtcaca

SEQ ID NO: 72286 - DNA, 181 bp, Oryza sativa
agctttgatctccgccattcttcaaaaaatatcaattctttagctctgttgactgttatccggagagtaaaatatggtatatacaattcagtggatgtgatctgtatcttgaatttattttcaattgctgggaagatctgactggttcagatggactgctactgttcaaaaaatacagtag

SEQ ID NO: 72287 - DNA, 181 bp, Oryza sativa
agcttcagttatttgcccttcaatgtcaagcgctaaatcagtaaaggtaataaaaagttcttgcttgtattatacaatgttttgcactatatcctatgcaacatcacctcaaatatcgcaggctcgtcggaggctttctgaaatttttcagactttaggccttccagcaactacagactgc

SEQ ID NO: 72288 - DNA, 180 bp, Oryza sativa
agcttcatgatcctggaattattatttgggagacttctagaatgagagcagcaaaaatataggagaggtgtttcttccatgcaggaaatggaatctgaagaattttgggaatttggcatggacctgaattgcttggtttctgccacttctcatgcagtgacttgtactcctgaagaaaaa

SEQ ID NO: 72289 - DNA, 182 bp, Oryza sativa
agcttctaccttaaaagatggtacaatggtttaagttttgcataaagctaattttattgagcaagtagtaagttgaaaacatagcattgataagatagcataatctgaaatttttgggcagtaagcaagtaaatctgaaattgaatcacaaatgagcacaaccggtgctctcatcgccatcc

SEQ ID NO: 72290 - DNA, 180 bp, Oryza sativa
agcttagtaaacaaaatgtggtaaatctagacaatcttaatacatgaatcatcagaattttattgacatgactataattgactggtgtttaggcttctcgttgcacaccgttttgatggtgcaatgatgcatattagccataataattgatagtataagtttgtgcttgatacgatgaat

SEQ ID NO: 72291 - DNA, 180 bp, Oryza sativa
agcttgagaaagcggagcagcagcagcagcatgtgaagaggtgtcgagagtctgagaaatacataggatcatgagatcaggactttaggagaagatgaggcgaagaggatgatctcctgggttcacttgagagaagagatggctgttgatctggtttgggggcatgatttagggaaggag

SEQ ID NO: 72292 - DNA, 178 bp, Oryza sativa
agcttcctgttcatgttggctttatctatggaactggaatttatcagcataattaggcattctactgtagtttcagttctcactgatcagaatttacaatttgagcactatgagattgcgaagagttacctttctagattaccagaaaggaagcatggtaaacagtaccttggacact

SEQ ID NO: 72293 - DNA, 273 bp, Oryza sativa
  unsure (1)..(273): unsure at all n locations
gattatgtgcagcttggcggctgcctctcgcatgctaattgcgtcacttggtattggcttggtgcaatgaattccaattttaacacagagagcatgcagtgtatatctntctcctttacttccactggagcttctangcagaggtccaactcttngtgtaactggggatcaacgatctcaagtatcctgtcagagaagttgatctctgtaaactttgcaatgctcagtccattcttaaacatagcgtctattgggccgctacatatgaacaac

SEQ ID NO: 72294 - DNA, 373 bp, Oryza sativa
agcttgtatgttgtgaataaagaaatttccatagtattgggcatacgccatgcgcacactgctttaacagatgtgcttaagtccctagaagacacatggttccaccacacctggaaatatatggcatatgtggtataaaatccgagtaaataaactcataaaggattcaccaaccgcctgaaaaatgaccacaatatataatcagcctaagccataatattggtcaataaaaatgcacacttacgtggcgaaaagcaatgatattgtatccaatcaattgcttaaaaacccaaacagcaccatgactatataaaaaagtcagcgggccagctatataaagctttactgtttgacaccttttaagatgcattgt

SEQ ID NO: 72295 - DNA, 364 bp, Oryza sativa
atctttctttcttatactggtatccgctaaagaacacaccgacgatttgggcttctgctttgctctgatcaaaccaaatcttaacatgaagtcatacttctctgtgtgtggggtccctgcctatataggtaaaattttatctctttctttaaaagttgaaaaatgggtggtcttaattggaattagtttgtggacttagcaattgcatgctaattgagacgtattggaaggaatactagtattatctcttcgctttgtttttcttcaaatcttgcagactactattattgtagtagattggactaatttggagtaggatttgcgtagaaacaagcctctctctgaataaagacaggccggtgat

SEQ ID NO: 72296 - DNA, 344 bp, Oryza sativa
agctttgcagccgccggtgcagtgtcactgtgtcagtcaagatgggcagctacttgccgtgcgccgccacgtcgctgcacctgctgctgctgctcgcgtcgtcggaggccgcggcggcggcggcggccgcgtcggcctccctctccgccggcggccaccggcgctaccactccatcttcaacttcggcgactccttcgccgacaccggcaacaagccggtggcctacgcgtggtaccccctcccctccaacgtcatgcgtcctccctacggcgagaccttcttcggccaccccaccggccgcagcagcgacggccggctcatcctcgacctcatcggtaacgtc

SEQ ID NO: 72297 - DNA, 417 bp, Oryza sativa
  unsure (1)..(417): unsure at all n locations
actaagctggactctgatgcagcgtcatcccggagaggctgcttgttttataaaagttaccttactccagagctntggtatctgagagtcaatgtcattgaggcacaagatcttataccaaatgacaggaccaggttccctgatgtttatgtcaaagccatgctaggtaaccaagctcttaganacccggtatcaccaagccggacgctgaatccaatgtggaatgaaggattaatgtttggtgctgctgaaccattcgaggaacacctgattctgagtgtagaagatatgattgccccatggaaggatgatgtacttggaaggacaatcatttctctgcagcacgtacctcggaggctggatcacaagttgctgaacagccagtggtacaatcttgagaagcatgtaattgtggat

SEQ ID NO: 72298 - DNA, 349 bp, Oryza sativa
  unsure (1)..(349): unsure at all n locations
ctctcgccttgatctggaccgcggcttccgctacaccatacgttcgtggtgcccggtcttggaagccatggagctcaactcctgcatcttcgagttcgacgagatcactggcantgcgctcaggagtttggccattgatggctgctcccgacgtggtctgcaggtgcctgatgatgcattgtgtgtcacggcgccaaagcttacctcccttcggctcaagtnttctatacatgatttcagcgtgttnttggttgatcgaatgggtattctcgttgatgcgtcgatctgtaaaatgttatcgttcacgacccaactttggaaacaatgtatgcaacttgtagaagtcgaa

SEQ ID NO: 72299 - DNA, 368 bp, Oryza sativa
tatttcttatcaccagtattctaaaagtcggccctcaggtggctaacctgccttgggactcttgtgctggtcctgctatttgagtgtcctattgtctaacttgccattagaatttagaaatatactctacactttagtttctgtacttgacattttttttgaaagcttacatagttagattgaaacaagcatcccacatcttacaatgagtcgtctgtccgccttctcctcccatcacagggaacacgcaaccactgtcttacccctagagaaccaggaaaaaaatgagtaatgaaatctctgttggattttggatggattgaacacaccctagtaatacgaatctagatagggaagaagtctatcta

SEQ ID NO: 72300 - DNA, 344 bp, Oryza sativa
  unsure (1)..(344): unsure at all n locations
gcttctcattggaagatagcattcatatcatccaccatatccatgtcatcattatccacacataagctctccatccatgctttctttccaaagaagaatcctttgcaaaaattaaaggagaaaaatagggaaaggtatggctatgagaaaaataataaattcttgctctcccaaaattggagcatgantgaaaaaaaatgaataaaataggagaaaaactcgccataccctctctatgaaaattaaaggatattttggaggaaaagcatatgcacaaatgagaagcattttctttatccacattgtgttttccatcactatttccaccatattattcacacaca

SEQ ID NO: 72301 - DNA, 424 bp, Oryza sativa
  unsure (1)..(424): unsure at all n locations
ntggctacctatccncacgttatatatcttcacgtttccaccgttttcgcctcttctgcaaacgcgatctcacagcgttgcatgcgaccgagcggcgctcacgctaagccaacgtgtgcacagcgaacccacgaagcactgctagcacgtactactactacgctccgcccgcgcggtgtttgccacagaccgtcctataccactacacatattttcccgtcgccacagcgcgttggaaatcgtttcacggtggcagacgctgtgtattggcagcggcgcagcgctgtggcgctgtgctaatcaggcaggcagagacacagaacagaggcatgagtacgcacaccgtgccgatgacacgccgcatgcacgcgtgggcaaggccacgggcgcatgcacaccgcaacgtgaatcttcttcccagctc

SEQ ID NO: 72302 - DNA, 359 bp, Oryza sativa
tatctcttttcaaaaatttgaagtaaactgactgcctcgatcagacactattttctttgggacgccatgcaaacacacaattcttgccatatacaattccgccaaccgacttccggaataagttgtctttaccggaatgaaatgagccactttggtaagtctgtcgactatcacccaaatagagtcatggcctgatgacgttctgggtagaccagtgatgaaatccataccaatttcctcccatttccattcaggaatcttcaaaggctgcaacaaaccggcgggtttctgatgttctgccttgactcgctgacaaacatcacatactgctacgtactctgcgatttcacgcttcatac

SEQ ID NO: 72303 - DNA, 307 bp, Oryza sativa
  unsure (1)..(307): unsure at all n locations
tcgctatctcaagccgttcttgcttggcatgtgggtgaatgagtcttgttctaattcgaccctagcaccgcccatgagtggactgaaggacgctctcttccatccatcgatcgcttcttccatcaaattaaaagaatatgttaacagcagctacatatattaagatcagatcaacatgaanaacggcagctaacaagcatgaaattaaacaaccacgaaacttttggagcttnctcccatgcggatcttggagggattgtgagagtggtagactggtagtatgagaggagctagtagaagttatcac

SEQ ID NO: 72304 - DNA, 302 bp, Oryza sativa
agcacctgcggcattctgtcttttactaaatttaaacaatagatgaacatacccatgccactatgttctgcttttcaaatgggttgggggtgtcgattgctttggggccactaattaggtcaaggaacacaacacccaaactatacacattagatttaacaataagctgcccagtcatcgcatattctggggcacaatagccataaattcccataacacgtgtcgaaacatgagttttgtcaccaacaaggccaaattttgccaggccaaagtctgataaatttggatggtatccctcacca

SEQ ID NO: 72305 - DNA, 264 bp, Oryza sativa
  unsure (1)..(264): unsure at all n locations
cctatatgcaataagccattccatatgaattttgtattgattggaaanacttcaatcctttgaattaaagggctacataggaaaaattcctataggattcaatcctatgaaattctttcataatttctttgattcanatgggctctaaaatcatataactnattttttatgcactgctcgtacgtttgttgcataattcaagacccaaatcaactatatttaacaagtaactttggactagctattggacactcgagacacaat

SEQ ID NO: 72306 - DNA, 356 bp, Oryza sativa
tttttgtgccacttgtttgggagggtttggcaaaagggtgcctaaacaacatttcccaagagagaagcgacggaagcactgtcatcgccggccgtcaaggtctcaaagagaaccgagactaagcttttacccggccgacccgctagagggatgagacggcacgacaacgccctcagaagggggagtgacgctcgaaacgccaccgttgccggcccgaccaaggcctggctgggttttcactggccgtccgccggctgcctatccaccgctgacacatcattactccaccaccatctaaacctcttccagtgcgtgggcaccactgcattggcgccccccccccacacacacacacc

SEQ ID NO: 72307 - DNA, 261 bp, Oryza sativa
  unsure (1)..(261): unsure at all n locations
tctgttccacgtcttcgtctgcagcgctctcgtcgatattactccaagatgggctccgtgagggaagcccagtgcgcgctgcatgacacccgcgagccgaacgtcgtctcttacaccgcgctcattgctgggtttctgaagaatgggatgtctggngatgcagcccggctggtccggtgcatgccggagaggaatgtgatttcttggaacgccatgatcggcggatccagcaaggcaggactcaacgaggaggcagtcaat

SEQ ID NO: 72308 - DNA, 362 bp, Oryza sativa
acatcatcctatggatggattggctggctcatcacaaaggacagatagatcgtgccgaaaggtccatcaccttgcaaggacctggaggaaagcaagtccgctttacctctaacaccccctaccgcaagtccggtctaatcctaaccctgtttacaagtcacctccttggagtcggtgcccatagtctgcgattatcccgacgtatttccacaagaattagcgagtatgccaccagaccgagagattgaattcgccatagaactggcaccaggcaccgcaccaattgcaaaaagaccctaccgaatggcagctaatgagttagcagaagtcaaaagacaaatcgaagaattggagagtaaacg

SEQ ID NO: 72309 - DNA, 418 bp, Oryza sativa
  unsure (1)..(418): unsure at all n locations
gctcggatgcttcattttggtactgttcagagttatatactactttattgcataaacttatcatatgatccaaagaaacttggctgcatacttaataataacatagtttaccattcttatagatcatgcaaataaatatgttcttgattggccaacaaggttcaagataatcaaaggagtagctagaggacttctttatctccaccaagattcaaggttaactgtaattcatagagatctcaaaccaagcaatatcttattggatgttgatatgagtcctaagatatcagaatttggtatggcaagaatctttggaggcaaccagcatgaagcanatactaacacgagtgttggaacatagtgagtcaatcatgcattaatgttcacaatcgttatttgctcgaatctttacttactg

SEQ ID NO: 72310 - DNA, 357 bp, Oryza sativa
agtttgtcattgaggtgacacatcagcccacacatgttatcgtcgttgagcttgccacccaagcgacacggcaactttgacttcagtgcgatgctacccaaatgccaaaaaaatgaacaaacataatcgatacccacgaaggacattggcccatactaccaaggaatcacttcctacacacagctagcatcaacaaccatataaagtgattgcagtgtgtcatcatttttaagcttcgtcgcaccccagcagctaagcagctctgactctacccagcagtaaccaaataagaatgatgaacacccgtcgtagagcaaggaacgaaaccaaggtagcgaaggcctcgtcaaacaccct

SEQ ID NO: 72311 - DNA, 319 bp, Oryza sativa
ctacaaatagaacccaagatttgcttcggaacattaatattttggactcccatttaaatagtgtggcaaacaatcatacgtcagggcgtactactggtggaccgtgcaatggccacctaaaattaaaaatatagatatgtgctagctaatataataacaaattgtattagcggatcacccttttaattacatactaatatgatgaaccacttactttaatctagctcgccactcatatgtatgccaccgggtgtggcatgtagaaggatgaaaaactcatttgttaaacataacacttcttatcacagatgagtattac

SEQ ID NO: 72312 - DNA, 372 bp, Oryza sativa
gctttttcttattggcaatggcatttgcgtttgcaggcgtacagtgtgtccaaggtgcttttggagaaggccgcatgcaagttcgcggaggagaacaacatgagcctcgtcaccgtgttcccggtgttcaccttgggcgcagcgccggcgccggtggcgaggacgagcgtccccggcatcctctccttgctatccggtgagctagaagcaccagcaacagcaatcaaatcaacaagctagctcccacaaagggcctgtttggggggagcttctagctgctgcagtatattctagaattagaagttgctctaaacagttcagcttttgatttagattataagaagatataattgtaaaattccatcaaatgaa

SEQ ID NO: 72313 - DNA, 314 bp, Oryza sativa
cacatgtcaacagaacgtacgtaattatggatcaatatgagaatatatgtcagtgacaaaactaggcttctgggcgttacattttctctagaatattgctatcatgatatatgcaaatgcagaaatggctaacagtaagcagatgaacaagcagcatcgcaaaaaagggataggaatgatctattatcacttgaagattatactaaacgagtagagcttccgaacgcacctgcaatacaaaaatgaggaaggcttagtagcacatgtttgttatggtagtttgctaaagacttactgcaaaattttcataacat

SEQ ID NO: 72314 - DNA, 353 bp, Oryza sativa
  unsure (1)..(353): unsure at all n locations
agtttttgatggttnttaaggatctcatcaacgtttgtgctgtcacaggtaataaatatggaatgggggaacttcacgacatcccatcttccttcgactgaatttgaacaagcattaaatgctgaaagttttgaatcctgtgaacaggtaacataaaaagatccatctcgtatttcattgccaactatgacgaagcatctcattcattattttgtaagtttacgataagttgatctctggcatgtattcgggagaaaatgttcgtatagtcctattaaacatggctgaagaagcttctctctttggtgatgaagtaccaccaaaactcaagattccatttattatcacgtaac

SEQ ID NO: 72315 - DNA, 229 bp, Oryza sativa
agcttgctttttgctcaaggtccggggtgaggattgaacccctaatggcgaaagtaagcctgcaagtcaacctgctgttgaaacatcatgttgtccaaaatggaaagacgtgcatcaatattctgctgccactcttgagagtgcatgatgagagacttcaacgcgcgttggtgtttttccggtttgtagaaaaaaacacccaccctccgagggagctcccccacatccc

SEQ ID NO: 72316 - DNA, 178 bp, Oryza sativa
accgacctgaatggctgataaccctaaactcccggacatgcctaataaatctcaaacacgacacttgaacaatttgaaatagaccgcggcagcgcccccaaacccaaattgccgatgaaataacaagagttgctgaagtaaaacggccgctctgaggcaaagacaaagaaaataactc

SEQ ID NO: 72317 - DNA, 351 bp, Oryza sativa
gaccatatctttgggtattacccatatctttgcatttcacagtgcctgcacgcaggccgatccatgtctctcataaacacaagaatgcattaattcataaacttgtgagttttataagaaacatgtgttagtaacaaaacgggatgatattatgcccatgatggtggaatcatttttcatctgtcttgccaatttataagactgacattgaacttgagcgagacaaggtcaggtcctcctcttttcatcttttcttgcttactgaatatattttttggtactaaggactttggtaataacaaattttctaaaggacctatgccaagtaatctctattttgcttatcaaact

SEQ ID NO: 72318 - DNA, 324 bp, Oryza sativa
tcgacgcttactctggctaccaccagatcagcatggctatgtggtcaggagaaaacgcgtcatcactccgtcggagattgctacgcagagcccttcgattgaaacagctggcaaacttccacgcaggtcaggccacttagcaataacttggaacaatgtcgaggcgtacgtcgacgacatcgttgtcaaaaccaagacaagcgactcattgattgatgacctccgggaaacgttcgacaacctccgacgatatcgtctcatgctcaatccagagaagtgcacgttcggagtaccgtctggcaagctactcgaatccttgtttct

SEQ ID NO: 72319 - DNA, 369 bp, Oryza sativa
tatcttctttttagttggtactgattggacaaaaggaacttttttttttggcagcgtctgctctataaatttaactctatcgattgagttttggcctggctggatgcctggattactcgttgtagcatgaaatcacgtggcatgtaggtcaacatcgaaacggcagcctgaataaccccacagaaacttcaaaatgacattctaactcattgcaatttgcacgtactttcacctttcggtgtttgtttcaatcatagttggtggagatgctcgaagttacttccattatctaaaaaaaaaatcatttgctttgctattagtttgcatcagaagaacaatcaaaagaagccgattgagtttgttaaatac

SEQ ID NO: 72320 - DNA, 320 bp, Oryza sativa
  unsure (1)..(320): unsure at all n locations
tgccttccgctcgagcctatcctttgtttcggctggaaatgtgaaccatntctgcattgccgtccagctcgctctttctcggcttctgtgaactatccgatatctttatggaggatcccgaagttctcacgtgccgctagcccgcagcagttagaccatcttccaatgacagtcctgggcgccgtgggcctaccactagcgtcaacctctcttataacttgcactgtggtcggtcatatattttgtgaccgcggatttctactagacctacttgcacttgtcccgcccgacatcgacgtatgttgttcctgcggcaattc

SEQ ID NO: 72321 - DNA, 157 bp, Oryza sativa
tactcctaactgatgttgtaatattattgaaatgcttatattcttgtgcaagcgcaggaatacctatattttaatagccgcgacggtgctgtcattcaatcgttttttcaaatattacaatatttgaagatcatgtattagctatatatgtttaatt

SEQ ID NO: 72322 - DNA, 63 bp, Oryza sativa
tatatatatatatatatatatatatatatatatatatggagatgtagatagatattgtgcaca

SEQ ID NO: 72323 - DNA, 309 bp, Oryza sativa
tatcttgtcgtgataattttgttctacctaactggaaattcccttagatatcttctgggtggtgtttactttacatctcacacctttactcctaagcacattggagttatgatctagttttgtcattatttgaggtttatttgtttatataattatttttagtatgtttttaatcaaacaacttattgatgcatttgataggttgatgttaaaaaagccgagcgtagacatgatcataagcaaaccagtccatctattaagaaccaaaacgacagcgtgcagaaaaatcaatttatttttcaaaagaaa

SEQ ID NO: 72324 - DNA, 239 bp, Oryza sativa
ctcttcactttcgagcgcccttctaactggtatattatatatataccctctgcaaaacaaacttcttttaaattaataacaacccgctctaaggatgctgtggagaaacgataccggaagctggaacttcatattagccttcacaggtcacatcacattgctctttcaattaccgcacaggaagcccagatgcggcaaaatgaactaccacatgtggccgtcctacatgtggatcattt

SEQ ID NO: 72325 - DNA, 361 bp, Oryza sativa
atcttcacagggtaaccgatacaaattgaatcgggttttgtctttctttttttttttaatgtgaacagtagtagatcggcttatagcctgatctttttgatctatgcacgtatacagtaataaaaggaaacaatgctcctgctgcttgtctctcagcagatcggctctagtagcctgatcttttcctctgttgccgtgtgaaacaaaaggaaaggaggttgctgagtcggctgctgctccctgatgatgatcttcaatacacacggcaagtgttcagatggattcagtgacgaccaaataacctcgccgccgattagattaatccggcgatactagattaatttcggccgtttagccgaaa

SEQ ID NO: 72326 - DNA, 408 bp, Oryza sativa
  unsure (1)..(408): unsure at all n locations
tgtccaganattccatgaacactttcgtcatcagattcatgttttatgcatgtgcgttagtaagtccgaaagacataaccgtgcactcatatagcccgtaccgagtggtgaaggccgtctttggaatatcctcttcccggattatcaactggtggtaggctgatcgcaggtctatcttagaanacactntagctcctttcagttgatcaaacaaatcatcgattcgtggcaaaggatatttgttcttgattgtgacctcgttgagtgcgcgataatcaacgcacatcctcttcgtcttatccttnttctccacaaaaatgactggagcaccccaggtgaagtacttgtcgaatgtacccttctgcgctgctatcaactgctcttgactctgtagtcgttgcgccttct

SEQ ID NO: 72327 - DNA, 351 bp, Oryza sativa
  unsure (1)..(351): unsure at all n locations
ttctgaatggatgctgcggagagcaatgcagatatgtgctgacggctatgccgtgtcatgattcagctcgattcgctgcaggtcacgaatcctttatgaaagcaatttcgtcacttcattctatccctacaccagctactatactgcatgtaattgcttgtctgtanaccagtacatttcagacccacagaatcaaattatgattgtatcgatgctacatatcagataggtgatatgcctatctncaccacacctatctatggtggcttggggcgggcgactttatcacaaatctaacctatatggcatatgctgttataatagtgggagaaacagactgtcctgaccgag

SEQ ID NO: 72328 - DNA, 373 bp, Oryza sativa
ctgtttatctttattttgtaccatgaacgtacacgccgatggttgatagcgaaaacaaagatgcttccggtccggggtggcgcaagcgtgtcaccagcaactggtacagacgtgaagacgctactggccggcgggcgcgccttctcacgccaagccgatcttggcgccgggcacgccaccttgcaccgtgccgacattcactaccgctggccacgccaaccaaatgcggccatctgccacgcctccccggctagccgcccgtggccgtgaaaccaccgcgccgtgcatcttaccggcagaccacccgccgcgccgggctcacgccgcggtccttctccggcgcccaactcctttcccgcctccactttgacag

SEQ ID NO: 72329 - DNA, 331 bp, Oryza sativa
  unsure (1)..(331): unsure at all n locations
aagactttagtgccctcgataaatatgtgatgagtggaggtgagagagtatgtacgggataaaatatgaataaatntgaatacgaagtgattgatgagataaatagtaagtgaattgggccaaaactttaatgagacgacccacaccttgccccatttcttgtccacccctgcgttgagaggaaaagactttagtgccctcaataaatatgtaattagtggagctgagagggtacgtaagggataaaatggaaatgagataaatagtacggattgtgccaaagctttgatgggatgcgccagaccttggtccatttttgtccatccttgtg

SEQ ID NO: 72330 - DNA, 368 bp, Oryza sativa
  unsure (1)..(368): unsure at all n locations
tgtttgtttttgtatagtataacttgctggaggcgagtgcattgggttaagcttggtggtatctcaccttcgaaggagttgttcgataagccgagtacctggagattgctgcatgaggacagctcatctggaatacggccttcaagagagttgatgctcaagttcangtagctgatttgtcccaagcgtccgagctcacttggaatttttccaaggaatgcgtttcttgataagtcgaggcttgcgatggagctcagattgccgatgcaaggtggtattgaaccactgaggcctttggagctgacgttgagcaccatgactcggagttgggtctgggtgttgttgcatgaaacaccctgccagttgca

SEQ ID NO: 72331 - DNA, 432 bp, Oryza sativa
  unsure (1)..(432): unsure at all n locations
tgttccttatggatggtngctgcaattaatattggctcgatatgatctagtttttctcctgatattacttggagtaactagtgttagtttcttttgtggtgtactggtgaacattgagttgtgaactgcttttcgttttttggtggaactagctaggttcccaatgcacatctgtaaattggtaccctcagaaaatttgtatcattacacttgccttcaatataagagcatgttcaggagactagctatcctattcggtgcccttcaatataagcaaaggtttgacctttgatctaaaaagttttatcctcacctatgttagttgcaacaattantttgtcaatgtgaattcagggaaattttgatgtacctattattcaggctgactagtagtagcaatataatcgacttagctntactatattagattat

SEQ ID NO: 72332 - DNA, 387 bp, Oryza sativa
  unsure (1)..(387): unsure at all n locations
gcttcgtcatctntgcgacaatcctctttcacagatatagcacaacttttcttccagctcctaaacatgatttgtgctgttggacatcctcataggttctcgattctgatttgcccgtttcgtcttgtgtgtctaattatgcttttgagcaaaacaagatgatttgctacattagtataacatgtgcctactactacatgaattacatcaaagttccaagtatgagcagataccttctgacttatatgttagagcaccgttgacagtaatcatgattccagggtcagcaggatcaatagcagtacatcttacatatagaatcagtactgataacggctgaaatgccagaatgaacatcaaacgcttgtaaacaanattctactactc

SEQ ID NO: 72333 - DNA, 356 bp, Oryza sativa
agcttttcttcatggtgggctaccccagtcaacctccgggtaggcagcctatctttctcttaattcttggttagacatatggcatagccgaaggtggatgtcgggacagaaagatatgatataccaaatcttttttattttagtctcttcgtcttacagcacaacatgcttgattaatattggttgtagttgtactaatgagacatgtaagtggcgcggtctacccaccccaaggtgtggaacccataagacttctataggcctttcttcgcacaacccttagcatgtgagatcaatacactgttataaaaccagccccgaaatcgacatcggtagctaaacgcggaagaaaatgc

SEQ ID NO: 72334 - DNA, 397 bp, Oryza sativa
ctcggcccgggatccttaagtcacctgcagcatgcagctttttttttttgttgacataaaaaatccctttcatgtcttcggatccacccaaaaggcttgcctgttcttaatgcataaacccttgggatcatttcgcgaactttggggaactcttccacttctagtaaaaattctggtgttcttgcccgataataagcactagcaagttggtgaagcataatcctcgcgtgggggaatgctatacgcttggtgggttctcctccaagcagaatgaaggacgccatggacgcggctattcccaggcatattgtatatatatctggtgtcaccgtttgcatcgtatcaaaaatcgccattcctgagattaaccacccgccgggggagtttataaacaaaa

SEQ ID NO: 72335 - DNA, 195 bp, Oryza sativa
atcgaatattacagactctaggcagaaacatctaccgcattcaacgtctatttctgcctggcacatcgtcatcctataggtacatgcaaagcgataggaagagatcaactatgatgaatatccgcgccatacgtacgactgaggatcactatcgaacacgaagaaagcttgcacataactatcattctatcatac

SEQ ID NO: 72336 - DNA, 249 bp, Oryza sativa
gtccgagtggtcactggtaggccagagcaggtccgtgcgggaggcgacagccaggttgcttgagcccgaggagcaaccaggagaggaagacgaagaagttgaaaatgagggccaccactgccctcgcgtgccgaccgcacgcgccaccgtggctccctttaaccgtcgcgcgtgtcccccgagccgccgcgcgtgttcccgcagtcgtcgcgcgtgtcctccgagctgccgggcgtgtcccccgcagtc

SEQ ID NO: 72337 - DNA, 381 bp, Oryza sativa
tcgcagaaccctcatcgacggtggcagtgcactcaatatccttttctccaagacactggatgatatgcagagtcctcgctccgagttaaaaccaagcaatgcgccttttcacggcgtaattccaggattatccgcaactccactcggccagatcaccctcccggtcacttttggcactcgggagaactttcgcacagagaatatcagcttcgaagtcgccgatttcgagacagcataccatgccatactcggacgcccggcattagccaagttcatggccgtcccgcactacacttacatgatgatgaagatgcctggtccccgaggagtcttatccctacggagtgacatcaagcatgccgtcacatgcgacaaggagag

SEQ ID NO: 72338 - DNA, 337 bp, Oryza sativa
ttaatccgcccacaagtcaactctgggagtcatcaattttggcttcgcttcaaagcaataggtcaagaattaaattacatgtctgggaagttggagtcatcaaccaatcaactcatatcagattcaatgagttgaacaacagcatatactttcctccaagtgaagcatctacaacagtttgatggattattgtcactgacatcgtcaccagcacatctgcttcatcggctctgacattccgccgttgctaatggatgactaagacttcgccaacttgctattccgccttcaccggtgacctactatgcaaacgcagatgagcgtcttcgtcattatc

SEQ ID NO: 72339 - DNA, 483 bp, Oryza sativa
  unsure (1)..(483): unsure at all n locations
tgccatctcctcagctgctacgacattcttatgctccgcgatattttcatgctcatcagcacattcgtcaggtcaggtgtccattcattactaccagaagcaagtgctttctttgtgagatctgctgccttcgacgcctgaccaaccttgaaatatccaccagccaacttataccaagtattgccaaaaggcgtcctccctttcttgacgaatngatctacaagagcttctgccttctccataagaccttctttgcagtaagcagtgagcagtaagttgattaaccgggaatcatggtaaacatgcttactntcccactcttcatatgctttctcagccccaacaatgtcattcatcttaagtaggacacttatcctgcacatgtacattgagttgcaagccgatgctggcactttggatntatagacatcccagattcggtccacctcactattcatccctagatcggcatacatggtgagc

SEQ ID NO: 72340 - DNA, 366 bp, Oryza sativa
ttttcttacctagtgcccgatggtgctgaactctcggtaacgctaaaaagcttaccgagtgcccgatattgctcaactcacggtaacactaaaaaacttaccgagtgatactgtggacgcacggtaacaaacaaactgttaccgtgtgatcctggtgcacggtaacccgccgttctgttgggagcgccgctacgtcgtgagtgttaccatgagtcccgagttttgagtacactcggtaaaattttcaaccatcccgtgcgtttttcgtgcgaactcacgggaagtccacatggtaaaccgatgaagccgccgtgtgagcgttaccgtgagctagaactcggtaacgacgttaccgtgtggttttgg

SEQ ID NO: 72341 - DNA, 502 bp, Oryza sativa
  unsure (1)..(502): unsure at all n locations
tggcgcacacganagaggacgagggcttataaagacacgcgcgctttctacctggcgcgccagatgacggagcttggggctcctcaccgggagaccgcgcangccctcctttgccggttcggccggtggcgctatgtgaggttcttcgccctcgatctaaggaatgtcagcgagaagaatcgcacaagacacgggcgacgtagacagggtcgggccgctgagaagcgtaacaccctactcctgtgttctgatggatctgtgtgtgaaggaatacagagagccggagagcgagagaccgttcaggctctagaacccctccctcctcttctcctttntctctntntttcctctctcttctctctctccttctcttaggccttgggcctctttntatctggtcaggggtcaccacatgggcctcaagctgcctaagaaaagaaacattctttttacaatganggctagtctacagtcagaagtgacccctgacaagcacagcaca

SEQ ID NO: 72342 - DNA, 186 bp, Oryza sativa
ctaagctgtgtgagaaggagacacatagtcaactttttttttgccttacccgcgaagggcctctttatagaaaggaaaccaatgcccgtcagtactatttataatgatgcgggggccacacctgctcaagtccgccagcctagacgatcatgcgttgatatcccacttagccagcggaatcctttc

SEQ ID NO: 72343 - DNA, 370 bp, Oryza sativa
tgtattcaatcttgaaggcagctagccagatctcctctgaattggggagagaagcaatagcttcctgaagaatggctcgggcagccgggacatgtccagccaggcatttctcctttgcactcataagccataaaacttctgcacgtggattggaggtaacagcctttctgaggagattataaagagactccttggttccatggctcttctgaagctgagccgctttcagccaaatactcttcttggaaacgaagacactgagtgcatgcgcatagatggcacgggctgtctcaattgaaccacgcttcttgcattcgtcagcatcggcaacccatgtgcgttggctgtcttcctcattaacaccaatgcc

SEQ ID NO: 72344 - DNA, 458 bp, Oryza sativa
  unsure (1)..(458): unsure at all n locations
gtctagaaactagaggcataaaacctatttgtctgacattcaattccttgataaatgggttatgcaagtctggtaaagctgatattgcatggaaatatttggaaaagatggtttctgcaggttgcacacccgatacttacacatacagttcatttattgaacacctatgcangatgaaggggtcacaagaaggtctgtcctttataggggagatgctacaanaggatgtgaagccctcaacagtcaattatacaattgtgattcataagctnttaaaggagagaaactatggattggttgcgagaacctgtggcgaaatggtttcatcagggtgcaatcntgatgtagtcacttatacaacgtctatgcgtgcttactgcattgaacgaagactaaatgaagcagaaaatgttttgatggagatgagcacaatggngtcactgagatacaatggatac

SEQ ID NO: 72345 - DNA, 279 bp, Oryza sativa
attttataccaggcggaggcgaataatgtggattgttccctctgctgtcccagagcataagccagtctccgatcaataacagccgcccgagggccaaaagagatattcttccacggaacataatacagagttatgattcggacttgtaaaccaaatccaaagcttatacgccggtgctgatcgataataaacaagtctcgcaatcagccatacaactagcagatgcccatgtatcacagaaaaatccatattatatctaatgacgcaccaataatgcga

SEQ ID NO: 72346 - DNA, 256 bp, Oryza sativa
  unsure (1)..(256): unsure at all n locations
cttctgactgtgagtatatcagaatgtcatcaatgaacaccactacaaacttatccaagtattccatgaacactttgntcattatgttcatgaagaacgcaggagcatttgtcagaccgaacgacatcaccgngaatacatacagcccatatcgcgtggtgaatgccgtctttcgaatatcttcttcacggatacgtaattggtgatattcggaacgaagatcaatcatggagaatacagtggcacctttgagctg

SEQ ID NO: 72347 - DNA, 342 bp, Oryza sativa
agcttttattaacgggttggagtccggtgcaatacaagcttcaataccagaaagacgaattaattaaatattaatatattaataattaactattgtataaataagctattaaattgacgaaactagtaactaggtatattatattattaaaggactaactagctgtcattcgacaaattttagtataacttaactggttaaattctttgtggtggaaccagcccacccaagtttaaatcctagaattgacatgggtgctcgtatttacgggctatttattctttcaatggtaggtaatatacccgtcaatagcgaggcacttacacgcatcaataacttaat

SEQ ID NO: 72348 - DNA, 455 bp, Oryza sativa
tcttaaccagctgctggttcttgatcatgttcttaagagccttatttccatgtagtcaagcccaatcttctcagcctgcacacgagccaatccgcagcaagttggcagataaataaattctcattagacagaataaattgatccacaaacaacgtgtgaacattcttaatatcagactccagccaattatacatagcatacaacacttgagatgcaatggagaaggacccagacaatatatcatgtcaggcacaaataataattcaaccaaacaaattaaaaatatgaaatatgtttcagttaagatactacaagaatgtaaaacaaagacttaaataatctaaggtcacttacatgagtgagaaaggaaaatcctcaatttcaatctaaacggagggtggtacaaattacaaaatcaaaatgggtatggcatcataatctttacctctcgacat

SEQ ID NO: 72349 - DNA, 499 bp, Oryza sativa
  unsure (1)..(499): unsure at all n locations
ctatgcattcccttattgtctccagtatcaggctgtatagtttctttctgtggtcaaggtgaggactcggagttagaagaagtaacaaaaataaaacttcttaacttgtatacagatctagcatttacctgagcaggtganaacctgccacagggtggccatgttcgagtcatgtcgctaaggtagccatgatactcacagccaacatccatgagcagtagttcacctgctntgacctgtcaaatagctaaaaataacttcacaagaaagatagctctgacatgtgcgacaagaganaagtctgtttacccttccgtcatttcttgagtagtgtattacactgccatttgctccaccaccaactacaggatggaacctaaggtacggcaataaaaaggaaaggtaaatcatctgagcatggacctcatatntcccatgcatattaactcaatatctattaattaacaaagtgaatggacatagaatcatgctactagta

SEQ ID NO: 72350 - DNA, 354 bp, Oryza sativa
  unsure (1)..(354): unsure at all n locations
agtttttcttgtgtcaattctggncggccgaagtcaaattcttacggcacgtgatatctgctaaaagagttgctggggatcccgaaacagtgactgccgtcaccgaatggaagcaacccaagacagtcactcagattcgcagtttcttgggtttggcaggatactaccggaggtttatcgagaacttcttcaagatcgctcgacccatgacacagttgttgaataaagaagaaaaatttgtgtggagcccacaatgcgagaaggcgtttcacactctcaaagagaagctggtttcctcgccagtgttaatcctgccggatactcacaacgatttcatggtgtactgtgatgctt

SEQ ID NO: 72351 - DNA, 419 bp, Oryza sativa
  unsure (1)..(419): unsure at all n locations
tctggcccgtaggttcataanactcactcggataagctgtattattgtttcatacaaaacaacaagcgattaaaccaatgacagataaagcgcctaaactataagacaagtaagcttctccagaccatacaaatgcacggcgagcccatgcgaagggtttggttaagatatgccaaattccgccaaatacacaaatgaaacccaaccatacatgnttccccaattatatcttctaaatcatccacactaacaatccaaccctctccctcaaaaggggattttagtatataaccaaatataacaccggggctaacggtcaaattggtaatatttcttacatctcactccccaggagctcaggtatcatatataccgncacaatatagagctntgagtactataagataagcacctatacc

SEQ ID NO: 72352 - DNA, 353 bp, Oryza sativa
cattttttcttttgggaaggggttttttgagagaaaaaaagaatctacttcaaccgatatgcccttaagcaccgccctacataacataaaaatcacacgtggaaggggtgggcaattagctaaagcaacacgtgctgtagcgaaactgattgcaaaagaaagtaaatcggccactttaaaattaccatctggggaagtccgtttggtatcccaaaactgcttaacaacagtcggacaagtgggtaatgttggggtgaaccaaaaaagtttgggtagagccgggtctaagtgttggctaggtaaacgccccgtagtaagaggggtaattatgaaccctgtggaccacccccatg

SEQ ID NO: 72353 - DNA, 414 bp, Oryza sativa
actaagcttagtatacttggtgatactgacaagcagcgaggtcttggtgttatattataaatcaacattgtgaagcagcaggatgatcttagtcaaatactgtgaattcttttgcattgcttgtcatggaacatggagctacttgtgggtaaaataatccctcttggaatgcgaaagaataataaccaagaactaaaggtgggtgggagattcctaaataatatcactaatcagcttctgatcaaatacaaaactgcaaaagttgaatattaataaacacttaggtggataaacctccataaatccaatacataagggtcaattcctcaagtgaaacatgcgtgtggttacacatataagctcgtgtgatcaacaccatgaattacaaaaattgcactattcaggtaggatgac

SEQ ID NO: 72354 - DNA, 375 bp, Oryza sativa
cgccatcttgtgtgattcttttgaaaacccgccagagaaaacatgtgggacagaaaggcccaatccggaaacaacacaagatggattcacgaataagagtaaagggattaaattatgcataaaaattattcaataatgctagaataacagcgcttacatgttctacctataatgcaatacatacgcaacacacgtgtagcgaactaataatatacaagcacttccatggtgtcacatgaggacacataaattaacacgataacataaacctatattcgccggtcacctaacatgggccaccgcgacgctgaaagactgaaaacatttcaagtgtgcgccaatatttgcatataaagagtacagggatcaacatga

SEQ ID NO: 72355 - DNA, 262 bp, Oryza sativa
tgatcgcatactgtcgtgtgcaaaccaccacgcgatcaactccggagcaatatacaacagtcttatatgttcatggacgacactgcacggattatgtttcaactactactcaagttccgttgacgcgtgtgactaactgtcactctcatgtggtgctctagcggacatatcatcaatcgatgcctgcgtgctcatgttctatcatgagcgggtgggacgaatgatgtcatattgaagacaggggcgaacccacgatcgggat

SEQ ID NO: 72356 - DNA, 352 bp, Oryza sativa
tttttcttgtcaccaacgaggccatgaaagcggcggtgagagctcgggcgttcttctccgtcctccgggcggtggacgctcgccaccgctgtggtcacgacgccggcgacctgagctccagcggcaacggcagcgtcaggagcagcgtgagcgccgccgccaaggagcagaggaggagggcgtcctctctcccgagctcgtgcgcgcagagcgtggcgagccatgacgagtactagcagagcggcagcagcgtgatgagcagcccggtgcgccttcacaagctcgcgccgccggcattgccggcggtgcacaacgtgccgcctctgccgccgccggcggtgaacgctgcttc

SEQ ID NO: 72357 - DNA, 502 bp, Oryza sativa
  unsure (1)..(502): unsure at all n locations
tgagccgagatcaacacttgtgaccatccggttgaaccatgtttattctgacgtctcgtccatcatatgtcacgactctattctcatcacaagcttgacttcattcttgccaacatgacgatgtccatggcttggtgaccactaacccatggtgtcattcattagcctcatcgtagtgggacctattccttttcacacctcagaggagaacattatgtctcaaccaaatcggttgtcatccttcacttgatgaccaaccggttgcatatgaaagatatggatatgtttgttgagtattcattaacatcacaagtgtcatatactcgtatgcaagctcaagtgcaaagatccgatataaataatatgtgaacaacatggatctagaacatgcacaatacatgtatacgatctgcttcccctaaatatatgcatacanatatatatacaagagatgcaagtgtatgcataattagagaatgaccaatggtgggttatcctatac

SEQ ID NO: 72358 - DNA, 362 bp, Oryza sativa
  unsure (1)..(362): unsure at all n locations
ttcttacccgctccgtgcggaagttggcgggtccaccgaaggtgaccggtaggtcgatgtgacctaatggccacgtgtgccccggcgtcacaccgatgatcggttgagacggctggagcaccatccccggggccttgatagcatcaaaggccgcgggggaaagaatgttgagagccgctcctccatctatgaggacacgtcccaacttcacgttgnaaatggtgggggaaaccaccatcgcaacctgccctccccgggcaatgcacggtgggtggtcggtctggtcgaaagtgagagcaacctctgaccaccgcgcccgacgcatcgcctcatgagtaggggccatggccagaagctctcgc

SEQ ID NO: 72359 - DNA, 463 bp, Oryza sativa
  unsure (1)..(463): unsure at all n locations
cggctgcatatctgtaactgatgctgacagcgtcaagcgccgacccttagtagggggttcataaattatccatgtttcagatatgaaattattttgaanagatcagttcagcacatggtgcaagtgcaccgaagtaggtaatatctaatatcttctatagcaataggcttgtacttacaataaaataaattgctgagaaagcagcaatagtccagtactttccccagtaagaatctgctaggagggcaccaatgaggggtgttaggtagcatgtcccctgccaagttgtaacatttcttgcagcttcaaggttgccttgatgaagaattgtttcagataagtaactacgttctttgcaataccataataggccagtctctcacagcattcatcccctgtcaccaaactagcatttctgaaacttcanagctactcattgcagaacagataanaatgtgcacag

SEQ ID NO: 72360 - DNA, 365 bp, Oryza sativa
ttatttttattgacttggcgaaattggtggggatgaaatgcttgaccagcactgcgatactgatccaatgtgggttccacaaatggttaaagattggtagtggccagatttcttgtaaatttatttcaaccctcaattcgggttttatgccatttaatggaaatacttcataatgatcaatcattcaggttaagatcgatctaaaccaatccattttttctatatacatacgacatgccaacggttaaacaacttattagaaacccaagacagccaatacgaaatgctagaaaatcgggcgcgcttaagggatgtccttagcgtcgaggaacatgtgctagggtgtatgtgcgactcgttcggat

SEQ ID NO: 72361 - DNA, 383 bp, Oryza sativa
  unsure (1)..(383): unsure at all n locations
aactagtcgggataataacagtatttatacaaatacaggttaaactaagtatattaggcataacaagcgtttcgttcttgtagagtagataattggattttgattgagttattnttctaagggaaaaaggaaaaggacgattcaaaatccctttttcttcggactcttccaaacacaaaatacctccttgtattcgcactctcaaatgagagtggaagaaattccactttcatataatatcttaatagaattccatgtaatgatcaatgcatattttggattctatattattcgcatgtctagaatcctaccaagagaataccccccatatttatgtgattgaagtaggattgacgaataagaaataaacataatactgttta

SEQ ID NO: 72362 - DNA, 358 bp, Oryza sativa
ttttcttttaatttatatgaatttagggttaagattcactcgaatcggagctcaaaccaataagttacgctagtttaaacaatcaaatttgaacaaatccgagaaaatgtgaaaagggactggtcccaattcattatttttattcctaaactctatccaaaactccaagggactgccatgtggggtttaggaaaggatctgctttcctaccggattatttttctaaagcaaatcctgcgaaccattgacaggtgggcccaggtgctctctcttgactttcttttacggcggcttcaactccagccatcggccgagcaaacacggcgcggctaggcccgggcgagggcgacctagcggc

SEQ ID NO: 72363 - DNA, 476 bp, Oryza sativa
  unsure (1)..(476): unsure at all n locations
atattctggctcagctatttgccgaggaccttccttctttatcgtcaccgcagtagagtttaaccaccaaattcgggatggattggtgtggttcctctacgcctaggacaccagaatatcgaaccatgaacgaggaaaggcatgagagaaatattggctagtaattgtgaagccacaattctcgactggaagggacaccaaaggcctctgccctccctctctatctatccaagagatggaagggcagagctnctttttggttntttcatcttttcatcaaagagttgaacaatgaagatagatggcaagtgcctgatcgatatgatcaggtcgtgtaggaacaacgttcaaaatcgtcgttcgttaggatgcctcagctgcatacatcacttgcacttcacttgacacctatataaacggctcgtctcgccgctaccttatcctatttccatgcttctgtcgcttcatccccgtat

SEQ ID NO: 72364 - DNA, 353 bp, Oryza sativa
attggcgaccaacatgggattccataaaagctgtgaagggaagggagatgccatgagatgatcgatatatgtaatacactcttggcaaactttgcccctaatacgctttctttcttcttcctttttgtttgattcttctcttttctcaagacgtgatcgatgcgagccgctttttggtcgcacgtatcggcgtaagcacgctctgccaggggcccctgcaccggcacgacgctgtcacggcggctcgtgacgagacgaggcgcggttcggttggttgggcggttgattccgccgagatcgacgaggacgacccgacgacgcaaaagctagcgacgttcagttcgtacgtgccg

SEQ ID NO: 72365 - DNA, 366 bp, Oryza sativa
agcttatctcatgagaaatcaaaattataatttggaaaatgtcgtgtctctttaagaagtgagtcttcaaaatatacctcagtgatggaccagcttatgaccaaagaagtaacaaggatatgtgaatgtgtctgcaagacaaatgtacaaagggatcaatcaatatatatgtcatgaaaccatgtgttaagctacactacaagcatacaactaacagaaaactaaggatgcaaaagtaaagacactgcatttgcatatcagtaccagtagttatgccatttagtaacttgtacaatcatcaccattatttacttgatccacaaccagacataaaacagacaaactacctagtgtccaaccctcata

SEQ ID NO: 72366 - DNA, 207 bp, Oryza sativa
tttttttttacaattctcgccccaggattagattggtgtcatagcaataaataagctgccacttaaatggaaaaataacgttacaggttattaaaggaggaaagagaaagaacccaggtcttgcatgtgatatgaatttaccaaacatataagatattatgtgagataaatagtattaaatttaaatatgaacaagtggggcacatg

SEQ ID NO: 72367 - DNA, 459 bp, Oryza sativa
  unsure (1)..(459): unsure at all n locations
ntgtctatgtcgtcgcagggagtgcccatgttcacacaaggtttttatacatccttccactcaaaccataggcatcttagtctcaaagctctcgcagatttctctaggttaagaatcccaagtcctcctaagtctttcggcttgcatacaccattccaatttaggaggcaactccttgaaccaacattatcacggtcattcccctttccagaggaaagctcttcttaaacgatcaattcgcttgtagagccacttgttctgaggaaggactgagagatgataaatggtggttgccgtcaaggcagatttaacaagaacctccctggctgccgaggtgaaaaaacgggccttccataccggaatgcgtgatcaactttgtcacacaggggtgaggtctactttcctcagtttttatatggagaggtatgccagatatttcatggaatgattcttatttcg

SEQ ID NO: 72368 - DNA, 416 bp, Oryza sativa
  unsure (1)..(416): unsure at all n locations
ttctgccatcattatggatcatagggtccatgcttatggaaggacaaaatgaactgtaaatatagttggcagtgatctccatcggatgtaccgtctcttaactggccgccaatgatacaactcagtcacgcttgatgtaccagtcccctccaacccagttgctgaagactngtctcatctggtttcattgatgcgtgcgagtgaggcacatgctgtccagctcaaggtacatgcaagtcggtttactgcactcaatttattttcatgctattattgtgaatgttggagattgctattcatggagcaacagtgtctntagtttccttatatcaccgtcatagcattacttcaattcatgttagtattatacggatcttatctattatgcatacatcgtgtctgtaaatttatgcatg

SEQ ID NO: 72369 - DNA, 343 bp, Oryza sativa
gaacgcccaactccgagacctgagtcaagaaatatcgtccctttactaacggtcggttgagctgaaaagggaattgcgggctgaccgtgggccttatgccggtctgaccggccccacaagtctgggttttggtggggatacagagccgtcagaatcgcaaccagtcagaccgagcccacggcgggctgaccgagccgtggaccgtctgaccgagcactacactgtggtcaaaccgaccaggttgagtacgctcaatgattgccctgtaacggctagtgttctagccgctacaaagtagtccggtctgaccagccttacaacagcggtctgaccgacagaacac

SEQ ID NO: 72370 - DNA, 121 bp, Oryza sativa
aaaaaaccggcaaaaacacagagccctatccaaccaacaaggggaaaaaaaacaccccaaaaacaaaagacaaaccccacaacagcacaacaccaccaaacccacaaacaaaacaaacaaa

SEQ ID NO: 72371 - DNA, 290 bp, Oryza sativa
actcttttctaatacttatttttcatacatctttcttctctgggggttaattacggcatttcaactttttaaccatactaaaatctttgattttgatgatgactttttgcattgtcaatctagataaatacacccctgaatacaggccaccttggtggatgcgaacacctttctttagtcttctaattcttgcagttaattcatactccttgcaaatgtggaaagtattttctgacagatatggatgcaaccatttgcaaatgtggaaaatattttttttaatttttttt

SEQ ID NO: 72372 - DNA, 389 bp, Oryza sativa
acgtaagcactgcccatacaggctctgttgggttcaattgagcacacgcagctttgcatcaacacgagaattggatcttacatgcatggtgcaaggacaactgattctacgaaaagctcagagtatgaacaatcataaccaaagctagtactcacgttctgcgcaactacatatattaacgcaaataataacaccactaaaaggcataaggattacattatattagataaaacctaagatgtcgtcatgtatttgcgagaaacagtaagctctctaaattactaaatatgcccaaaacatacggaagcatatggtaactagagataacaataacctgataacaagccatactgtctgggtgacgccggagatcagatacagttgacata

SEQ ID NO: 72373 - DNA, 271 bp, Oryza sativa
  unsure (1)..(271): unsure at all n locations
ngacatacataagcctagtactagctaacgcggcgaaacttattatcttatatgttaactataggcatagagcacactataagagaatgcgtggcgcaacaccacgctcagctgtgaactcaaattcggcttatgcaaaaatacccgtgtaataccaattaaactgaatgttcttctgtaatangtacataactagaagttctgttattcgagtgacatcgntgaataatttgttcctttgaagaatggtatccgcaccgaacgacaatcc

SEQ ID NO: 72374 - DNA, 378 bp, Oryza sativa
tctcacactactctcactagattttttatcgtctgattacactatattacttcatcatggaatacactatgttctgatggacccacccccctttcttatttccagtagaaatacagcacaaaaacaatgggatgaaactatcgttcttgtactacgtggcatagcacgacttttgcgttcctttttacctttcctccagcaattgagcaaaatttcttctggtaagtgttcattgtactgtccattatccattcttctcggattggatataaattatataaattaccagttggattgtatcttaaaatatatcacgttgtgtgcttatgcttgattatgtcaaaaatggtatcctaaatggtatcaaggaggtcgctc

SEQ ID NO: 72375 - DNA, 315 bp, Oryza sativa
  unsure (1)..(315): unsure at all n locations
tattcttgctttgtcttattnctgcgcgagatgatgaaatcaatcttttaatttgtcccatctagaactgccaggatagcgtaaacagaaacaggttcgctaaaggtattagctgattattttaagcatcaatgccttgagccattctgtctggtttatatttgtagctaggtggtgccttacaatgttgcacaaataactggacgtcgtggtatgctagtaagagcatcacatggaaaaggtgttgcttatcaaacacggaacaagtaataagattttcccctttagagtaaatttcaaagaagccaatgtttt

SEQ ID NO: 72376 - DNA, 361 bp, Oryza sativa
  unsure (1)..(361): unsure at all n locations
gaatgngctcagacatggtgttattttattgcagtgatcacgatgggccaccactgatctgacaatcatggtatctggcatagaaggactctgtccgggaatggtacacacgctaaaagaggcgatgatcgaatagactttaggcggttaataattgcgaaacaatgcacgtattgggcctccgtgtgtgggggctatgtcaataaagatagtgcggactagaggaaccatttgaatggttggggtatgacctcatcataagcagagaggaaggtgacgatgttgtccgctctatccatagtctgcatactcagcgtaataggcttagggaccaatgtggcagtcgaaggaggacctatat

SEQ ID NO: 72377 - DNA, 334 bp, Oryza sativa
aacctgaaccgaaacctaaaccttttttaaaggcctgatagttaattgctttaccggaatatcaataactggataaaccacttaatggtgcatatccattttttgggtaaaacacctttggttactgtgatcacaagctggttgtttgtggtacgagtacatttataaagctagaccagattacctacaacaaataccatccctatacattctggatccccataacgtatgtattttttccatatcgattttttttataaaaaaaaatccttggtgtactgcaataactgattgctcaatgcttatcgtactcaaaagtgtgtacatctgctta

SEQ ID NO: 72378 - DNA, 285 bp, Oryza sativa
accaaaccaattaatgaacttgatgagaagggcttcccagtaatacagtatgccgatgacaatttaattcttctcaaagcatcacagaaaagaggtgctctggttcaaagcattgctgaattcttttgcacattctactggcctcaaagggaaataccataagtcctatctctacccaaacaatttatctcatgagaatgcagtgcttattgcaccataagcacaatccttttacttatttggggttgcccatggggacaactaagccaaaggtaatggactttg

SEQ ID NO: 72379 - DNA, 486 bp, Oryza sativa
  unsure (1)..(486): unsure at all n locations
cttcggacatggtaaacttcaaattaaatggatgggtccatatatcgtcgtcgatgcttcatcacatggagccgtcacgctgcgcgacaatgaaggtaacatctttaaggtaaatggccatcgtttaaaagtttatcttgatccgttagaagttgatcgtgacttagatgttgtgaatctagtctcttttagcttctacccggagtctttaggtcccccttgatccattagttttcaatgccgcgagtccttaggcctccatctagttatcttaggtctagctttcatgaataaaataaaataaagttggctccttggtcttccaatcaagtgagtcctttttgcttcacttttgtctttggttattcttttttgtgtccaataaagcctcccagatacaaagacaagtgtggtgttgatcntgtacatcaacgccgtaaccaaagcangatcacctcagaagtgctgagccatgacgaaccacac

SEQ ID NO: 72380 - DNA, 504 bp, Oryza sativa
  unsure (1)..(504): unsure at all n locations
ctaagcttgctttgatccatatgaagaaatctgtattgctgaacctaatgttctttttaccctatacgcattaacagacagagtgagaggccgagagctatggcacgtgcaaaagccaaattaaatcacacacaaaaatcttgacttgaccggcagaatcattcatcattatgtcaaaggagaactcaactaccaccactttactgtaaccaaccaacattcgatcattagctttcattatatcatttacgaaagatagaaaaagaaagtcgcctccacctccctccctcatatgcacatagcattacccaccacttcctctctggctctagctctatgctcttcactagtcataagctatcaaagtgaaagagaaacaatcaatatttgcacctgcaatgtctaatctaaccttgctctattataataaaaaaaaagtaagatgcatattcctantatttcgtatataagaaacatgaaaattgtgaacaatcgacccatgca

SEQ ID NO: 72381 - DNA, 360 bp, Oryza sativa
cagtttattttttatatatagcaatatccacaacgcttaataaatttgtttcattaaattttacattgaatatattttgataatatggtttgttttgtggtactatatggttttaggcaaacttaatgaaactttaaaatgtatgacttacaaaatataccaaacgttatgaaaggaaactagtacgtacctccgtcgcataatataaggtaatgtttggtttggggacaaggtgggatgggttagctccatctctatttttgaatgggatgattatgttttcttgtttggttacagggatggaacgaaccctgttttttaatttggtttgaggaatataatgcgatggaatgatcctat

SEQ ID NO: 72382 - DNA, 373 bp, Oryza sativa
cgacccggatcttaattacctgagctgcattttctcttgttttggtcactgcccgaggcatctaggccaaccccgagaagataccagctatagagcggatgcccccctccaacaaaattatggatgtgcaatgcggtatcggctgcatggccgccctaaatcggttcatattgatgatgggaaaaaatgcgctacccctatataaactcctcaaacggtccgggctcgttacttggaccgaggaggctgaacacgcccttactcaattgaagggctaccttaattcttccccaggcctggccgcccgaaaccaaatgaaccgttgctactttacctggcggcaaccctgcatgtggttagcaccggcgttggt

SEQ ID NO: 72383 - DNA, 339 bp, Oryza sativa
  unsure (1)..(339): unsure at all n locations
tttcttgttcaatagatggatccaaggcgggcagatcatcagtcgacatattagttggttgtggttgagttttcttgaatttgatctttttctttggatccaaggctaaagtactcatggctaatgatctggttntccttttcttgcctgcatcggctggttccctagttaggccgtgaaggagagttgaagtcttgggggcatggtagccgatgaaatggggagataatccacctccattcagaattagacctgaagcatattcaatgttcttgccactgttactttgatgaggaagggaagactctgttgtctgcaaaacaagagccaagagttagt

SEQ ID NO: 72384 - DNA, 351 bp, Oryza sativa
cattcttttttggcttcaccattgccacaagttctccgcccagattcagcagcttaagaacaccggcggcgaaattcacgaaaggaacttgaaatacaaagccgatggctgcagcttttctgccacaccaccacatacagagaatcatcctcgcttggcggcgctctactaggaagcggaaagggtcgtggggatcgagcgccagatggaagaaatcatcactaggtttctggttctggagagcacaccgacgaacaagtgcagcattatttcgattgttggtcaaggaggcttaagcagaccacccttgctcgtcaagtgtacctgagaattccgggtgaatacaaatgt

SEQ ID NO: 72385 - DNA, 386 bp, Oryza sativa
  unsure (1)..(386): unsure at all n locations
aacaagcacatatgttgaagagaaaacactagacacatatacctattgcatttatcactctttctcagataacctttagcacagaacaacaaagagaatttttgaacttnttcttttcttgagcctttttgcttatatatctctcttttattcccggtacgtgcactgaatcaagactgtttncaaggattcggcacctattattatgctcacattgaatacgtccttgtatgaagactgattcgacgattcggtattatttgtttatatttgtattctctntgtacaatgagcaattaaggctatttgacgaataacgattcaataagcatatattagagctttataagtcaacattgcagcatcacattgctattacttaatta

SEQ ID NO: 72386 - DNA, 275 bp, Oryza sativa
  unsure (1)..(275): unsure at all n locations
tgtgcactttctttttgtttagctcatcatataccaagaactatatggaatcattccacgtttatggaaggacttcctgcttcggtccaacaaatagagttcttcgtggaaactgtacaaactacttcgattggttgcctattggactcctggatctacgtggacaattggtcatctatgggtngttatccaagaccctttancttgagttggagagggagagacaccaatactacatctgtcagaacttactccaatacacaccgactgacatc

SEQ ID NO: 72387 - DNA, 433 bp, Oryza sativa
gaaagagatggagagaagtgagacgcgcatctttttggccgatgaccggccaccaggtgatagtatactatagtattcatccgatcgaacgatcgattaaagaagaatagagaaaagtgattgagatacatggacgacgttggactgattaggtagctactactatttaattaaggttggcgctaatagtaattagcagcttcatctgttgaagcttgcagacatctgatcgatcgatgtctgcatgctgttggtcgatcgatgagctgaggtagcataacgaggcatctgctgggagcaatggagcccactgccggccatggatcacagttgttactcgatcgaacctacagtcaattaatagctagctggcatgcaatactatgtatgtatgtcgattgatcgacggatcgatggagatcggatgatggat

SEQ ID NO: 72388 - DNA, 437 bp, Oryza sativa
  unsure (1)..(437): unsure at all n locations
ctggtggtatatatacacgcacgcgcgcgcgcacgggcggactttatatatataatacagcagaacacgattgagtgatcgatctttacttgcaagctgcaacacagagcgcacgctaacgaacacagggaatccggacggngtcactcatggaaaggctaaacacgcgaaacgcttatatggatgactggtggcgtgggaatagagaggagcaactcgcgcanagctagctgaaaaggngtatacatccatcgatcgatggacgaacgatggctacaccctacacgagccgaaaacagcagcagcctaagctagttaataaagctcgacattcccaatactccatgctgatgatctccatctccctagtacgcttgcacgcatctcgtctacaatcttccagccatgatccgcggtttgtacttgcatcatatcat

SEQ ID NO: 72389 - DNA, 311 bp, Oryza sativa
attcttttttatttaaccttctagagcagctttttcctccaaaacttcacctctactcatcatggtggctctgaaacatttaaccatgttttagaaacttttcaggatggtgaataaagttcggagccaatataacacaatcaataacatttataggcctaggtgaaataaaatctatttacgaaatcaatggataccgctggcatacgagagcataatttgtcattcttagagtatcttacttatactaattgcgacattttagaagctcttatgtaaccagaagctcttatttaaccacaaatatctga

SEQ ID NO: 72390 - DNA, 356 bp, Oryza sativa
tttgagagaaaagaagaatctacttcaaccgatatgcccttaggcacggccatacataacatagaaatcacacgtggaaggggtgggcaattagctagagcagcaggtgctgtagcgaaactgattgcaaaagaaggtaaatcggccactttaagattaccatctggggaggtccgtttggtatcccaaaattgcttggcaacagtctgagggaaggaggaggagggcatcggcaacgcggatttaccgccgccgccgcagaatggtcaccgccaccgtcgcctgcagccctctcaatccccttctcttgtctcagtgacctaatttctgagccaggggcacattggtcacaacac

SEQ ID NO: 72391 - DNA, 452 bp, Oryza sativa
  unsure (1)..(452): unsure at all n locations
ctcagctgtgctctgtctgcacctatgggaaccaactttttgancatgagccatgccccttgtcatccacgctgttcttcgtttcctaacgctttcgtgaggatgtcattctcgcgtttttgtgagcagacctcatgggaggcctttctctaacattcagttcaacctgcggtacaactatgacgcgttagacaaagaacaagatacaacataatgaaacttattctatgtgctcaacttacgatgttctggtacatcgcttgatcttcgggatctgcgaacgacagagttccgtcactattcttcttcacccttgcccttgcccagttccttgcccgttggaccgggatatcagcaagcacttgcggngtgttagattccactgcagcttcatcctccttgtgccattctaccatgtgtcccgcgtagcctaccgtgccaagccggtgcgg

SEQ ID NO: 72392 - DNA, 321 bp, Oryza sativa
  unsure (1)..(321): unsure at all n locations
ttttttctacagccggcgagccgcgagcaccaagtcgattatgtaaaacacgtgatcgagaaaggtcattatgaccagcttaaaaagaaaagccaaaaaaggatattgggtacaactcttaacttgatgatgtctttaatcatatattaacccactggccaatctcattggccactatcattacaaaatgatcaccacaaaccccataaacaaaagaaaatgaaaaactctagaatcacacctctaattaagtttcttcttttttggttcaattttttccctgggaactgcagcgattaatataanaataaatagcccttc

SEQ ID NO: 72393 - DNA, 372 bp, Oryza sativa
agtttgtttattaaaaaagatcacagaattgtaaattgttgaacaatattgactaccagcatataactccaggcccagcgagaaaagaaaatcattcattagtagtagatactagtgccaactgaattcacggttgattcctttggagcattgtgcctaattcctactccctccgtcctaaaaaaaaagacaaaccctggttttcatgtccaacgttttgaccgtctgtcttatttgaaaaaattatgaaaaaaattaaaaagataagtcacatataaagtattaatcatgttttatcatctaacaataatgaaaatactaattataaaaaaatttcatataaaacggaccagtcaatggtggcacaaaaac

SEQ ID NO: 72394 - DNA, 497 bp, Oryza sativa
  unsure (1)..(497): unsure at all n locations
ctgaacatatataacgtgtcatataaatgatcttcgcacgctttatatgaaaataatccttactgcaaatgaatctatatactaatataatgccatnataactggagctgcatgatacctgattcacaatagatgaagctaccaaaggttaactgagcaacgatgaaagcaaagttcagatcaattatntatctaagataaataacgtcggcttgtcatggtaatatacaaatctgcagtagataatttttctaaacaaagaaaagcaagttaacaccagtaatatccaaccagctctataaccatgaagaaccaatagacagggaatagtggagaaccatgtgtgagagatgaatcaattcacagaagaagcccaattgctcggtgtcaactatatatctttcccgcccaatgacaacaactaataggtcaagtaactagtacatgacgagcctagaacaacacatatgaaagaatagatacatactaactatcta

SEQ ID NO: 72395 - DNA, 226 bp, Oryza sativa
acaatgtgaaaagtattatcgcggaaatcatttgtttaaaagtgtgatgaacataattgtacattcaattaataaaagtggaaaagtggcttaaagttgtcatttcacattgattggatatgaaaataatggtttatacaaatctttgtgcccatatcattgtttgccaacaatcaatagaacttgatagttacttttggtgttccttttggtatgtactaaaatg

SEQ ID NO: 72396 - DNA, 482 bp, Oryza sativa
  unsure (1)..(482): unsure at all n locations
gctggcttcatcatagaggttctccatccagagtggttatccaatccagtcatggtgcgcaaggccaacgggaagtggaggatgtgtgtcgacttcaccgacctcaacaaggcgtgtcccaaggatcacttccctcttcctcgaatagaccaattggtagactcaacagctggttgtgagttgttaagctttcttgacgcctactctagctaccaccaaattagcatggcgaaagaggacgaggagaagacaacattcatcatgccattcggtgtattctgctatgtcaagatgccatttggactcataaccgcaggaaatactttccaacgcacggtccaaggggcacttaacgatcaacttgngaacaatgtcgaggcctatgtcgacgacattgttgtcaagaccaagacaagcgactcattgattngacgattccgagaaacgttcgacaacctctgatgatatcgcctcatgctcaa

SEQ ID NO: 72397 - DNA, 363 bp, Oryza sativa
  unsure (1)..(363): unsure at all n locations
tttcttaataatttggattntcaataacccatgaaaaagggtataaatcacttaaggcgatatgtgggttatgataatttaaatactatatagactgataataaaaagctaaaagtaaggtgatgactttatgagagaaaaaatgagagaaataatttggacaacagattaatcatttaaaggctagaaacaattgatatgatgtggtctaatgagagaagatagaaaacattaactaagtacggataaagtatataggatattgtagaaaataaatagatatatgctgaaatattatgtaaattatgtgggatgatgatctaacatgtttgtatttgaaaactctagaatatgactaaatat

SEQ ID NO: 72398 - DNA, 427 bp, Oryza sativa
  unsure (1)..(427): unsure at all n locations
tctgtnggtgctgttctgtacattattagtataagaatgtcttctgtatgcatgtgaacggataagaatgtcttatgatgttatttgttcgttaatgcttaactatcgctacgatgtggcaagttaaggttatatattcttgaagcacattaatgttgagtgatcttattaccaccatggatcaattgcaattgagaagaaagttctggtatataacatcttcaaacaaattttgatgattaactggaatttagcagcaggctttccttcttgatatgctatacagctatgaatcagcacttcgggaatcaaataccaacacaccatgtcgcattgcacgattcccacctccattccaatcagttccgtgtgatcctaatcgtcacgatatgggctacaatgcgatcgagatcctcaacattgataa

SEQ ID NO: 72399 - DNA, 348 bp, Oryza sativa
aaccgagattttcgggttacccatcacttactcttcgatatatttcttgctgaaaggatccctgatcccactgataacgagtaggcccaaacaatttaattggggtagttgctgacccataccacatagtttcggcaactacgaaagctgcaaaaaaaacagcagcgatactactggaaagtacagtttcaatattgcccatacgtaatcctttgtatagacgttgaggtggacggacactaagatggaatatgcccgcttatatgcccaatgtacccgcagcaatatgatgagaagctatttctcccggaacaaaaggatcaaaaccttctgcaccccacgccggat

SEQ ID NO: 72400 - DNA, 206 bp, Oryza sativa
ttcctctacgcactcggcacctgattctcgtatcctgatgcacgaaaggtatgagacaacgacttgttaataaatgggacacccccactactgacttgaaagtagaacagatgccattgcggtgcactttttactattcgagaggcggcacggcggagcttcattgtgtaacatgcgcatattgatttgagagttgaacaatgacc

SEQ ID NO: 72401 - DNA, 337 bp, Oryza sativa
ttaattattacttacctattgaataaaattttaccggtaaaggttagcttgatcccaaataaatggaaccaccccaatattattttaagggaaaacttttatacttctattcttaagtggtccaaaacctagatgaaaaataaaccaaccaatttttttttaaaaaaatccaaaatcaactctaaaagtaaaattcaaatctagctagcaattcagtttatatgctaacgagcagccaatggcaatcaatatcattcaatatactccctagaatcattaggcaatcgcatatcattcaatgaatctaatgaggtctagattcattaatatctatatg

SEQ ID NO: 72402 - DNA, 342 bp, Oryza sativa
  unsure (1)..(342): unsure at all n locations
ggaacctataaactcgctaaaccggtgtgtacattaatgataaccgcgcaactactcattctttgggtctgaaaccttatatcttgcattgtgttacagcttanaaatacccagaatgttcaaaagaaacgaccaatacttggtacatgatacacatcgatgttccaacagtggttgtttgacaacaactcttaatatcactacttaccttaccctaatgttggaacttcagcgaaactctatattcttgcaccttcacaatatggatcatccatttaatgagaccagctgctattgaatcaggcagatctaaatatgaaacccctttagctgctctaattt

SEQ ID NO: 72403 - DNA, 349 bp, Oryza sativa
caattctttgggccaacagtgacttcgccttcggacgtaataaccctcttgagggcactgttgaaggatccctccttccttggcaaagagctctgggtgaaaaccttgtccagtctttggatagaagacgacggcgtcttttggcgtcgcgaccctcgtgaaggcgtcattttaaaatcttcgtgtcgtagtggtgtcgttagctcggtggcgatcggtctcgcataacgatggccggatcggtgcttggcttccctctctgtagagtgtgttcggacggttggcacatggttcggggcgtgtgctctggtgcacatacttcctcgacagccagctatcgatgtaaaaa

SEQ ID NO: 72404 - DNA, 368 bp, Oryza sativa
atttttttattttaatggcattttcaattattcagcaatcacaaattcacaatacgagccttgctgtttgggaaggggaaaaaaatacaacatttccttcatcgcaagtgttcagtagcaagccatttgcacataaatcaatagggaaatcgttatgatgataacagcacattcatcgagcagacaactagaatacatgaacaaccgaaatacaaggttttcttttactagacaaaactatgatgaatgatttgcacgcatgaaggatatagtggaaaaaagtatatttattaaaggcatcagaaacagcaaaccattacataagcaccttcgatttgtgaacgtacgaacttcatgtaagaactaaa

SEQ ID NO: 72405 - DNA, 369 bp, Oryza sativa
gctttttcttttaatacagcaggaaaataatgtcctgaaagcaatttgcctaagggctataatggcctgaaagcaatttgcctaaggactacaagtccagtactacataacctgaaagtccatggtataaaaaaatatgagcagagacttttgtacatatgcaaaatgtaggtgtcattcaaagtcagagtaagcatcgatctctattgacaaacaatatgcttacatgtcggcactactcagacagcacaattagtaaaagtctagcaacaaataacctgaaggtaactttcattaattagttagttgtctgaatatctctgaatattgattactcccttattgtaatagtcagataaagagagacac

SEQ ID NO: 72406 - DNA, 366 bp, Oryza sativa
  unsure (1)..(366): unsure at all n locations
atctttcagnatcgngcaagaaaaaacatgtggaacagaaagtccaaatctggaaacaacaaaagatggattcaggaataagagtaaagggattaaattatgcataaaaattattcaataatgctagaataacagcgcttacatgttctacttataatgcaatacatacgcaacacacgtgtagcgaactaataatatacaagcacttccatggtgtcacatgaggacacataaattagcacgataacataaatctatatccgctgttaacttataatggtaactggagacgtggtaagatgttagatataattttctaaatgcgctatacatcangatcatacaattaggggaacaaaatacacg

SEQ ID NO: 72407 - DNA, 415 bp, Oryza sativa
agagacgtgagatgcggcttttctgtggacgaccgcacaccaggtgatcgcatactgtagtattcaaccgatcgatcgaacgattcacgaacaatatagaaaagtgatatagatacatggacgacgctggactgactatgtggctactactatacaattaccgttggcgctagtacttaactggcactttcatgtgttgaatcttgcggacataccatcgatcgatgtctgcgtgctgttggtctatcgatgagctgaggtagcagaatgaggcaactgctgggagcaatggagccaacggccggacgtggatcacagatgttactcgatcgatcctacgcgatattagtagctagctgcaatgcaatactactaagcgtggtccaatgatcgatagatcgatggagatcggatg

SEQ ID NO: 72408 - DNA, 398 bp, Oryza sativa
  unsure (1)..(398): unsure at all n locations
ggactatattacatnctgcgccaaattatagtacaattnggtgggaaataataccaaatgctcaattatataaatctgaataagaacatgagcatatttggatcaacctagcaaaaatataggactggatcttcatgaacagaggccaccatttagtgcataaacaactactgcatcacanaaggtactagtgaaattatgcaggtagtttaccatgagcaattattttcgctaggtacttttaccagtagcaatgctctaatataagccaaattaagccacacattactatatctctgnattctcattatctcaatatggtcaagagcagtcaacaatgtaacttttagcaacttttagaatgtcaataataaaggacaatgacacttgaaagagca

SEQ ID NO: 72409 - DNA, 363 bp, Oryza sativa
attcttgctctgggtgtgagaatgagatcatctcttgcatcaggcatgagcaaaatgtagtagtaatagtagtagtacaaagcatgctttcacatggcttgtttaattattgtgtcccttctgttggtgacacttgtgtttgttatcctcatcatgtgtgtgtatatgtagttcttgtgtagtaggggttgacctttgctgttctgcagagcatgatctttgacatttgtagatagggtggtgataatttaattagtcggtgtaatggtaattaatttggtgagatggtggtagtactagtaagttaagtaggttgcaactaactgaataatgatgatatgagtgtggaagagaaaataaata

SEQ ID NO: 72410 - DNA, 357 bp, Oryza sativa
tttttttaattggcagctcaaatcaagagtgaccgggcttaacctgacaataaaagccagccagttgagaacagtaaaatgggagaaattggtaaaattaatggagaagcaaagaaaaacaacgatggaaaaaacaacggggggattgtagcaccaatcgaccaggaaaaactggatgaactgtgtgtgcctccctatagcttccacatacttcttccttgttaagatcattaagttgatgtttttattgcatgttttaaagctggccgcatcacttgctgcagaagaagaggcaaatttgactggcaaaggaaaacagtatactgtaagtgttccattgcaagaagcagctgacat

SEQ ID NO: 72411 - DNA, 406 bp, Oryza sativa
  unsure (1)..(406): unsure at all n locations
gcgaacgccaatgtacatatttgttctgctggagtctaaanagaggtttcggcaggaacatctgtcgaaaaggggcgcctcatgccataccgcatagtttgacggtctcggccgaagcttcttactcacccttgcccatgacgggcttgttgaggcatgccatgaagcccttcggccggacctgccgaaaccatagtacaagctaggattcaagctaaagacatcaagatcacttaggcaaagccctatggtgaaagctataagcatagatggcgaatgctggaaagccgcgtcatgacttcgatagtaaaggcatcttgtgcgaaggcatctcgggcgaactacatagacttcttcatgactagtncagcatcaacgatggccaacacgccgctcacggtctttt

SEQ ID NO: 72412 - DNA, 381 bp, Oryza sativa
cccgggatcttagagtgaccgcatgtttcatttttagtagcccgcaaggataatgaagtctaccctgagttccctgtttcacagagaaaataaagatgggctgaaaatcttgagacctggtgcatgtgacaaccaaaaatattggaagtagacaagcctgtcttatagaagaagatttaagtgaattgggaactacaaacacgcagtatagaagtaaagatggagtggctattggtaaaaaaaatcaacagtgggacattaaagcatatcagccaggaaataacaaaacactccaacagtagaagctaatctgaccaactgagtggacacgccatacaaatgaagaacacgctccaacagggtagtgacacacattcagta

SEQ ID NO: 72413 - DNA, 372 bp, Oryza sativa
taatacacatgagccgaatgaactcccgctcctataatctctttcgaaatgatgtgacaatatcttcttgtcattttatccacactaccttgtgatgtattgctttttcttcatcctacctttacattacgagaattctttctattcgaacattaagagagagccgagatagcttgaagtaaataataattgttccgatggaaccttctacatggtataagcataaccttaatgaattaacaaacttcttctaattaaaataaaatacatattaacctctagcgttctaggtcaaagactaggtaaagtacaaatctgcttatgatccttaatatataatgggtaaagggatctgatgctataaatgttgta

SEQ ID NO: 72414 - DNA, 449 bp, Oryza sativa
  unsure (1)..(449): unsure at all n locations
agcttgatctatattcttctacaacctgggaggggaaacaacatgttaatttatgtggtccaaaatgaaaagattgctttaccctagtccaaattgaaagaacggtaaagaaatatggaccaaagtgcaaattttttatctctactgcacccctccgccataatatacaacctagtacatgacggtactaggctattatattatgggacggatgaagtacttagcatttcaatggattatttaagagggctgctatacaacggaatcttgttttcgaacgtgataatacccgataggtatcatgttntgatacctctctgaggtatcatgtcctgaaacctaaccggtatcaaatgatacctatcaagtatcatacgattcctaccacgtattaggtgatactcatgacggatcagatgatacctaccagatatcaggtgattcctact

SEQ ID NO: 72415 - DNA, 400 bp, Oryza sativa
  unsure (1)..(400): unsure at all n locations
agcttctctctcttctcttcgtgagagtgagcgcgtacgcggcgcgcgcaccgctgctgctgctgcgtgagcatccgtgcatgatcgatcggcgcacgagcagtgagagatggagaagctntattaggagggatcgatgccgggggctggagggaagaagaagtcccgcggggcgtcngaggagaggccgncgcacttctttaatgtgcttcgcagtgactcaagcagcgcctggtgagtgcacgagtgccagttagccaacttttgtctggcatatgtgcacttagcttacacttgttgccatcgtgcgaaatatggcgatcacaattntggatcgggacgatggctatccaatactttgcgcagagagaattcgtcacgctagcatgcatgcatgcat

SEQ ID NO: 72416 - DNA, 403 bp, Oryza sativa
tttgctcatggatccatactctaaaggctcataaagtttatatttattaagatatgttctagccagtacatgcataaataatagcctcactaagatcctggatgagggggacttaatttttcaatcaacacccactaagttaagcttgagtttatttgggtactatagtaaactataagtcttggtgtctcggtgacgcataatgttgttgaagacacattgccttggggagctacgttatgtgataaactcgtcagttagtcttaaaatcaaggggagaatgttggttgaatttatcggctaatgccggttagttaggataaggttaaaatcccaccggtttttctatcctaacaagaaacaaactaagagataaatctcgtttgtgtgatcggtacaaaat

SEQ ID NO: 72417 - DNA, 413 bp, Oryza sativa
tactcagcttgtctttctggtgtttagttcctggccaaccaattttttatatttaacacatgttactttcagtgaccgaatcgatcctcgattcgctattatgccatttagttttatgacgtttggtaggaggattgggttgcttaatgacaaaaatgagatgttcgtcattgagaccaaagacaaattgacatgaactaatccaatgatatatcatgacaaatgtttttctataagagaccaaccgggacaaatatttttttataagagaccaaccggcaaatgtcttaagttcatgattgaaagcaccatggcctgaatttgtaagctgtcaaaaattacttaatgtttttagaatttataataatgtgctaaaatgaattaagtttaatgaagtaaacaggagaataaaa

SEQ ID NO: 72418 - DNA, 433 bp, Oryza sativa
  unsure (1)..(433): unsure at all n locations
agcttgctttttctcatgtcatgtggtcactccccaagtcaccagcatcaccactctcgcatgctccatttctcccccgagccttgtgtgcaagtccgacttgtcttcttcgccgcaaaaaccacgccgccatcacagcattcgtgcattccacgaaacccccggtgtcatgtccagataagagctccccctctgactcacacacacatcaccgagaagcagagcaagtgcatctccctctcccaccatttgattcgattcccctaaacccccgagtcgtcgacgccacaaaccccggcgaccaccatggcctcctccctcctctnctccccaaaaccctgctccttctcctccgcagacgccacctgcactccacgcccacgcgcccaaactctctccgccttccgcgccgccagcccacgcttctaccatg

SEQ ID NO: 72419 - DNA, 413 bp, Oryza sativa
  unsure (1)..(413): unsure at all n locations
ggacctataaaactcaacttgactgcctacaatctgcatatgatcccacttctatcggctgttgatccaaagcaatactgcaaaagttcaaggatttcatttacagggcttttagtgaagacctacagtaaatacttcattaacaaaagggaacactcttaattcttaactgaagaaagcataacgaccagctgatggatgtttttttggccatttccaagactattttgtaggtaagatcattcattcattatgttgtagaaggcaatacgtaattagtctgaccgtttctgcccctgatgggtgtatagattttgtacatttcccaaatcttttcatgtgtaattactaattagaagtagtgtaattgtactcatgtcaattgacttgaaaaggatgtangacagaaattg

SEQ ID NO: 72420 - DNA, 330 bp, Oryza sativa
tgagatgagggcgacggtgacggcatgtgcagcatcgcttcaccttcaccagcagaggctccccgatggtcatcgccactccatcgagcttgagcttcacgcccacgggccaacaacaccccgtcaaggtcaagcaacccatcctttgaagcacgggagagaggaagacagaaagaccaatggcgcaagttaaccccggtgaaagtgatgacaagaacccctggccatgctggtgttgggagaaggtggtcgtagcaattggagctgcaccggtggagcagactggtggcgacattctctgggttggctggtgggatagaatccgtacct

SEQ ID NO: 72421 - DNA, 448 bp, Oryza sativa
  unsure (1)..(448): unsure at all n locations
agcttgtttattactttgttggttagatgaatgcgaagaagctaaagaattgaggtttttatgtgggcttaacaaagaaattcaggacatgcttgattgtcaaagatatacatctctttctcatttgttacaacttgcttgcaatgctgaaagtaaaatagaggaggacatgaagaagcaacatgctatgtttttgtcttctattactaaccatttgcaggaagtgcataatcatganaaggaggagagagacatgaaagagccgccagtcccattgatcacactcaaagtcgaggcacctccattatctgaagagggcatcaaaggtaaacttaatggtgctgaaattaataaaggtgagtgtgttgttaatgaatngaatttgtccactcttcatgctatagcagagcaaccattagtggaaccaactgctgagatcctttgtcac

SEQ ID NO: 72422 - DNA, 411 bp, Oryza sativa
  unsure (1)..(411): unsure at all n locations
tgttagcttattagtcatagtcaaaattagttttgtaacataattttgaagttgattttgggtttttttaataataatctattttcagcatttgcttttaaaccaccaataatacatctataaaattttttctataaattattttttattgctttctttattttttccatcgcttagcagtcatagactcatagaccagacaatcaaacccccagtcattagccctaaactgtcgtcacaagtttgtcacatagtacatttgcaatctttgcccacgccggccatcagctttgctagtgactaagtgaggagttttagtggaaactggaaagtgatagattttgagttgaaattttggatccaagttcaattttccatanacatatttccgatgaatacatttatttaaaa

SEQ ID NO: 72423 - DNA, 324 bp, Oryza sativa
  unsure (1)..(324): unsure at all n locations
actttctcttcctctcgccatggatgngaaccggtttattgtttttggtctgaactgccgctgggaatgaatgggagaatgatgctaattatgtaagcctttttaagctgcaaaggttgcttgggttttcttgagatgactggctttaatacagtcatccactcggcatgttatatgcatattttgattatgggatgagtcatagcctaagctattttgactcgtcttttatcaaattttatgccacatttgaaaggtcttttgaaacgttttacttggacttttatcacctgtgttgatttataaacctttggagtgcttctc

SEQ ID NO: 72424 - DNA, 442 bp, Oryza sativa
  unsure (1)..(442): unsure at all n locations
agcttcactatattttaactntgatcccagcactaggacctgctgtcaatatgaacaagatagtttggcctttctgaaaattaaaggagtgtaccttagcattgaagtctgaatccaaaagtatgttagacgatttcagatccctatggatcactggtggactgcagtgctcatgaaggtactctaatcccctgacaaattttaattntaccagtgcatattataaccagctaatcattcaccaaatcaattttttctcttaaaaaagagcatcattcagtgtgaaggaaagtggagggataagattataagaacctggccgtgtcaagggcgatcttcatccggatgtgccagctcagagttgatccatgtgaagaccctgaagacaaccactacacatatcaaaagcttccaatctggaaggaagatctcatctcatgga

SEQ ID NO: 72425 - DNA, 407 bp, Oryza sativa
tagatattgtcatctcgtgtctctaatcggatactgttatgaaaagaatgagatgatattggtgtatgaatacatggcccaagggacacttcgggagcacctctacaacagtaataagccatctttaccatggaagcaacgcctcaagatctgcattggtgcagcccgagggctgcattacctgcatatgggtgcaaatcaaaccattatccatcgtgacgtgaagactgccaatattctattggatgacaagtgggtggcaaaagtttcagactttgggttgtccaaggccaacccagacattgacagcacccatgtcagcacagttgtgaagggaactttcggatatcttgatcctgagtattatcggaggaagcaacttacccaaaaatcagatgtctactctt

SEQ ID NO: 72426 - DNA, 441 bp, Oryza sativa
  unsure (1)..(441): unsure at all n locations
tatcttgttatctaaagattatatatatatatattgtttaataggagcatgagattgatatttaggcatgaactctctctagtctcatttggacaagaatatgattgatgtagatcatgtaaaaccaataaaacagtgattcagaaatcaaatgatggtgaccacgaacctacaactggtcctgtatcaatttgatttatctganaattctacaactattctggtgttaagtggatgctgattgctcaagaaattaggtatacgcaaatatctgaaaaatggagggccacaagtctctagtctacagcataattggagtgggcttcacanatatntaactgtgatatatntccactacattgcctanaagggaaatgttcattattgcaattnatgctaataaatttgccaataaagtgtcatgtacaacatactccatat

SEQ ID NO: 72427 - DNA, 404 bp, Oryza sativa
  unsure (1)..(404): unsure at all n locations
ttcatgaacaggcatttcgaaagcctatcttgttttttatatgccgacgagaggggtcccagaccaacaacaggttaagtcccagaccatactgtgccaagaagcccaggggtcctccccgacaccaccccggcgaatccacatgtctctcggcatcaaagctcccccgattagcaatttactcagccaggggcgtcccattccacccatgtggtcgtacttgacttatgttcggatgaaattccaaggaaacggtccttaagtgcaagagcgggaaaccgtacacccggtaggatccccggtccgcggttttggaaattcatttggttcggaggcaccgacccaggtgtcgggttttccaagtcttttgtcaaactccagttntacccaagttgtactcagat

SEQ ID NO: 72428 - DNA, 451 bp, Oryza sativa
  unsure (1)..(451): unsure at all n locations
agctttcatattctaattgtattaacctttctttttctaacttcctttattgggccagactgtcaagtacttcaacaatgaacaatttgaagttgagaagtatgacaaatatttaaagagtgagtacatatataatgttcattctgggaagaaaccttgttaacgtgtagacatgcatatgttactcgatacactcttttttgaaagatatactctatgcatttaattcactggttttaatgttattttcatcttctataaaaactaccaaaaaaacttatattgaggcatgaaatacatgtggaaaatgttttccatgagaaacagtanggttgatattgcatcttggaattttnttttcaatcttcacaaacaattaggagcttgtacacatngatntatcaagtgcttagttatatgctatgtaaatctgatgaatcctagctgacat

SEQ ID NO: 72429 - DNA, 456 bp, Oryza sativa
  unsure (1)..(456): unsure at all n locations
agcttaaattttatttcttgtcctatctggcataagacagattgtaactgtgaagtgtgtatagatgtttaaccttgtggttaccatgtctcatcaaattttaatataacaggaatgggaattagagggtgcttattagtacatcagtttaagcagatggtcgaagtacccgaattcgaagacgatggacagaaggcaatgtgttcgttggactgaacgatttgtcattttcaagcctagggaatggcgagttagctggctatattcggcatcgacagcttgtcctgtggtctacacgattactcgtagcatctctctcccaacacagagtcacacgtctgatttttttttagaacagtcacacgtcttgatgatccctattcangagcanggagtagctatttttaagataatgaaatanctgttcattcatcatagaanatgacatatctcact

SEQ ID NO: 72430 - DNA, 414 bp, Oryza sativa
tcacgaatcacgacccaatgcaacttgatcattaactgattatacttcagttagctgcactggcacgtcggcgcttctcgtcgccgcgtggacgccggcgagccgccggccttgcgctccttggccgccgcgaacaccctggccgcccactgcgcgaagtaggcctcgtcgtggccgatctggcggttcttgtagcagctgaggatgtccggcgagccggggcacggctcgccgtggggatcccaccacgagccctcgtgccgcatccccgacctgtccgcgccccaccggtacacgaactgcccgcctcccgccctctctcgccaccccttggggtagaactccatgatgctgctgttcctgtccatgaacaccagattcgtcatctgcgccccgtgcgacgagatcagcacg

SEQ ID NO: 72431 - DNA, 172 bp, Oryza sativa
  unsure (1)..(172): unsure at all n locations
acttttttcatagcactcaaaatatactcgtcagtctagtagcacctaaagttcacctgcgttccttttttaactcttccggcaattctagatcatgttgtatcttaatcgctattgagncagctacttacaggatataacgttcctacccgttacaagttaaagttgaata

SEQ ID NO: 72432 - DNA, 404 bp, Oryza sativa
tgtgagccaaaagctgggaagtaaaattaagtatctacgcttgtggggttaagattctcttgaaattacttggaaaaacatttttctagataacgacttgaaaaaaaatgcatgaggatttaacttcttgaaagcagtagattttgaagaatcgggaggggattcaaagatcagagcaatttcgtgattgccttaatatgaacataatattgcattttgtgctaccttaagacatgatgacctcaatactttttacaaggtttgtgttgattagcatgctcatatatgttcgtgctagactctagccatactgaacctttgacttctttggtatcttgaacaggtttacggttcatcctgagcttgaggctgggaatcgtataactcttcctgcatcttgcaaa

SEQ ID NO: 72433 - DNA, 461 bp, Oryza sativa
  unsure (1)..(461): unsure at all n locations
agctntagatttttctattaattactacctctatcccagaatataataagttntatagtaggtagaagtgaatggtgtaaggttgtcattggatgagtagtaaaggtaggtatgaaaagtgaatggtgcatggctgtgattggttggaaagagaatgctagtaaagaagttgttatattttgggacaaattctgagtgctaaatgtttttatattttagaactgaaggagtattatgcttttgtattgtcgtcgtccaaaaattcactcgtcaagtgacaatcttctatcttggtgcaggagctctacgttntgaatgcttactagattggtatacttttacaaattaagctttagaaagcactaataattgttatgctnttatacttgtcgtgtacgcanaaattcatcgaattaaataatactaaaattatctggcatcattctcttatgcanataata

SEQ ID NO: 72434 - DNA, 401 bp, Oryza sativa
  unsure (1)..(401): unsure at all n locations
taaggtgccgcttaagattaaaatctttatgtggtacttgcttaanggggtgtgttaattaaaaataatttggcgagaccgaattggaatggtagcttgaggggttatttttgtttgaaaaatgagtctatccaacatctctttatggattgtcattatgcaaagttcatatggagagcagttcagttttcttttggttttaaccttccaactagtatatctcatatttttttatgggtgacttttgccggttgacaagaaaaagaagtaactgatacttgttggagcttctgccatttattgggctctatggttgagtagaaatgatatggtttttgacaaatcaccatctatttcctatatgcaggtaattntcagggcaacacactggctttggtttt

SEQ ID NO: 72435 - DNA, 437 bp, Oryza sativa
  unsure (1)..(437): unsure at all n locations
agcttatatattatgatttttttagtcttgaattcgaacttaagagtgaaagttcaagtgcctttgaatttaacttggtaaaagtgaaaaagcaaataaacaggaagagatggcagctgttgtagtgccgtataagcaaaaaactgtgtatcgcagcatgtgaacattgctgtcttaagacgttaataatcgatcatagccatgagtgagagtgaccatgcatccatcataagctcaacttgatgacaccatcatggaatatctactgccgagcacatgaacaaattaaaaagtgccatcatggaagctttactgctactcgtgtttagaggtggcggaggattntattttgtagtgcacaatcatcattngaaatatatatcaagcttacaatatgattagaaccataagaatggaaggaaattgtaaaatgatgt

SEQ ID NO: 72436 - DNA, 410 bp, Oryza sativa
  unsure (1)..(410): unsure at all n locations
ctgttctaatttagttcattgtcagaactaaacatttgttattttttttgggctcccttaattttgggttcgatctccttcagattgggctttaattatatactccctccggttcaatatggttgacgccgttgacttttttaaacatgtttgactgttcgtcttattcaaaaaatttaagtaattattaattttttttcctatcatttgattcattattaaatatatttttatgtaggcatataattttatatattttacaaaagttnttgaataagacgaacggtcaaacatgtgctaaaaagtcaacggtgttaaatatttccaaacggagggagtactaacattagcttatagcatgtgaaatattaccaattanacataaagttcattaaactgcaagcattgaa

SEQ ID NO: 72437 - DNA, 298 bp, Oryza sativa
tagagttcttccctaaaccgtcttgagagttcctactatacgctcaaaattgtatcttatttccttgcttactgaatcgattctcaaaatcgaccaattcttttgggtacgcaaaaagtaatacctaagttcaaccctaatttgatcatatcatttgatctttctccactgcgaaaatgaacatgataacctattcttcgtcaattttgaaggaactattcggttatatataattcataaatctgaaaaactttccctagcaaaaaaactacattttggacgatctcccgtgtaacct

SEQ ID NO: 72438 - DNA, 412 bp, Oryza sativa
tcgggcaatttggcgaagaaaaaactagtctttatttatatttgaattaaaacaaatacaggttaaactaagtatattaggcataacaagcgtttcgttcttgtagagtagataattggattttgattgagttatttttctaagggaaaaaggaaaaggaggattcaaaatccttttttcttcggactttcccaaacacaaaatacctccttgtattcgcactctcaaatgagagtggaagaaattcgactttcatataatatcttaatagaattccatgtaatgatcaatgcattttttggattctatattattcgcatgtctagaatcctaccaagagaataccccccatttttatgtaattgaagtaggattgacgaataagaaataaacataatactgtttattagtg

SEQ ID NO: 72439 - DNA, 384 bp, Oryza sativa
  unsure (1)..(384): unsure at all n locations
agctttattataagtgtagaaccagtgaaatgagaggcttgagagcagaccagttcactgtcaacgtgctttctgcatttaggcccatcagcaaaccatgctctttaggcccatttgtaatcagcaaggcgcttttgatttgaaggaaatgcaatactccaattctatagaatattttcctttatgatcggattgaaaattattgaaccctacaaaattcctgaggtttggaggaattttaagatgaggtcaaatcttatggaaagtttcctaatgtatatttctctcattcaattcttatgttttataatcttttttttggtttgcacatatattcctgttaaaattttatatnttttctcttctttccgtntctaactatgc

SEQ ID NO: 72440 - DNA, 410 bp, Oryza sativa
  unsure (1)..(410): unsure at all n locations
tcgngtttntcagaaatttggctaaggtctttttttattttcactataactcgctatatgatgctcgaggtgagaaaaaataaatatttctcatttcttatagtgcgctatcagatttggtgccttgtactgttatacatccctttccctaataagaggaaaatacccattactttgcagatctccctagcaaatacaagcctaggaagaagcactggttattgttttagtaaccacgcgggagctttgctttggacatggattttattgcttggccttttggcccctcctgatagttggagcttggaaccctgaagagtggaatcctctgtggttctcttccttgaagcgctgaatgggtttgtcggatgcactcctcaccacagtacatacagcattagttatactat

SEQ ID NO: 72441 - DNA, 440 bp, Oryza sativa
agcttgttattgtttaccattcagacgtaaaatccatgagtggttaactaggaaatcgatcgaacgccatcaaattcagattcgaaaaggggtacgtaagtctcgtacgcgtgggtttacataattagttcgttatgctctgagtaatctgcatctcttgatagtttacgctaatctctattgtggctcgactaacacatgcattcattatcagggggcgacgatgcctgtatggaatctgttgtcgaccagggtagtggtaatcatcagctccgtggcacatctctggctcgtcttgtgtgccgaagtccgccgaaatagtgcgacaggctttctgattgtcatcctgtgggtggcgaaccagatgtcacgttgggccccgaccaccgcgctggccatgctggccgtcggacgcactccgcatgaggagcatctggtga

SEQ ID NO: 72442 - DNA, 366 bp, Oryza sativa
cgcacctcggtatgtgggtcctttccgattattttcttcgccgaaaagacccttacccgtgggagctggccgccttctgggcaactcatgatgtgtttatgtgtctaactacgaaagtctccgaggccatccgatccagccgactcaaaacaaattgaagtttccgaagacttgacctatgtggagaagccagtgaaaatcctggacgccatggagcgcatgaccaggaaccgagtaatccgattttgctaggtccagtggagcaaccatccctgataagaagctacttgggagcgccaagaccatctgaatgcatgccatctcgaactctgtgacagatcttccgaatctcggggtcgagattcc

SEQ ID NO: 72443 - DNA, 283 bp, Oryza sativa
agcttttgttatttcctatgagcgctcttggcgtgtatctcagatgagcggctttgagcacagatccatggggcctggtgatcactggtatagatgtaatggtgggaagcctcaatcaaccctgcatggatgttaatgttatcattataagtaagacgcgtcgatttggatgatgattgctggaattaccttgacctttcctgcgacatggatcaaagctctagtggtcaagagaggtatatttcccgttagcgacatgacgggattactctcactttgatcg

SEQ ID NO: 72444 - DNA, 392 bp, Oryza sativa
  unsure (1)..(392): unsure at all n locations
tcacatgtacgcctcccatatggagacactttttgtttcttctggtncacaagaacacgccccaccgtaacagcctacagctctggtggacgagaatccaccaaactccgaagagaacattcctacccagccacttgccgtgacagttgcctagcgaagtccaactctgcgctgacaggagcaatagactccaaatcttgagcccaagcatctacaaaccttttctgcatagatgaaaactacaaattggtctcatctaactgttcgtcgaggcttctataaacagcaggagcaaaatcctttttcaaacaggagaattgcttctcggctactggcaaagcctgctggaatgattgcctagtaacatctttctcagcaacgaatagagcctc

SEQ ID NO: 72445 - DNA, 428 bp, Oryza sativa
  unsure (1)..(428): unsure at all n locations
agcttgttatttatatttcccagcgtttgaaaaggtgccaatcgatcgaacatggttttacgcaatggtcgaaaacatgtctcaactttggagtaacagccactcctacagaagatccttgaccttttgtaggacacgagggtaacttaatttaattacgattgcaggagacaacgatcaatcagctgtcccctccacctggccacacgttgtactggagagcgtgggctgagtgtgatattagtataaaattttactcacgagtacaactactatttgtatagtactatatcgctgcttctcacgcttaaattntatcttgaaatataactacttctccatatctgaatttaggtctcctttgattcaaaagaaattcatagaaattttagaggaattattcctataggaatnttttcctacaaagc

SEQ ID NO: 72446 - DNA, 397 bp, Oryza sativa
tgccaaggagagctcttctattctgtaagttgggtttactataaataattgcatcaacaattgcatggacaaaaggcacaccatataattaaggcagacataatttcatcaggacttagtgttttacatcagaaagctccctgaatttgtcgtctagaaagctagttttgagcacatcaactccatcttctccatagcaaaactgtatgattgatccatcaacatcacgtactgtgtgatcatatgagacttttaatgattcgagacttttgataagacaacgctgaagataaccactacgagaagttttgactgctgtgtcaaccaacctgcagtaaatattcataagctaaataccaacctacagtaaatatgaataatcaaccaacatctaaag

SEQ ID NO: 72447 - DNA, 370 bp, Oryza sativa
  unsure (1)..(370): unsure at all n locations
cagcaatacaccgagcggcatatagagtgacttctcctggtcacaaatggatacagccagaagaggtaagttataattgttccattcaggatatatggcacaaaaggcatttgcaacaatgggcttgaatgtgaatttaaggtgaatatgatggttagtatatacaagtcaaaacaaaggaagcttactanggttgggttgtcaaagtctagatcaaatgattcggttgtatcttcatcatttctagatatcaagggttacgtgagacagaatgcttccataanaagttgtgttngagcggcacctaagaacaaaagaancaaatgatngctgtcattactcattagcactgacctttcttttaagtgat

SEQ ID NO: 72448 - DNA, 444 bp, Oryza sativa
  unsure (1)..(444): unsure at all n locations
ttttcttggtttggcggcngagaaggcgcatgcgtccgggacgatgcgaccgcaatgtggtgtatatgaagttgacctcgaagacgatgtggcggaaccgcgtgtgtgcctctgcagacgagaggcggagcttggcgacacctaaacacatcagcttttgagcagctcgacggggggcgactatgagctacggggataggagcttggccagtgtgatgaggcagaagcctcagcccttgtgcgtgcaggtgaagaccacattgcagttgtagttgagacccgcgcgcgcacatccatgatgtgagcgctcccggtcattgggagccacgtcagcggcggcctccgccgtcgagctttttccctacgaccgacacccttcttccaacccattggcagatgccctgaaggtttgggttgagatgggagtatacgggagtgaggtgg

SEQ ID NO: 72449 - DNA, 396 bp, Oryza sativa
taccccaccaatgttccaccagcgcttgttattattttcaactccaagaatgggcactttggtttgccattaaatggtgcaacggaaattgttggctcaagttgttgaacacctcatattgcttttcatcacagcttattagcttcgcctagaggatttagcaatatcggtgtcaatctctgtagttaatgatgctgctttaagttcttaccatgctctgctctattagccattatcatcaaattcaagacactgctgatgagtagagaggataatttgacctatcaaatggttctgtggtacagaattgatatttgcttgctgttgcttgtgtaattgtgcatttctgttggtatgcttatggattgaactgaaatggatgcatatctgtatttc

SEQ ID NO: 72450 - DNA, 388 bp, Oryza sativa
  unsure (1)..(388): unsure at all n locations
agcttggtatctgatcggcaatgttcaattagcgcctaccgctgtgttgaatcctatcattaaaatatggccgttccgaggttgggctttggattttattggtcaaatttatctttcgtcatcaaagaggcatcggttcatgctagatgtaatggattacttcactaggtaggccgaagccgtgccgctcgagaatattacttgtacggaggtaattgactntattttgaagcatattgttcatagattcggtattcctcaaacgttaaaggggctttttatgtccaaggaaatgagaggttttgccgaatcttatgatattaagttgttgagttcttctctttactatgctcangctaatggataagccgagtcgagtaataaaaca

SEQ ID NO: 72451 - DNA, 415 bp, Oryza sativa
  unsure (1)..(415): unsure at all n locations
tagtctatttgggcttgcactgcttctactagatctttgagcattttccatctgtgcgcaaaccagaataagtaagtgtaatgattacctttcctaatataaaagattggagttagctgtaatgatgatgactccttaatcttttgtaaaagagtaaatttcataaaaccccacctattatggtccaagttgcataaaaccacagcaattttggcatatggcatataaccccaggtatcatggttacaaaatttcacaaaaccacaccggtaactattttgtctttgacctaccacattttttagttcttctacaatcaaatctcaaatttatgagttttttatccaacatataaatgtatgtcaaaatggttaactntgttgttttgtgaaactntaagaccataatacccagg

SEQ ID NO: 72452 - DNA, 190 bp, Oryza sativa
ggcatgacttgtcatttttttatctacacgtgggcattttatctccgctgcgtgattgcgtcgctgggagtgtatgggtactataccgggagggtatttcatcacaaatgctgtatatgacgtggtgcggcatccaattggtttatcccaaagaatgaattatgtgaacacctaacgtggaaaagaaagg

SEQ ID NO: 72453 - DNA, 300 bp, Oryza sativa
agctcacgttatattacagtatagctactggagccacacgcgaactcttgcgaaggctcccggactccgacttctactctattcctactccactagcttgagaacactaaactcgctcgagagactatgatacaactctgcttgacgtgtgcgagcgacgtgagaaactgcagtccttacctacgcatgtatcaccgctgtaactgctgcgaaatatctaaagtatcccgcaaccgccattaggagaagatctacagcgctcctaccaaaccccacatgcaacggtggagacgtgggttc

SEQ ID NO: 72454 - DNA, 201 bp, Oryza sativa
ttttggcgcttattttgccagagaaatctaataatacgagaaatggagaccattaattcaaggaggagtaaatccttacctggaatttttggattataaaagggccattccaattttagggggggatttgggccccctataaaccggaccgccccctttaagaactggatattccccctgttgggcccccccaacccaaaa

SEQ ID NO: 72455 - DNA, 300 bp, Oryza sativa
agcttaggttacgtctgtggcttgatgaaggcaggtcagtctacgtgactcctattgggtatgatgctaaccctatcacgtatcacgcgatgcctgtgatgtatctagcgaatcctaccacggatcacgtgctacttacgaagtatcaaaagccagtctccaaagcagcatgaatcagcggacgtaccgttcatgctctacgctagacctcgtacactacagcagactcattgactgttcacgccacaatggagctcggcgacagtggcctaagactgtactgttaactcatacatcaga

SEQ ID NO: 72456 - DNA, 151 bp, Oryza sativa
tctctacagacgttttggcgcttggaatttcgaagatgttttctactttaggttgctcccggcctaatttataaaaaaagctgttttatcacgtgcgtcttgtttactcccgggtttataacggctgtgcctttattacgctacttatggg

SEQ ID NO: 72457 - DNA, 424 bp, Oryza sativa
  unsure (1)..(424): unsure at all n locations
agcttcaagcttttcacatgtttaatttatagccgattaagcacagaattntgtccataagactacaactcctagttggtagtacattgcttcatgaaattcaaaatttatgtaatttactgagggacactacaaaatcatgtcgctgctgatgcctgatggacaccacaaaatttatagaatggctgtaagacatccgagataatactttatcatttttggcaaaactaggggagagaagtcttaaaacgataaaattaccctcagccctatccacttcagttccatcaggaccatcacctgctttccagcactgcttgccagctctcgctgacaccgccgtctcctaaggttagggtctttggatggggattacggtacggtgcatgtgcgtatagggttcggngttgcgatggttcaatca

SEQ ID NO: 72458 - DNA, 415 bp, Oryza sativa
tatagtgatttctcatatagtacgatttagttaaatctatatttatctataccaagggatactttggaaataaattaactcatgctaagaccttctgtaactaatagaacttatacagaatcaaaagtagcgcaacgcgcgactacgtggcttgtaagcattaatggagctttgggccaaaaaacgggggaagttcagctagttcaagataaaaattgcttgtagtgaatacggtgtcgtaaattcatattaagtgctgttattcccaatgtgtagataaagtgcttgaatttgtataccatattgtttgatctagttttctaaaaaaaaatgcttgttgcttctgcaatggcaacttgtttactgagtcattatgtgatcgtcaggattcatgtgaggatacaggagacatgag

SEQ ID NO: 72459 - DNA, 443 bp, Oryza sativa
  unsure (1)..(443): unsure at all n locations
agcttttgttgttgttgctgctgagccgcatgttcggtgttaattatgttgggatagaacagtagctaaagcattctttagtaaagagcaaaacgaaaaaaaaaagtaaaggagctacaataatataattaagtaaatcaccaaagagatgaaaaatgagctgagacaatgccattagatcttgatatatatgaaataaacagttcaattgtatatagatctacctaaagtgatacatatatataggaacggtggaaatacaaagcagattcattaccagattacacatatatatatgggtaaacaaagaatccttccagaatggtctaggctctatatttatagtctagaagatgcatcttcagacagcttaatttcatccatatgcaactttcttggtatatatatacaanaacatagttcatatcaaatagtgaatacac

SEQ ID NO: 72460 - DNA, 320 bp, Oryza sativa
tagaaactcagcttctatcgctctcgcggagacggcggttttttctttttcatccggcccaacgcgaatgctatcatagcccacctcccttttaaaagatgacgcccgcactttctcactgtctaccattcgctataaaaaatatgcaatgcccatattaagtccctaaggactatgagcctaaacactcttgcaaacaacatacatggaattcttgaatgacacaggccacctgtagagtaacgcgtactataaaaagatggagagatttgcactagcagtgggactcgaccaccgcgacttgtgggacctgaccgccg

SEQ ID NO: 72461 - DNA, 435 bp, Oryza sativa
  unsure (1)..(435): unsure at all n locations
agcttgtttttactttcgagaggaacttcgtacaacaaaatggaagtatatacgcctatcatgtacacatggatctatgaggtatatacagcacatactctgcctgttctaaaataagctaatttttatacataaaattaaacatagcatgtgtagattcgtgtgaaaaggttaatttatgagggtgtttagatccagaggtgtaaaactttagcgtgtcatatcggatgttatatagggtgtcgcatgtggtatttggacactaataaaaaactaattacagaatccgttagcaaaccacgagatgaatttattaagcataattaatatgtcattaacaaatgtttactgtagcaccacattatcaaataatggagcaattaggcttaacagattcgtctcgtaaattaagtacaatctatgnncattagtatt

SEQ ID NO: 72462 - DNA, 324 bp, Oryza sativa
  unsure (1)..(324): unsure at all n locations
agcttttgttctctgaatgggatcttgccttccagtttgattggcaggagctgtacaaacatttggagcagctggtggcgccacatgacctgaactctggtgggaatgacaatcattaactgtaagcgcatctgcatcagcaacagcttcccagtcatccaagaccccattctcctcttcagggccaccagtatcatcattctcggcctcgctcacacttctcgaactggaccatacactgctgctgctgctgagattgaggccaccaccattgttgtaatgcttcctgtgcatgccgnncaacgctccagaattgtccgagct

SEQ ID NO: 72463 - DNA, 401 bp, Oryza sativa
  unsure (1)..(401): unsure at all n locations
tgtagagatgtgtcaagggctttaatcacagttattttattaaatttctagaaacaaagggacatgaagtagaattgctgtgataaatcagcagatggaagaacttagtgtaaattttatgccccatttttggcataaaatatgaaagcactctgttataacttataaacattattgattccgggttagcaatgtaaataaaatccaagcctggagctgcttggtccatatttcataattgtgacctacaaatttctttggagaaaattatttcataattgtaacctaaaaaatttctttctagaaaatacatgaatctatgcaaagatctatagggcctcctgcaggtgtgatgcctgtttaaggtattctttatattacaccagtatatatatntttta

SEQ ID NO: 72464 - DNA, 335 bp, Oryza sativa
agcttgtctttaatcaacctcatgatgtaaggggcataatagattccctgagtgaaggtcccctcggagatggcaatctcttgcatcataaaagacacaatgtccaactgacgaccctgaatgattgcatcgatgacgtgcccagccaccccccaaatgtcatcattgctgccaaggcgagggaggatagtggctctcacaatcctgttaaccacactggggatagtcctcaagccggcaacctttccatgtgtgtaccgcgcttcatcttcatagaactgagagagatagtctatggagagcggattgtgggtgtgcgcctcatgcaaatcatg

SEQ ID NO: 72465 - DNA, 401 bp, Oryza sativa
  unsure (1)..(401): unsure at all n locations
taagaggcatgtgttagtgtgtgcaggattattatctgttcctatgntagcgcgcgcacagctttattagttctttcacatgctagtttgggttgctctgcataatctatatatagtactatgtaaaacctcgcgcgttgctgcgggagtttactatgataacaataagtaaaaaataatgcgtaagatagcttaaacaacataaccttgcataaatataagtttacataagttgatgtaatttaaagaaatagtatatagaacaaaagtaagatgatgtggctttctgagagaagaaaagaaggaagataatttagaccatacatctaagggctaaaaaaattgagatgatatggcttaatgagaagaaaacgaatgaagagagataatttgaactatag

SEQ ID NO: 72466 - DNA, 414 bp, Oryza sativa
  unsure (1)..(414): unsure at all n locations
agcttggtttactttatttacttaccttntactttgattctctaactttattcaaattaatccaaaaacttgtgctattaattggataaatgtcttaacttcctcctttcacttgtctttagatgccgcgctacaagcctgagtacttgtatggtgttgagggatttgtctaggagttgcgcacgatgtcctttgccataggatttgggactgcccctttgtatgcccagattcctcatgatcgtcaagaagagaagtgccgagtcaaagtcaccttgaacagtaatagagaagatatcccatcagtgatgttcgaagctggaggaggaaactacatccatgcatgtcaggaggtggcaaggatcgccataggagagctccgcgatcgctacagtgattagttggccgacactg

SEQ ID NO: 72467 - DNA, 410 bp, Oryza sativa
  unsure (1)..(410): unsure at all n locations
tgcctcanattcacacaatttgctgcatttagtttatacactntgcatatacaagtttgctttagttcagtgcaaggttaatcggcgggtatttgcttaacccctgtccgagcagtcttgtattcttgctctttgctgtagctatgaagaaagacttccgggcatattcaagagacaatcaagctcacggacaagccaacacgataagccgagtacaccttcttcagcggatgcatccatggaggaggcgtacgttccaccgaggctgtacaacaactccgatctcgacctcgtgggtgaccgggaaatgcaagcctatcatatgctgaaagaccgaacgtgtgctcagacctaagcatacaactcgaccttctgaaaaggataggtatggatgctgagtttcatactgt

SEQ ID NO: 72468 - DNA, 407 bp, Oryza sativa
  unsure (1)..(407): unsure at all n locations
tttcttaatatctatctgtattntctttaaccgccagcggtcgacttacaaaaactgattgatattntagctgatttttttacaaagttgatgaaaaatcatcagtttatactactttgttctggtcggatttcgacgaggagtggttttcaaatctaaaattaagaagtaaacatatcctggatacacgtttatactagtgcatgtctgattgttcatatgtgcgcgtgtgttagataagtctgtaaaaatacagaggatgcattcctagtatgagaataaatatagctggntatatacacgtcattgtaattcgaacatcactataacacgtcgtggatactctcctatngacttataaacttctgttcatgaaaccggcgattaatgatatcaatagtacctac

SEQ ID NO: 72469 - DNA, 405 bp, Oryza sativa
tttaaagtctcccctttatcagccctgtgttgtaattattgtagaaactatttatcagtgcatgggtaaaggtgatgttgcttaaggacaatatgcagaagacaaatacaggaagacataagaacaacatattgcatataaattgtacagataccagcacattatattgtgttgctgccctggtacgtacaaatagtgctattgcgtgctgttttaactataggtagcagtcaagttcatcacctttagagcatccactttggaagctcaaaatatcaatcatgaccaaaacttatgttcattcatgttatatttcaagaattataggaaaaaaatatgggttaacttcagtaagtgcaaatcaacgatgtaactgagtacgatattggaacaatgcacgtgcat

SEQ ID NO: 72470 - DNA, 272 bp, Oryza sativa
tgcactgactacatcggtagaactatgcgtgacatcacagcgatatgctgggaccattcttgatcaaagctgctcacagtgccatatctccctaaatgcacccgagtatacgcaggaggccatgctgacatgaatgatgaacctggcgcttatgctggagtacgaggctaatgaccatcacatgctgagcaccaagcctttgatgctctgacatatttggaatgcataccttgtgacaggtcttactttatttgtttctgctgaacacgact

SEQ ID NO: 72471 - DNA, 371 bp, Oryza sativa
ttagcaaaatctagcttgataatgagggtcttgcttttccttgcatggcacgcctgtatcagttcagtggcataaattaaattttcagagatgcatctacctttaaggaagcctgtctggtccagatgaatcattcttgtcagaactttttgaagcctatttgccaaaacctttgaaagaatttttactgagcagttttgaagggagattggtcgaaagccatctacctttacaagtgagtagtcgtttgtagttgatagtgaaacagtgattgaactaactttcaaaaagaaaaaaaaaacagtgagcaaactgattgttttgtttcgtagctagactaacactgggatctactactgacaaagagagaa

SEQ ID NO: 72472 - DNA, 351 bp, Oryza sativa
  unsure (1)..(351): unsure at all n locations
cgcttctcgtgttctngttctctgcccgaggcatcgaggccaaccccgagaagatacgagctatagagcggatgcgcccccccagcaaacttagggatgtgcaatgcgtcaccggttgcatggccgccctaagtcggttcatatcgaggctgggagagaaggcgctacccttatttaagctcctcaaacgctccgggccgtttacctggacggaggaagctgaacgtgccctcactcagttgaaggcgtatctcagctctccctcagttctggtcgccccggagccaggtgaacccttgttactctacttagcggcgaccacgcaggtagttagtgtggcgttggttgtgg

SEQ ID NO: 72473 - DNA, 413 bp, Oryza sativa
  unsure (1)..(413): unsure at all n locations
tggtgtgcatctctgaatctgtatctcaagatcctatttttgttttcaaattcntcatataacatcccaaattcccacgcatattacatcactgacagtactaagcactaatcatctgatcaaatacacaacaatcagtccctagtgaacacgaccagaatttcccagaaacagaaaaatttccccttcgatgaacatcaaatagccaagcaaatgcaatgtgcattctctaaaaaacgaacatcaacaatcaacatacggctaaccaaatcagacaatctgcaggccgttcagtagcttaatctgcaatcaagtgcacagctatcttaaccggatgaaataatcaggtaaattctggacatccagctgaagaaagaaaaaagaaaggaggagacttgtggcaatggagcttt

SEQ ID NO: 72474 - DNA, 460 bp, Oryza sativa
  unsure (1)..(460): unsure at all n locations
agctntgatttcttctgtccacatttcttcttatgaagagattgagcacagcgaaatatctgcaaattcggatccgttcatgtttcagaattcagagagggtaagattcagtcggttagtttttcgcagactgaagaaaaagaagatgttgctgaaattcatattatgatcaatggattgcggtgatcaattaattaatattccctccgtttctaaatatttgacgttaacttttcactacatgattgactgttcgtcttattcaaaaacttttatgaaatatgcaaaactatatatatatataacaataaatcaaatgataagaaaagaattaataattacttaaattttttgaataacacgaacggtcaaacatantttaaaaaaatcaacagcgtcaaatatttagaaacggagggagtatagtactatgcctaaatggctgtgacgtcaaatttaa

SEQ ID NO: 72475 - DNA, 409 bp, Oryza sativa
  unsure (1)..(409): unsure at all n locations
tcagacagaactgcaaagnttgtgactctttataaaatttttctgaatgtataataaattactcaatgtaatactctctccatccaaaagtctaaggcatatttcttttgtcaccaagaccaaggagaaattaactcattccccatgtaccaaaaccagggaattatttacatgcatgcaaccaatgagtattaaaatggttacttgggttccgatcaacaatttaatttagcatatggagactacaaatatgaccgtctcatttgggaaaaccaaaaaatgaaatatgctcaagacttttggatggagggagtataagagaagcacttgatattctctacacggagaagactattaaacaagtgccatttgaagatccattaattggctcagtgaatgcctttgcact

SEQ ID NO: 72476 - DNA, 409 bp, Oryza sativa
tatgaaactcagcttagcgtgaaacgacaagatggtcatggtccattagtttttacgagagaaccgccttcgcgcttgagtcgataggaacctggcccggtgactttagagatgataaatggcccctcccatagaggagataacttgtgccgattccgtgtagtttgaatttttcttaaaaccaggtcgccgactaaaaaggcacgggatcgaacattgggattatgattaccgcgcaacccttgtaagtattgagccgaccgaatcaaagctgcttcgcggacttcttccaatcggggcaagtcatccactcggtccttttcgtagcgttcttcgcggaaattacgaaagcgcaaagactcgaattcgacttcacttggcaacattgcttcggacccatagacaagga

SEQ ID NO: 72477 - DNA, 455 bp, Oryza sativa
  unsure (1)..(455): unsure at all n locations
agcttattttcttttttgaagtgctccagtgctgtcaaaaaaaatagtgaaatggcttctttggatctaactgatcgatgaaatgtttagttcatattctgtttactactagtctattacattgtgttcgaggagtgattaagctcacattccatgcaacacatggttntatttttgtcttttttgcaggaagttataatgttcaattgttatgatacaattttattgacgatggtcagtatgttgacaattaaatgctgcaaactatgaagcaagattatagtataccttatgctgatcacctatatattcatttcagcaatgtactcttgcttcctgtntaaaagaactctagcatttccatttagatgcttaccatntgaagtgagctttctattatgtatgggtcactgggcctcatgatagcatcagtcggtgtgatattctcagtcata

SEQ ID NO: 72478 - DNA, 401 bp, Oryza sativa
  unsure (1)..(401): unsure at all n locations
tatntcttgtcccttcttttcttttagccccgactgtagtttactttgctcccctgttgctacagggttggcttcaaccttcagccggttctctcacgtgcccgctcacagtagcgctgcatcctccaccaaatccggccatgccggtgctcccaatctaaaattgatcgcggaaatagaaccctctcaatctcctctaccttttccccaagaaagaccccatcaaattcgtgcttaatcccatgaatttcggtcccgttcttatcctaacaaatcgggataaaccctaattttcggccaccaaatcccaccacatccgtatcgatctctacctcctccgcctatataaaggatgcactgggtctccccttcgctttcccctcctttccccgagctcccat

SEQ ID NO: 72479 - DNA, 410 bp, Oryza sativa
  unsure (1)..(410): unsure at all n locations
actaagcttttctcatggatccatactctaaaggctcataaagtttagaataatttagatatgttctagccagtacatgcctaaataatagcctcactaagaacctggatgaaggggacttaatttttcaatcaacacccactaagttaagcttgagtttatttgggtactatagtaaactatagggcttggtggctcggtgacgcataatgttgttgaagacacattgccttggggagctagtttatgtgaataactcgtcagttagtctcaaaatcaaggggagaatgttggttgattttatcggctaatgccggttagttaggataaggttaaaatcccaccggtttttctatcctaacaagaaacaaactaagagataaatctgttntgtgtgatcggtacaaaat

SEQ ID NO: 72480 - DNA, 280 bp, Oryza sativa
  unsure (1)..(280): unsure at all n locations
aacacaacacaaaacacgacaacaaccccccccccgggcnatgagcgagcgccnnnnnaaccgcaaccngaacagaagacgtttatgaccccggcacgacagcaagcaaaagcaccaccacgcctgacgaaaaagaaagccccacagcggcaacacaagagacgggcaggctaaacaaacagacaccaaaacagcacctctcaaaaagcacgcaccagaaaaagagaacacacccacccgaaaacaaacaacgaccaaaacaaccaccctcaaaggaaaa

SEQ ID NO: 72481 - DNA, 373 bp, Oryza sativa
  unsure (1)..(373): unsure at all n locations
agcttattctttattcttttccggtgaacacaattagatttgatgataagaaggtattgattctgccggctggagcaagccgaatctgctatggggaaaggagtgatcattggagagcctaggccaaagatgatggtgctaaagaatccggaggttggtgtctggaacgagaatangagtgaagcttctagttctaaagttcctaaaaagactaaggtgaccttcgatatgcttttggataaacatgagaagtaaggtggtgagaaggcttgtaataaaggaaaaagaccaagatcatctcctagggaatgatttggtcattcaccaagatggttggaatcatctacatatcatcgtcctcaagacatgtcat

SEQ ID NO: 72482 - DNA, 421 bp, Oryza sativa
aaaaatacccaagcttgctatttttacattcagtggaaatggtcaaaatcctgtctactgggtatatctagaggtctagacatcaaactgactactttaaataaagaataatgaatacaatatttgactgaagcttctaacatcatacttgtatggacaatctatcttatctagatattacccatgtgttggacttcaaaagcgaacgaagttggctccataaggaaattttagaaccaaagagtcgcacatggacagatttttttgatcctcccctaacaaattccagctcccttgatacaccattttcagcatagctgggttcttcaagaaatggaactgcaactgaaccctcagattcgacattctttagccatcctctgagtaagtagtttataacctgtccaaagaccaaaatcat

SEQ ID NO: 72483 - DNA, 350 bp, Oryza sativa
cgacccggaccctaagcgccgcggctgcacttttttttttacacggacacttagccgacatcccattaacaatcatagaaagggcacgtggctactctgatttttatgcctgactttgaaaagtgaaattgcaataaattgattgccttgacttctagaaacaacagcttataactggaattctgatttgcgatgaaacctacctaaggttttttaagattgcaacttctatgtggccacttacagtcatgattgttgaataacaaccctttcacatgtaccgatacttggccttactgttataatgcatcacttctaacttcttatatactaatcttggtccaattttt

SEQ ID NO: 72484 - DNA, 411 bp, Oryza sativa
  unsure (1)..(411): unsure at all n locations
aactataaaactcagcttatatggtgccaaaaatttcagctaattgttttgtttgcctgaaaagctggatgcacctcgtgaattattggaagtaccctgtgctatttatatttcaaacgcttatagcataaaagaacccgaaaattgcaggacaaataatatatgggaccatataaacccgtgacacattaagggacactggcaaaatgacacatagtcacccaacagaaaatgtgacacgtagtgggttccccaaccaaaaagacacagacacagacctagatgtgacaacgcataaacatagatttatgtttntggtaacgtagatttaagtttttgagccacgtgatcattggtagccaagctaaccaagtctgtacatgagtctatgataaagaagatgaaatactt

SEQ ID NO: 72485 - DNA, 291 bp, Oryza sativa
gatcttaagcgccgctgcagcaacttttttgttttcgctcggctgtataacatacgaatgctctttagacctactgtggggaatgaactcattttgatacactccgtttggccagctcaagaggattacacacggattgcgcacgggagtcaactcccccagccagaatttaatcacatggtgttacagatattccggggagctagttactgcaaagcgcaaaggaacacaaactgaacgtttctgcacctattattaattccatggatctcttcacgagcaaagagtcca

SEQ ID NO: 72486 - DNA, 406 bp, Oryza sativa
aactcagcttcccaatgattctctgtcaaacacaaacttattggttttttggcaccaatatcattggccttggtttaccaatgaatactcctttctctttagcacattcggcttgctcccgccgaatcaacaccgtcttggcattgcaattaattgtcttcaccggaaaaagatcatgatcaagcttcatcttggagccatccgtgaacctcaatcgtgcgttatctatggccaattgaacctggcgcataaacacattgctatcattactggaatgagaatgagaatcatgccatgtacaataagctcgacgtttcaattcttcttgagatggtatgacatggcctataggtaatctaacttgtctctcttgtaatggatagccaacaatcttatcacacttggc

SEQ ID NO: 72487 - DNA, 193 bp, Oryza sativa
agcttgtatttgtgttgtgtataacttgccaaagtattgggcgtgcgccaggcgcacactgacattgcctacgagcatatctccctcatggagacagggtgtcgccacatacgcaagtatatcgcttgtgtggagtgatgatctggtaccttaagtcattcacgatgtatccatcgcctattcagtgacccca

SEQ ID NO: 72488 - DNA, 305 bp, Oryza sativa
ctccacgtgcgagtggcatcgctctttttttttatcagctcagggggggggtgcgtttcaaggccattatgggatcttaaacatcgcctctgccaacgttttacggggatcacattctaggggcggttcttcacaatcatcacggggccacctgctgctccacggcaaatggccagggaatgaagaaggggtggacctatgagatatggattagaggttggctgtggttatgcgatgaggaaatgttaaggaatgattagggaactatgggccagacggggaacccatccagactgcttgaaaga

SEQ ID NO: 72489 - DNA, 388 bp, Oryza sativa
  unsure (1)..(388): unsure at all n locations
tttcttgcataccaacaaacaatcacatgactatagagtttgcctttaattttatcagagaactaatgatactttaataaactagattcaatttaatcaagaagaattaggtatgcaagcagccaagccaaagaggtctccggcttaggcaatagagatgtatacattgcaacattcactaactgaactagcctcagctcctacagcacagtagtttctaaagtcaagatgtatattcacgaaatctattgaaacccatctccaattattttcacatcatcgggacaacaacatgtcccgcanagctccaaaccttagatccactgcgtgctntattaatcgagtttgatggcatacctgcacgtagagcacgcttctggcttggagt

SEQ ID NO: 72490 - DNA, 399 bp, Oryza sativa
ttgtcaaacttgattaggaaaaaactcaaacgacttataatatgaaacggagagagtactcaataatgatgcacaaacacacaacataatcttctatcgtgctcaccagatacacattttgcagctacttgcacattccatgacttatgctatgtgtacaattaccccgactcatcttgcctacctattcctaacccaatttaacgtttattttatccgcatccgttcctttttgtcaaatgtctactccaacatgacagcattaatgttcactcgtaaatttctgcgtggaacttccaataaagaatactgctgagggctgaaaggaggtgctcaggcattctctttcatgcatgcctgctagtaatgctcatacctttggtgttgggatgctcctga

SEQ ID NO: 72491 - DNA, 453 bp, Oryza sativa
  unsure (1)..(453): unsure at all n locations
tctttcttggccattgggccaaagactgtcgacagccacgacgcggccaggcccacgtcgcacgggtggaggaggaagagccggctctgctcctagctcacgcaagcatcgagctacctccagcggcaccggccgcagcggctttcctccaccttgatgagccgaaggtactcgtctccctctgcgacggctccagcaacgacaaggctgatgggtggtacctcgacaccggcgccacccatcacatgaccggccgacgggagttcttcaccgagttcgactccagcgtccgaggcaccgtcaagttcggggacgcctccggcgtggagatcaagggtgttggctccgtcaccttcaccgccaagtccggtgagcacaggctgctcaccggagtctactacatncccgcgttgaggaaatctatcatcagtgtgggacagctggatgagaacg

SEQ ID NO: 72492 - DNA, 395 bp, Oryza sativa
tgtgcagctaggcggtgcttgaacatggtttatcttaatctatggggggtcacgtccagaaacacaaagaagaagctccatccatgcatcgactggacttgaatccggtcaaggagatcgatctggcggcgaaagcgctggttcgcatgacgagctggatccgcctaatccgatttgtagctctctccctctcttgaaggggaagttttccgatgctgaccagcatgccggcaagaaaccaaacatgccggatttgacacagaggccgtcaagcaagttatgtggcagtgtggcacagggggagctagagttttgccgtggggactgagcgaaaaaaagggcaaccaacgtgatggcaataatttatcaagcatcggcaaaagagattgagagga

SEQ ID NO: 72493 - DNA, 452 bp, Oryza sativa
  unsure (1)..(452): unsure at all n locations
agctnttaattcatctcttacaagttcttaccaaagcaagcggaatggtgatgtacaccgacttaaccaagcaccccaatggaggttggatgtatcgatgccttggcaaacacttgctgtacggctgcaatcagatctgtggagctctgggtaggcttaaatatgtagcaaagggatagcaaatgctcaaatcagagaatgcaaagttgaataatggttcaaagtcaagtaccgtgctggtcctaggctagaacgtactagagacgcgagcctagacacaaacgataccacaaaatagcactaggaacaactcatgcacaactctgatatatgaagttcagctcanaccataatagatnttctcttttctttctttcttctttcttcttttctttntntttctttccttttcttttctggtggttntttgcgggcggcttttcttttctttt

SEQ ID NO: 72494 - DNA, 458 bp, Oryza sativa
  unsure (1)..(458): unsure at all n locations
agcttgcttgagatttgtntcgaaccggccaccgctaaatggctggatcgatcgaagttctggtactatgctcacggtagaacgctcaacccagttgatggctccctggtcttcaatgatcagatacgtgaggctgcgagtcgactaacggacgcagtggaagcctcttctcagggcacgttccgacccgacagagagaaggacgagctgtcactcgccctacagactcccgagcatccaggacgaacacgagggaaatgggtgattccttggaagattggattcaaggaggacatccacacgtacaggagtcgaatgaggagcacgagagataccgaggcgaagattgcagatcttgagtacagggtatcgagctacgagctcagcatgcatgaggaggtgtgcaggaanggtgatgaacgcatggctgcacatcgatcccatgatccacagccgta

SEQ ID NO: 72495 - DNA, 401 bp, Oryza sativa
ccatagaaacccccaaaccaggaaattatatgtttttataagtcagaagaaccaagagaagaaatccaaaagttagataaggtattaagtgaggaagagcaatgggaagtaaatgagaaattattactagagagttatgaagaagaaaataacctgatagaggaaatagagaatatagaagaagaagataatgcagaacaatataatgattttatagactcattggatgaggaaggtttgcataatctagataatgcaatggaagctatggaagtagatttgggaacaggaaaaaggaaaagatacggagagggttctgtaaaaaatgaaggagaaagagaaagaccagccagggcagcaggaagatggcctccagaaaaagaagaatattcatatcatta

SEQ ID NO: 72496 - DNA, 398 bp, Oryza sativa
  unsure (1)..(398): unsure at all n locations
agcttcattgtttttcttcgttcgcctctctcccatcggagcacgttgatcttgacggttcctggcgcgaccaatgcgtgcgcgagaagttagacgccatgaattcgnttctcttctctgctttgcttttttttttggctcctgttttgcacttggtgtgttgcggaggtgtcagtttctgaatttgtttaaaccaaatgccctcttcttattctttttgctgttcctgatgcaatctgcccgtctttcttacgtattgatcaagtagaacggcgcctcgttcttttcttgaattttaaggccgcttcggaatccgaaacttgctaagattttcctggccgcgatcattttttctcctgtcttggttccctttccggttgtggtgttgatgtttgaag

SEQ ID NO: 72497 - DNA, 423 bp, Oryza sativa
acacatagaaactcaagcttctgtgctcgtcgacctcctcatgcaactccgagaaaattcttccttaaatgcatcaagcaacaacatcacgggtacgggaagcgaagaacacgaaaaaagaggacccgaccgcggttaacaggaaccaaccaagacgcagggtgctgctcgattcagcgaagacaagaacgagagaaaccgcgacaccaaacactccaagcaaacaaacaccaccaccaatggagcaagaacgaagaagagtatggagaagaatctcacggcgctttcggagaagaagtatggtttaaggatggaggcggcggacgaaaccacagaaaaggagaggaggatgaagtgagagagagatctcacctcccacctttcgccgctgctcttgagacgcgagagagagagagatgcgga

SEQ ID NO: 72498 - DNA, 461 bp, Oryza sativa
  unsure (1)..(461): unsure at all n locations
agcttatctatgtattgtttgttgatcaaatcggaattaaactattggtatgctaatgatctgaataatgtgccaagcaagaaaagatatggtttatttatgtatgccttcactcattctgctcttttgtaacagtttccttcacctggcttatctgcacaatcttcatctgatgactctctaatagaggacattaacacctctgttgttgaaatactaaatgctgagggtagcggccaacttacaaggtaatacatctcatgactgaactcttctgaatatttaaaggtgctagaattgcctatacttctagtaaagttctatacacccaccccaccacacctaggaccttcttgattttatggacatagacatttgtgtgttgtctgctagattttcttttagcgacaatggcattgtcttcacatgtgcatacttaggtcggtaatngatcttatgtg

SEQ ID NO: 72499 - DNA, 394 bp, Oryza sativa
  unsure (1)..(394): unsure at all n locations
tatatttggggatggagggagtgctatctagaaatttgttatatctttgngtaagaaacctacataaaacaaccaagatgctacttttattgatataaaaatcttctaaaatatttagcaagctattggggtttatcattgggccttagggaaaaaaagaatccgattagagaatcctcacgggcataagggtttaatcaacaaaaatagttgcaatgatgaatttttagttgcacaagatagtacattaaaggcactcagatcaataaaactacaccagtggcttgatcgcacaaaataaaataccttaaggggcctacaaatgcaatttgcttgcttaaaagtgatataactacacttacgatgtgacatgaattttcttctgctttggtcg

SEQ ID NO: 72500 - DNA, 418 bp, Oryza sativa
  unsure (1)..(418): unsure at all n locations
agcttctcgctcttctcgccgtgagagtgagcgcgtatgcggcgcgcgcaccgctgctgctgctgcgtgagcatccgtgcatgatcgatcggcgcacgagcagtgagagttggagaagctttattaggagggatcgatgccgggggcgggagggaagaagaagtcgccgtgggcgtcggnggagaggcggccgcacttcttcaaggtgctcgtcggcgacttcaagcagcgcctggtgagtgcacgagtgccggttagccagctattgtctggcatatgtgcacttagcttacacttgttgccatcgtgcganatatnggcgatcacaatttggatcgggacgatggctagccaatactttgcgcagagagatatcgtcacgctagcatgcatgcattgcatttttgcaaagcgagct

SEQ ID NO: 72501 - DNA, 407 bp, Oryza sativa
  unsure (1)..(407): unsure at all n locations
tccttctgattgctgtttgaagcggatgacggtcttctgcttggtatcgccctccggaggttgattgccctttgctccgcctggagtaggtcggggagagacacaacttcttccatcgacgacaattctttgctgaggctgtccgtgcacagaatggttggtgctgaaggtattattgctatgatttattgcagagttaggtggagcacgaggaacattggtgctatggatgatatcgtcgatgttgctgttggagctgactagctgatgagacaatcgtagggttgttcgttggatttctacggtcttggtcaacaacacactgagttggcaatccttgggcacatggtttgtaccttcgcacagaanacatgtcatcttgcgggtgggacactcccctggtggat

SEQ ID NO: 72502 - DNA, 445 bp, Oryza sativa
agcttgttattctcttagtgaagaagactcagctgatatctagttaagtaagttatccgctttgatatcttatcatttctatatttaacatcagcgtgtgatatggcttgggcggcgtggtatttccaatagtcatagaattgggttgtatggctccatataaaaatacgataggcatacggctgactgtatcatagacaatcaggcgatatggaaacataaagctcatgaatgtaagggtggcctctgattttttggaagccagatggtgaatgggatgagtcatgttagatcaaccttctacggttaatgctgttagccgtggctctaaaataacacatgtaacttctattcttctgatgcactagagtaagtagcatgaatgggcaaccatgagttactcgtgccaaaagataagcacagctacaatctaatgtgatcgaac

SEQ ID NO: 72503 - DNA, 268 bp, Oryza sativa
cttaacttttggtggaggagaaaaaagtatactgattctagccactgtactcagaatgtttaccggaagatgatgatgacttagatataaccgaggaagcaagggttcatttgcgcataaaagcagtatttaagcggtaaacaggtgagctattaatcaatattaccatcctgccaacctcatccgttgaaaggcaaaccacacctgaatgaccagttcattactaacttaggtgagactatccatgatctgatgaccccataaccgc

SEQ ID NO: 72504 - DNA, 458 bp, Oryza sativa
  unsure (1)..(458): unsure at all n locations
agcttgctcttggaccagtgggcaaaccttaacattgcnttggaggaaaccattcaggaagaactgcacattntttgaaatcacgctggctgcagcagatttatctaggtgcatctgaagcatttaagattgaagaactgacgatccagctaagaacatgagaactgccacattgtaacatgcaacccgagtgcataaaatgccagaacccagcgaggaaatagagagaaaatcaggataggagcagaatcagtaattcaagaggttttggattgacaacaagctaaatattttttgattattagaaaggaaggacgagatccagagagtggaagggttaaattgttcgataggatggatggngcgactgaagagttgaaccaaatgagggcctggtcatggaacagctcaccgggccatacctttgattgttgaggccaccggatttctcgccgccg

SEQ ID NO: 72505 - DNA, 404 bp, Oryza sativa
taatttggcttgccatgctgttgtcacttgaccattaccatgcttgtacatttattaattttttgttttcgattatgatggtcgaattaatcatcaagatgaacagtcctgttctagcgcccaattggtccttcaggttgttccaaggccattagtttacaaagaaagctaaataaactaggctacattttggtttacataaaaaaatacagttcaattcctgaggaatcgaaataaagagaattccacttttgattcaaacagggccatatgagttattggcttatttgcccatgcatcttggatttcgatactatctgctgaaaaagaaattgttcccgttccctttccattgtgtttacaacgttcaatgttcaagtgtcatagtacatgttaatctccca

SEQ ID NO: 72506 - DNA, 362 bp, Oryza sativa
  unsure (1)..(362): unsure at all n locations
agctttatgctctacgaaaacttgcagnacgtttccttaatgtgtctgtccttctgcggtagataatgaaaatcgggaatcaatccaggttcttccctttggcatcttgacacgacagtgacactgttcctccctccctcgctccgtttagtgtgtgcattctaagcaagcattgatgggagagccacgcgggcacaaggagttgcaaatccacaagcaaccgcaaccgaggccaacccgagacgccgtcatccccaccactcgatctgcgcgcgccagtcaagcgcctcgcacgcacgtatgcggtgccttagtaacgcgcggtgggctggctcgctcccccgcagggaacaggccgagcg

SEQ ID NO: 72507 - DNA, 398 bp, Oryza sativa
tcttctccggcgtcgcacgcaagcgcgaggtcttttttttaagaggtggaagctgccagatccgcgccctggtttgtctctcggagaagtggaggcgcacgcacactgcgaggcgacacggggaggggaaggagaaaggggaagattgtggtgggctctccgtgcctaacccagatcgtttgttagaaagtggaaatgtccgtccgaggggagtaatacgcacgccaaaacggataaaagtatcgctattcctcctggggatgaatatgatcgggtaattttgaacattttaccggaaaaagtaatggagagaatgaacaccgttacagaaagccatcaaacgttaatttaaatgaaaaaaagtatcttcgttaagttaggccaacgtgtggtagctg

SEQ ID NO: 72508 - DNA, 453 bp, Oryza sativa
  unsure (1)..(453): unsure at all n locations
agctttgatatctctctaagaagtcagagtatgcatcaatttgcaaccgcagagctgaacttgtgcattccttatttgcgcactcctttaattcatcctgactgcttgtttccactggacatgtagacctcaggacagaggaccaatttgcctgagcttttgaatacagatctgcaacatggttcaagtcttctgctcgaaatccaataacagaagtggcagaatatcgatcaatgtacctctttacctatgagggttaactgaaaatcagcgtagagcttcagcaatccacccaaccaaacaaatacaaatgaactttcatattacctgccaacaatntatacagagagcttcagcatatctccgcatccatgcttctagatcattctgctgtgtacaatcattggcaccgatcttgtgattatcccatgttncagcactcagagcatacaa

SEQ ID NO: 72509 - DNA, 399 bp, Oryza sativa
tgccgagtccgccgcgcggaaggccattactgagtggggtcgtccagccactgatatcacccacctcatctttagcacctactctggctgctgcgcccctagtgccgacctgcagctagcatcgctcattggcctccgccctaccggctcccgcacaatcctcagcctttatgggtgctctgggggggctcgggcactccagcttgccaaggagctcgttgagaacaatcgtggcgcgcgcatccttgtagcactctccgagctgaccctgatatgtttctcagcccctgatgaaagcaaaattgtcgggcatggactattcggggatggcgctggtgcaatcatcgttggcgcaggccccttggctgatggcgagcgcccattgttcgagatggtcgc

SEQ ID NO: 72510 - DNA, 399 bp, Oryza sativa
ttccgcaagggtttttctggccgaacgccctctaatatgcctgcgacatggggcaacggggggaaacctgtcaattttacagcaaacacacaaaattgccagcgcaagcgctccagaccatccctcttacttggccattcacgtgctgggggctcgatatactcggaccattcccacgaggacagggcggctacaggttcctgttcgtggccatcgacaaattcaccaagtggattgaagcgacgcccacgggggaaatcaaggccgataaagctatcaagttcatcaaaggaatattctgcagatatggattgtctcaccgcatcataacagacaacggctcccagttcatcagtgccgacttctaggattacagcattggattgtgagtcaagattt

SEQ ID NO: 72511 - DNA, 433 bp, Oryza sativa
  unsure (1)..(433): unsure at all n locations
agcttatcttctgtgggcttctgcctgtaccgcgagcgaagagcgatcgatggatatggatggatagtgcacggtccacgcggaagccaccaattgtaaccgatccaacgtacacaacacagcaaaatcacacgaagctcacagcatcagcagcggcgtgccgtactgacggtcccgcgtcctacagtgtgtggcgtggaaagcgagcgatccgcgaccgcgcaaacgttggagaataaatgaacaggttttacgtacgttcgatcggttagtgccaaaactggatggagcttttgtacttctgtatctcgcgtcaagatctgatcggtcgatcgatattggactaccggctttntattcgccggacctgccttgccgatcgaccgatcttttctatactgatgaaatggtggaggtaatcaccagttagtac

SEQ ID NO: 72512 - DNA, 394 bp, Oryza sativa
  unsure (1)..(394): unsure at all n locations
gcttcngaagagggcagctgtaaatgcatcatagttattgtccctctggttacagactacacccgcagtcgtctcattgatgtaatactgcattcttctgttggagacttgtcaccggaacttgtggatcaaattatgaatagacaaaggaactttgatacagaaactcgttcaggtgcagcagctaaattgaagcaaaatcaacacacgactgctatacttggattgaggattccgcgcagagttaaagataacaaaccattaatattagaagctatgcatgccaatggattcattggtgcaaagatgattcgagctaagctgttccataaatttctgtgggtatatgttagtggtttgccaaattggtgtgacccatttgataatgacaaag

SEQ ID NO: 72513 - DNA, 401 bp, Oryza sativa
taatcttttactgctgctctacatggataacgtgatttgggtgacgattgacttgtcctccctcttacctctgatcgaaaaaaatagatataaacccagctctgagaaatttttatgtaagacggacaggtaatgtgggacctcgagacttgaacgtcatgtatttttttttggactgggaaagaacacctaccggggtctaatggtgtgctcactgaatcgatacttacccttggtacatgtacgcgtgccccggccggcggagggctcttctgggctgcgtcactgatatagataaccctcagcaattgttgagactgcgggtatgacttgttgccgccgatcgtggtatgtgaacctatgcaacgcacatttgttgggaaatggcaacaaatttagac

SEQ ID NO: 72514 - DNA, 373 bp, Oryza sativa
tcctgggctatccagctcagtacaatgcttttttttttcaggactctcgccagaaacattgcttcatgtaaagcaaaggtgatctgtgaaattattgatgacttctgtcatgttggagcgcacgagcagccaaattgacgagcttgtatcaatgggcaagccacaacgcacctaatagtgatcttgccgtgtggcgcccatatatagtatgcattatttttcgctagtttatgcgcacattgcggaaattgcaaagaaaatgtgtcaccagtacgcaccggcgagttggacgggtattgacttccttgttatgatcgccattcagatgctgctaccttatgaatttagggctcttgttgagtacgaaaaaaac

SEQ ID NO: 72515 - DNA, 370 bp, Oryza sativa
agtaatgctatcttcggtgacaacaacctgttgctatggaccataacttaattggtctccgaacaacacttatgtgaccatgaatctttattgactacgaaaggccgatgaacatatcattggcacaatctgctacaggacatctgaaaaaccggtaattagctaggggacatcgtaaaaacagtgtattgcagtagggcatcgtacaaactgggaattatctatcggacaccggccggactatttctagagaaataggagagagaaacaaccattacaaactagattgcctgttggtcaagctaatccaacgcgcgccgctacacatgttctttaggcagacttcactaatcacgagcttaaacacatc

SEQ ID NO: 72516 - DNA, 404 bp, Oryza sativa
  unsure (1)..(404): unsure at all n locations
tgtcgacaggagatcatccctttgcgacgcccatgttttgtattgtcgcccagntcagaccggagacacgggtgaaagactgagaaccgatgagagggtaagagggggtccggcccctcatgagcgattgaagatggaaagggatttagacaggttcgggccactgtgggagcgtaacaccctactcctgtatgtggttgatttgagtggaagaatactgttggggaggtatgtcatgagggccttcggccaacctgctgaaaccatcttggccgtcaaaacaacggctaagttcattggcccaagcctttgggcagagccattgggcgaagtcgaagcacaaagaccaaggggttcgccatcaagcattgagcgaagcctggcggcgaagatcgatgggttcg

SEQ ID NO: 72517 - DNA, 450 bp, Oryza sativa
  unsure (1)..(450): unsure at all n locations
agcttaggttattttaatgggctatnggactattgggtcactcggtctgaccctgtgctattatggagttcaggcacatcgggtactcaagcaagataaacgaacaagtgaaataaaaagatcagtctttgcacttttctgaccgaactatgaaccgatgaccgacatttcgggtacttcggtctcggttttttatgcccacccctaaagacaaacaaaagtggtggcgggttgtggtccttgtgtgcttttcaatgtctactgtntaaaggccagaggaggctttgaactttctttatatgacagcagattctgatacaatgaaaagaaggacggaatttcacgatggagttgacagtatcttcagtgaacataatagcaagagctggaacaggtagtgtaaatatcacggcactaaattgcaatagatactaagcatggtgacagtag

SEQ ID NO: 72518 - DNA, 305 bp, Oryza sativa
tgacttgctccaggatccctcacagcttttttttttttgacaaaccatttacaaacagttccactagaaatcttatctcggtgggggaaaagagagctaacgtgtcttccactgtctaacagttatcccgaaaagagtttagcagtattaccaaggagctcaggttttttgctaagcaacattaaaaacatgtttaagcataaacagttgtattataaacaatttaccaacctgtcacgctaacccgttgaaacagccacccccctgactacaccattattaactactcgggaactatcccggaa

SEQ ID NO: 72519 - DNA, 436 bp, Oryza sativa
  unsure (1)..(436): unsure at all n locations
agcttgttatctattatgggtagngatgaagagatgcaagaattagatagcttaacagaaatccattaataacaactagtataagttaccttcgcccatgacaactgtccgtctttcttcagcagtagcttgaagaagtgtgttaaggtcataagaagtgtacggtccatcggttaatctcccaggcctgcaatgcagctagtattgagtcataaaaatgtatccgctgtgagccatgaaaaggatttatgtgcacaataccttatgatggtgaaaggtatgcctgagttctggacaaagtcctctgccatcttcttgtacttaagcacaccaaacagattcatgatactgaaaaatgcatagcatgagtgaaggctaanattgtgacgcaatagaagttgaggaagcagacactatacttaatgaactanaattc

SEQ ID NO: 72520 - DNA, 406 bp, Oryza sativa
ttaatattcttaaactctttccgtagagggggtactggtttttgaagcaagccaagcatgccgcaataataataactaaatgtgtgaggcttacagttataaacaagaacaattttcgttccatagctaccaaaatcatgccatgaaggcacatgttcaattgcatgaactgaactgcattatgcctgcgactttaaggatcgtggggaacgacacctgaactgcacgaattggccaaatcagtgaccctatacaccaaagggcaaagagtaggggaagggaagagggagcacgaactgtagctacagcccgtgctttttgtgtcaatatgtctgtctccaccataatttcttcacatgttgctcgctgaagccactgttgtctctttgctatttgaagccaccac

SEQ ID NO: 72521 - DNA, 387 bp, Oryza sativa
agcttgatgttctgtacatcataacggaagtggaagaagatggacgtcttactgccccggccgaagccgccaagaactatgtacgtcacagcggttaggttgtgcgggataacgtgcctgtcagtacggtgtactggcgaagaacaagggcacgcggagatcatgagagctttgtcccagattcggagaaagagatgctgtggaccacaatgctcgagacattcacccttcctgcgggtacagaggacaaagtgaaaaggtggactctgaagaaaatggcagaacagtttcagaggttcaagggagatatgtaccagaagtatatactgaaggggcagacaccgaacttcgacacattcccaaagctaagggatcactgggacgagt

SEQ ID NO: 72522 - DNA, 400 bp, Oryza sativa
  unsure (1)..(400): unsure at all n locations
atactcaagcttcatgcagcanagagcgggaaggttcggtcagagttttcttttttgttaagatcaaggagagtctttccggagtttacctaaacccaatctttcctggaagaatagtttctttagctgctatgacgggtggtgtttgcttgggtgtaggggtatggtttgcatcattgtgggggatgcgaccatactaggttgtttgcttaagcaacctgaacaataaaagtgtacttacaacagatcagtaagcaagtgggataaggtcttatctttaacaacccctctcttccacctctctttcgccctggcagaaaatggtcactgtttgagagaagagcatcaacggtgtatgaaagtcacaaatcaatgctacagtcaatatgaataatgtact

SEQ ID NO: 72523 - DNA, 459 bp, Oryza sativa
  unsure (1)..(459): unsure at all n locations
agcttaacttctcnttattgactntntcactattntgaaatacgaaaaagatccaaatccaaaatgcaaaggtcgtcttattcaaaacctcaatcatcacatnccctctctcccacttcacacctcggaacgcactgttcttatagagagaaaggggctttcccatcttcttaacccgaaatgaaatggctgaggagagggaggttccttttgggggtacccccgggaagagatccagtggagacggtgtgggcctgtagctcagaggattagagcacgtggctacgaaccacggtgtcggnggttcgaatccctcctcgcccacagccttccaaaggggaagggcctttactttccccctgagggtaggaaaaccatgatcgggatagcggacgtaaagctattgaacttgngtatgctctntcctttngtcgaagtggaatcgtagaacagaatgtg

SEQ ID NO: 72524 - DNA, 411 bp, Oryza sativa
  unsure (1)..(411): unsure at all n locations
gacacataaaactaagcttctgaagaccttgacaagcagtacctttttattttngctcctataattggaaaatcattattattttgtttgcaacttgcattagtagaatcacacacttaacttgcttggcctcggtttgcgtgccaaaccgacggacctacccagtagtcgcactaattcctgtaggttgttctaccctgattccttgtcgttccacctttgtggtacttcggtatccgtgttctctgagtgtgtataccaactattccacatacaccgttgtttgtcgataatttgggaaatgggtttgagaagccttgaaaacccaacatgtggcgttggtgtgtntgaaaacaaaatagactgtgaaaactcgcgatgcgggggttgtgcctatgtggtactatcctg

SEQ ID NO: 72525 - DNA, 446 bp, Oryza sativa
  unsure (1)..(446): unsure at all n locations
agcttggtgtataacgaataanaatcagatatgaaaagaagctagatcatgttagacatatagagtaccaaaagccaatcaccacaagagatagacatccttgcgattggtaaagatcatcgagtgttgtaatatataccaacaaattntcgatgtcatctatgacagtggcaaaccaaatttcatttgaccactggaatttcctccttagatgattgaggaagtgccttcaagcataaatattccaagaaaatccaccggatcaacctagatatgtctagtagatccattggaaaaaaaataaagggaacgaggaagaggcagacacaatgtagtggtgtaggctntgggtgagagatgtattagttagtggttagtgataaagtgagatctaatgatgcatgaggtaactaataggaagacaaaaggcattgatctaacggttg

SEQ ID NO: 72526 - DNA, 390 bp, Oryza sativa
  unsure (1)..(390): unsure at all n locations
tcaccccaccaatgttccaccagcgcttgcttctttttttactccagtaatgtgcattttgttttgcaattaaatgttgcaacggaaattgttgtctcaagttgttgaacacctcatattgcttttcatcacagcttattagctaggcctagtggatttagcaatatcggtgtcaatctctgtagttaatgatgctgctttaaggtcttaccatgctctgctctattagccattatcatcaaattcaagacactgctgatgagtagagaggataatttgacctatcaaatggttctgtggtacagaattgatatttgcttgctgttgctgtgttaattgtgcatttctggtgttatgcttatggattgaactganatggatgcatttctg

SEQ ID NO: 72527 - DNA, 448 bp, Oryza sativa
  unsure (1)..(448): unsure at all n locations
agcttcttgcttggttatcctccgtcccaaaataagtgctattttgcattattctcattcaacgtttaaccgttcgtcttatttgaaatttttttatgattagtatttttattgctattagatgataaaatatgaatagtactttatgtgtgattaaatatttttaatttttttacaaaatttttaaataagacggatggtcaaacgttgagcacggatatccacggctgcacttattttggggactactgggctatttagcgacgggacaccggatggtaggctaacagcacagtacaggacctgtgattctgctgcttttggtgacctgctagtacgtactactacgcgtgagccatgtgagccagcgacctcngaaggatctccacagactcggagtccgttgtctttacggttacacatacagtatactnttttagttttcttc

SEQ ID NO: 72528 - DNA, 400 bp, Oryza sativa
  unsure (1)..(400): unsure at all n locations
tgtagctaccggatctagcagttgtcgagcttgttgttttcgtatctaaaagggcattgtcacgccccattttttgggaataaaaatcattaaataatgtatttctagaaattatattaaaagttaatgcaatttatcaagtgaagttaatgtgggaaataaaattttctttcaaaatcatggctggaaatatttttgtaatattctccatgccctgatatactctatgaaatntcccgtaaatttttggagctcaagaagtaatttcaataatacaaagttcattgaatcaattaaataaattgaaaacaaattagaatccttctttcattgtttccggccaaagtctactgttggtaattggtcacagataaatccgcaagtgtacggataccgctgt

SEQ ID NO: 72529 - DNA, 266 bp, Oryza sativa
agcttgttttgttctccatctaccaagacctatacgggactggtccttgaatctaaaaggacattccgttatcgaaacaacgcagagtttcatacggcaaccaccatgacctctccgatccgatccagacttggcttcctacctccacgtgcacaaggggacccctatgggtacaaacaccacactccctatgacgagaggtgacgacagacacgcaagctacaacaaaccaatatgccgtcagacatcgacatgacagactacct

SEQ ID NO: 72530 - DNA, 341 bp, Oryza sativa
tgggacatacaaggtgggagaaagtgggttgctattattttgttactcactcccagacaccaggtgatatacttcctttctgcatctgataaactgtgaacttctcatatgcccgactctgtttttcaaccagaatgactccagacatggccgggacgccgacactttatggcaaagcataaaaataatgtcggcccgcgcatagcacgttttatcattacacagcgtccaattttgcctcagaggacttaaatggaaagctgcctgaacaatgcacgagagcccaccttattgctatttaatcaaagctcaagaggaccaattgtccgaaacccccaact

SEQ ID NO: 72531 - DNA, 446 bp, Oryza sativa
  unsure (1)..(446): unsure at all n locations
agctttattactttctacatagctactatagatcttgtaaagagctgtgcttgaattctatagcagctatcattataagccggatcagacaaaacgaatgaacgaatgaatctaccgctatatactgcactagtcacttcaatactttatatttatcgtaatgttctattcttcgcttttgctgtactaacaaatgtacgttcttgtctccagtaaattaattgtggtgccgaaaaacggctttcagacgtcaggtgtaagccagtggaatccgttgacgaagctcttgccgaggaaggggcgcgcggcgaagtagtcgagctcccgcgcccacggcacgccgtgcaccgcgtcggcgccgggcccncagttcctgtacatcccgaagaacgccgtcctgcacgcatgcacgccgtcgacaacatttgcacaggcgttagctggat

SEQ ID NO: 72532 - DNA, 408 bp, Oryza sativa
tcctcatagtggcactttgacacgttcggtcatgtttatgattttattgatagtatcttcttttgaactgtaggcactcaccgaaggcctgcagaagttcttgggttggttcatgtttcatctcgtgtgcggcctgcggagtctttatgggccttagcctatgggggtccaatggctttacttccgttgactataagcaatgtgcagatggatagtcttgaacctatgcttggtgaattgtcgattgccactgcttctctttctgccccaattttcaggattatttccctggctattcagcatcctggaaataatgaagaattatgtcggacatgttcaccggagattttgtcacgtgttttacattaccaattacaagcatttccaaagatggaaggtggagagggg

SEQ ID NO: 72533 - DNA, 349 bp, Oryza sativa
tatcaactggaacaagtacatgcatgtacacatccaaccttttttcatcaagaggacacatacatcattgcttgctgccatatgcttcctctcctgcttacatcaccctttagcatcttcctctccccactgaaccccacaatttttgtgctttgcatcacttccctgaagcttcatatttgtctgtttgcttccatccactatgcatcatgcttagatcagtgtactcacatctactgttatgcagatgcctctattctagaattctattcagcattgcaataatgtggaaacttgaaaaaaaatgcaatgcaccctccattatgtcgttgacgtcagagggtcacca

SEQ ID NO: 72534 - DNA, 418 bp, Oryza sativa
aggacacataaaactaagcttgtaagaaccgatcgacatgaattcttgatcagatggagtattcgaacaaatatatatatatatatatgtatatatatatatgcatatccaaaaagaccgcatattaatactgttcaaatacaattagccctactataggcacccaaatcagtgctggttctgaaggccctaccagtaccggatttccaaccgtacgtgcattacccggtcagcagcactgtataaccgtatctgtgcaggttgtagtaccaacatagacaggactttgatgagacagtaaaaacagcatcaaacgggctcaattatgctgttgacggtcgttaaggacctatttcaaccatcaactatcttaatagataaaagcaactaagatttcttacacgtatactatttataa

SEQ ID NO: 72535 - DNA, 443 bp, Oryza sativa
  unsure (1)..(443): unsure at all n locations
tagctttctttatatcaaaaanaaataccaagttgataatgtaagctgtgaactatctagcactaacaaacaattacaaagaattaaaagtttataccttgaattgtgaaatatgatcattgtatatggaacatgtttgatgcagcaagctaaaaaaaatacagaattatgacaggttctgaacactaagcaggcaggaaatcaaactggtgaattatgaaatgtgagcaaaataagataaaggaacgcatgatatgaggttcttaacgattcactggtttatccatataatggccaaccacacacaacacaagtaactatgactccacaatcaaaaataacatgcacactctggacggacacatatagtcacaacagaaattgatccactccaattaanacacaagagaacttatttgggtctcaaacgtttccaaacagca

SEQ ID NO: 72536 - DNA, 398 bp, Oryza sativa
  unsure (1)..(398): unsure at all n locations
cttaaccacgctcttacaaggtcttaccaaagcattctgaatggngatgtacaccgactcaacctagcaccccaatggagtttggatgtatcgatgccttggcaaacacttgctgtacggctgcaatcaaatctgtggagctctaggtaggcttaaatatgtagcaaaggaatagcaaatgctcaaatcagataatgcaaagttaaataattgttcaaagtcaagtactgtgctggtcctaggctagaacgtactaaagacgcgagcctagacacaaacgatatcacaagagagcactaggaacaactcatgcacaactctgatatatgaagttcagctcacacataacaatattttctcttttctttctttctattttcctttttttctttcctttc

SEQ ID NO: 72537 - DNA, 440 bp, Oryza sativa
  unsure (1)..(440): unsure at all n locations
agnctgacttgtttcttcttattcgcccggctaccttctctagctccaataaccccgttgatgccttggactaggtgcatgccgttgggaaaaagttggacaccgtccaatgcaatgatgaggagaaagttatcttcacaacccatcaactgcaagggcccgcatcactatggtgggaccacttncaggctacgcagccagaaggacagccaatcacctgtgcccgcttcaccgccgctttccgaaggacccatgtgccagctggagtcatggcccttaagaagaggtgaatttgggaattgaagcaaggcaaccgctctgttatggagcatttgcatgtcacgcccggaaattcactagtaatttccgaacttatttgtgcataanaccctcgtccaggaatcagccgagatacacaaactgacaatttaatatacaaa

SEQ ID NO: 72538 - DNA, 408 bp, Oryza sativa
  unsure (1)..(408): unsure at all n locations
gaaactcagcttacttgtcccgcatccctttcgtaaggccctgtcttttacggccttttggggaatcgcccggggaggcagttcgccattgtaaacccgggtcgcccgcctagccgcttgacgcgttaacagctgactatactcgacgaccgaaacatcgccgatcatcctgcgggcttcggcttcggcctggtcgagggtcaacactgaaaaattagagcgtgaagctacgtcaaaagtcaaataaggcgaaataacaaagcacagtagtatatagcaaaagaacagtcttactgtttgcccccttagggagtatcaggttcggcaaaccgtcgacttcttcgccttggtcaaccgcgacttgccatgactgggagaggggaaaaatttgaagcatacaaaantcct

SEQ ID NO: 72539 - DNA, 79 bp, Oryza sativa
gggtctaggtggtacctcttgttactcgcctggctgtgtatttaagaaggggcttcgctataaaatgacgttcttcttt

SEQ ID NO: 72540 - DNA, 406 bp, Oryza sativa
tcaatgacttcatcaataattggatcatgcaactctctttatattcttccaatcaacccactgcataagaatagcccccttcttaagtgcaatcactgtctcatagtaatcctgctgaaaaaggttccaaaaccgaggatcggtggacaactggtgaaatttgtagggatctttcttacgctctttctccaattcagtccacttgcggttccaccttatgactctccgatgataattaggatctctagagggagcagtgataaagaaaggcccttcttcctgagcggcttgctgagcggcaatgtcctcttctaactgaatctctttctcaaaggatggtgcatgagaaccactaccttgaccaggctcagaagaatccgtaggattgcctctccttactttgcta

SEQ ID NO: 72541 - DNA, 201 bp, Oryza sativa
agcaacatatttttgtcgtttgagataagactatctacgggcggtactagcgcgccctggctgtgaaaaaaatatcaacaaaaataataaaaaaaaaagtcgcgcctctcttctcagcactagagagagcaagcaaaaaaaaaaaagaggatccagagagcacaccccaccatacctccttggccaccaccttccaccacc

SEQ ID NO: 72542 - DNA, 370 bp, Oryza sativa
acactttcttgtttccaaagaaactgcagagatcagaacatccactatccctttgggaatggaacaacccatcgctctaggcacgcccaaaaccagctcaaatgcgacaataccacaccaccaccaaggctgttattcaagaaaggcacccccgagaacaaagactctcccagaactggaaagaaatacgaccaaccataaatccgaattcagatatacgaccaactagtaatccgatttcaatttgagatgatggtaccagttgaactgcggggatattacgtcgaaaatttaatattcaacaaataatataaagatgaatggtgatatctcggaccaaagagggggcaaggcgctagacttgttggca

SEQ ID NO: 72543 - DNA, 353 bp, Oryza sativa
  unsure (1)..(353): unsure at all n locations
agctngtctttctcatttgccaccggcaggactcgaccgacacatgccttcacgactgaccaggaggaggcgtttgtcgtcgcccaactagacacatgcctggaacacctcctttggtgccttctagcatcgactcttgccaagcctacactaaaccttggctcatgcggggatgcattcaactatcccatgcaccgtgggggaactactccttgtctatgagcattaaggagtgtggtgcgcttgttcatcttgcgctcaatttcggtaccagatgcgccctgctatatcaccaccgatctgatgtcgtcggcgactgacatatctaccgccactgtcattttcactgattg

SEQ ID NO: 72544 - DNA, 154 bp, Oryza sativa
ctgtagcgatatgggggaagagggcagtacatcccatgttgtattattcaacagaatgaactgttatcacgcgggcgcaagaacttatcgaacatgtctggaaacagttcactgtcttgcacgctgtctggaatcccccaggcaaaaacatatg

SEQ ID NO: 72545 - DNA, 421 bp, Oryza sativa
  unsure (1)..(421): unsure at all n locations
ctataaatactaagcttgcttgcctcatttaaaaactgagcatgtcttgtagttttataatcaaacgataaagatgtaccattcaagctttgctgagcatcaagagcctggtgtggcataatcatgcgaactgaaactggcccagatgtcataagtggcggaactcgagcaaaatttgcagcgagtgtaattggctcattttcaactaatattgcccaaataagatccaggccttgcttcaaccagaaaacatcactcactgcttcccagtcctgggtctgtattataaactgcaatctaacaaataatgtttttccgacatagtcatggtaaagnttgaagaatcgcttcctcatttctgggtctttagctctaagtccaagcctgtattgcctctccaccttatgaaaatactcttgcc

SEQ ID NO: 72546 - DNA, 406 bp, Oryza sativa
aacttagcttttaacgtgcgaggttggggaacttttttattattataccctcttacctcttaacgagacaaaatttcaattctaaagtactcttacgtctaaaatttaaaaaccctaatactagattgaacacttaatccggtgctataaatctagataattcgaagtaccatatgatgtctaattagttctacgtaattggggtagctaatttattcatttgcacacccttgaatattatctcaaaaaccagataatccataatcgattcagagctgattcctttgtaaatttgactactatttcctattgatcacatatgttacaaatttccaagctaagactttgttggttagatgcgattggagagctcccagatggagtcaactttatcagattgcccctg

SEQ ID NO: 72547 - DNA, 438 bp, Oryza sativa
  unsure (1)..(438): unsure at all n locations
agcttgttacttagtgtttgccatacaaatccctgtaaaggcgtaaggcaacaaatgtgacaaaaatataacctgggagtttgttgtccacgaagaatacgactaaattaacggtatacctgcatgggaaaagtatgtgaaaagagaggtagtggccacattatgacaataacaagcaaggagctaaacttatcataccaagcaacaacaacatccacagagtagtgtttgcgagaagcaattataagaagactctgaactatggccatgaaccaagcaagaagcttaacaaacctgtaacaaaaggtccaccagttaaattttagtgttcaggaatacactcaggcaaagttaatattcaggggtctcagaacttggtaatgttcaaaccagaaaacattggtaagaacataccnttttgaaccatatttgtggtat

SEQ ID NO: 72548 - DNA, 403 bp, Oryza sativa
tcattcttataatcatcacactctacattacatcattatattataattaatgatatgataataagtttgacgaacagtataaaccaaattcaacaatacttcaaaatcgataagttgagaagatcaaaattcagcaaaggatacataccatgtcctaaggcttccgatgggttgagctggctagatcgccggggcactttcaaaattttaacagaaattaacatacgaacaggtttctgacaaaacggtcagaaaaaccttcattccatttcctgatttccactattattttcagaagatattactattctcattttcaacactcacaattatttaatactaccggctaaaactatgggcgcaaaccggaaacggcatccgaaaatctcaaaaattgtttagt

SEQ ID NO: 72549 - DNA, 451 bp, Oryza sativa
  unsure (1)..(451): unsure at all n locations
gcaattcagctcgcacccgggatccttaagtcacctgcagctgcagctttatttctttattaatcaaagattcatattgattattgaaccccatctagaccattttgtctgctgaagggcaatatatattttattttctatataactcttttcctgaaaataatattgtgcttcacattgaacaaccaatctacactgttgtacaattagatggtgatgacctncagctcactcatgtgttggtctctgatggaccagccattgntgcatgcttgcatttgcatgcattcatggaccacttcactagctgtagttagtacaaacatacaagaatgcattcatgagctgtgtcactgtgcctatgtggccacatagcaggatagcgtaatcttcactgatgctgatggtgagtgctgacagtaagtacgacacttccattatatgctgatct

SEQ ID NO: 72550 - DNA, 368 bp, Oryza sativa
ttacctgtgcatgcatacagactttattttttctaatacgagaaacttggcttattttttgtcacactgcaaacagcatgtattctgtaatctttttctcatcagctattaaattctaccgcgcacttcatagcaaagacccagccttgccggttgctgcaacgacactgaacacaacaagaacactgcccagcaaaatttctactagaatttcaccaaattccaatgacaaaagtgaagaaatctgtagaacaaaatcacgctattccaggaagaattgcaaatcaactcccttttgatcagtggccgctgttcacgacagcgcagttcctcctgatctccccatcggagcctgtcttgacctgcac

SEQ ID NO: 72551 - DNA, 428 bp, Oryza sativa
  unsure (1)..(428): unsure at all n locations
agcttggtattatggatgaatggcaacgacggcggcggctcgagaagtgcccacggaagcggtgaatanggaatgttgtgaagcttaccgcactcagtggaggcaagatagatgtggcctcaaccggtctccacccgcacaacctgttactgcttctaccgcccagggcttccacgacctgtttgttcgcttggtggcagttgagggaggtcatcggtcttgcgcccaacgaattgccacctcgtctcgccacctctttccgatggttatgatgccatgccactattgcacggtgcctttgaggccgactctagaattggatgatgatgagcgggagccaacaaggacgatggtggctcgacgcgcaagaagtgcactcctccaggagctctcacgttcctctatggatagagtactctatatatatg

SEQ ID NO: 72552 - DNA, 278 bp, Oryza sativa
gcttacaccattgaattccttcacaccgcattggtctagtggcccacggaatggggattactttgctgcgggcccagagatggcaagccatactgttttaattcaacacttgtcacaatgaccaagagagggactttacaaatactttggtagatgaaaggactgttagtcgccatatacgggacgttggaggtcaagccaagacgatcctcttggatgaggatttgcaagaatgggtaatgaactatgcccaacctaaatctcaatgtgatgtctat

SEQ ID NO: 72553 - DNA, 395 bp, Oryza sativa
  unsure (1)..(395): unsure at all n locations
tctttctggtttttttgctagacgaatcttttgagtctaattacgccataattttgacaatgtgatgctacagtaaacttttgataattatgaattaattaggcttaaaaaatcgtctcgcggattagctctcatttataaaattagttttttattaatctatgtttaatactctaaattagcgcacaaacatctgatgtgactggngctaanaagttttagcccatctaaacactacataacgttgttaagttaacattgcacttcgagttccgattcagtaaggaatgaatgcaaagcacgaacgacacgagcaacaagaacaaatatttatgtatttgctgcttctttcttttgtcactcaactctcccctttcttctgccactaatttaca

SEQ ID NO: 72554 - DNA, 399 bp, Oryza sativa
tcctggaactgtacctggacctcgctctgctgtgtctgtcaccaccggttggagatggagaagacgcgcgcattctcttgctgctgcggggatcctcggcgtaatcactagagcggtgatcctcgacgtaatcaatggagcgcctatggtccctcctgtcagagcttgacctgctggtcttgtaactgggatcggtgccatgagaagagctcagacgctggttacgctctgatgatcgagactgattggcaggttcaggttctttgggcttcgccgccagccttggacgtgcagcgtcttcgtttgcccagtgaatcatagattgagtttcccagctgaagatgacgaataaacgaacttgtaagtgttgaaatggaaagaggggttctacatgactga

SEQ ID NO: 72555 - DNA, 325 bp, Oryza sativa
atcttctcttctgtataacatttgaaacaaggactagttacttttggacaatgaaaccggactctactaagccaccaatacatcttacaggccgattgatgaaccatactgatccgttgatgtactactctcctagctactatagatagatcatgatctaagtcatactccatgtgtttttacgccatataatatctgagcgcttggacacgaatgttatgatctctcttaagcgtaggaacattcagatatctaatcacatgagatctcgcatctacctctaactcatggacacgaaagtcctaattcacaattaactgagaca

SEQ ID NO: 72556 - DNA, 442 bp, Oryza sativa
  unsure (1)..(442): unsure at all n locations
tctgtctntggataagaagtcttaagtggagtcctggcttataccccagttgagcgcctgtgaagatggagccgtatgcccgctagtccgctgctgtttatttttgtttgtcaggcctgaagtgcctttgtaataatgtaaatattatcgatataataaagatgtgtcttttatatcatgtttgtgtggtgtaccccggcttttcctgagacggngattaatacactggcgttcgggaaaaggcaatattcccggtcgtgacaagctggtatcagagccatctcgactgtaggataagccaagtggataaaacctaaggacatattntataaataaaactatttgcgaaagntcctcnttttcttcttcccctaatgctatttgcaaaagggttactccttttcttcttcttcaaatttcaactagtactagatggttagtt

SEQ ID NO: 72557 - DNA, 331 bp, Oryza sativa
tcatatgagctttctgttgatagccttggagtgatgcctagcatgatatctttaccattcgagccattctatcaagctaggctaagtggcaccaccatatcatataatagataatggagcagtgcaaccaataaacatggaatttctggcaactgaaatcatattaaataatctgaagtaaagaagattctcttatagaagtgaggcataattgcatatgatcattagaatataatcaggcttttgttaaccgtgccgtggtaaagaagatgaatggtgtcctgcaagatgaatcttcctgctgatactgtgagtacccctttcacgatag

SEQ ID NO: 72558 - DNA, 445 bp, Oryza sativa
  unsure (1)..(445): unsure at all n locations
agcttctgatgctgtctaaataggattcgccaccctgcaaaagatcctaaagttaatatatctctcgaagtgaacagtaatttaaacagtaaactgaatagtgtttttgaatagtaatcagccgaataaacagtaaactgaatagtattcagccgaataaatagtgtttttgaacagtgtatattgtctgaagtataagtgtggtatatatatatatatatatatacactgcatactacagtaactcgaagcattgtagcaccatatactccattccaatttcttccaatctacttcgcgaacaccgacgcttacacgcacacctcgtaaagcccattgcagagatctctctcacacggtgtncatccaccgtatgtcatctcgtatccaacttcgtcacccgccatccttggatcgttggaccacaactcctccctgagtgtag

SEQ ID NO: 72559 - DNA, 354 bp, Oryza sativa
  unsure (1)..(354): unsure at all n locations
tctacgaagtaaggggaagcctgacacaaagaagataccttcccaaaaagaaacacatgaagaaaaaagaggtaagtctgatacgcgggccctcctactttatgtgccagccaccaccatatatgatggcacataaaaccacaaattttgtttctacttaactggtggaacaatatattctgtttcaacaacttanggtgtggtctatattatatttgcggtttgagggaataaatcagatgaacataaatatagttttggaacgaaatcacacattttcctatttcacaaataaacaatacatatatacatatactggagtggcatatatcaatatgatatctcataaacgca

SEQ ID NO: 72560 - DNA, 408 bp, Oryza sativa
  unsure (1)..(408): unsure at all n locations
agcttggtatttcttctgtgaacatgatggcttaattgcttctaaagtttacattgaaatttgatttctttcgcatgcacacttggctccgcataggctgaggtcaatcaattcaatataaaattgcagctgcttggtctctttgatttgcatgcaacgcttttggtttgcatgcaggcatgttgatgcagcagtaaatggacaccttggtcttgctgccaagagctaatacattgatcaaatgtgaaccgaggttgtatcaattaactggatttacatggtagaaataaacacatatttttctacataggacattgtagtggtgtaatgtaaaaatagttctctgcttcagcttgctctgcccttttgccattntagttntcttaaatatcttttggttctagtccc

SEQ ID NO: 72561 - DNA, 408 bp, Oryza sativa
tgtgctctgataccatctcttgtcacgccccgaactatttttgtcctgaactagcccgtgacgctccaaattaacctgttaatcgataccagtcccaggacacaatgctggtattacaggaagacagattatcacagccacagaggtctctttattatagagtaaaagtacagtcatgttgggctgcggacagatcccgagctcacaactgcattacaaaagggaaacggaagccatgactaggaccaaacaacacatgcgcgacttgggaactaagccgaaaccctaaaacttatcatagccggcttgctcctggaagaactcctcatcagcaggatctcgcttattctttttagcaactgggaggggatatattatataaagcaagggtgagtacgggagtactca

SEQ ID NO: 72562 - DNA, 151 bp, Oryza sativa
  unsure (1)..(151): unsure at all n locations
gaattatcattacattcagcgattatgcgcatattttcaataattcatgtagtctaaacaggggtctaaggtcacncatccttgtgttagaggagtgtcgcgacgcactggcggtcatgacagaaacgctgtgggccaatcagcctagaga

SEQ ID NO: 72563 - DNA, 436 bp, Oryza sativa
  unsure (1)..(436): unsure at all n locations
attcttgatagagtacgagagagctcgctngaggtgtgtgtngaaatggaggataagagcgccttttatagcttcctaatgatgaatgtgaccgttggaatggtcggaaataccctccaaccatcatttggggctaatccacaccgttcaggtaaagccctggatcggatggcgctgagcangattcggtcgaaccggcctgcccaaccagcgtatgttttggctggcggcttccgctcttgcttccatatgtagacttgtgaatattggcccaattggttgtgtcatttctgagttnttggcccattcattgataagtctgattctcaacatcgtccgattgattgatcacttgtttcgatgtcaattctcctcaattntatgtatattctctgcaagaaggtaacaatccagtactagtggaatattattattt

SEQ ID NO: 72564 - DNA, 399 bp, Oryza sativa
tatctcttacgctccaggaatggatcatttataatattatcaccggctcgcatcgaccgccgccgactggtgtttccgactgcacggctggcctttatgccgccgttgttgggcgtctacgtcttcaccgaccggcttgccttcgccgctgccgactggtgtttccgcctgcacggctggcctttatgccgccgttgttgggcgtctacgtcttcaccgaccggcttgccttcgccgccgccgactggtgtttccgcctgcacggctggcctttatgccgccgttgttgggcgtctacgtcttcaccgaccggccgcctcgtctgccgccgactggtgcttccgcctgcacggctggcctattatgctcgccgtgttgggcgtctacgtcttcaccgac

SEQ ID NO: 72565 - DNA, 453 bp, Oryza sativa
  unsure (1)..(453): unsure at all n locations
agcttctgtattagcttggctagcattatcttgaaaccggttgaggagttcttgcatccgtcatccgatatataggcgctgtcacgagcatgtccaacaagatcgccgccgagataagccttgcaggcatccagaatgtgcggcgcgcaacaagtgaagtgctccttgacaaaattctcgaaatgctagatcaaggaaaagaaagaactatcagtatacacatcttatttcttaaaggggtgactcttacagctgacttggttatatataagattaaacatactaaactcttgtgagatccagtaattcacatgaagcattacaaactaaagctatagcattcttaattctgaacagcgtttagaatttggtttcacaagattccaaacttctttgaactataccaatcattctgaaacatggatgtgtaanaatggtattttcaaaattatc

SEQ ID NO: 72566 - DNA, 412 bp, Oryza sativa
  unsure (1)..(412): unsure at all n locations
gacctataaaactcagcttgactacggatcctcatccgaccccttctttcttgcatgggcctctntttatactctaaggggataccacatgtgctgcgagtgctacctagggagaagggaaaatattctctatattaattacatgtctttgccttagcccagaagctatctgcacgttgattgctacacggggcccatcaaatcatgcagggcgcccttgtcattcgccatttaatggatgaggacttccgggttctcgttcacaccagaaaacgggaacccgggtcagttcagagtggttggaccagctctgaccggggtaagaggctgtgaagccccttatcattatgatgagacgggatggagcacgccgctcgccgcctgacacaatgacagggcggtggtacacagt

SEQ ID NO: 72567 - DNA, 401 bp, Oryza sativa
agcttatagttcatagggccggcgatcgcccgatggcccatcaagagcccatgagcccccctttacgttatgtaaccctgtaaacgtccctttcataagggcaactatgtaaattcctcagtacaacctagaccctagaagtgagaatctgtaacggggctataaatagccccctagggccatgtaatacaggggagaaaattcaagaaatcaatatacttcgtttctttccaaccactgttaagtaaccacgtctttcgacgtatgcggttgtcgtttcgataacagctggcgccgaccgtggggacctccgagcgaaaccactgagagcgaatgccaccgaagaaggtcgtgaaggagaaggttacaaggcgaaaggaaagcgacgccggtgcggacat

SEQ ID NO: 72568 - DNA, 406 bp, Oryza sativa
tcgtctaccgctgcgcacagtgcggcttcgacgcttacccactgggcacgctgctcccgcagacgatccgtaacccgcttcacccgcaacatgatctcaacatggccccttcatgggggacatgctcaacgtgtcatcaaagcctgaacatgtggcactaccgctggggattttgcctctataagctgcacgtcgtgtgcccctctggcgcggcaaacgctggccaaagtgacaccagccgttctcacaacgctggtgctggtgctgctgctgctacgccgggctcgagccgcgccactcgtatcgccaagttcctcctcaggacaagtctcaacatcgcgatcaacgcagcaaccggcgcgctggcaacaccggtgctcgatgtccttgccacggccttggatga

SEQ ID NO: 72569 - DNA, 437 bp, Oryza sativa
gctttacttaatgagcagcgggctcgcctgcatcagactgtggtcagtgcgaccggcgtctactagctagctttgtcatcgatggccgtctagctcctcctctgcgagctacgttctgttgccgcagaccgagccgatctctggctgagtcgagaactacccctgctcctgctcgagcttgtgctaatccgtcgtcttctgctcacaggcgtggaggccgaagagctttaaccttgggattgacatgctaatgactgcgaagatgggcagctagcagcacaaagtactagcttgccgagattagtaaggcagcgtatgtttggagtacattgatggagaaagcaccccgttttccgcacgcacgcttactatactactaaacggtgcagtgttaacatagatttctataggaaagttgctttaaaacatcatattaa

SEQ ID NO: 72570 - DNA, 401 bp, Oryza sativa
  unsure (1)..(401): unsure at all n locations
tgagctttctcttatacatacgaagtagnaataaatagtgtattagttctcaattctcatgaatcctagctagacagtgacatgcacaaaagcacgacttttacattttccaaaagtgggcaatggtaacgcattggagacttgatcaggtccgggtcgattgctttggaaccatttacagcagggagcacgtactcccgcgttcgcaaaattggagcgcgacacgcgccagcctttcattcagcacggctcgttccaccccccccccccccccctgtcccgctgcacgtacggccgcggctgcacgacctgacccggcccgcgcgccgtgcagtggcgcggcgcaaatagcgtacgctcgcttgctgccatgcaccctctcgcctcgcgcgtgctcacat

SEQ ID NO: 72571 - DNA, 414 bp, Oryza sativa
  unsure (1)..(414): unsure at all n locations
agcttgtgacttgatcgaagtttgtggtttgaacgatatgtccaaagacatcaattctaaggcccacttcgcaatccgtccgtttgcttcgcattatgaagtatatccccgagtggaaacgatgtgaccaccgtgaccgagtgactttgaaagtagtgagataatttcctgatggtaattaagacaccatataataacttttgaacctgaggataccttgtcttggagttggctaaaacctcactgacaaaataaattggtcgttggactttntgaatatggccttcctcttcacgctcgacaaccaggaccgtactcacaacctgggaggtcgctgacacatataacagtagcggctcttgcggatgtggcgaggccaaaactggtggagtggtgaggagtttcttgaagtct

SEQ ID NO: 72572 - DNA, 402 bp, Oryza sativa
tctcaaagctggtttcatcagagaggtactccatctatagtggctagccaacccagtcatggtgcggaaggccaacgggaaatggagaatgtgtgtcgatttcaccgacctcaacaaggcgtgtcccaaggatcacttccctcttcctcgaatagaccaactggtggactcaacagccggttgtgagttgttgagctttctcgacgcttactccggctaccaccaaatcaacatggcgaaagaggacgaggagaagacagcattcttcacgccgttcggggtattctgctacgttaagatgccgatcggactaataaccgcaggaaacactttccaacgcacggtctagggcgcacttagcggccaactcggaaacaatgtcgaggcctacgtcgacaacat

SEQ ID NO: 72573 - DNA, 441 bp, Oryza sativa
  unsure (1)..(441): unsure at all n locations
agcttcatgagcatctcgaatgcctctcaggcatacaaatttctcaggcttggtgctcagggtagcaaccaaacagaccctctgtgttctcacagctagctcaatcagatcatcaagccatcattatgattatttctgttaaatatcgaactgcatacataaaccaatagaatgtcggattgggggttttctcttattagaactccattgattcgcaggataggaaaaatatatgaattgaaatggtatgattctccaattccacaagaatataaaaaacacaggaaagaagataggaactatttgatagtgccatatgaaaaacaaatgaaagtttacaaagagctcatactctcttacntgtttttcctatgaaatgcgaaacatagtaatgcaattctatgtaaagtntcctttctttccctacanatcaaagtgaca

SEQ ID NO: 72574 - DNA, 403 bp, Oryza sativa
tcagcttgatccaaagtgtacggaaatgaatctctttagttctaatggagtagagcaaaaccttgtatcattaaatgaagcagttaccaaaaccggtgggtagcatatgtcaggagataaattgtcataaggagaataactacgaatagtatcaaattcagtggagatattagggtcaccaaattcttcataatccaagatggttagaggcaaagtagaatccatcattgtattgcagatatcaagaaaagggacctgtttacaaaatcatgttactaataatgtatgaaagaccagacacataatttactagcagaaatgaacatcgtagagacaataaaggcataatgaaattccattaccgcttgaattatttactgtagtccaggaagtttcttctctt

SEQ ID NO: 72575 - DNA, 373 bp, Oryza sativa
agcttacctactccttcaaggccaacatgacctgttatgttggatgccatattcttcagttctgcatgcagcgccatcgcaattgtggactagctaatgtgcagctttaccagcctctgttcaaaactgtgtggtagctggagtctatgctttgactagcaggccagatgaacacacctaacccgtctctctgcggtgtgctgctgaactgccgctatctgtacagaatcagatatgatagcccatctaccttaacagtcactagttgtagaactattaagcttgctatatggatttgcaggttattagtactatttgatagtaccttttgttctagaaggaagacttgattagcttctgtgccatgatccgc

SEQ ID NO: 72576 - DNA, 378 bp, Oryza sativa
tatattcactggcactgcaatatccttggatgattttatcagctattccttgtcaggaaagtaagaatgtgatgattaacatttatgacaagttctggctataggaagtgctgtgcacagattgcctaaaaatgaacaattacgctgcgattcttttaaaacatcaattgttagtaccttagaagggctgtttcagtcatgctgtataatatgaccttgcataatatgctactcgaataatatgtttcatatgtgcagatcattcgcggtgtatttttgtgtacactagctttggcattgaccattcttttgggttggcatgtgtatctgatctttcataataaaactactattgctggttgagaaattaataccctt

SEQ ID NO: 72577 - DNA, 383 bp, Oryza sativa
  unsure (1)..(383): unsure at all n locations
ttattatatgcttacatatatttctaagggctgggctcttatagaagatgtacgacactgangttatgatnaaatgggtcacacgagtagaaagttatataggcgaaatagctntcttaaagacaagctaataaacaagttcttctaatataaacaaagtagtgtaggaagcgtgtctatgttaatcanatccataatataatctcgtagcttataaaaatcatgaaccaataaaattcatgccatttagaactaattaatcanatccaaatttgtctcgccaaatttatgacggtcagggaggagggaaatntaaagataccggcgaggacacattataatgtgaatcatacacaacanaatggtgaccttgatatacatgt

SEQ ID NO: 72578 - DNA, 430 bp, Oryza sativa
  unsure (1)..(430): unsure at all n locations
tactaagcttgtcgagcctattatagaataaattcatcgatatgtgtattcttaaaataacagacaacttctaaaaccaccagtagtacgcgccgcgggaggatgtgcttaactaccgagattgcatgtgnatcgatcccgttaagattcccgagccctcattagttgggtattntaggtcatcacaccgtgaatccaaaccttgatgaaggctccatcagcaaagaaattgctagtttaattttgttgtacgacacaagaacaagtggtcgatcgattagattattagcacacatatcagagacaatgaaccaagagtgtagtacgtacgtagtacacctcatattgacccggcgatgttnttgtggtactagtactgcatcccattaaatttgccacttgctcatatacaaattaaagattaattaac

SEQ ID NO: 72579 - DNA, 411 bp, Oryza sativa
  unsure (1)..(411): unsure at all n locations
agcttgagctcattctcaatcttctcctcggcatagccatttctgagccttggatcaactgtttccatgattgaaccgctgcgccaatagtcgagcacccaatcgacaagcaccatatgagcttcctgctcaacaggcctacgcccacatgtaacctcgagaatgaatgcgccaaatgcgaatacatctgtatatggtgtagctttggcgcggtgtccaagctcaagagctaggtaacccattgtgccaactacatgagtggtgtntggttcagtaccatggtcatataatcttgcaaggcaaaatcgccaaccgaccgtcatctagcatcgagcagacgtgctggcttgatgtctcgggatgacacttctccaatctcgggaggacaacaaactgatcaccctttgatat

SEQ ID NO: 72580 - DNA, 503 bp, Oryza sativa
  unsure (1)..(503): unsure at all n locations
tctttcttttcagaaattttatccatattaagtaagaacgaagtcatgatcatccaagctcataataataaccttccgcgggaacactaacaagcagtcagcagccaccaaccaggttgaccattgctgactgctggttaaggaaatccctgcagagactggtgtttcaaacttcagatagtttacacttcagagttggccaaaaccaaaaaatgttccaaattacaccaattcaggtttagcatattattattacacattgatattcatatggtactcagcactacccaaaaaattacgattaaagtttacaccaccttgcatgagattgtcttacctcatctacttgggaacttatctttgacgcgctgtctttcttcagctcctttntcctctttgccctcagctcttctgaaattttaacacgtaagtcatcagatttgctgaccgtgcccttatattcattgaacaattacaagtaaatagatgaataatatgtatac

SEQ ID NO: 72581 - DNA, 433 bp, Oryza sativa
  unsure (1)..(433): unsure at all n locations
agcttcatgctgtgttcgtacagttaaaaaatgaacaataaatattagtaaacaaacttaagttcactataaggatagagaactattaataactaagagatggtgttaacaacggaatttcgcatcagattcagagaagaaggaagaagatcaaagtagttctgatgtggaatcgagttgaatttggagtcagactgcacatcggctggacaccatatcggcaggaaataaagtgtgagttgatcaaggttgatgtatccgatggtcgatacagtcgatatagtatgacttgggctcagtctgggcctatattagaataactgtcattgccaattagagagagagctcgattaaggaaattgtatctttagttacatcagtttgtgttagatttggcaagagaccagccgatatgggtnntgtngtattttat

SEQ ID NO: 72582 - DNA, 462 bp, Oryza sativa
  unsure (1)..(462): unsure at all n locations
tactatgtaccatgggtcatagtaatacttatacttattcaaaanaacacaccgtatagcagtttgaaaagcgtgcgcatagaanacgagagagatgatgttctacaactttaacttataaatataagattntctaaaatttattctatatttaaagagagacgggatcttatagagtaaatttcacaaaactacagatactttgattaaattatcacaaaactacagatttaagaatgtatttcacaaaactacagatntagagtcaaatttatcacggaactacagattaagatattatatcacaaaactattgatttaacaactattttatcacaaaactacacattttaaaactattttatcataaaactacatattnttataactntaaataaataatagtgctatgatcntaaactctagaatatgtagtctttgattacttcatcacctaatcta

SEQ ID NO: 72583 - DNA, 468 bp, Oryza sativa
  unsure (1)..(468): unsure at all n locations
agcttcaatatctatatctttgcatctcacacatggntcattacttgngacaattttggaacaagatggctcactaggaaaagagacanctatttttaaggtttcgaacttctcttcaagagagaggtaggctttgtccaagccatccactctatcttgaagttgagcgttcgccacctcaagattagcatgagactctttggtttacttgtaaagccgtaccaaagcctcatttttttctctctccttagcaagctcactcttgagttcatgagaccgctctttctcacgaatgagcaaagccttttgcctctcaagagttgcatattggtcctcaattctcccaagcaactcactcaagtgtggtagggattccttagttatggacttgaacaattcgtcatccataacttcatcctcaacctcatccttctcatcactaacaagatcaacattaaatgacttgag

SEQ ID NO: 72584 - DNA, 190 bp, Oryza sativa
  unsure (1)..(190): unsure at all n locations
tgtccttctcctgcagccgcagtggcgcaagacgggctggtctattctttatacacctcgcgtgcgcggagcctattcgcgagacaagcgggaagaggaccgatggggcggaaagagatagaggagtantacctccgtggagatgtcgatctgcgcgtagtcgtcgcttaccgtcggcatcctaaccaac

SEQ ID NO: 72585 - DNA, 395 bp, Oryza sativa
ctatacagtatgcattgcatgacagtccgaacaatgtaacaaggtttgctagttaccataattctctatacgacttcaacatggttcgcaaaacataatagtgcgttacaacaataatagacatacgaggtcaacccgagctattaaatcgtcgagtgacgatctcctcctgcgagctctatgaatatcgatgttgtagcccacacatggcactaatatccatagtcataatcctctcttgttctaacattattttcaaagctatctgcttggtcttcaattctaattctttgctcgtcatctcaagatgttgtgactcgcttgcaaccttcgcttgatcgaatgcaaccatctctttgtctaggagatgtgaatgatatatctctcatgtatct

SEQ ID NO: 72586 - DNA, 407 bp, Oryza sativa
  unsure (1)..(407): unsure at all n locations
catgcgtgggacattaattagcaatatttcatttgacgaggggcctacatggtgattgaatgggctacagtcagaaaataaaagaagaaagtcaacccatatgttagtcttttagaanaaatagaaatgacagcgaaataccctcgttgagggctgactgtcagtccctttctcttctttctcttgccctctctcatctcatcttcctttacttttgggttgtggccaatcattgaaaaatatagtttcttcctcttgtttgaacaaccattataaaaatattttntttcaataacttcagtaaataaatcttatattactgaaaaaatatataactttattgttcaataaccactataaaaaattattattattctgataattaaaattaattcagatatatattt

SEQ ID NO: 72587 - DNA, 365 bp, Oryza sativa
  unsure (1)..(365): unsure at all n locations
ccaaaaacaagctaatgtcgtgccgtatgagcaatggtgactggcgagccataccatggcgttggcacggaagaatgagttgatgattgacattatttatcagcgcatatggcgagctcgctacatcacaataatagtgagagagatcgggctactcggtctggactctggagtgatgggttcgacttgactctttgatgatgatgacctgtaaaataacagaagtacttaactattgaaatataaacacttttgatattatntaactgaaccgataacttttattgttcaaataaaagtggctgctttgagtacttaaaatgctaataatattaactctggatgcttaaagtcatatttacata

SEQ ID NO: 72588 - DNA, 326 bp, Oryza sativa
  unsure (1)..(326): unsure at all n locations
tctctatgtncacaaatgcagccttaccagtgttcccttgacgtttgtgcagaactggccttnctcactgtctgataccaacaaggagagaccgaaatctgcgaccttcgcggtcatcctctcatccaagaggatgttggtggacttcacatctctgtgaatgattggaggatcggcatggtcatggaggtacgctagccctctagctgaatccagagctatcttaagtctcctactccagtccaatggtactccttttatacctacagtgacccaatttgtgatcaattcatttgatataagggagaanatcttatgtgattagt

SEQ ID NO: 72589 - DNA, 410 bp, Oryza sativa
  unsure (1)..(410): unsure at all n locations
agcttggtctttatcttcgacaagatctgatctgtttccaagggaatntgtggatgaactttgcaaaatgcaggtatttattttttgtgattccatatcaaattcttaatttatttgctaactctactgtgtttgtgttaacctccaactgctctagtattttctgtattcctcttgttgattttttagctctacagtaaactgattgtaatttcataataatgaatgaaaggacacaattattattgtaatgatgaccgacaagagaattatctatagtagtaaaccaaaatcaaaacagttcattagaacttagaaaagtatatatatttgtaacttccggtntttgtgcaggatagagtacccgcattttctcctgagaaggcaaaggctntcatagagaaagaaat

SEQ ID NO: 72590 - DNA, 412 bp, Oryza sativa
tcatttcctcaagatccaatatgagacattctccatgttgtctcattatagtgtgaatgacatgtatgggaggctcaatgtcattgtgaatgatctcaaggagcttggggcaaactacaccgatcttgaggttgcccaaaagatgcttatggctctaccagagaagtatgagacccttgtcaccatgctcatcaactccgacatgtcaaggatgacacccgcaagcctctatcaacaccaatgacatgtacaagttgaagaagaaggagatggaggaagcctcaccttccgagaagtgcattgctctccaagccgaagttgaagacaagggcaagggcaaggtgaatgaagccaatgatgacttggaggaagagaatgcccttcttgctagaaggttcaatgatctcttggg

SEQ ID NO: 72591 - DNA, 421 bp, Oryza sativa
  unsure (1)..(421): unsure at all n locations
agcttgacattgcgtaccactgngtctagtaccagggggtacccccccgggtggaccactcggtctggacgatccgagcggtcaaacttgattgttgtctctgaccaccgaagatattggggcgtatcgggctgaacagcgttgatctcccattcagtcagcttttgctttcttttagactcgtaagccagagggccaccaaagatgtgattgagttccttgcgatggtcttgaaaacctgtcgaggcatcatcattatcatccttctttttcgacgtgctttgatctccatcggaggtcttccgtgcattcttggcatattgctccgcatactgtttgtagacgaagcaatctttatctgtatgattggagttgggatgatgcggacattgggagttcatgatcttgtcaaaagtgttga

SEQ ID NO: 72592 - DNA, 485 bp, Oryza sativa
  unsure (1)..(485): unsure at all n locations
acacaaaaactaagctgtaactgatgcacggctttttcattggctatctttatgtttttccttagaccttcacctcttgccttcagcaagtgcctttgcctatgtccttggcttcagtaggcctggccgaaagtgtcacgcccagatattcccaaatagaatattaagcagaatgtgcattatacccctgttcaggactggccantgtacacaaacgacaaagttaacatatagaatcacgtcttacaaacattattaatagtcttacatataatgcagcggaaattaaaagataactggagcttagcctttgacttgatagtagcaagaacaccacttcacatgcattctcgacgggacggacgaaacctatctcttggagaaaccaccattggactcatactcgaactctaagggttggagatagagcacactgagtctacacactgactcacaagtctactgaaggaggtatgtgcatatta

SEQ ID NO: 72593 - DNA, 442 bp, Oryza sativa
  unsure (1)..(442): unsure at all n locations
agctttttgtcttctcatcactagctggatctggcagtgctcacgccattatcgaggatgtctgggcacagcggtggccagaaattgagggggggatggtgggaagaggagggggatgcancanttantcaaattcgtcgggtgccattccctccgtagagcttgtcgtcgccctatcgttcgttgggagaaaatgatgatggggcaatgggctgagtggtgaccccatcacctgcccttgcacacgctggtgcatctcgtttgtattcgcgggcctggccgatcaacgtatctcatatcaatcgttcctgctcatcctgctagtcagtgctttttgactccctctcctgtcttgatttaagttcttgctccttacctctcccatttattctcttttggtatcttttccttcctcgacctacccactcttattgtttttttc

SEQ ID NO: 72594 - DNA, 372 bp, Oryza sativa
  unsure (1)..(372): unsure at all n locations
ctcagcttatgctccaagngtatgtagcctctgtctgatatgtcatattgctgtgatgatcagtgagaattatgaactctcccaattgtnagtaggaccttcaatggtcaacagctaaaagtatagccatacattccttttcataggttgacaaaccttttgttctaggaccaagtgccttactaacaaaagctattggatgtttgtcttgtgacaaaactgcaccaatccctgaatctgaagcatttgtttctactgtaaataggttgctaaagccaggtagtgctatgactggtgctgaaactagaagcttgttgagcctgtggaaagctaattctgttcctgagtccatttgaaggaacccctttcctc

SEQ ID NO: 72595 - DNA, 150 bp, Oryza sativa
  unsure (1)..(150): unsure at all n locations
agcttcaccaaggcaacacctcgttaaaatggagtgcaaaatggcaacgtatcctgtgcacccgntnaaattggngcattcntgcactcacgcaacatgaaacctttaatatccatcagacgatgtaaagcaatagaacttatattcata

SEQ ID NO: 72596 - DNA, 479 bp, Oryza sativa
  unsure (1)..(479): unsure at all n locations
actcagcttggagtaaaaattcaccattagcagtttaccttgatcattgttaaaagatagaaaacccttcgtgcaatggagaaattcatgatcagatcgcttactatagagagactgcatttggtctcgttttaacacataacatgcatggaggattggaggttatttggcccttcgattccgtgcatcatacttccattctaaatactgaacgtgacacgaacatganaatgaagcacagagatagtgagatagcttaataaaatattgaagaagaatagtgaacaaaaaggtcccaccgggattcgaacccaggtcgccagattcanagtctggagtgctaaccactacaccatggaaccgatcttgntcattgcctgtgaattctatataaggctttgagttcaaaacaaactgannattgacccgaaaatgtatgcgcggcgcaacagcggtacagtgtgatacgtgtatgtata

SEQ ID NO: 72597 - DNA, 447 bp, Oryza sativa
  unsure (1)..(447): unsure at all n locations
atcttggatctgacactngcataatagtacatgaagaagtactaagtcctgaagcaacatagaacaaatagagtaatttgaaaaggattgaagaaacaaaatcgttcattttgaattagaatttggcttcatttggaatatttggctgaacccaaatcatgcttacgcttgcagctaaaggcatgcaacatatgaaagtctagtacatcagtccaactgcactntgaaatgttcatggtgcatggcttcggaatagtcaattatcgccaaaatgggacggaattcccaaacacaagagttatagcagcacatgaatatttggctaattgaactaaatcgttgaactgttcagtgcctcggcatggttttgagagaatggtacccgcgacagcaattgcgatttgaaactatctcaaccccaccatttatgatattaaagcgcatatg

SEQ ID NO: 72598 - DNA, 449 bp, Oryza sativa
  unsure (1)..(449): unsure at all n locations
cagtctattgttaattaagggttgatattgctcttgtttccctgccttttccccttcctgtcagttcggtctgcctttgtgctgaangtattttcttcttctttattgntatgcattactatatttctctagtaatttaattctttgcatgatattatatggtatatgtgtgcccctgtaagtgtaagtttatgtgtgtgcaactgcagttcctccctagctttgtcattttttttatataattagatggttctatgctgtgtgcatatagtgaaagtgttcttccccctatagtnttgggtattagtagcaaaagagagacgctacaagttacaatngtcacaatttgtataacgaccaatttgntcttttactatctgtaagtcatgggtgacatactttcttctcacttatctgcgatatagatgtcccttctattatacatactc

SEQ ID NO: 72599 - DNA, 468 bp, Oryza sativa
  unsure (1)..(468): unsure at all n locations
agcttgtagataatgcaggatatagtaacttcatgattccttcattgaaaacatgagaaacatgtntgatataacttgtaagcagtgagtatgtggcataacgcataatcacattttttttacttatgcaaatcatgagaaaatgcagattcagcagtagacaaagtagcagaattctaactgtcacggccacaattttgtaatgttacgcctgtcaattagagttgtcattgccaaatgttacacctaatgatgatgatactgaggtaggccaaagaaaaaaaatctacagttaatagaagtgcagtaggaattacaaacagaatgtgcgaaatccataaatcaaaatactccctccatcccaaaatataacaaactatagagttcanactatacctcacccatcccgaagaagcaaccaattnttttatatgcataaattgaaagaactaaacataatgaatactc

SEQ ID NO: 72600 - DNA, 463 bp, Oryza sativa
  unsure (1)..(463): unsure at all n locations
ctatcatcagcanacaacaagtgtgacactcccagcgcacgacgacagactntcaactcatttagttgtcccttctctaccacctgacataaaatacgagaagggccatccgccacaaataagaacagataanggaacaagggatccccttaccttagtacctgtgaaggagagagaatccagtaaggaaccattaaaacaaacctagtatttcaccgttgntacacattccataatccaattcacccgctgctcgcaaaaaccaagtttcatcagggcgtagcttcagaaagtcccaatcaactatgtcatatgctnttgctagatccagtttataggcacaaaactgactaccattccctgaagctctttgcatagagtgaatacactcaaaagcaattagtgcattatctgtaatcatacgtctcgaatgaaagcactttcnagtggngaaatgatatca

SEQ ID NO: 72601 - DNA, 445 bp, Oryza sativa
  unsure (1)..(445): unsure at all n locations
cagctgacattcttatgtaagaaattttttgggtttccaccgctgggtgtacgattttgggtaacaatcgattgggtgggctggacagctgcaaccaaaaatgccgcaacaatcagaactgatcagcctcaatatgttggtttttagataatggaagctttatttagactcatttaattacatcaagatgatagaatcaaactgagtcacccncggcctctgcataaaatgcacatagccaaaaaagaagaaagaaacaactagaacatctcccaagcacaaaagtttaacagaaacatatatcttagtggctatcaatccgtaagctagaccgtcacccatgctcctgggtaataaaactcctgtgccacctggtccaactgtcgagataccaccgtatatcttagtgactatcaatccgtagactagaccgcaccatgctcct

SEQ ID NO: 72602 - DNA, 439 bp, Oryza sativa
  unsure (1)..(439): unsure at all n locations
ctaagcttcgtacctacaacttggatgtgatgattcatctctggatttcattctggattcctggtctcacccttcttacccgctttacaattntcagatgatcacttactactgtttccccataattccagagtggatggccacgctttttaacgtcgcattcctggacatcaatgttacttctgtggagaaggatgttcttcngatccttggngacttgccttctctcttatctctttcaattacgacaaaaacaattgtatctganaggctagtcttcggcagcaatgggttccaatgtctgaaagaanttgacttccattcatggcaagatgtcttaagtcctttattgtttgaggttggngctatgccaaagctctgaaaagttcggttcaacgtgtgggcacgaacactatgatctctagacagcaacttctat

SEQ ID NO: 72603 - DNA, 397 bp, Oryza sativa
agcttaattttgtatctcatctactctgcaccggcgagctcaatagcgagagcttgtaacccatgtgggggcatcatgtggtgtggacgatcggtgcctgaattgggcctgggtccatgtgatgttaactatgctggcttgcgtattgggcggaggggcttccgcgaaagccttggtctctccggacctgacattggcagacactgcgtgaggctggcttcacaaagcagcgatcactggccgctttcaacggtggaacgataacaagccgctgcaccatgggcccgcttctggccccactattacagaccaccatcattgtcgacatacgatgcagggcataaaccactttacatttccatgtgtcgtatatacaatataaatttacacaacaact

SEQ ID NO: 72604 - DNA, 510 bp, Oryza sativa
  unsure (1)..(510): unsure at all n locations
actaagcttgtactaccaagtgtcgaanaacctctgtttaaaataatgcttcttcatcgtggtgcacagaagtatatcacgaataattccatcgtcgcattgttaacacaagtacattgcttttgtgcctcatagattagcacttaactgaaatgtggtttatgctatttgaaaatgatcggtaaaaaattatttgtaataaagtatagcatgtgataaatcaacgccagtggggttagcacaaaatgtgtatggaacacttttacagntttgcatattcattatatagttatatgtcactgtgtcagcactccgcagttttaaagaaagggctaaatttgtctctgccacttaaggagtgatgaaatctctcgtcatgtgtattttgctttccactggcggctagcacaaatgagtgccanaagtgggattttngattagtggcacataaaagatgagtattcttagtggctacnatataaaaattacacagagaaatgatgtatcttc

SEQ ID NO: 72605 - DNA, 434 bp, Oryza sativa
agcttatttcttgttccttcttttcttttagccccgacagaagtctactttgctcccctgttgctacagtgttgtcttcaaccttcagccgtttctctcacgtgcccgctcacagtagcgctgcatcctccaccaaatccggccatgccgttgctcccaatctaaaattgatcgcggaaatagaaccctctcaatctcctctaccttttccccaagaaagaccccatcaaattcgtgcttaatcccatgaatttcggtcccgttcttatcctaacaaatcgggataaaccctaattttcggccaccaaatcccaccacatccgtatcgatctctacctcctccgcctatataaaggatgcactgggtctccccttcgctttccccttctttccccgagctcccatgcccaagccacttcttcccgcgagctcca

SEQ ID NO: 72606 - DNA, 500 bp, Oryza sativa
  unsure (1)..(500): unsure at all n locations
aaagtacaaggctcggcttggtgcttatggctatactcagaaagaaggcgaagatttctttgacacttactcacctggtgctagattgaccacaattcgtgtgctactttccctagcagcctcacatggtcttctcgttcatcaaatggacgttaagacagcttttcttaatggagagctggatgaggagatctatatggatcaacctgatgggtttgtagttgaaggtcaagaaggcaaagtgtgcaaattgctgaagtctttgtatggtctgaaacaagctcctaagcaatggcatgagaaatttgacaaaacattgacatctgcaggctttgcagtcaatgaagcagataaatgtgtgtactatcgccatggtggnggtgagggaagtatcttgtgcttgtatgttgacgacatactgatatntgggacanaccttgangtgataaatgaaaagtaaatcattcttgtctcaaatntcgatatgaaagaattggagt

SEQ ID NO: 72607 - DNA, 473 bp, Oryza sativa
  unsure (1)..(473): unsure at all n locations
agcttatataagaggaaaggttagctactagagccatacctgaactgttccgaacgcttccagactcctgattntctactctattcctattccaccagcttgatactactaaactaaacttaagagaatatgagagagctttgcgtgaggtatgtgagtgaagggagaatgtgaagtccttatatagaggtagttatgacggntttggaaggggaattgtccgaagtgccctccaaccgtcattgggatgcaatcctggacgtccatgccgaaacctgcatccaacgacaccaggatgggttcggccgaaccatgggcaaagccatccccagcccatcttcggctggcggcctcctctattgctcctttatgcagacttgtgaattntggcccaattcatcgtgtcaattctgagttcttggccattcatgcataagtctgattctcgatattatccgaaaatgattatcgtt

SEQ ID NO: 72608 - DNA, 434 bp, Oryza sativa
  unsure (1)..(434): unsure at all n locations
tacctcgaccttctgcccttgttatagctcttgctggtctggtccttcacctatctgaaccttctgctctcaataatcaaggaggaggaaagcaccaatagttggaaggcgaggtgacaccgcactgctggggaagggatctttactcccgggtggaaaacctttgtagtcccgggacatctttaagtccaattgaaataactgggactaaagatgcatatcaagtaaaaaaatgtgtgggatgtgggagtctaactcaagatctctcacctcaaccctcatacgcgttaccatcccacctactatacacatctgaccttgataaagatgctttctttntacactaaccctagaatcatctntagcgagactaaaaatatctntagtccggagtggtgttgccactgggactaagatcgcactttattccggtg

SEQ ID NO: 72609 - DNA, 456 bp, Oryza sativa
  unsure (1)..(456): unsure at all n locations
agcttgcttgataatgccattgcatacgtacgcagctttgctcatgcaggcgggctatctatggaaacctatcttagctgctgcaggtgcctctgctagctgccatggttgcatgcgtgcatctgcactcacttcggcctggtttacttcccaattttttttttctaaaaacatcacatcaaatctttaacatatacatggagcattaaatatagataaaaacaaaaactaattgcacagtttgcatagaaatcgcgagacgaatcttttgcgcctaattagtccatgattagccataagtgctacagtaacctgcatgtgctaataatggtttaattaggcttagaagattcatctcgtggtttccagacgaagttataaattagttnttntattcgtgtccgaaaacctcctncgacatctggttgtgcatcgtatatcaacggtcaaacaaaa

SEQ ID NO: 72610 - DNA, 518 bp, Oryza sativa
  unsure (1)..(518): unsure at all n locations
ngaacatgctatganngtgttattttataagtggatttaatcttttatgaattccaaattcagttctcttatgaccgatttgacatctacttctgttgcaagtactattcaacctcctgttcaccacatatttagtaaaaatgatggggcaaccatgcaacatgctgggagtgaaaaccctagcgctgctgtatgttcaagtgacttaatttggttttggtgattaatgacaaatctaactatatgagactaatgtttttatgagtctttctttgactagtctcatttggatatgaaagtaaaaatgatgagaggtatgtattaaacttcacatattctaatttggtctctcttgtggatccaaaatatagtgtgagcttcctctntgatctttatngattatgtgcatatgncgtccttcatatccatatgtatgcacatcttganggagagcttattctatattttatttattataagatctctaccttgantggaaatcatcttatctcatctct

SEQ ID NO: 72611 - DNA, 411 bp, Oryza sativa
agcttagaagtgattatatatatcactggatgtctgtatcatgcatatggtttctgctagtaatcttctagcattgaaaaatcaaatctgtttagtgctcaatggtagctcttggacgagatgatcttagctgttcaagcacaatgaaatctacaatgttaattgctaaatgaactagtagtagacaccgcatattatgaatgacggcattgagagattaaaactatttactgctactgttgtccttagacaaaacactttatgaactgcaatataacctcaagtactatggttgaatatgataaagttggtcttaaattgtgctagtaataaattacacatacattcgagtctctattgattatcaagtttagctcttggtaccttgttcaagtaaacgttgagcataaa

SEQ ID NO: 72612 - DNA, 498 bp, Oryza sativa
  unsure (1)..(498): unsure at all n locations
gatgtgggaacatttctagtgctgcctttctctctaccatatntgaggacgagtgatgtgttgatgactgatgaagtgatgatatactcggactatagaaattcagtccacctattctgtgtgttcctatagataaattcctgctggttaatactctttatatttgntggatctttagggtgtgttgtatggatatatttggtatattttgcttcggttgtattttcccagtgctattcatatacagtacatgacagtcttgcttttttttttctgaaagaagtttttggtttggtgatctttgtctacaaaacatagctaaatatgggacanaggaactgtattttttcgactnttaagaattaanatgacagatcaatgaaatcttgtgtgttttagctcttgcaattagctaaacttgggtcatatctgaggcttactcgangaanacaccaagatagacattatgaacttggcagtggcacattgacaaacagt

SEQ ID NO: 72613 - DNA, 263 bp, Oryza sativa
  unsure (1)..(263): unsure at all n locations
cattagtcactagtgcctatgtgacccaaccagatctgccgagatgttaccgctaccgcatatcatggcgcggaatgagggatactggttgctgctaccaacgttctaattcgcgcgcggttatctctctcgtgttactatgatttgagtcctcttactacagttctgagactatgatcttntgtctcacgatcctattatactgcattgctctcctgcttgcccacaccgacctacgtgcaactcacatggcttctcacaca

SEQ ID NO: 72614 - DNA, 310 bp, Oryza sativa
ataatgtaacttctagttgacttgtttattcactacgtgattaaagaactagtcaccacaatttagtttctggttggaccaagaatccctgatacccttcataaaagaatctgaaagcttgttgggatctgattatgaaatttggttcagtattgcgggccaaacaaaataatcattgtagtagaatatacaaaatagcatgttacatcaaggaaccaacagaacatattatgctaccaacaggttggcccctctgttcatggtgttggtgctacttcaaaacagctcactttggtcctggttttgacat

SEQ ID NO: 72615 - DNA, 436 bp, Oryza sativa
  unsure (1)..(436): unsure at all n locations
agcttgttgctgttgggcaaaanttgaagaagcacaagcagtacaagccccgccttcagcttggagctccccgtgctcctatggcggcgccctcctctcgtcctggagctagctcaagctcagcacctcctcctcctcctcttgggtatgatccaaatgctttcttccatccacagtatgcttattttggaatgcaacccaacgaatacttcaacccggtacttggggctattaataccctaagtgaaagcattcaacgcttgtctaccgggcatgaagctttacatgaggatgttcgtggcttgcgcacggacgttggagacttgaatgcttccgtggggagattgcacactagagtgggtacattggattctcgagtccaactggtggagaagctccaagcatttgtgtatcnatcgtgtcgtgatgctcctca

SEQ ID NO: 72616 - DNA, 349 bp, Oryza sativa
cagttccatttaccggattggagggcgatacagtttaaacatgttggcataagatggatcgtatgttctgtatccttggatcttggatgaataaatctatactcaatcccattacactccagtaagtcctattgattgcataggatggcttacacttataaattgatttcctttgtccaagaaaaggattattaacttggaaccggctaagaaagtattattaatatggaatcaacatgcccatgctgagactatcatgctcacctgatccatcgattgtgaactgcatactgatacaaggtgatcatactggtgtgcattgcgtccacatggtcaattgataacacaa

SEQ ID NO: 72617 - DNA, 440 bp, Oryza sativa
  unsure (1)..(440): unsure at all n locations
agctntatcttcacctctcgtagagttagatttcaaccaaacatgttgcaaaataaattagagacagagaagaggtttagatagctccacacccagctactctattctaaacccaactctaagtgaccctatataacatcaataatatccaatacatgatacattcatctattgtcacagctattcttcctcctgactaaatgtgttatgtacactcacaaatcaacattcctacactgacatatagccccaacaaaatggccactgatctaaccaacatcaaatcaaatcaaatggagtgtacccagcccaatggagtgtacanccagtgctgatctaataatgccaccaccttttcctttggttctncataactggtaactctgcaccacaaacatgcactggtgagctaccgcatcaatcccgcaaagagacactct

SEQ ID NO: 72618 - DNA, 403 bp, Oryza sativa
  unsure (1)..(403): unsure at all n locations
gtacccttgataattttccctatatgaaagcattattttgtggtgcacttgattattgaatccacacttactgcttggctcggttgcgtgccaaccgatggactacccagtgtcgactaatttccgtggtcgactaccctgattcttgtcctccacccttgtggacctcggattcgtctctctggcgcgttacaaatatccacatacaccgtgcttgtcaannacttggaaaaggtttggaaccttaaaacccgacatgtggtgtcgtgtgttgaaataaaaaattggaaactccgagtggggttggttatgggactgcccgatcgatataggaccatctgggaactataacatataagtgcaccaggggaaggaacctgctatactatcagtaggaacttct

SEQ ID NO: 72619 - DNA, 226 bp, Oryza sativa
atgcagaaaccatacagggttgtactggagcgaactcctacgttgcattcggtgggctgcgggggttttttcttcccgaaactgccttgcgtagctgagttccccgccgtctgattcctcgcattaattgaaccgctatgttgcttgcacgaaaccgactatagagagagagaccttaatcggcggacagatgcagacattgatgatgacgctggatggagtgagt

SEQ ID NO: 72620 - DNA, 447 bp, Oryza sativa
  unsure (1)..(447): unsure at all n locations
caccataaactaagctgtctagcgaatgcatnctgctccgaacagtctattccctcgttgaacagctccaactccagcgagtgcattaccacaaggtgtcaatgcctaatntcagccccagccatcaattgacaagacagaggccagtattggcattgtacctttggatgttccagcacagctaccaagatatcaagtaccagatgaagaacccgagcataagaaagttattgtctgtacaactgtggtacctgttaaggaagcggacatgcccatcgccaagtggtcactggagcaaatgcagtacctgttaagcctagcgctaatcagaagcaaccataatactcttatatcagtgttcaaatacttgtggtttatagttgttccccgtcaatcatgtaataacagagaaacatgagataatgaatgagtttgataagtttattg

SEQ ID NO: 72621 - DNA, 399 bp, Oryza sativa
  unsure (1)..(399): unsure at all n locations
tggcgccttaatatttatttggtgccttctatttaacgctttctgttccttggaggtccacgctaattaaagaaatcgctaactatgtaatttggtgacagacggagagaataatctttgtagttgtaatctccgcttatagtggggccccacaaaaaagaatcgacaaaccgatggtctctacgtaacacggaatgaaacacaacaacgatacagtgaagccgcagcctcgtagacaagctgagattcttatgagactttttctttggaactntcgagacaactaatctgactgtaattattggatcgcataattctagcgaaacaatattgtggtgaatataagaatcttgaggaatcttaagattctaagaagcaattgggtgataaccagcttat

SEQ ID NO: 72622 - DNA, 417 bp, Oryza sativa
  unsure (1)..(417): unsure at all n locations
agcttctattattatggacctgtataaagatgcgtgagagctcaaggtcccatctgcaaaaacaccaccgcgacgaacgagcgaagaagtgggaacaagacttcaagagagagaggagagagatcgcggccggtgacggagacgatggagacgcgacgagcaacctacagatccgncgcgctcctactcctcgccgccatcctcgcctccgccgcctccgccttctccatcggcgacaagtgcgccgcctgcaaggccgttgccgtcagttcccgtattcttttctttctttntttttttgcccctctcgtcagttcatacgcgcacaattcactcatcctttggagcaccttgaagcaatttagttcgtatttaaatcgttttataccaagatgggaagaaattagcattccatat

SEQ ID NO: 72623 - DNA, 241 bp, Oryza sativa
tggtgcggcaggccctcaggacatggatgatgtgctgcgataacaccgacctccacaatgcgtgagacactgaacactgacctatgcctcgaatagaccatctactggactagacagccggatgcgaatcgccgagccatctcgacgcggactacggctaccaccttctcaccatggactacgtcggcgccgagatatcaccactcttcacgccgaacggtggatccaagatacaataaca

SEQ ID NO: 72624 - DNA, 169 bp, Oryza sativa
caccaagaacagcagccatcccactactgacctcaactatattcttcgaaatgggaaatcacagtatcactggacaagaatggggcaaaatgcacatccctgccgatctagaaagtgctgaactcaaaatggagtataggaagccaccagccatttcctcacccttttg

SEQ ID NO: 72625 - DNA, 448 bp, Oryza sativa
  unsure (1)..(448): unsure at all n locations
atgctgatctggacctatttctcatgttattctctagcaatacagatattatgtccttcccctgtagttgcatgggaattctgaaatattttagattgtttaacttcacctaaaatcatgacaatgagagaccacatcttgtttctccaggccagattgaactcttcactcatgtcccagttctgcgtaactttgttgaacatttgaaacgaanaaatttcaacgtttgtgccgtgtactttcttgattcacaggtttggactcttggatcactaaccaaatatatttatccttgaaaaaagatactggccccaaacacaagtagacaagtctgacttgagttttgtttttcttgggtaaaagttgtagtgatgtgacaaaatacatcagtggttgcatggcttctctttttgcatgattcagcttgaacttcctcatatcaacattc

SEQ ID NO: 72626 - DNA, 455 bp, Oryza sativa
  unsure (1)..(455): unsure at all n locations
tactaagctnttttctactacaacctgatgtgcaacaganaataagtcataacttatgttcctattaaggaagtacataaaattgaagtagtcaattgtccaccagtgccaaggtcaaagaaaacaaaactttgaactacagatgcccaattaaatttattaaaaatatgagtgaaataaaaaaagaattattaagggtacagaagcaacaaaagaaggtgcaatttgtaaagtaaaaaaagttgaccgtgtattcggtgaatgagcaatngctaattctaaagggtaagaaattaatagagtgattccaacataattatgaaagttctgctaaaatacagaagtgctttattaacattgcataaatacccttggtgaaagctatctttcaatggctgcacatgacaactacactgcaattactggattctacatgtncattcccataagtgaat

SEQ ID NO: 72627 - DNA, 430 bp, Oryza sativa
  unsure (1)..(430): unsure at all n locations
acttcgaaatacaactgtctgatggaagaaagacattaatagttgggtactcgacaatnttaatgctcctcagctgtggacccaatggttcttctatgttgagttggcgatatggtgaagttgattcctgcagcaagttataagatgctctttaaagaaacagaggacatatcaataactacaacggatgcaaggtaaattggctgcagtactataccttggcagacttttgaatgaacagtttgagatcacgcaaatctgtattgcgatatggtgtgagctgatttttccaaggtccaggactcagatgtntttcaatgatgatagcaagctggtatgctcatctatgctgcgaaagagggcataaaatcagcacagaaaagagtgtgtgtggtgcacacagcttctggtgtcgtgattcatttacatg

SEQ ID NO: 72628 - DNA, 389 bp, Oryza sativa
  unsure (1)..(389): unsure at all n locations
tactgatatggtcatatttaagaacccaacaatcgcatattcattccctctagtcgatatctcgatccaacatagcctcctccgtgcgagagcggtgttgcgctaacatccaagtcctaaatctgtttatgggtggtaagggtaatccgtaacagaagtttactgatatggtcatattttaagaacccaacaatcgcatattcnacccctctagtcgatatctcgatccaacatagcctcctccgtgcgagaacggtgttgcgctaacctcgcctcaccggcgtcacttgcagggattggagatatgaatagttaatatatgggagaatatactaacatgtgtgtcaacctattnttaanatattactttngttgaataaactggcacg

SEQ ID NO: 72629 - DNA, 413 bp, Oryza sativa
  unsure (1)..(413): unsure at all n locations
agctnttctctngttttgtccgggctactgagtgcgtttacgcatgagtagtgccgaagatagcactgagacagcctgtaatctgaactctagctggaaaacttgattgaggtcagacggcagtgtttggcacaaccatcacttgctgactgataagatcaggtggaccgtcgtgattgtgctattgtctttaaagaaattaaaaaaaaatcttaaatataaaagtcatgagaaaagattaaaaactcatgttctatgctttgttatcatgttgatactctntatgaactgggcattagcacattagcatgggttcattgctttgattatgtaaatcttgcatgattatgagctggtttgcttccttttaagcttcttctagaaatagctttgcacactaaatcactaattca

SEQ ID NO: 72630 - DNA, 399 bp, Oryza sativa
ctcagcttacctagcgccacaccctctgtgaggagttggcattgttactaatccaaggtggcggcagccacggcgctggtggccggcggcggcttcagctccggttcctgcccttccggtggctgcatctactctggcggtgggggtggcggcagtgggagtggtggcggcgcacgccatacctttccgggcggtgggactggtggcggcggcttccctgctggccaggcccgcaccggcggcaacacgaaccgccgcaaccgcaagggaaatggtggacgcggcggcggaaatggaggatggaacggcggcggcagtggaggtggtggtggcactcgccaggccttctctggcggcggtggcagcggcgtatccttggtggcggcggtttctctgctg

SEQ ID NO: 72631 - DNA, 443 bp, Oryza sativa
  unsure (1)..(443): unsure at all n locations
agcttgttcttanaattgctttnttagctntacgtaattaataatgtactatctaaaagaaagtgaaatagactgaaatgatctgaagaaataaaccagggaggtgaagcaggatttagaacactctataacttcactccaaactctctcgtaaaggtagattgaggagttggaaccctacgctaaagatagtttttggtgatagttttctagttgtagatttaaaaaatatttaccgagttagaaaaatgtccacgtctcaccgtgtgttttcaatgattatacacgtatttagagacatccacgtccgtattttcagtgattatacctgtattaatttagaggcatccacgtctgtatggtccgtccttntaatttagtgaccataattgtggaagtaantattactcanacaaattttgangagcgtttctttgtaactc

SEQ ID NO: 72632 - DNA, 388 bp, Oryza sativa
  unsure (1)..(388): unsure at all n locations
tctcgggttcttggtctctgnccgaggcatcgaggccaatcctgataagatacgagctatagagcggatgcgcccctccagcaaacttatggatgtgcaatgcgtcaccggttgcatggccgccctaagtcggttcatatcgaggctgggagagaaagcgctacccttatttaagctcctcaaacgcttccgggccgttacctggacggaggaagctgaacgtgccctcactcagttgaaggcgtatctcagctcttccccagttctggtcgccccgaagccaggtgaacccttgctactctacttagcggcgaccccgcaagtagttattgcggcgttgtgtgtggagcgcgatgaagacaaccctcattccgcgcattcccaccct

SEQ ID NO: 72633 - DNA, 410 bp, Oryza sativa
agcttcttactagttactgggtttgctaggcaaatctgtgagttgagtaggattttaaggaacatatactctttgagcaagtttatggccaatttagtaaaaatctcacatcttattaacattcttaaggggatatttttgtgacagacattatattggattatagaaggaatcaaagagatgctagccatgacctttcttctcaggaggtgatgcttcccttttaccagtgacaatttctactttatgaactacaaactgaggtggagatgcagcagtagcttcccttcctacttcaactaccaactgcactaaaggatccaagctagaaaaaatttctttcttggagatatcatgatctatatacttggattgaactgagttcaaatcaatgctaccacacctaacat

SEQ ID NO: 72634 - DNA, 456 bp, Oryza sativa
  unsure (1)..(456): unsure at all n locations
tcgagagatcccctgtcgaaaacaatgtgaataccacttagtttctatatatacaagntcctagagaatttataggacacaactaaagctatgctctgaaagtcaaaataatgtgtggtgcaagagcgtgtttaagcagtcattagcctatgaaggcatcaacctacatcgtgttagaagaacattcctttcaaatattctagtgatagggatgcgatgagttaatcttgtattgcaaggttatgatgataactattcagctgaccacttgcagaagataagaccatgccagctatttttctcaaggtgtatgccttggtatgattggatgtgataaccaaattcacttctgagggagacctattatgaactcatgtgagaatgtcagccatctcctggtgcccaaggaataacaacctaacgataattattaaacttatgcccgtgcaccctcta

SEQ ID NO: 72635 - DNA, 440 bp, Oryza sativa
  unsure (1)..(440): unsure at all n locations
agcttggtttgcccgccaaggagggagagcagcgctccacgtgaccacgtggcgttttaatgggccttgatctcggcccatttcagcaagcccaacaggccagttccatgcttcgatcatgctggcatcaagggtctgtttggttggtatcctgaataccatgcctggtatttattttcatgcttgacagttctccgatgagttctattttttgtgtgatcatggtaccctgaacacttgaacagtgaacaccatgcctgacacttttcttcatgcctgacagatgagctntagttggtgtttggttggagggactaaagtggggctaaacaatttagtctctctcacaaaaatataagttcctatgggagggaacttatgttttgagagtttagcccctctctccncaaataccccttaatttntgcgcagncgggata

SEQ ID NO: 72636 - DNA, 411 bp, Oryza sativa
  unsure (1)..(411): unsure at all n locations
tgaatcactaagtgatgtatttctttctaagtttgggccgaaaagagacttgcgtctcgattcgactttaagatatgtntttcaacagctcatttggtaatgtaccgacctcccgggtcatatcattacttctcggctcccagagccattccacttgattaatcggctcctatagcctttttcattttctcggactcccagagtccagctgcccagcagcacaacaatccgcttccactcgggaagcctagtctatgatgcccgtagacatcccgaatcacacagattcggttcttgaccactcaggtcatccatctgccacataggctgattctagtaacgattcccataccgcaacaacgtttcacaaagcacaggctaacaaatctacgctacaggaaacacctcaca

SEQ ID NO: 72637 - DNA, 462 bp, Oryza sativa
  unsure (1)..(462): unsure at all n locations
agcttgaatacgacactgtattctggaggcgaattagactntctgtcttgggctggctgaaaacaaagcaaagaanaaaaagaggaggagctcggctgggccgacttgggctgcacagcacgcgcgcgagggagagagatgttgggctgaaatcagcccaacggcttaggagaggatttaaaaactttntccaattaaaataatcactgaaatgatctttgaattgttaaaaatacttctaatgctcaaataatttcaagaaaagtcctgaaaatactggaacacccaaagtacttaaaaaaattataatcagaccatttaatgattaatttaatatgttgataattactgaaatgttctttgtatgattaaaattaggaattgagctccgaanaatctgagaaaattctagagagtataattaaccatggagaatttaataaaaaataaattcatccatgc

SEQ ID NO: 72638 - DNA, 437 bp, Oryza sativa
  unsure (1)..(437): unsure at all n locations
tcatataactccaggcccagcgagaaaagaaaatcattcattagtagtagatactagtgccaactgaattcacggttgattccttnggagcattgtgcctaattcctactccctccgtcctaaaaaaaaagacaaaccctggttttcatgtccaacgttttgaccgtctggtcttatttgaaaaattatgaaataaattaaaaagataagtcacatataaagtattaatcatgttntatcatctaacaataatgaaaatactaattataaaanaatttcatataaaacggacagtcaaatgttggcacatgaaacccaggttggtctntntntggacgganggaatacgtgactattcatcctattcttggctcaaattcatgggcttcacatcatntctacatacccgtacatcanttctacccatactggaagca

SEQ ID NO: 72639 - DNA, 408 bp, Oryza sativa
  unsure (1)..(408): unsure at all n locations
taagctcaagcctgataccgactattagtgctttacatacaatgttttctataatattaatgggtgggatntttatataatagatgaagcatgaaacttttgtgctaattatacagtaaaaatgatctcatgacaaattcttgatgcaagtttattngttgcatggtcagttactggttttaaatacaaattaatgtggcttaatctcagcccttgatgtatacggaatgacacatatttagccaactccaccttgtagagttatatctaactctaggggatctggacccgtctagcctactntaaataccaaagttcctttctctttcctatntcataaaanatatatgctcatgcangagtagaatgtgacaatattatgttntgtaggtgcatcatatatgatcg

SEQ ID NO: 72640 - DNA, 446 bp, Oryza sativa
  unsure (1)..(446): unsure at all n locations
agcttgttttgtgtatctttgacangtgaaaggagggagttaagacctttatccaattaatagcacaagcttttggattaatttgaataaagcttagaaattcaaagtaaaaggtaagtgaataaagtaaaccaaacttgcaagataatttgaaatagttgaaaacaaggttacaaatnttgtactttttaacaacaagtttcaaaagaaagttataatatcaacatgctaaatttattctattgcagcaagattaaataaaacaacattgtaaaacttttgctgataaatgagccattagtacagttatggatgtacagtactaataacactggaataaattctgaatgagaaccattaaaagagattatgaagtgcatgtgccattagtttgggttaattaaaagagaaagggaggagaacagttctactcttcccaatatttt

SEQ ID NO: 72641 - DNA, 393 bp, Oryza sativa
  unsure (1)..(393): unsure at all n locations
ttacatgtctgggaagttggagtcatcaactaatcaactcatatcagattcaatgaggtgaacaacagcatatacttttctctaaatgaagcatctgcaacagctatagcaccaagttctactgccatctttataaatcaagaggtgttgcatcaatcttcatcacacacatgccaacattaagaaaatacttgagctncgatatcttctcaacaatttaatggataattgcactgacatcatcaccagcacctctgcttcatcggctctgacattcccgccgtgctaatggatgactaagacttcgccaacttgctatttcgccttcacggttgacctactatgcaaacgctgatgagcgtcttcgtcattatcatcggctactacaccggt

SEQ ID NO: 72642 - DNA, 363 bp, Oryza sativa
  unsure (1)..(363): unsure at all n locations
agcttgattgatggttaccccatgcagagggaagagagcaagtgaacaaacaatgacaagcactacaaggcaaatgcaaaatatgtgtattctttntttaaaaagaatatcctagcgacaacagtttcatgtccagggacagggaagaacaaagcaaagaagcgtccccggttcatccctttctttttctcttgcctttttcgtctggggcctggaagcgtcacaattataggcttcaacgagatagttaggcatgtggcattgcaagatggttggcaagtaatccatgtgagcggcaacgaaccacgcgctgtcatgctcacattcacgcaactagccaggatagcattaccagctggagta

SEQ ID NO: 72643 - DNA, 478 bp, Oryza sativa
  unsure (1)..(478): unsure at all n locations
gtgcgcgttccctattactaaatcgctaacaccaccttcctgtacaatagtatggtggaatggaaccacagcaccagtggctgtctgtagtgtgtccctgatgctgtgggttcccctaatttatagaagtatacattgcttggctctatcaagtataatggtgaaagctggcttcaaaatctgcaaggatcccaagaaaaacaccagatcaatgcaaagtaggcacttttttccttgtgaaatattacaggaatgcagaatcagcaagagaagagatacccctaaagaaacacaggtaaaattcactcactcctgctttatgctcttgcataagaacantcctcgaagagtagccagtcgccttccaaaacaacgggaacggctcttgggaaatgccacatagtgcaacanattaaatgatgcttaagtcagcaatactggagctcattgagctcacactatcatctncncatatatg

SEQ ID NO: 72644 - DNA, 471 bp, Oryza sativa
  unsure (1)..(471): unsure at all n locations
agcttgttctgtatcatgcattctagttnttatgatcgttgagaggtaccaaaaggtcccaaacattttagagtaaaatctctcttgagtgatataagtcattttagaggtggagttggagctggagctggagctgtgccaaacaggccctaagtcatgataactcttggcaccttttgataaaatccctcttgggtgatataatggattgatataattaatgtgtagtgttcccttttaaataataataaaaaacttaaggtttatgaaattttgagcttctacgaagactaacgttatgtatgttatactatggattatatatggcatactttctaaatntctgaagggcacgatctattgcagaaacattcttcagcaacattacttcgaatactctntgtaaatccacttttcatatgtttctaatatgataactaatcgnttctatactctcgaataactgtcata

SEQ ID NO: 72645 - DNA, 395 bp, Oryza sativa
  unsure (1)..(395): unsure at all n locations
actcagcttactaaagacctangagtatgacttatacgctccacctgaatggtattctacagacggtctagtattagataagactctaagtgaaacttgcttgcacaagacttgcaacttgcaattcaaagcgtaatccattgttcaagttgtgagtaagtgtagcctggagttctagatggatgttcaaccttaatcggtctccatcgaaccgctggtatataaacagtacattgaanaaggcaaatctcagtgggattttgagaattggtgggggatcgttggaattattagttgggctaaggcccatttgaagattaattctttggaaaatcacanaagcccacctcatgggatgacatgcatcgtggagttagtaccaccttacttattct

SEQ ID NO: 72646 - DNA, 445 bp, Oryza sativa
  unsure (1)..(445): unsure at all n locations
ttcttgtttttatttntaaggctcccactaataaggtctgatcctggacatagttaaatttatagactgtaaattttataattgacatatatatttgagaaagattattttcttagaactacacagtgctttttttttcaattgcgttagaccatgctaaaattttccaatatatattatcgaacgttgtcgttcactacagacctacaagagaatatataagggccaattccctatatgcccatgtaatttcacccaatcccttctacgcccctgaaatttgtttgatctcttatatacccctgagtntttatttggatcccttacatacccattccgttagttgaccattagtgtgaccgttagttattgtagaaattactttattgtccttgttatattgttataagctagagatggtttatgtgttaattatttgagttgt

SEQ ID NO: 72647 - DNA, 226 bp, Oryza sativa
  unsure (1)..(226): unsure at all n locations
atacacatgaaaagactattagctattatttacaaacaatgcatcccaagcattactgctcatacagcttacatatgccactttggacgagcgtcagactcaccataatcgacatccttattgggcaagactagcgtacaacggcttnaatactaacattgaaaccctaaattggaatctacagcgagcatacaacatctcggatcactaaacaactcggcgtcac

SEQ ID NO: 72648 - DNA, 434 bp, Oryza sativa
  unsure (1)..(434): unsure at all n locations
agcttgttctttgtattgaacttgcttatttatgtgctactactactggttggataccgggctgctggctactatgatttgctggtttaattatgttcttagttgccctattttatatatttgctctatgcctcaagctcccagcctccaagtcttattttcagctactagtttcagttcagtgttattttcagcagcaagtcaaaagaaatatggagtacgcgactgggatatggagttatggattcttgcacacatcaaaactcaaaggattcctttattattgctttatgttgtgcactatatagtatatatgttcttaggttatggcaacagactntaccgatctgcctcgattaatcaggttggtcaacgattaaccaacctgatcggcctaatcggtgccatggcgatcaggtctgatcggtcgatca

SEQ ID NO: 72649 - DNA, 469 bp, Oryza sativa
ctaagcttgcttagcacccggagcaaggatatccagatgacttcttatttattatccaatggtagttggttcaccaccaaacttattatgatgaaatgcggaggatggctttctggtaagtggtttaccgtttcatctaaccatgcaaaccaagtgagcacaaagagaacacaaattattgaataacaattggtcagttgtggtgttgggtggtggtgtatatatatgaatgcatcttctgcaaccaagtaccaacttagcattgatatagcacaccatggggaattattctttcttctaataagaaagacacatagaacaagatgcatgtgtttaatagtggctcttaattactgggtacacactttagtaactactccacagatacggctattactatcgacccatcacttactctgtcatgaccgatccacgtcattatccgtgctaaaatacaaaatgctattga

SEQ ID NO: 72650 - DNA, 414 bp, Oryza sativa
  unsure (1)..(414): unsure at all n locations
agtcttcttatgtttcatctcaaatntaatatactcctntttgaaaatatcacgatgaagttcttttatgttatttgttccttgatgaaagttactcaaagcattctaaatttcatgagcagttcgaagatgtgcaacacgatcataatccgaacgagaaataccactcaaaagaatgttgcgagctttgcaattntgttcaaaagcagttttttcagcagcagtattaatagcttcaggaatcacataaggatgagaaacttttctccaaatatcataatcttcagccataatgtaagattgcatcctactacaccaatgagaaaaatctgttccatcgaatacatgaggcttagttgaaaacctaacaggagtagccatggcaaanactctagattgataaaaatccaaaga

SEQ ID NO: 72651 - DNA, 501 bp, Oryza sativa
  unsure (1)..(501): unsure at all n locations
tatcgtcttctccccacatggtggcaagtccacataatcatgcataatgttagcaaatagaaggaaaataacacatatgacatcattatgtgaaaacgaattgcacatcaaagcatagcatggagtcatattaagaagtttagatttatgcacaatcatagcactcccctntaatttaactccctcgatgttagaaataggagttcccttctcatnttgggatatttcattatcacactcaacaatttcagcatatgtcattggaagcgaagtaagtttcttatccctatgcataanattatactatattttacttctaccatgatgtgttgcattaatattaaattccaagaacgacctaacaatagtgaacatgcattcataggtactacatgcattcgtatagttggtgttaccttgtccttaccatnngtgttaaccatcaaatgtgacgtggctgtgaatggtgacgagtgagcannnataagttcttgatcaaat

SEQ ID NO: 72652 - DNA, 405 bp, Oryza sativa
  unsure (1)..(405): unsure at all n locations
atcttggtctcgtttatgacgccgaaagggtgttcgacggaatgccggttatggacatcgtcacgtggaacacaatggtggacgggtatgtgtcgaatgggctggggtcactagcactggcttgcttccaggagatgcatgatgcgctagaagtgcaacatgacagcgttgggatcatagccgctctcgcggcttgctgcttggaagtttcatcgatgcaagggaaagagatccatggctatgtgatcaggcacgggctggagcatgatatcaaggtgggtacttcgcttctggacatgtactgcaaatgtggcgaagatgcttatgctangagcgtgtttgcaacgatgccgctgaggaccgtaatgacatggaactgcatgattggtgggtatgcgctgaatg

SEQ ID NO: 72653 - DNA, 431 bp, Oryza sativa
  unsure (1)..(431): unsure at all n locations
agcttatataanatataaaatagtattttcaacccaaaacgagtatattatcaaaatatattcaatattagatntaaagaaagtaatttgatattttagatgttattaattttttcctaatagaagtttgactaggagaaaaattagacgacttataattatagatggccaaatgggccgtactgcccgagcatgatccggcccgggcggagatcagtcgtgccggcacgacctgacctacacatcgggccgtgcccgcccacaggctacaccaacagcctatgcacaataagactcangccatgccgtgccggcctgaagacacgatgacctattgtgcttgtccatagaataagtctatttttcctccctcatcactntgggtagtatcacatatggctagagtaagtatatntagcatccatcctctc

SEQ ID NO: 72654 - DNA, 301 bp, Oryza sativa
  unsure (1)..(301): unsure at all n locations
tgacattacggaccactgggtctagtaccagagggtaccgtctccggtggaccactcngtcacgatgatccgagcggtcaaacttgattgcaatctctgaccatcgaagatactggggcgtgtcgggctgaacagcattgatctcccgttcagtcaacttctgctttccgttagactcataagccagggggccgccgaagatatgggtgagctccttgcggtggtcttgaaatccagccggtgtgtcgccgtcgtccttctttcttgacgtgctntgttcctcgtcggagttcttccgagt

SEQ ID NO: 72655 - DNA, 392 bp, Oryza sativa
agcttcaattaaaaatctaaaacatccaactagaacttaagaaacttatacagtaaacctttcaattcaaagtctaaaactctcaaataaaactaaaaaaacttttgacttgtgacttcaaactttcaaagtttctactcaaattaacagaaagaaacaaagcgcacaaatacatctctcttgttcaaataaaccaagttttgagaggtttacttagttgtctgaggaattataatatgtttatttcccaatctcctaacggtcattcatttgtactttcaaataattattacaagctcattttcaaccataaccaattgaccaccatctaagtcaagtgtgaccttaagattcaaatgtaacataatactaatagtgtaccacctccctca

SEQ ID NO: 72656 - DNA, 388 bp, Oryza sativa
  unsure (1)..(388): unsure at all n locations
tctaacaatactgtgattatagctaatactntcttcatcattatttcttggagaacacaagttgcacaagttgattaaccctgtccctgcctgtgttaattatgatgcacaaatctcaccgtacaagtagctggctagccggttaatgattgacacatttctggtttagtgatctgattcagtaccaaattcagtctgaagaggctatatttaggtgaaaaacgttccaaattactgtacgtgtngcacattggtgaaactaagtaatggcagcagtaattntctagagcaatttactcttgcatgattccaaataaatttgcatgaagataatccactttgattgactttgtaacaatctcacatgcttgctgcangtgctaatatt

SEQ ID NO: 72657 - DNA, 320 bp, Oryza sativa
  unsure (1)..(320): unsure at all n locations
agcttgttctgaagagttggntgagcagggtgcttttccctagccagagtaacaaggcaaagcatcagcatcagagatgttcccgacatcaatttcaactaccatattattatccaaatcaccaaaacaaacatgtccagtaaaaaatcggtgcaaaaaaaaattaaaaacacttccgcaacagaatatgctactagcgtcatccaatctcgatatcccatcaaccacacaacaagcatcaagtactaacagactactctgctctctacatggagatggaggggtggtgaactggtgatcgtgggaggaggaggagggag

SEQ ID NO: 72658 - DNA, 296 bp, Oryza sativa
  unsure (1)..(296): unsure at all n locations
cagcttggaaaatgaaggttcaagtggctcacaagctaccattgttaatatgaacactaaatgcagggagctactncctcattctctaaatgtttgacgccggtaatttttttaaacatgtttgaccggtcgtcttattcaaatttttttgtgaatgtgtataactatatgtatacataaaagtatatttaacaattaatcaaatgatatgaaaagaagtaataataattaattntttaataagacgaacgatcaaacattttgtatatagtcaacggcatccaacattttgggat

SEQ ID NO: 72659 - DNA, 413 bp, Oryza sativa
  unsure (1)..(413): unsure at all n locations
agcttctctggttcttggtctctgnccgaggcattgatgccaaccccgagaagattcgagctattgagcggatgcgcccccccagcaaacttatggatgtgcaatgcgtcaccggttgcatggccgccctaagtcgtttcatatcaaggctgggagagaaggcgctacccttgtttaagctcctcaagcgctcggggccgtttacttggacggaggaagctgaacatgccctcactcagttaaaggcatatctcagctctcccccggttctagtcgccccggagccaaatgagcccctgctactttacttatcggcgaccccccaagtagttagtgcagcattggttgtggagcgcgatgaagacaatcctcatttcgtgcacccccactctgtgctaacttggcccgggagc

SEQ ID NO: 72660 - DNA, 363 bp, Oryza sativa
  unsure (1)..(363): unsure at all n locations
agcttctctcgctctgttcaatggccgaacgggcagtggcgcacaacctctctccgagcgctagcggtgacgacggggagcaaaacccgcgccgtcgagctcgtactccactgcccccctctcgccgaagtcttaagcgggaggaggcgctcgatggggtcgaaagatccgcgacttcgccgcccacgagcgatggagaatgacggcgagactgggagcgtcgcctcctcgtctacggcgatggcagcacgccccanggcgcgctccaagctgcgggcgcgctcttgcgtcacccgcccgtcgtccccgatccagagactccagcccgacgttggctggatgacgtggccgacttggtcatga

SEQ ID NO: 72661 - DNA, 478 bp, Oryza sativa
  unsure (1)..(478): unsure at all n locations
ctaagcttgagtgctttttatatctgatggcattgtctaaaattttatactcatttaatcttcttattgtgaagaaagattgaatttatcttggtcacctgattctttttcttctatttccatagaactcttgctttggttctccttttggatgacacctgcatagaaagaataaattaagaattgcaagaacttntgtatttcttaaccagcaagttctgaaacatagagtggatttaccattctttttcataagtccatttacagtaaacatatatttgattacagtgaaattatacttgaattccagtaaacagaaactgtaactacttaaaaatccaactacaatcaatntgataattgattatagacactgaagtgaacaaatgaatcagcttggataattctttcannaataatntaatattacactaagtatgtatttcaactacagtgtantgctactantattcaaagt

SEQ ID NO: 72662 - DNA, 453 bp, Oryza sativa
  unsure (1)..(453): unsure at all n locations
agcttcttcttgatcaccctcttgcaccccacaggtttacacccatatggtcgctctgtcacctnccaagtcccgttagcgataatggaatccatttcactacggacagcctccttccagtagtctgcatcaagagatgcatatgcttctgaaattgacttaggagtgtcatccacgaggtacacagtgaaatcatcaccaaaggacttagccgtcctttgtctcttactccttcgaggagcttcactgacatcctcctcagagacatgttcatgtgtatgttcaatttgttctggtggtgtgattgaactgggaattatttcagagggttgactcgaaccactatgtgtatccttcattgggaaaaagctctcaaagaaggtagcatcacgagacttcataattgtaccaacatgcatgtgcggtacctcggatntaactagtaaaaatcta

SEQ ID NO: 72663 - DNA, 447 bp, Oryza sativa
  unsure (1)..(447): unsure at all n locations
aagcttttccttacgctgtagcatacaagctgtaattacattcatctctgtctagtgaacatcactaagttcaatccatcaagtatgttaggaaacgatgcaaaatgtactatgaaatcatattcatacattcatgaaaacacatatactactcacgaacttgcctgaggtttggaacccattgaagagagaactttagaaacataagtgtggaccaatccgngcgtctgttgataccttgcagttcaagaagtccagtcaaagtaatcagcagacagtgaaacgagtagcatattaagtactcaagtatgttaagtgttctgacaatgtaatacaaaactagcaacttacattttcagagcccaaatctcttctcagaaataacttgtgaattctgttaaagctggatcagaataacatctgaattgaagacaataactaccggag

SEQ ID NO: 72664 - DNA, 392 bp, Oryza sativa
  unsure (1)..(392): unsure at all n locations
agcttattggctgcttggtgaacaacgtgtttgatgcatgatcagttttcacccccctacagaatggtgtccttgcaatcaatcttgtgtggacgtctatgcgggttatctccatccatccacttctttagtaaagctgagttgttttggacaacttnctcggttttcatgaggtactacctaaacgggtaaataaattgtttgtaggaaagttttttatataaagttcttaatatattttataagtttctaataattaatacctaattaatcatatgctgcccgtagaaatatacttccaatcgctgaatcgaatgcaacctaagaattacataattgaatcatgcaagagagagttaaacacaatttatgtactccctccgtttcacaat

SEQ ID NO: 72665 - DNA, 419 bp, Oryza sativa
  unsure (1)..(419): unsure at all n locations
accttgatactaagcttgtcccactgtacctaatgatggtggtttgttcttatacaacagatggtaagtgcatctacatctacaagggcaagggcttcacccaggactatggaaaagacaagaacttcacccacgaatgtggcaaagaccagaactttacctatgaatgtggcaaagaccaggactgtggcacagacaaggacatcacctatggcatctgcaaagagaacatcagctacagctggaatgggtgcagtggagcaatccaggaagaaagtgaaagttagaaggtcctctggatagatgttgaaagttgacagttacaagttgaatgctagtgaataggataagaaagtaacctanggatactnnttggacatgttagcaggacacatnagtacttatgttagtgggtatac

SEQ ID NO: 72666 - DNA, 422 bp, Oryza sativa
  unsure (1)..(422): unsure at all n locations
agctngactggttttactgtaattaaaccttataatttactcacgttttttgttcttcaaggtatttgaactctgaaatagtagtttacataagcctgaactggttttcgttgtacaggttgcatccatggtatctaatgccacaagtcaagttttctcaacatctataagtaaggttaaaccacaacaggtatggtaatccacgattcaattgatcaccattcgttcaaacattatctgctcgttcccaaacatatctttcattctttcctcgaatcttattaaggtgcatacttctgagcaattcatagtgagcctatctgctatttggaattgatgcagttgccagcatatagtcaaaatctacatcctctagatntgtgattcagtgaatctctgtgttcacttggttagaatattca

SEQ ID NO: 72667 - DNA, 331 bp, Oryza sativa
  unsure (1)..(331): unsure at all n locations
ctaagcttgtaccccttgtggactgcccggataggttgctaagtgcaggccaatcgtngatggttatgaacagcagcgctcgtaggttaaactcctcctgtttggcctcatcccacacaaggacacctttcttctttcacaacagtttaagatcttcgaccagtggtcttatgtacacatcgatgtcgttaccaggttgctttgggccttgaattataagcggcattattatgtacttccttctcatgcatagccacggggggagggtgtagatacacatcgtaacgggccaagtgctatggccgctgctcatctctccaaaaggaatcat

SEQ ID NO: 72668 - DNA, 440 bp, Oryza sativa
  unsure (1)..(440): unsure at all n locations
agcttagttcctactggcaacccacttgaattntgtgcatccacgggccacggcccacggcccacggagcaacaacgcgagcatacgggccatcccactgtctagttgggctcgattcacccagaagcggcccactaagcgcgaggggtagcctggcccagtccgagaccaagaaagaagggatttttcatcaggtactatactctctctccatcaaaactagctagttaggtggcccgtataattgcatgactagcacctatataaaattatttaagttgttttatacatgattnntctcaaatttgttaaatagtcgtctcgttgtattaccatattaaaaaaaaatcaaatatcgggtttccaagtttatagtaagtcataccagtcatcacccncttactttnttttgctaccccttaatttacttgtccaatatg

SEQ ID NO: 72669 - DNA, 482 bp, Oryza sativa
  unsure (1)..(482): unsure at all n locations
ngcccactntattggtatctgtactttgcctttcacttgagacttatctctgtttttctggtatagctaagctaatctatgctngctcatcttttccacaaaggctttgtgctcaactggtgagttttgattggctgggagagtacttgataagtcttcagataaaaacactatccttttgttcagctccagcatatgcatttcaggtttcactcctagtaattaagataatgtttatgcatgatgtgtgtctgcaagtgtgaaatttggcctacttagtagctntcagttggccaagcactttgacagtgccctccaccctggcaaattaaattaactctggattaattctgcaatgcaatctgatccaaagaccctagctagttgctgatgccattataattaactctagattagctaggcacctgagtagntattanaaccatgcacattgctagagctgaaatgttaagtgtagcaca

SEQ ID NO: 72670 - DNA, 365 bp, Oryza sativa
  unsure (1)..(365): unsure at all n locations
ttcttgttaatgactaaccaaaccaacttggactaaggatgttatctggacagcggattaaattgttcattatctttaaagacacaacttgaaactgagcatgcacttaatcgatacttatattcactacactagtctgtctatatcatgtctgaaaatattagcaattcaccataagatttaatccggaactaaagagcataaaccatgttgatgtaaaggtaaaccatagacatattactctcaataatagggacacgcaaaatagatatactataggtgtaataaacaattatatctaactcatttatgtgtaaaaatggaaacatcaganaggaacaaaagagaataatgaagcaaaatca

SEQ ID NO: 72671 - DNA, 479 bp, Oryza sativa
  unsure (1)..(479): unsure at all n locations
ntcagctaagagacaggatatgccacctcttatgtacttcttcttttatggacgctcaacatgggttgtagccttcacaattgcaatatccaattcctggtttgaaaaaagacaatgcttaacccgcggcggagtaaagcatataacagtgagcaattgagcatgagaatttccaaacattcttcagaggattgatagaattttcgaccttataatcactgttcacttttgccaagctcacagttgtggtgtccttgagggctccaagatacttcctgaggctcgtcggctgagtgccaactcctgccatcctccttaactcacagatgatatactacttgacctgaatatgcagcanagaaccaaacatactacaaatgagattatctgctctaaataaatcttgatccatccaaataaatctacacttcaaattcatcaaccagaaataagcaacagcacgaacagttgatcacaac

SEQ ID NO: 72672 - DNA, 451 bp, Oryza sativa
  unsure (1)..(451): unsure at all n locations
agtctttatcttcatcatcgatctcctccttgctcttgctcttgcggctctcttcttcttcttcctttgccttcaatgccaagtcttccttcttgatgcttgtcattgagccttggttgatgtattggatgacctccttggactcttgcacaagcatgtcacgggcaagaatgcgtccgagcaaatcatgaggtgtgagagtcttgtagtccggacgctcacgaatgatggtaaccaaggtagagttccttgaagtgatggctcgaaccatcttcttgaccacaacctcatcggtcatgtccttggagccaagtcccttgatctcattgacgatcttgctcaaccggtcatacatgtcacttcggctctcaccatccaacatcacaaatctctcaaattgccccttgaggatctncaccttggactcacgaacactatccgtgccttcatg

SEQ ID NO: 72673 - DNA, 373 bp, Oryza sativa
  unsure (1)..(373): unsure at all n locations
ntgctagttctccattatntccagaagtattgatggtagatattggtctataatgaacgtcaacaaaccccccaagcataaacctttgctcgtcccgagttaaggacttgcataaactaaacttagttgttgatcaggagttgctactatgtggtccatctcaaaggtactaagtgcatagtttgtgatggctcttaagtaccaaattcatgccatcagtacctgcataaaatggaaagcataaaacatccaacatagtggtagggtatatttgtaacaatttccacgagtgttggtgtatatttggatgtagatgacaaactaccanagttgagagaatatatacatgaagaacaaggagagtcaaactcat

SEQ ID NO: 72674 - DNA, 422 bp, Oryza sativa
  unsure (1)..(422): unsure at all n locations
agcttctcttcgtatttatggagtacgcatttattcttcatactgaatataaaaatcacgattaatttaatgtagagaccagattaatttctactttttccgtttcaggttataagactttctaacaaattgtatctagattcattaataattatataaatatggataatgttaaaaagtcttataacctgaaacagaggtaatagtaaatatcgacgatgcacgtataatctctagctcgtaaataaatttgcatgaacagttggatatattaattaacctgctgctgagtgctggcattntgcacgaacgtgtgcatgcacctgaccccaccaaacgcatagctaccattgcatcgaccgccttcatcggccattcaaccttgcagcgctcgaccggtcatcattcatcagctaataact

SEQ ID NO: 72675 - DNA, 518 bp, Oryza sativa
  unsure (1)..(518): unsure at all n locations
tattgtatcacatattctacctcgggcaatttcaccggaatagtgaacatgaataatgaaaaaaaatcatcctgaatgattattaacgagaagttntcacttgttaattttcaccagcagaaaaggattactaagagcaagtttaataatatagcccactactatcttcaaattatatataaccaatctaatagataattcatacaatagttaactacaaatatatactacaacattaataattgatcccgcatgtcatacacacatagcgttntggaatccgtgctgcagttggatacaaatccgcttctcttcactcctncacgtatgcttatagctgactttacagttgggtatttacctgttctaacatcatctcaagcgagtacattaagatgatgtaagcgggttatannnatgtgcacatcatatttatacttatatagaagaaatatgataggatagangggaanaacatgctacagattatagcactatagcatgagctcaataaacat

SEQ ID NO: 72676 - DNA, 451 bp, Oryza sativa
tgcttgatcttcttgaagaatgaagaaacctgtgactttgggcacggcgcagtcgctatgcaagttggtatgttctctggctgctctatccacaccttgtgccggacaccagcggtttccagcttctcagccaggttcttcagttgtgtctctcctttcacctccagtgttacctatacacaaaaaaggctctcagcacagctattgatgccacatataacagaatgtaaacgatgcaggataaaagtagtaggtactagtgcagttgttttttcgctcgggatacatcttgtagccggaacaaaaatcaattgtcaaaattacactattccagaggcatgagttgaatccggcttcgcaagaaactactgggacaggttacagtatcagtactctctgtaatgaatgaatcatttagccatttagcattctaaatcactataatcagtca

SEQ ID NO: 72677 - DNA, 279 bp, Oryza sativa
cacctggatcggatcgcggccgtccgatgtggcgcgagagtaagatctgaccgcgggagatgccatgccgccggcgtggtgcccgctcaaacggaatcggtcccaccacccaactttcttcttctggccgattacctggcttccgtatcgacacacgcgtggaccggttcggacactgacaggtggggccacctctggtttcttttttttctttttggtgtcggtgaagcagcatcagtggttcctgcgtcgcattatgaaacttcagcaatattttct

SEQ ID NO: 72678 - DNA, 338 bp, Oryza sativa
  unsure (1)..(338): unsure at all n locations
agcttgcttatcgatcaaattaaagagataagctagggttntgatttatctaaacgatttctgctggtcacgcgcgcggaggaaaaggcagttccaaacacggaaacataggaataagttaaattattgtcaccggactatggcccagcaacaaaacgaactaacaaatcaagtttatctctattgattgctccttatcggcaggaaaatcggaggaggtcgctccggtatatcgcaatggcggacgcgtggtgtgcggcgcatcaccgacctcgtagacgttgtttaccaccttatacaaggacgtcgtcggtgagcgagaagacgcgcgtgcactt

SEQ ID NO: 72679 - DNA, 294 bp, Oryza sativa
  unsure (1)..(294): unsure at all n locations
ngagctcactcggcctttgtcggagaagaagcctaacttctttctttgcttataggagacaaagggaagagaagagaatagaggacatgaaggatggatcaagtggtggtctangccaagtgcactaatgggcggctgtggatagaaaaggagacgaagtggtgttcctcaagccttattgaagacagaaccattgcccatggtagaaaacttaactatttgccatattttcgattggcaatttatccagtacttctcttaagtatacacatactaatataccattggagagag

SEQ ID NO: 72680 - DNA, 432 bp, Oryza sativa
  unsure (1)..(432): unsure at all n locations
agctntcattaaactcctgttctaagaagtatgaaagctacaacttcgacatgggagaaagaaacactgacgattgatggcatctctaaacaagctactagaatggctcctggcactggaccccagcaggttcacaatttcaattctctttcaagtaagttattgtatggtccatcaagcagagataacttctgaatttaagttgcataataatatgcatattcaagttcacagggctatttttcttttcaacattctaattttcagggggaagaggcatagaacataaatttgaccaatatttctaatgaatgagtacttgattctgaaaaaatgcttaacaaactttctgtttaatgacctccttttcttattaccaattctttgaatatactgatgttcctttttcagcacatgtacttaacaacattg

SEQ ID NO: 72681 - DNA, 290 bp, Oryza sativa
  unsure (1)..(290): unsure at all n locations
acacttgcaagtaatgacaaatctaggcgattagataaaaaatatgagacgtggtgagagaaagagaccatgctgatgctgacacgattatcctccagaaggttcttggtgaaattcttatactaattgtctttcgatcattcacctaaggaaaaatgtgccagataatttcctaataaatcaggaaagagtgatccactttctaccatatagcttctatgtcatgtcagaactaanaaagggataaaagactcactagtggatcagcaactctaccataccaaatgaca

SEQ ID NO: 72682 - DNA, 407 bp, Oryza sativa
  unsure (1)..(407): unsure at all n locations
tctaacaggtgtggacaccaacatactctgcactagtagtggtattaaaattcgaccaattacagatcaaagtgcaaatatataatntcaggcagttggcaaccatatgtcttgtgtatactgtctagtccaatctttgctcactttatcagtgcgagatcatctgtgatgtagtctgtatcatcaattaaccagcggaagnttgttatttatgctcatctaactgccccttgacggtattgttatactaggattatcttggcatatgaatccaggatcatcaactttatccactaaattaaagatagcctaacacacctattacagtgtggaatagtttcctgagtggtgggcataatcattctcctgatctcactccataccaactcatatggtccacatttgca

SEQ ID NO: 72683 - DNA, 410 bp, Oryza sativa
  unsure (1)..(410): unsure at all n locations
agcttggagctcagctggtgttctccctcttcttgttcgagaagattctctatgtgtntcattggaagctggtgacccaagaacatcggatgtgtcaaccgctgtattatcgattccaataaactgattatggtgnttggattccggtagatttattcatgatgtgtaccgttggtgtcgtcttcatggagcacttgccaaacatgatatgttgaacaggctacacgctgacatggttaaattagtgctgtgcacggagcaagatatcatgttgtgacagattgatatgacttagccatgtgaaaatgctttgtactattgaaatgtcccatagatgcctattaagcatccaataagctcatagtataggagttcgggccttagattcagaactctggtacagttccatg

SEQ ID NO: 72684 - DNA, 468 bp, Oryza sativa
  unsure (1)..(468): unsure at all n locations
tagcttgtattttcttattctcanaacaagccgccaaatccagctgggtctgaagttcacgaaggaaatattattctagtcacactagacaaattgtcggctgaacatatgcaggagcttgaacagatgatgagcagcatgaaggacaagttcatgaattcattcaaagaaacccgccaagggacaattgtccagaaatacaagttgaaagtggtcgctgccgatgaagttggttcaagctcagctcaaggcgataaatgtactgctggtgaaccaggcgacaaaggtagtggttcttatgagggcatggntgaagatcttggtccagatggcagtggattacaaccacagtttgacaacttccaagatcggattgactacgctatgcaacatgctttgatcaatcaatcaggagtcttattcaatacttttaccaacatggtgataacaatgagtgatggcacaata

SEQ ID NO: 72685 - DNA, 226 bp, Oryza sativa
tgcttgccatgcatatatatatggtagaataataatattccactattattatgtatactaacctcttgcagggaatgacactaaagtggaggagaatcgacctcaactcagacgattaatcaatcggacgatgtcaagaactagacttgtgtatgaatgggccaagaactcagaattgacacgatgaatgggcaaaaattacaagtctgcggagaagaacaacgga

SEQ ID NO: 72686 - DNA, 433 bp, Oryza sativa
  unsure (1)..(433): unsure at all n locations
gctggtttattttntatcttaccttttactttgaatntctaaactttattcaaattaatccaaaaacttgtgctattaattggataaaggtcttaactctctcctttcacttgtctttagatgccgcgctacaagcctgagtacttgtttggtgttgagggttttgtccaggagttgcgtacaatgtcctttgtcattggatttgggactgcccctttttatgcccagattcctcatgatcgtcatgaagagaagtgccgagtcaaggtcaccttgaacagcaatagtgaagaggtcccctcagtgatgttcgaagctggaggaagaaactacatccatgcatgtcangaggtggcaaggatcgccatatgagagctccgtgatcgctacagtgatcagttggccgacactgagtatcgctaccatcctcgtc

SEQ ID NO: 72687 - DNA, 214 bp, Oryza sativa
  unsure (1)..(214): unsure at all n locations
tcgccgacatgaatatacccncgagtcacaacacctgctgtgcaaccaactccttgtgtacaacacgacgcgagtccgtcacagcatangagtagttgtgcattcacagaggtgccggccnctggtctcccgatcgcaccactagctgcagtggaccacatcgaggtaattgttgtatccgatcatatctaataaagacattacacattccata

SEQ ID NO: 72688 - DNA, 468 bp, Oryza sativa
  unsure (1)..(468): unsure at all n locations
agcttgatggagcctgtgataaagtcgctaatgccgctactccactcatccaggcaatgttcttcaataacgccggttcgagtacacttgatactgccgaaatcttcgacaagctgagagtcgctccagatacttatttcaagaatatcaaagaagctggaagtatgggagcaagtctggcattggcgatgaccaaatccctttatccaagggttgatatggatgccattgatggctttgcagacgggacgagcgaagaagctgctcttgacctcattaacgatgcacagaaagccgctgacaagattgctgctgatgtggttgaaagattccaagaagtcgaccttcggccgactggatctgataagtctgatgatgaanaaactgatactgattgatataacaatggatttgataattaatgatgatggaggctcaatttttacaatactgatgaattatgctatg

SEQ ID NO: 72689 - DNA, 357 bp, Oryza sativa
  unsure (1)..(357): unsure at all n locations
ctaagctttatcataccagagtggctnggtgggtgcactatagggtataatatctttntaatcctttctcttgntaggtgccgggtgtgatgcaatatcaaaggtcttaagtatttttggacctgacctacctcgttctagaaggggttattgcactctacatcattgatgctacttaagatcatatatgccatctttcaattgctcaagctgtggtgttaggtaaagctatactgagctttgcatcatatccgcatgcttccacaatatcccacctactntagtttttgggttntgcacgggccttctcatgggtagaaccttcactagacctaactcatcctatgtagtatgaat

SEQ ID NO: 72690 - DNA, 430 bp, Oryza sativa
  unsure (1)..(430): unsure at all n locations
agcttatcttcagtacgtacttctataatctatttactcccttcgtttctttacctgtacccttacaaattaagcattgactgattccctttgccaataaatctgtaaaaatntactatctctttcatattataaattatttgattttttttattagtcaaagttataagcttatagaaaaaatatactactccctccatctctaaatatttgacgccgttgactttttaaaatatgtttaaccattcgtcttattcaaaaaatttaagcaattattaattctttttctaccaattaattcattgttaaatatactttcatgtatacatataggtttacatatttcacaaaagtttttgaataagacgaacgatcaaacatatttaataaagtcaacgacgtccaatatttaaggaatgagggagtacta

SEQ ID NO: 72691 - DNA, 378 bp, Oryza sativa
  unsure (1)..(378): unsure at all n locations
tcacacttcagttcacccaatctgagccatcatttcttctcttcgtattactcaaaccatcgaaatgcattgcagaaacctacggagagtggcggcgccctgccgcanaatgtggcggagtgggctaaagatcangtagccgcaagccggaccgcggcgaatgagaagcaagagatcgtggatgtgcccgtggcatcatcagacaccanaggggggaattccgggaggatgaatgcgacgcactcggtgagcattgtggccgagagcgtcgtctaccagaagggccggtcgtcgaggagatcttcccacgacttcgacaacaatgtgcaactcgtacgcattccttgcttctcgaggacattcagaactaccaccagc

SEQ ID NO: 72692 - DNA, 433 bp, Oryza sativa
  unsure (1)..(433): unsure at all n locations
agcttcaatattntctgcagcttttgctgcaattntgtagaacgttcgatacaacatgctgtatcgtttagacaacaagaacctgggatcttcatctacagcttcaaaaccatagttctccctcggagattcactctgagcatcctttctccatcttttcaaaatgtagtgtggtggaagttctttaatatttcttacctcaagaactttcagtacatggcaacatggaatacctgtgaattcaaatttcttacagctacaaacaaccatacattctgatgagtcaaatctaacaaaatggtcacggggcctgtttttgacagttacctcatactcagatattggtccaatctcaccacagcaataagccatgcaagtcaaggtcagttcanattccaacctgaacatctcanaaagtgtaggagtatatgca

SEQ ID NO: 72693 - DNA, 379 bp, Oryza sativa
  unsure (1)..(379): unsure at all n locations
tccatctgccttcttccatangaatcttcaacctctgcttcttcctgtatattaccagcttccatccatggctggtctcccctatttatacaccaactcctttccctgccagcttcgtctcccaaggcaagagcaacgcanagcatagaacagatacttcttctctccacctgcctcgcaagcttcttctgtttcttggatctcacctcgccacgccattgacgccataaggagcttgtgagaggtggtagccaataaggaggaggaggagatggngttcgtgctggtgatctcgctgcccttcatcttcttctccatcctgctcggcttcggctgctacttcctcggcaagcacaaaggccgcgaggagatgcgcacc

SEQ ID NO: 72694 - DNA, 442 bp, Oryza sativa
  unsure (1)..(442): unsure at all n locations
agctntgttattgccttcagtcagtgtagctttctgaaaaaccggactctctatcttggcagtgggagacctcangagaatactcttcccgctcggcttatcgtgttctcttttttggaagaactcgtctccagcacaagccaatttggcaatctttggcgccccctcgctgtcgctatttcctttggttggtagctcttaaccgttactggacagcggaccgcctccggagccgtggtttgttgcacccggatggatgtgttctgtgtgatcaatgcgaagagacgattgatcatctcttggtcgcatgcccggagtcgcagcaactgtggtgggttgcgctcagagctattgggcattcggagtgcttaccgctcaatgaacactctntcttctcatgggtgtgtgactgtcataagaagatggtcaaggaacatcgatg

SEQ ID NO: 72695 - DNA, 353 bp, Oryza sativa
  unsure (1)..(353): unsure at all n locations
gccttaaactagctgatccttctggaagctggagatcggtgctgttttgggcacttgcctcccgataagtttagcaaactagatatagtttaacagacattgcatgtgcagtggatgcctgtcggcctgttgctacttgcacggtcatcttctacccctgattttccagccttgcacgaacaggaaaccagaggttcgtggccatctgactgctgagtgcatgtgcttattacctgtgttttgagcaatgatctgttttgtgctttgtgtttgcccaacctctctatttgaactgtatatatgtgactgacggnccggtcgttctctcacgtgagggatattctcacgcactg

SEQ ID NO: 72696 - DNA, 395 bp, Oryza sativa
atgctagtctccttatccagtagaacggaatactagtacagggtattgggacatgaaaggtggagcttattctcaatcgaaactaagaagaagagggcacattttaacataagggacatgcaaacaatgtcaagagcaaatttgtcgctccgctgtcacatgggtattatgcaattatctcttcattccggtttcttttgttatacacaacatattgtgtgaactgaatatttgattggaatagttccagtggttcccttgggtcaatgccattgcaggtaatataattaaaatttctccctcaagatatcttgtccattttattcgtctcatcaccctgaaacttcttttctttcataatttcttcataacagtataccaccagcttgaccaat

SEQ ID NO: 72697 - DNA, 389 bp, Oryza sativa
tcaatataatgttccgggtgctgtattatgtgagggttgatttttttgattttttggggggcgaggcctcatagtttgtgtatcccaccatagtttaagatttttcagtacaggagttcatgccttatcccatatttctttctagtgatacaaggatgtaagccgcatattcacgtctgcatgtattgtagggctatatcttaaacactataatgggggaatataaaccagagaacattctcacatataaactggagataagcccgacaaatgcactgtatttatttgtgttcagaaaagaatggaatataattatcctcctatatcactgtagaaatgatttatctacaataattatgtattatatttgtctaaaaatggaatttaaa

SEQ ID NO: 72698 - DNA, 120 bp, Oryza sativa
agcttcattatttatctgtgaacaacgctagtaacgctatgatcaattgccactataatctataagtcattgtcattctgtttgcgactagcattagcggaatcacacacttaacttgct

SEQ ID NO: 72699 - DNA, 199 bp, Oryza sativa
  unsure (1)..(199): unsure at all n locations
actaagcttattcaactgctacagactgaacaaacaatccatttctgcttnttcgngcctagaccccccgccatctgaggaaacatttagatcctcaagtttataggccaagaatcgtgtggcacagtcaattctaattggaaactctgcttaaaatagatggctatagacactggactccaagaatgccccatgcgat

SEQ ID NO: 72700 - DNA, 430 bp, Oryza sativa
  unsure (1)..(430): unsure at all n locations
agcttccatgcctccttcctatggggccgaggctctagctactgccacatacctactcaaccggagaccttccacctctgttcgcaattctatcccataccagctcttgcataacaagcttcctgactattccaaccttcgagtctttggttgcctttgttatcccaatcttagtgccacgacacctcacaagctctcccctcgttcagcaccttgtgtctttcttggctacccggcttctcacaaggggtttcgatgcttggacatctctactcgtcgtctctatatttcccgccatgtggtttttgatgataagacgtttccctttgcggctattccccangatgcctcgtcttttgattntcttttacagggtttctccaccgcggtagctccctcctctgatggtgagcgtccgcgattttcctcg

SEQ ID NO: 72701 - DNA, 294 bp, Oryza sativa
ttcatccaaattcagcttatttaagcttctcttggcttaagacaaggaatttaaaaacgattcaacagagataataatttcattcaaaatttaaaaaagctaagcgctattgtctaacgctgccttccaccagaagcccgactgcatgcatatgccgtatttgacaacttaccgttgccgtattgacatcttaacgtggatgcagctaaccggcaaggggtcgcctgccgtgccccataacgtgaggagatcttttcactgctcctctatcctttcttttttacagccattaac

SEQ ID NO: 72702 - DNA, 451 bp, Oryza sativa
  unsure (1)..(451): unsure at all n locations
ttctttctctttcttccgccatgaatgtgaactggatggattgatttagttcgagatatggctggaaagggatggggaatcggagcggtggatgcggngagaaatcttgtgaagtttttgagggtggattggagcggattgatgaaccctattttgtccggcgcagttttgcattgtagcaggaaatggggaaaatggcgagagtctcggcggngaagacgaagagacgtttttcacttcggtattattagggtatcgggagtactaatgggcctgggtctgtacagtacttcatcccaattatgttttcagcgcggcccattgtgatccctatggacttangcgctttttgctttggcaatatgtgctcacaatgatgtggcccgatgcttgtaaaatcactttttacgcgattcaataattcttttgaattattatgatgcacatgaaa

SEQ ID NO: 72703 - DNA, 361 bp, Oryza sativa
  unsure (1)..(361): unsure at all n locations
ctcaagcttacctaccctcgagtggattagaccttgtttttggttttattgggtagncctctgagtgagctctccatagagttcaagatcatcagaaacggactcccgagtgaaaaggtataggcgtcttactctgtgcttttcggaaagatcgaaaaattatccgaaaatggctgcaaatctgagatttgcttctgtagattntccgacttgtccgaaaatgttttccggaaaatccgaaaattatagtcttggccttcaacggctagtttttgagagactcgggtatataaactcctccacccctcctttgagtggctgcttttcttaggcaacattagacacatccaaagccaaatag

SEQ ID NO: 72704 - DNA, 430 bp, Oryza sativa
  unsure (1)..(430): unsure at all n locations
tcttttatttgaagacatcttgaaatcactaagtgatttatttctttctaagtttgggccgaaaagagacttgcgtctcgattcgactttaaaagatgttnttcaacagctcatttggtaatgtaccgacctcctgggtcagatcattacttctcggctcccagagccattccacttgattaatcggctcccagagcctttttcattttctcggactcccagagtccagctgcccagcagcacatcaacccgcttccactcgggaagcctagtctatgatgcccgcagacatcccgaatcacacagattcgtttctgaccactcaggtcgttcatctgccacataggctgattcttggtacgattgccacaccacaacaacttttcacaaagcacatgccaacaaatctacgcaacgggaaccacctcac

SEQ ID NO: 72705 - DNA, 250 bp, Oryza sativa
  unsure (1)..(250): unsure at all n locations
tcgacgcggtgcccttcatgtgtgcgagctcgtcaagatgccgaatgggagtaaggaatcgcctnccgccgatctcctgttctctttgagcgagagcttgccgccagactgagctgacggatcgaggaatactctgcccgttatctggcaacgagaatattggcctgacgaagggaactgaaatgcttaatcgagacacgacgttgaaaaacttctgtaactagactcatctacaaattcttccaggtgc

SEQ ID NO: 72706 - DNA, 433 bp, Oryza sativa
  unsure (1)..(433): unsure at all n locations
agctngctcacataatgaaaaggctagtatttatatgctcaaaagattagtggatcccattaaatcaaatattatggtcgataataagtcttactccactatacaagttacagcatatccggcaggctcagcttggcattgcacatatgacagtccaaactggatctgtcaatcccacactgtttgcaaggagtgtatcctctacctcgacagctagggcaacacagctcatgatagtattgcccatttggaccaacccaggacctcagcttccccttctctgcaactggagcagtattcctacaccaaaagactacccttttcaacacgcattaacagganaaacgttgaagtctcagttctcaaagctttgatggcacgtaatacacgatgctcagctctggtgaaaagtatgccatttgccatggacatg

SEQ ID NO: 72707 - DNA, 378 bp, Oryza sativa
  unsure (1)..(378): unsure at all n locations
ctactcactngctttctttcattaagtaccataccatctattaaacacaggtgtgaccaattaaattagttctactaacctctttggtgtattgaccattaaatatgtaccaaataaatatggcccagccatttatcaatatagatatatcaaatatatgctcatacattagactatatcattgctcctaagtagctacaattgttgcaaagtcactatagttaatatcgtaaaaatgaacaactctataggtacgaaagaggacaatccatcaatcattatacattgtatggtatatcaaaactatcaaatacacgggcactaatgatactgtgagatatgagagctaattatcatgctagtgaattgatattatat

SEQ ID NO: 72708 - DNA, 449 bp, Oryza sativa
  unsure (1)..(449): unsure at all n locations
agcttgcatatgatcaatatctcaatcaaccttatcatgatagtcaccaattgagaatgacaagcggaccatagatgaaaccttcacagtccctgaattattcaaccattgcatatggtacgggtgtggatggcgacgtgtttgcaggccaagcttctcaacaagcaaggcactaacaatataatattgtngcagctctcaccatcaattataaatttgcacacctgccgtttcactttgcatcgtgattgaaacaaattatggcgttgcccttgctcagctgcaactaattgagtagaaagaactcgtcgaaccaccaatgactggtctggtgcattcaaactataagcacgcacggtggaagttgtatcagacccaaatgaactatcatgtcggggcgaaatatgagcctccaaataattaatatcaacaagcaaatcatctaaatc

SEQ ID NO: 72709 - DNA, 468 bp, Oryza sativa
  unsure (1)..(468): unsure at all n locations
agctttgttatgattggcttgatttgtttgtttggtgttttcaatttaggagagattagtaagcttaattaattttgtcttgaagtagtcgtcatatatatggttaattagctagctatagctagagagttgttgacttggtcgtgttgactgcatacggatctctcatgagatgacaactgattgcgtgtgaagataatcgtttagttaaatgattccaagatttggttcagcaaggatatgatgtgacagcatggcgtacatgtattattcaggtaagagtaacagtacttgaaaagtatccaattatccatacaagtgatgaaattaaaccanaatggacaatttgaaactatatatgcttcttgtgggttgtgaggtgataggcaaatgagtcttggttcgatccttccatgaactcaaaatccgtcactattaaggaaagaagagaaaatcacatattaatat

SEQ ID NO: 72710 - DNA, 472 bp, Oryza sativa
  unsure (1)..(472): unsure at all n locations
agcttggtctgtattatcactgaagaggcttctgatggcataaaaaaagctaaggtagtcaggtagcgcagaaagtaattatctcgttttccgctgtcattttctaaattttggcatatctctaggaatcctggaatctgtgaaatacgtttccttttaccattagtacattagtttctactatgtttttttgtaatcacaaggtaaacaagtttgtaatttgattaaaatttgatgacaacacacacatgttattcctttacttatgaatagcaaaatgaataactagaagcaagctgttgaggatctccttgcagaatagctatcttagtggtgcttattntacttnctctaaaaagaagatcatgcttattntgtgtgaaattatnntttaatctaaatttggacattagaagcagggatgtttaatactagatgtataccacagtaaaatctagtttacatatcctaa

SEQ ID NO: 72711 - DNA, 428 bp, Oryza sativa
  unsure (1)..(428): unsure at all n locations
taagcttccttcttcgcttcttnctgctgaagacgaaaggagtttgctctttcttacagtcctctctctggagaccggccacaccaatgtgagatgcctccttctcttcttctttcttctctgaagccgtgtccaaagagagatgtacagtgaatattggctctttgtatcctaatatatctcaaaagatataccatatgagatgccaatcttaattctcgtctcctcacttttcttctatatatgttatatggtttgaagtgcaaagctgcttctttctctctctcctgctgctaccttgtcttggttgagttgcattggcatctcactagcctaccgattgttgctctctgattccctcttcaatctcgtcatcgtcattcttctcttacagttcatcgcagagtcgcgactcttgcttagtcgtt

SEQ ID NO: 72712 - DNA, 456 bp, Oryza sativa
  unsure (1)..(456): unsure at all n locations
agctntgtatacgtatacgcgtatacaaactttntatatgtgatattntttctgggttttttttccaattttttaatatgtagatatacaaagtttgtatgtgtagatatacaaagtttgtatacgtatgtatacaaagtttatatacatgtatatatttttatacgttaaaaatgtatacatattaaagaaaaaatatattttatatatacgtttgtacatactttatatatatacatataaactttaaatgaaactgattagtttggcaatgatattatacaaatgttttattggcacaatagctataagagataaacttaacacaattaccttacacggaacaattattatatatatgcatgttgtgttacantttgcaaatgagctatagatactcgccaaggctaataatctataaagccaagtaacanacccctttatagctaatcgatt

SEQ ID NO: 72713 - DNA, 430 bp, Oryza sativa
  unsure (1)..(430): unsure at all n locations
tnccgttgaccacgatgggttgcgatgttagcccccgatggtgtacctttgggcactatgtntgtcgaaagtatatgtatgtagttgcaaaaatgctaccttaaatcgttctaatgattattattcaagtgagttccaatggagcanaaggattgtgttctttattctagctggtttcttgtatttggtttgcatttaattagttggttgtctctatgctagttggcttcttgtatgttggttttcctttaatttgtaataatattgcttaatgaaagggataggtataactctatgaggatgatgggcgaccctacttggtgatgagagaagtaaaataaatatgtgtaacaactttacattatgatataattctattgcccaacacgatttattagaccacctaccagttatataaactagtgatctc

SEQ ID NO: 72714 - DNA, 390 bp, Oryza sativa
  unsure (1)..(390): unsure at all n locations
tggcgncaggtagcagaatggcgcagacagaatattcatattcctgtggtatccgngaacatgtcggcgctggactttcgcaggaatcaactgcctaatcaggtgtctgatgcaatgcacgcctgtggtattgacggccaccagctgacggtagaaatcaccgaaagcatgatgatggaacacgataccgtaatctttaagcgcattcagatcctgcgtgatatgggcgtgggcttatcggtagatgaatttggtacgggctnttccggattatcccgcttagtcagtcttccggttacggaaatcaaaattgacaaaagttntgtcgatcggttgctgaccgaaagacgcatccttgccttacttgaagccataccagcattggcaaag

SEQ ID NO: 72715 - DNA, 467 bp, Oryza sativa
  unsure (1)..(467): unsure at all n locations
tgcttctctctacagttttctaactttactctcattttcgatgcgcacttttaaattgtgtgttttttaaataattntacagaaaaattattttaaaaattatattaatttattttttattaatacttaattaatcatatgttaatccgttgctctgtttttaagcgtcgggaaagggttcccagccccaaacaacacagccaaaccctgcctcgggctattaattaactcaggtcttctcttcctctctctgaaaaaaaaactcagagcaagtagcaagagttcttgataagttaaacacaggaatctcgtacggatggatagaaataatgccttatccatctggattagcaggaaaaattgaattaaaatcatccaaagagataagaaattntctaatccaaacaagtgtattggtccagcccttcagctggtttgatatacgtttcatgaatttggacgggatt

SEQ ID NO: 72716 - DNA, 449 bp, Oryza sativa
  unsure (1)..(449): unsure at all n locations
agcttcttgtnggctgccaaccttattcccaccaatcgccaggcgccgtcgtcgggcttctacctaccgccgccgcccaatgaccgcctcccttctccctactggtcaccggccaccacacacctctcccgcaattcagcgtctagcgtcctcttcgcgtgcatgcacgggcactcatggagtcagtggtgctcgcgagtatactcaggcgtcgcaacgtactccatctcccaactcttggagattctctcaccaatcccgacggtgtggctgacatgcgaccacaatgcggacacggcgcagatgcgcggcgagctgccacgcaacaatgttgtggtgtaacccaaggtgacgatgtgtcgggagcccttcctacttcgctntttcgcgctcttcgccgtgcatgtccatgacgcagccgtcagtcgccactcttctcccctacctgt

SEQ ID NO: 72717 - DNA, 439 bp, Oryza sativa
  unsure (1)..(439): unsure at all n locations
agcttgatgtatgaccaagtggnnaacaattatccacagaatagaatgtaaacataatatgaaggattntaaagaaacgggtggaaaacttcgatgcccaaacaaaatcccttcaatttcaaatataagtccatttggattcagtacaagaattaaggtaggtggtacaaaatgacactactgtccaaaagtaattgtcataattaaagtggttggcaaattaacttaattgattaggcacatttataacaggaaacagaaagtaaaaaaagtcactaaggatgcaaataatatcacaagaattaattgattgaactntacaagtgataaaaacaataaataanaagggaataaattaagttttttaagggctgacttctttnttttttcatattgtccntgtccccaccatctgattgtaaagaaagacagtcattac

SEQ ID NO: 72718 - DNA, 424 bp, Oryza sativa
  unsure (1)..(424): unsure at all n locations
actaagcttaccttgtttggtaaaatagttcatgttggctattccaatgaccttcanaggcacataatgatatgacagaaacctcaggtccatccttcatgggtcctttgtacactactgtctcatgagatgaaccaataatgttgctaaaatcctcacaagctacttcaagctcttggcgacttaactntggcaggcttttcagcatatcagaatctggtgagagcattaagatattaacagcactattcaaatcatatcaattaattaaccgataacagcactaaccgatcagcactgttatctcatcactccaactttntgatctgttccacgaggatattcttatcgatggctttagcttgcaacttctggaagcagtaattgcaccagtgatcacatatacaagcagaagaataccagt

SEQ ID NO: 72719 - DNA, 260 bp, Oryza sativa
  unsure (1)..(260): unsure at all n locations
gaaaaaaaaaaaaaaaaaggaattgaactgtgaacccaaacaaannnaaaaaaacaaccaagggaggagtgcttaagaagaacgaagagggacggagaacaacaccccccagacagaaaaaagaggcagcacgagaaggaagcggaaacggcggagagggggacacaaagaggggcgcgaacaccaggagaagaacagaggaaaagcgagagcgggaaagcgcgaggaaaggaagcaagaagaagcagacagacaccaaa

SEQ ID NO: 72720 - DNA, 351 bp, Oryza sativa
  unsure (1)..(351): unsure at all n locations
agctttatgctatattagttatattaccgatggatttgaatataaatatattntttacaaaacattttctacacctatgtacaaaggtagcaatgtatatgaatagtttttagtgcaatatattttntattgtctttcgtttttccgaacttattttttaaattggttttagactcatcgaacatgcacgtgtgtaggcaagccgcgagctaagctcaaggaaaaacgtgtcgagtgtcgccgatcgtgtgccgcgtccgtcaacgactaatcgcgtattagccggaccctctatctcctgttatagaaacctataatgaaaaactaacgtggcgacatactgtcgtctcg

SEQ ID NO: 72721 - DNA, 423 bp, Oryza sativa
  unsure (1)..(423): unsure at all n locations
caacaccaaacatggccaatgatattaatcatgtaaaatcggtataaatctaacgggctcatcttttcgcttatgcttattagccagaatntaaattttcaaccttataattggagttgatnttggggtttttttcaccggagtttattttttagcccttgcttttagatcgttaagaacacgtacagtaaaatttattcacaaattatttttcgttggaaataagccatttggcttattcctcanataagccaaacaatggggtcgtaaaaggctaacctcaatacatggaaatcttcattgatcatgatgaataaaanacatgaccagagctactactatacantaaatataaacaatattgtttttataanaaaacactactaatnggtgcatccaactcacattaatagataactcagt

SEQ ID NO: 72722 - DNA, 416 bp, Oryza sativa
  unsure (1)..(416): unsure at all n locations
agcttcttcaccatgttcccacgggtatcttgagaagggtgagccttgtccacaagtccatgatccatatgattctccctttttcctacacaatccanatcacatgtagtgctcggggaaatgtttgctttggagcaataagtgtcctcatgttgatatttgttcgacgaaattttgtgcgcttttttatggattataaaaatgaactgtgcggagtactgtagttgagaactaatgggcaagtcacgcgcaaggaatacttggttgtttgcctgtgatttactttcatgtgtgcattccatgattacttaaagattccatgattatttaaagaaggggaattagtacctagtcatagctaattgccgataagcacacacatgcagcaaatcatcagtacttatctactcaccgga

SEQ ID NO: 72723 - DNA, 322 bp, Oryza sativa
ttaacttttactattttagtattaaccaaatagcaaaataatcccttgcttcgaaagattttttttttcacatttggcctctcaagtatatatttcttggatggatacctagagctatgtatcgatcctcaccaccaacgtatgtcgtatgggcagataaatcatacatatatggcatctggttgtgcagacacatctagtttcttccttgacccatcgttttgcatccttcatacagtttgacggtagactaaactaactgcacccctagctagctaaccctcttgtagctagttatctcttgttaatttgagtagccaat

SEQ ID NO: 72724 - DNA, 420 bp, Oryza sativa
  unsure (1)..(420): unsure at all n locations
agcttcacttgtccacgcatccactttcgcgaatgccctgcctcgtcgtcggccttttgaggattcgcacggngaggcagttcgccattgtaaactcggttcgcccgcccagccgcttgacgcgttaacagctgactatgctcgacgaccgaaacatcgccgatcatcctgcgggcttcggcttcggcctggtcgagggtcaacactgtaaaagtagagtgtgaagctatgtcaaaagtcaaataaggcgaaataacaaagcacaacagtatatagcaaaagaacagtcttactgttcgcccncttatgaagtatcaagttcggcaaaccgtcgacctcttcgccttgttcaaccgcgacttgccatgactgggagaggggaaaaatgcgaagcatacaaaattccttcaccaagtcacg

SEQ ID NO: 72725 - DNA, 344 bp, Oryza sativa
  unsure (1)..(344): unsure at all n locations
ctaagctagtacaagattanaagtattgaacaagaatagagaataacatatttgtggaaaggtaagcatatgtctgttgggggtagattagtgctaattaattatgtacttttaagtttagctatgtttatgatttctgatgtgatgttcccaaaggggttcttcaaaaaatagattattatatatcacgcttcttttgggaaggggatgatcataagaaaaggtacagacttactaaatgggatattatttgccagcccaaagatcaaggcggtttggagtttcataatctggaaattcanaacaaatgctnngtgagtaaatggttattntaagtaataaat

SEQ ID NO: 72726 - DNA, 403 bp, Oryza sativa
  unsure (1)..(403): unsure at all n locations
agctntgtaaattagtgttgcatgttaaatcgtcgccatctcgcgggtatgtaaatggatacacgcggaaaatatatgagcccaccggttggcttatgtgtggaataagccaaacgacatatttataaacaaaaagtaatttgtcaataaaacttttatatacatgttcttagcgatctaaaagcaaatgctgaaaaataaacttcgacgaataaaacctcaaaatcaactccaaatttaaggttgaaaattcaaattttggctgataagtataagtataagcgagaagattagacagataatctcatatgtttatgctttgtagcggtaattgtccgaatggattcaaaanatatgtaattatactagctattggcactggtaggctactagtagtagccta

SEQ ID NO: 72727 - DNA, 456 bp, Oryza sativa
  unsure (1)..(456): unsure at all n locations
tgtactctggaaccatactctccattaatatatctctgttctgcacaaagaaaatcggtggtacacaacagtatcgatttgaagaacctctntatgggggcttccatggggactccaaagcgttcctatcgttgtcagcccgatatggtggcccgtggtccacagcatggtgatgttgctcgcagtgtcatggaatttaatttgatttggtcttcgcttggtagtaccactggactcctaggtagagatgctttatggcagctcagtgtcgctgaccttgttagttgacgggtctagagtcattaatacgtatggcattggacgangttggttgtgcctacctaagcatggactgaatggaatactcatactcaccctgtctggttcttgacggatattgctcattcttataaatgattgctcgagattattatattgtcatttctatttacaact

SEQ ID NO: 72728 - DNA, 400 bp, Oryza sativa
  unsure (1)..(400): unsure at all n locations
tcgggccaattggcgaagaannaactagttcggataaataacttattttaaacanatacaggttaactaagtatattatgcataacaagcgtttcgttcttgtagagtagataattggatcttgatggagttatttttcttagggaaaaaggaataggaggattcaaaatccttttttcttcggactttcctcaacacaaaataccttcttgtattcgcactctcaaatgagagtggaagacattcgactntcatataatatcttaatagaattccatgtaatgatcaatgcatgttttggaatctatattattcgcatgtctagaatcctaccaagagaatacnccccatttctatgtaattgaagtaggattgacgaataagacataaacataatact

SEQ ID NO: 72729 - DNA, 447 bp, Oryza sativa
  unsure (1)..(447): unsure at all n locations
agcttatgtggagtcgttgcactcaagtntgggtaacaaagacagccaaagacgcgaaggtgggagtagtctggggtggtgcgatgtatgagctgaaaaggtagtgagtggtgaacaaaggaggatggtctccggttgagaatgtangtggcggtggcgagagcctcatcccagtaggaaggaggcatagaggcctgtataagaagggtgcgtatggagttgttcatggtgcggagcatccgttaggctttaccattttggggagaggtgtaaaggcaagagagtcgtatctgggtgccacgactagtaagaaaggaagtggtggctgtattgacaaactctctgccattatcagcctgaaaggttttgagtggtaagccaaattgggtggaaacatactctgcanactcaacaagatgacgatgaacatcagatttgtgtcggagt

SEQ ID NO: 72730 - DNA, 400 bp, Oryza sativa
tcgatgacaaccaaaagaaatcagctgattctcgtacagtatatgccacaacaccacgagcggatgcacgagtagccagtgatgctcctgcagccccggctgcagtggtgaatgacaagttctgggagcagttcctaacagagcgacctggctgctctgaaactgaagaagcaagctctggcctaagaacagatacttccacggagcaaatggagaacaggcaggcatatgatcactcacggaatgacagagaagacgtggaacaactgaaactctgaatttactatagaattatacaatttacaagaagggatacaggcgtacagtgtaagatgttataatcaggaacctgctgttaacatgacagatcaatgggtgacaacatcacacaggtgacata

SEQ ID NO: 72731 - DNA, 461 bp, Oryza sativa
  unsure (1)..(461): unsure at all n locations
atcttgtgcgtgccactgcactgggcctctntgggttggaccgtgcggtgcggcgtccgatctcggatggcccagtccatcgaaaatcttggcccatctacgtacgtgacagcccgagatgttctgggcctgataaaacgggcaaggctctctcattctcacgtggccaccgaccggcgtctcggtgttgtcgtccatcagcaacccgacgacacaacgcaagagcatcgattaatcatgtgctatactccctctttccaatttccccatggttntatgtgcgcatgcttctctaattcttaaatggtttattttctaaaaaatttataggcaagttgctctaaaagttcatattagtttttttaagtattattagtgatacttaattattcatgtgttaatccgacgctccattntacgtatcggaagaaaggttctcaataatcctatcttcaacacat

SEQ ID NO: 72732 - DNA, 383 bp, Oryza sativa
  unsure (1)..(383): unsure at all n locations
tattgtcctttccctcttcttataggtggtggtctattactntttcccttatcgtttctaagatgagtttcatattattntattagcctcaatgtggtggcatgttgccttctatctaaaactaataatattattctgattttatgtctatgtaattctttttatattgatgacctgcaactcaatggctcctaggtgagggagttcttagcaagtcaacgtacgcgagtaagataatttgttcgcttatcacgtgagaaagccctgagaatatagtcatccaaggctcctgacaatgtatgctccataagcactgagcagacacctgttgacattgatgcacatgctcaagttattgaacctctgagaacattataaccatt

SEQ ID NO: 72733 - DNA, 459 bp, Oryza sativa
  unsure (1)..(459): unsure at all n locations
agcttcattcaaatggtaacaacaaattgtacattctctatttagtgacgatagtggcaaagtggcctctagatatcactactgaggaaaagaaaacatggtagccatttgatcaaaacggatgcagatttcaacagcaagtaaccaagcacccttccatgagtcaagaggagccacaccactagaggtatagcctgatcttagctcaaacaactagcaacacgtaacaacagataaaaactgtccatgtaattntattgtgcaaaacaaaaccaacaaggttattcagttagtaagcataacccaccatatgagtctgcaaaaatttcccaatcacaaccacaagaccactccatatgcatgataacaccaaagtaccaaatgcacagacatgaacagtatatcatataatctagatccgcacaagcataccgaatagaaccatataacgccacaatc

SEQ ID NO: 72734 - DNA, 270 bp, Oryza sativa
  unsure (1)..(270): unsure at all n locations
cgacgatcgcctaacggcccatcaagagtccatgaacctctattacactatgtacccatgtaaatgtccctttcataagggtaaccatgtaaattcccctgtataaccaaaaccctagtagtaagaacctgtaataggggctataaatagtctcatatggccatgtaatanggggatccaagaaatattctctaataatacactttactttcaaccactggtgagtaaccacgtctttcgacgtatgcagttgtcgtttcgacaacagct

SEQ ID NO: 72735 - DNA, 348 bp, Oryza sativa
ctgaccgggatcttaagcgactgagctgcttcttcttctcttgacctgtgacttagtattatgataagctgacaaagtatatatcgcacttattacatacctacgaacaacatgaacctgacagacagtaaccagcgaaaacgaaatacagctacagttatagatattaataaatagttgagcaaaatgtggctaccatatcacatatgcaagtttaaacactaatatgtgccagacggacaaacgagtcccaaaatttgttcttttaactcacattacttcttttgcatgcggataagaatcatcagctagttacgagactgacaggaatatcagtaatttcagata

SEQ ID NO: 72736 - DNA, 319 bp, Oryza sativa
  unsure (1)..(319): unsure at all n locations
ttatctccagatgcccgcttagccctgatcatgcatgtgtttatggcgctcccactctacttcatgtccgtcttggaactaccaacctgtgcaatcaacgaaatcgaaaagaaatgccggggtnttctttggaaaggtgaccaagatgctgcaggctcgtgcagcttggtggctagggagaagctttgcctccctatcaagcgagggggattatggatcaaaaacctacgcctaaggggaattgcgctttgcactctgtggatntggctgccgtgctgagccagagcgtccctggacgcgcgttgcacctctttctgac

SEQ ID NO: 72737 - DNA, 417 bp, Oryza sativa
  unsure (1)..(417): unsure at all n locations
agcttgttccggtggcgtttgtttgaccatggatagagtagatggatgtgcacaggcactagcttgcgcatatatgcacggngaatgatcgatctccgggttattttaagctggcaacaccggcctcctttccttcccgagagatgatactactcctacaaaccagcaggaaagagtcatgcacagccagtctttgtcagaaggcctccacaacaacaagtgaagtgatccctgcctgcctgcgagctgagagcacctgcagtccccagccttcaccatcttttttatactacttgctactaggactagctagtgctggagtaatgtttggtatacatgagtgcatcaaggaaatcatcaaaactaaatctcaactcatgtaatacaattctttcatctcatcatttataggagtat

SEQ ID NO: 72738 - DNA, 516 bp, Oryza sativa
  unsure (1)..(516): unsure at all n locations
aaatactagctttctctgctgatatacctcttctcatggtggaatggatgtctatgttctcangattctgaagcttgtcggagttggcttcaaagcatggacatagcgtgaatgccgtgaattgttttctgatacttggttacagccatgaagtgcagttcactgctccacctgctgttcgtgtcttttgcttcaaacccaacttaatttgctgtacttggtatcgacaagaaatcgagtgcacaactatgctggcgctgttcggtacctgtaagcctccataggtatacatatggaaatgcctattgtacattgatgatagtatcaagctggagccagggaagaagcaatagaagttatgtctggatgagcctccatattttactttcaatctgctaagatgctgaancacatttttagtggcgcatattctctagaggatatcttgttctggtctgctggatcatctcttgcacaatgccatgctggatctggatgactcataattctcttatg

SEQ ID NO: 72739 - DNA, 368 bp, Oryza sativa
  unsure (1)..(368): unsure at all n locations
agcttcatgtgctaagatattaaatgtaatagtgtgcaggtgtattttcgtcattttctatctgttgtacacagtatattgccctacgcgattagtcaatatgtttcaatccccaagttctcttctaaagtggtaggcatcgctatatgaatgggaggatataggaagaaaaacgacacatacagaaccacgtcaaggattcgatcaggggtgtcaagaaaaagatgtgngcttgtaactgcatcctatagttcggccacatgtctaatttcattnttaatgcaaggactagtatgtttgggacatacaaacttgcttccgcgttattaattacataataatggagatcattntgatatatgtccatc

SEQ ID NO: 72740 - DNA, 209 bp, Oryza sativa
  unsure (1)..(209): unsure at all n locations
ntccagcatcatcgccttcgtcgtcactcagaactaactttctcttgcgggaatccgactggccggctggattataggtgatccgctgggcttcaaaccggatctttggttcaccgctcccctgaccaagttgacggcgaagtgatcgacgctgaacgattgggggatccgacttcatcanaacaaactcctgagcatagtatcttcca

SEQ ID NO: 72741 - DNA, 375 bp, Oryza sativa
agctctgcaagtcctctagatcaccaattgcagacattattggcctagcgaggttacagccaaacaaccacaagcttctcaaattcttgaagttactaatggatgaaggcattttgctcaataagtcttactcatacagtatcagagcatgtcacgttcttgtgggcccctatccatgacaacaaattggatcctgaatctcctaacaattccgaattaatgagttctagatggcactcagaccagatcaaaccatacgacgtgagaaaatccttagaaattaatttccctttcagacccaactccttcagcatattgaaatcgctagaagatattcgtttagcatacgaaaagctggcccctctagtctcaatg

SEQ ID NO: 72742 - DNA, 232 bp, Oryza sativa
ttcccgtccgctgtcgagcttacccacggatccacctcccaatgctttatatacacccaacctctccagccacacacacaccaacatgtacttctccttctatacatatagctcagtattgtagctagactcaccggtcgcatttccggcgaccgcgcggttagtttggaggatcatgcggatgagctgcacaggtgccgcgtgctcgcaaggggtgcagtacaactgtcca

SEQ ID NO: 72743 - DNA, 437 bp, Oryza sativa
agcttattttcagctttaattaactaaccacatcattgttctgctgctaataacaacaaaggtgagtggtttatgattattcactttaatacaccaggtgaattccttctgccatgcaggcagggttggacagaaaacacgcgaaggaattaaaatgcctggaacgggaaaaatgaaacatgtcagtttgactctgcaggttgagaacgacctgaaacatcagcttagtattggcgcattaaaacctggcgcacgcctgattactaaaaatctggcggagcaattaggtatgagtattacacctgtgcgtgaagcattattacgtctggtttcggtgaatgcgctttctgtcgcacctgcacaagcatttacagttccggaagtggggaaacgtcaattagacgaaatcaatcggatccgctacgaactggaattaa

SEQ ID NO: 72744 - DNA, 295 bp, Oryza sativa
agcttggagattcttgcttgtccgcaagcacaaaaacgacagcggtagatttggcgtttactgtgccagttggggccaccgagaaagggtggttgcgttctgggttttcctggatgatgcgacccgtattccagttcttgtgccgtacgccggctaagcatgagtaggccactgtttacgtgggcgtgcagaggcgaactgcatttgctacgactgcctactgctattgctgtgctatcgtgcaccagaacaagtactagctacagtgctactgctatgcgtgttagtttagggg

SEQ ID NO: 72745 - DNA, 501 bp, Oryza sativa
  unsure (1)..(501): unsure at all n locations
cttaaatctcacttatactcacaccaactccttacattaagcgcgcttatgcgcgaaatgtacggtcgaactgccttaaaagtcaagtttttaacgtgtcgacaactaatcaacgtagagtgcccgaaaattttctgatttgggaatgagacagatcgaagtcgattttttttattgaattttgatcaagtggatctttttttaattgaatttttgcaagatagtactcgttggggttttgattggacatgtcaggaacacatagaaatcatcgtttcttttttctctcaccgtgcatacgagtcctccaatggccaattgacggtggaaatgctacggtacagactacatagctcactctacgacgganagcctactttctgattctcaccgtgcatacacagtcctctgcacactgagcttgccgcaagcctgcgttctggtttagtcccaattttttcttccaacttttaactntnttattacgttaaaatttttcta

SEQ ID NO: 72746 - DNA, 421 bp, Oryza sativa
agcttcttatgaatcggagaggtgtatcgatcgctaagggcgcaacgcaatgccttgtacgggtgtagtcggatcatcaacgtttcttccaaatcgtagttatctcaactcaccgaaagatcggtccaaacaacagctttgagcatcttgagtggagctcagggtttatcattatatatttgttcgcctttttttttatcacgatgacgaaaacaccttcaattttttaagtatttttttaagtagtagagatagagataatagaaagattaaacaagattcgatagacgcatgtgatgatatctctaatctaaaaaatataccaacttagtcttggagattctcatagagatatgttgtgcgtgtgtgctttcatatggatcaatggtgcacgtgttatatgaatgcatgtatctatact

SEQ ID NO: 72747 - DNA, 491 bp, Oryza sativa
  unsure (1)..(491): unsure at all n locations
tgtcctctccttcactcctcggccaaaatgttgtccacgtgaagaataacgcatattcagccagtaatttaatagaggggcccgtttntagttttgcaaattcagccgtaatttaatagaggggcccatttttagtttttttaaataaaatttaagttttctgttggagagattatttttttacttattattttcagtttaagaaacccaaaacaattttttagtaggatatgatacacaatctctcgatgatgctccaagtttataaaagttggctttactactaaataaacttgctctaataatacttcctccgtcccagaaagctagtcatcccgctgttcagaanaatgtcccacaaaatttgtcgttgtagcatcttgaccagcgagctaagcctagtctatcccatcgattcatttgaacctgctatntagtatactacggtgccactactagtactacccatgtctgtgcaatgcgatagatgg

SEQ ID NO: 72748 - DNA, 459 bp, Oryza sativa
  unsure (1)..(459): unsure at all n locations
agcttcatctttgccatcaaatgacaagattaataggatcttacttattttgcctcttaatcttctatantttttattgatttgtggaatgatgaaccaagtcaattatggtccactttgtcttagtattacataactgaaaatgaccgtagtctaatgggagaaaaataatatgaaatggacaagtggcgcatatgaaatgttcgatgtccatcccactaagtttgcacgccttatgatttatttcttgtgctaccttttaaattatggcggcaaatgtgcatatgcactaacattgtactaagcattagttntcacatacttctaatagttcatctcaacgttggctagatacnagtttgcaaagtcatgctcaaaattctcccctaacaccaacagggatgataatcttaatgtttatgagtgatatgcgaaacataacattatattggcctactc

SEQ ID NO: 72749 - DNA, 421 bp, Oryza sativa
  unsure (1)..(421): unsure at all n locations
tcacanaatcagtgaatcacaagtttcaaaagttgattgttcaatcatgaaccatccctgaatgactggattcaaatcctaaataaaaaatgttcaacagtgaaccattcctagattcaaagatatcctanatcctaaatcaaatgaaccatcttggattcaactatgaactaaatactaaaatcctaatccaaccaaattaccaaaatgtttctaaccttccaccgtcgtgtgggtctggctgtctaagtctaaggcggttcaaggactggaggtggactggtggagggtggaggtacgggcggcagagtgcgggcaccggctggcccaccacctgngagccacagggcangggcggcggcgtgtgggcaatggcgccttcgtggcggccggcctatgggcacggacgcgtggcgtgaga

SEQ ID NO: 72750 - DNA, 383 bp, Oryza sativa
agcttaatgttctctcaatatcttctcattgtaagtgataaaacgaaacctgttagaaacttccgtttgaaagaacatgttattgaccctaaggaaagaatgtggtattgaagcattccaatcaactcagataagtattaaacagttgctatgatcacaaaaatgttcgttcttttagaaatcaaggtacaaaggaaaatatctggtttcatgttggagacatggcagcatctgattcatattcatgcggataaatcagttatcacatcttctgattatgtagagcttgtttttatacactctacaagctgcgaccaaatgtcagttcgaccaaagtgttctgctcacatttcctaattaagtatgtccctgttctgctcaca

SEQ ID NO: 72751 - DNA, 489 bp, Oryza sativa
  unsure (1)..(489): unsure at all n locations
tctaagtgctgattggatgctggtttccaaagattatttattctgtgcatcatggacaaattatgttcatgtagttataaaaatcttttagcccaagaattagatggatccgaacatatagaagttgtgatgatatcgtgtggctatgtatttaataacaaaataaaaaataagtaatggttacaagagtctcagtagcaccttagttcttgggtttgacttcccatggaaacgaattttttaggttttaacggtattgtgctttcagtgataggcgatgtacccgtcaacagcgaggcacctgtggtgacttcgtcaatattcaggattngccgcccatgggaacgaatttttacatngcatttanattatctaatatatgcttgattgcgaaatatatgatctcctagtttattatatcattataaatattanggagtgtagcacagacaatactagtntataaatacactataactacaagatata

SEQ ID NO: 72752 - DNA, 452 bp, Oryza sativa
  unsure (1)..(452): unsure at all n locations
agcttaacatactaagaaaacgatagagacttccgggtattgggtgacgaccttaatgaatcaagtattcaggtggcagagttattagctacataagcgctcaaattcctgaatacttattgccctggcttctatgatcaacccctggcacatttaggttttgatctaaggctatcctggtctgcaggacccaacacaagtattcatcctttccaatctgaaaaaggtgttgccgaaagcttaccctcttccacacggatgctacagctgctatcacttntgctgggggggaattacagagttcgcctctcgacatcttgtttggtaaacggaattgggacccaggcgccctagtgttgcctaaccgttcggccggtgatgtcggatgcgagatctttagctacttgtatcaatttgccgcagtgtgcttagatacaatgcgctggcagctg

SEQ ID NO: 72753 - DNA, 493 bp, Oryza sativa
  unsure (1)..(493): unsure at all n locations
tctttgtgctcctgataacgcacggatcaggctggacatgcttttacatgaagcaatcaacaacatggtgagtactaatatatgagcaattccaagttgntcttcctgtcagaaacaaaatgctcacagattgctcatttctttgcatctttgttccagcaagagatcatgcgtgactcaaaggccgagcaatcactaaatacagctcgtttgatgaacaagcactgcacatccgatgggcattgcaactcaggtacaatggagcagacgattcccagttcttctgttgttgcgaaggatagcgaagtggtcagtgcgattgctcggtctgtaccaaggttccatgaagattactacgggccaagtggccatgaacctaatcaccattaagcacagctagctagctacatatcgccttaattagccttgcccttttctaatttagcagcagcagcttactttcttagtagtgatccgtagtagatcttctctc

SEQ ID NO: 72754 - DNA, 456 bp, Oryza sativa
  unsure (1)..(456): unsure at all n locations
agcttgttcttactcgcaccactactgcagcaccatcttatcttgcaaggtagaagcatcactctggttggtaaatgcggcctcgcccggtgcgattttcttgggattntatggccaaaaattgcatctttattttttttttgttgggtgaggaggtggtgttctttgatgttcggaagattcttctgacgaaccgcctactgnggtttgttcggaatcgaatcttggggtggtgattaggagcaaagagagagatctcgatgctaattcaattgcaattggatgttattgtttgatgcanacgacgttaaacctggacgatattgtcgcatccagttgaacctgtagtacacttgngctgttcttgattaatccccatctccttcctcctnccaatctcgtctcctcttgtacccaatcatccattcattgccgccgctttcgtggataaagtgg

SEQ ID NO: 72755 - DNA, 371 bp, Oryza sativa
  unsure (1)..(371): unsure at all n locations
tggaggcaacgagccggtgagcagtggcacgcacgatctgcgacgccggtttggctcaacgccgagccgccgtctaccacgagtcccaccgacttgctatcccgcgcctcaccggatcatcggttcctacacaacgacctgctgcacactaccgcacgcatactgacgaattcaccccaaacaccctgctcgactccgacatactcctccggcgctaccaagatttgcaaactagtacaagcgtgtatccatctcatggacagagaaagcaagcacaaccgttcttatcgatcccactggttacacccaaatttggcacctagagataanataggagacattgcaaaatttgaaagctgctggtttcctct

SEQ ID NO: 72756 - DNA, 405 bp, Oryza sativa
agcttaatgtttccacttataacactatagtatatgtcattacattgagttcccatattcatatctttctagagaagggtattcttacccggcctctacattcaactggatatatacgggcctctacatccaactggatatatacggccattgaaatagggaacttagccccgcatataacccaatctgaaattcgctcctacggagatttgaactcatgaccttgtggtactactcaagtcactgtaaccactacgctacatgccctttcgtcatagtgatgttaatgaatctagatagatatatatgtctagattcattagcatcaattttgaatgtgaaaaatgccacaatgacttatatcgtgaaacggagggagtatgtagcacgcatatatccctcgat

SEQ ID NO: 72757 - DNA, 376 bp, Oryza sativa
tcgatgcgcgtgatctcattgtcgacggactgcgctgtttctgcgttctccgatcaacggagaacgccgactgtgctgccgtcactgttgtgcgcctgcttcgcagaagtacgtggcgcgtacgtaccgtcgtcgtcagggtgcgccgacctccgaaatgagatgtttaccgggacgtgctgtgctccacagatacatattctttgtgcgtactagctatgttataaagagcctcccagatggaattagagtggtatgatctggaagtatctagagttgctgcaggcgactctacggtcttaatgatgatttattggagcggcctataatgtgacttctataaactgcatgttaatccgtttcctatgtgatgtac

SEQ ID NO: 72758 - DNA, 380 bp, Oryza sativa
  unsure (1)..(380): unsure at all n locations
atctttactatcaccgtgtntagttgcaaactttattttcaaacttccaactattccatcacatcaaaactttcctacacacataaacttacaacttttccgtcacatcgttccaatttcaaccatacgttcaattttagcatgaactaaacacacccttgtctgtgttgctgtcagagactgaagttctttaacttgcagggtacagcaccaacaatatcaatcgacaacacatctggatgtcaattgtacttaagcaatgattcacttggagcctccatcacttcagctaaatctagtgaaatcaatgtgatggttccaagtggtgctactgatggtgaatgggtacgatctgatcttctggctatgtggttaccatg

SEQ ID NO: 72759 - DNA, 422 bp, Oryza sativa
  unsure (1)..(422): unsure at all n locations
tagtgcacttagcacgcgagtggatcctttagttatcgatctgntgtccatgttgcaggtaagtttgacttctgcacaccccctcttctctttgttttgatgaagttttgactgcttgtgcaaaaaagtaattttaagttttttagtcacgggatgatgcagtcaaagaaagcgtactttctgcacttaaaggtgttgtcaggcatgctggcaaaagtgttagccctgtagtcagatctcgcgggtgtgatcttctcaaagatctacttcaggctgatgctgatgacgtccgcagttctgcggcaaaggcaattggtacattatgtcaggtatggttactattgcccttcttttatccatataaacttntcccttgtgatgcaatggagaaccctacaatttgaaactatgctggtagtact

SEQ ID NO: 72760 - DNA, 333 bp, Oryza sativa
  unsure (1)..(333): unsure at all n locations
cagcttggctcacacgaaagaagacgagggcttataanaacacaggcgcgcccctacctggcgcgccagatgacagagcgtggggctcctcaccgggagaacgcgtgggcccccctttgtcggttcggcctgaggcgctaagtgaggctctaagccctcgatctgtggaatggttcgcgagagagcaaattcaccagacgcgggcgatgtatacaggatcgggccgctgagagaccgaataccctaattctgtgttctggtggatctgtgtgtgaaggagttacaaagaactggagagaaagagcgtttgaactctagagaccctcttcctac

SEQ ID NO: 72761 - DNA, 498 bp, Oryza sativa
  unsure (1)..(498): unsure at all n locations
ngagattagctcanatctggatgcatacagatttggcatacttttttttactgggaatcttggcagtatttaattaaatccagactaaaccactggtattaataatgttttccattatttgcaagacaatcttaagtaacatgctcttttttcctaaagtccattgatctcagaagtttagagatatttggacacttattttatgagatgtgtggatatttatgaagattattcagattaagctatgttcacacataggggagcaataaccatgtaaaagctccaaaaataatctcttactgcatagtcgacgatgaagttagaatttaaagcgtgttatgattaatcatatttcccaaaactaagagtagtgaatagcgctcataaaccactcaaaagatgttaaccacccaaaatatactgttataagttgtgcactaattaaacacaagtntctattctagtagcaacatgtngtgtgtttctgcctacacattg

SEQ ID NO: 72762 - DNA, 345 bp, Oryza sativa
  unsure (1)..(345): unsure at all n locations
tcatccagcgtcgatatatataatattactctctccgcttgaagatatatatttggcaacatttcccaaaaaaaattggcaacagaacctaagggaattacaatttaaatcttgatcactggagtgactaaataagtcttggcccggccactaccctagtttttcaatataatttagctaattcaacacatcttggatagntggttctacacctacatgtggttgctggcagcgtgggtgggtacgacacatttaaccgggaccctgtgacacaggcagctaggacactagtagctgagacacgcagcactcgcactcgatgcgttatggtgataggcgacgtac

SEQ ID NO: 72763 - DNA, 376 bp, Oryza sativa
  unsure (1)..(376): unsure at all n locations
agcttgcacaccagttttataagcagtgcatcatccagcgtcaatatatataatattactctctgcgtttgaagaaatatttttggcaacatttcccaaaaaaaaatggcaacagaacctaaggaatttaaattttaaatcttgatcactggagtgactaataaatatttgccccggccactaccctagttattcaatagaatatagctaattaaacacattntggctagttggttctacacctacatgtggctgctggcagcgtgggtcgcgactacacaagtaaccgggaccctgngacacatgcagctaggacacaagtagctgggacaggcagcactcgcgtcggatgcgttatggtgataggcgacgtact

SEQ ID NO: 72764 - DNA, 459 bp, Oryza sativa
  unsure (1)..(459): unsure at all n locations
ctaagcttctacgaagttcattctgtatcaacgtctgaacatgcatgacatttgtacatggatcactgatctgtctaagtggaagatgtgcatcagtagactattaactactaacaggctgggtgacaatttttggtatgtattaccttgtaattaagtatataaccacatcttaattattccctgcatcttttgaccgaaccttccaaatctcccaacctggcttgcttgggccaaatccttgtttcaatnttgaccagcctctgaccaacttttgccagccttgccttaatccccagattaacacctccctaatcagtagttagcatctcacacaactgtgctttaatttaatcatcacttaactgtgctgatgctaatgacaatttgcatgcactaaccatcaacttaatgacagaattacagttgagctgcttggtactcaccgacttgatgtct

SEQ ID NO: 72765 - DNA, 316 bp, Oryza sativa
gagcgttcgtttgtcttctatgggagtatataatccccaatcccccactatatgtgaggttattttgaactcaagtggcgcacacccgctttgaatcgcaaggacatttacacatgggtttattctgggtactcagcggaaccgaaatactccccccttgttggtactaccatggataatattgcattctattttccactgacaaaagaatactgtacattctttatttttttctccaacgaccagcttaggcgggtggcaattcatttatcttataacgaacaaatacgaatatggcaaaaccgcgagatgaaaa

SEQ ID NO: 72766 - DNA, 488 bp, Oryza sativa
  unsure (1)..(488): unsure at all n locations
tgagaccttctncgcagtctaccgcanggcttgtgggaaagatgttttcttctagtaccctatgactgaaactgcttgaagatgcattccttggattgttcccaatgtattccagaaatcatagttttgatgccaaaggtggtcttcggtatttgttacttggagatggcaaatcgacttgagcaatgttaaaggtctgggcatttaaattatagacctttgcttggcacggttagcttgtttcaaatccgttgtttgttgtggaatgtgtttcacatatgtggtaggtgaagaatctcattatggttcgctgtttcattctcttgcgtttatcacccgctgtctgctaacttagggtgtgtttagtcctcgtncaaaatggaagtttgggtgaaattggaacaatgtngacgaaaagttgaaatctttttgtgggaggaaagtttgatgtatagaaagttgaagttaaaaaaaagttaaactaactc

SEQ ID NO: 72767 - DNA, 303 bp, Oryza sativa
  unsure (1)..(303): unsure at all n locations
agctctgggggttttgttgacggtcgntatcgatcagtttcgaccatcagtattaccaaaatagaggagaactattgatgcttgcgatgcataaatatgttagaataataatattccactagtattaagtttactaaccttttgcagagaatgaccataaagtggagaagaatcgacatccacatagaccatgaatcaatcggacgatgtcgagaatcatacttatgcatgaatgggccaagaactcagaattgacatgatgaattgggccaaaattcacaagtctgtgtatgagagcaaaag

SEQ ID NO: 72768 - DNA, 505 bp, Oryza sativa
  unsure (1)..(505): unsure at all n locations
nggatgaatacctggaagggatgaagccataaacacaactcagttccatgagcatgtatgtattcaaagtacatccagaaaaaaaggttattcagaccaagaaactttttctgaataagtttattcaatgagcttgtgactcatgtgacttgatcagtacttattctgctgtctggtntctatgccaccttttagtcaattggtgctggcttgagtaaggagcgcatcaatttanggcatgttcagattgtagtcaaactaaaccttaccaagttttggcaatgccaaaattttggcaagatggtaatattgccaaaattcttgctaaaattttagcaggatttcttatgtattgactaaatntagcaacaaattaaacatagacanttttntgataactntgccaaaaaatggtatgggtaaaatgacatcaaagtgaacaggcccttaattatctctctcatcagatatatagcanaatccaatagctttttattaataccac

SEQ ID NO: 72769 - DNA, 459 bp, Oryza sativa
  unsure (1)..(459): unsure at all n locations
agcttctccagtctacttctcccaccacctctctgccaatcggctccgtccgctaccgcttcgatctactccttctcgggccacctncgccattgcagtgttgactaaagactaacttgtctttaatgagtgtttctctctccaattccttcgaaaataataaattaaggcagctagtgtctgatagctaattaccagtttttttggtatattcgacagcaaattggcgttcttgcggtgtctaccagctaattacacttntttnttgtcatatagcaaattttgccaaaaaaaaggggtattcaagtgaatacccatgcatgaatcgtgtcctatttgattntgtactttgacttatatatatacagaaagaatgtatgtgcatcgcaatcggtgaagatattgntaatcgattattggtagatatcatcttttggctacaaagtgtatgcgatttta

SEQ ID NO: 72770 - DNA, 460 bp, Oryza sativa
  unsure (1)..(460): unsure at all n locations
agcttatgtctatgcgagcgaagatgatcaagtgctccacactcaaaacaacgattcggttctcctcttttcctgttcctaacatttttcatagctcgagaaaatttgttagataacaaaaccaagtcctcctcctcgaactgttcgagttaatcatcgggcatggcattaaataaagcaagaacagaagacttcgatgaagaagcaccaacatccaaagaagtcaaggaaaaaaccatagcagtagacttagaatcaactttatgagaaagaatattcatctcatgagttttcaattntgtgtanagcgaatctaaagtcaaagtagacatgttcacagactcctgaatagatgtaactntcatatcccacatagacatgtgaagaccattcanaaagtggcgagaaatctcagattgtggataattagcatcataagaagaatcaacagatctaagat

SEQ ID NO: 72771 - DNA, 364 bp, Oryza sativa
  unsure (1)..(364): unsure at all n locations
cgcnccaataacctatatgtggcccctaactagcatatgtttagtctcattactggttcttctgatgttaagcacctaagcaaaccattcttcataacatatatatatatatatatatatatatatatatatatatatatagagctatagctagcatccacctacatcgagaatgtagcgcccctctccaatctgcatgtgcgagacagacaccttaagtggatgtgcgaatccctccgacgattagaaggtctctgcctcagagaatatcagtgcctgtggcatagatgtacactggcaaatttgttatcatatccgctgactctcatactccgacatacgtgggcggaagctgagacacgaa

SEQ ID NO: 72772 - DNA, 420 bp, Oryza sativa
  unsure (1)..(420): unsure at all n locations
agcttcttttttattatggggagtggggcccacctgatataagtaaaatgtatacctatgcagcaagtggctttgtcctttcttagattagcaagggtaagagactaatgaacttgctaagaggatgcanggatgtggctaatagcatatttaattaactattaattactaccaatcaattaattaattaactaaccttttcaacgccacttattgctacctggattaatatgctactacatgcatgcatgtttgtggtagttacacatttgcagcaacttgattcanggttaggtcatatgccatgccgtacttaaggattcttctctccttatggcttcaaattaaagtggatgcagtttgcttgagttggtgtctactattagtaatatacttaacctgtctttcatgtgcttaatc

SEQ ID NO: 72773 - DNA, 503 bp, Oryza sativa
  unsure (1)..(503): unsure at all n locations
tctcactatcaagcagcgatcgagcactatgcctgaatgattcaccactcctttcttttcgctctataaaatgttccttctttaattaatagagtaccatgcacgtacgaatggtttatttagtggcctagcttgttacacgcactaccgattttattcattttatttttttccaatccaacccagttcgttcattcagcttttctttctttttaattttccagtttgcagtttgcatcacacctcattntcgagtactcgatcatctctggccagtaatgcatgagtgcgtgtcttatcacccttaatcaaattactgtcatgattgtgtgtccagtccagtgggcaattagtatggcctgtntagaggagattctaactgctgcagaatctctcnagaatcagaagctttccaaataatccagtttttggttcagaatttaagaaaactgcatngtagatttcannaaatacactagaagtcagaagctgagaaacctaac

SEQ ID NO: 72774 - DNA, 356 bp, Oryza sativa
  unsure (1)..(356): unsure at all n locations
agctgctgttatgggggtcaccttttcaaagtataggctgtttgcatgcaggcctgaatcaagcctgtctctcacttctgcaaggatagagtgataagacagaggttggcaaaaaacaatgagaatatatttcattcctaagtcaactntatgggaatatataggtcatatgctggctatcctgcagtgtgacattgcctgtgcaaaatattagcaattntgcttattgatctctgttgntaatgtaacaattgaagcatgattttttttttctgaagtgtaatcagaattgaagttacctagaanaaaatgtggaattacattttcatttcttccacgtcttcacctggagcatt

SEQ ID NO: 72775 - DNA, 420 bp, Oryza sativa
  unsure (1)..(420): unsure at all n locations
ggcaaaaataatntacttcataatttcatatttgtggagcgtttctaagccaacacctgacactctaataagatgtgtgatatttctatgaatcatatgaaaacacatctaggcatcaattttagtttaatatgataaatccattattttcaaccaatagattaaaaaaaatccacatctaaaaccctacccaggtcatgcttagtcccattgtccaccactccccgttattcacgctggttatctatatgttntattccctatcctattttcttattggaccaattagaaagcaaaatttgtcataaaaaattcagaanaacaataggatgaaattatacaactatattttattcacagttaaaggcccatattcactatatgttaagaattgaaataaatggtgtactttggggtata

SEQ ID NO: 72776 - DNA, 233 bp, Oryza sativa
  unsure (1)..(233): unsure at all n locations
agcttgtgctatgttggaatctctcttccttgctgnggtggcggcgggcgggagggcggcgttgatttcgttggggtttgcgttgcgtgcggaggaccgggttgtgtttgtgtgtgtgtttgtgctgatttgggcattggtgttggtggtggaagaggatggggaactgcgtggcgaggagcgggacggcggtggatgccggtggtgatggatgggaggatgggaatacgccg

SEQ ID NO: 72777 - DNA, 433 bp, Oryza sativa
agcttatattaattatacggagcaatttgttaaatttatttaattattaaaatatgtaattcatccatataaatatatattatcgactgcaaaaaaaaatctgtacaatagtcctaatgaaaaggggcctaaatgtggggattgctaccaaacgtagtgtgccgtacctggcttaattatccccctgatagtacataaatgtgcatgtatagcagtaaagtatatagtactgagtgtggtgtagtaatgcatgttcgattgtagtatacttgttgggaaaataattggatgtaccgtagaggcgatcgatcgaataaacccgactaactacatgtacactgcgacgttatcaccggcactgctctatactatctacgggagagacgggcgttataatttcagtctgtctgctatcctcgtatcacatgatatg

SEQ ID NO: 72778 - DNA, 452 bp, Oryza sativa
  unsure (1)..(452): unsure at all n locations
atcttctgctcttagtttatatatacacatcacatttaaatctattttatntttttagtctgcattgctaatgtgtattcctcagctacaaatccatttttatcaaaaatttcattcatgatacttaagatcttgaaactcacattcgttacgcanattactcctatctagaataagcttagtactctgtttcttgtacaaatagagagacatgtaccaacatgcattgttcagagctgctcattgctaacttggcagtggtagctctgcaactcacccagaatcaactatcagggatggcttgattntataagagaagtacacactttctgcaaggaanatcgcaacatttgtccttaagcggaaagcacactagcccacacatatttgtccttagaagaataatcattccctctagtaatatattcttcccttcatggcaccatttcaag

SEQ ID NO: 72779 - DNA, 456 bp, Oryza sativa
  unsure (1)..(456): unsure at all n locations
agcttctatttctcttctgntgntgcttgtttgcttctctatgctcctggtgggatcgttctagcaaccagatcggttgcaaggttgcctgctcattgtatcttcgacggtgttttttttttcaatgctaaatgattctctaccggtcaaggccatgtaaggccctgtctggaaacgtgccgatgcttgttctgttgcggcttgccatggttgctcttgccacctttgtcatcaacatagatgaagcaattgcgtaagacaaatcaagaaggtcttgattgtgttttttagattttcttttgtcctgccttgaagaatctaggacctttatataatttattctatcccaaatgattgtctgatactggttgtcgtagtattttaaaaataaagtcagcaggtgcaagaagacaaataacgggtntactataaatatatcgacggatttcttacttc

SEQ ID NO: 72780 - DNA, 456 bp, Oryza sativa
  unsure (1)..(456): unsure at all n locations
tgccactgccacctgatcgtcgggcaaagcgtggccgacctatgtccaccaggctgaagtccccagtagatggtggagtccgaaaaaagcgcatttgttcgaactgtcatctgaaggggcactatagaactggatgccccacaaatccggagaacacatcgaagaacaaagtgatcaaggtgtgcacgaaatgcaagttagctggtcactatgcatcaacgtgtggtgttggtgtatagaagcaagtctatcgttgtttttaaatacaatcttgtaaaaatattcccatatcttgcgtgttgcacttggacaagttnttaattaaattcggatatgttttctatttcataattatgtcattcatcttgtgggatatacatgtatacgtgttcgctctgtcactcataaacctatgtgtacatgtacacctataanagtacagattatgtcattaat

SEQ ID NO: 72781 - DNA, 404 bp, Oryza sativa
  unsure (1)..(404): unsure at all n locations
tatctttctctgtaattcatccattaatcccttataaatagtgtactagtgcacacgttaattgccctggtagagtggtaattgctcgcgcgcattctgcatgcatgagcgcgcgcggcggtgtcacgatggcangatgcggaggcggcgaccgcgcgccgtcgtcgtcgtcgacggcgatgatctcgcgactcctgccgccgggcttccggttccggccgaccgacagggagctcgtcgcccactacctcgcccggaatgcggtcgacgcctgctttacctccgccgtcatccgcgacgccgacctgtaccgcgccgagccctgagaccttctgccgctcgcgcgttgtagtcgatcgattggatgagacattgctgcgtgcgtgtgtttgctatgatcgatg

SEQ ID NO: 72782 - DNA, 294 bp, Oryza sativa
  unsure (1)..(294): unsure at all n locations
ggtgctgaatgtataanagcanataaacaataatggagaanagaaatagaattagaatcagatgannagactttatctagtagagtacgagtgttagaaaatagactaaataaactagaagtagaattagagaacctaaaaaataattgtgatattaaagcattaccagaaaataaggacatacaaaacaccgaatttaaagagcaatggataacactaaacgacagtaatactgctaaaataattcaactaagagatgccataactaattntggaaataaatatatagtaaga

SEQ ID NO: 72783 - DNA, 452 bp, Oryza sativa
  unsure (1)..(452): unsure at all n locations
agctttcttgatgcctactccggctaccaccagatcagcatggcaaaagaggatgaggaaaagacagcattcatcacgccgttcggtgtattctgctacattaagatgctgtttggactaataaccgcaggaaatactttccaacgcacggtccaaggggcacttaacgatcaacttgggaacaatgtcgaggcctacatcgatgacattgttgtcaagaccaagacaagcgactcattgatcgatgatcttcgggaaacgttcgacaacctccgacgatattgcctcatgctcaatccagagaagtgcatgttcggagtaccatcgggcaagctactcggattcctcgtttctggaagtgggatcgaagcanatcccgagaagatcaaggcaattgagaacatgaagtcgcccacaagactcaaggaagtccagaagctaactggatgcat

SEQ ID NO: 72784 - DNA, 452 bp, Oryza sativa
  unsure (1)..(452): unsure at all n locations
accatggccgntccgagggtgggctttagatttcattggtncaaattatccttcgtcatcaaaggggcatangttcgtgctagttgctacggattacttcactaagtgggccgaagctgtgccgttgaagaatatgactcatacggaggtaattgactttattttgaagcatattattcatagattcagtattccacanacattaactacggatcaaggtgcttcttttatatctaaggaagtgaagaaatttgccgaatcttatggtattaaattgttgagttcttctccttactacgctcaggctaatggacaagccgagtcgagtaataagacattgttgaaattagtgaanaagaagaatgaggaacacccaaagaggtggcatgaagtgatttccgaagcattgtgggcgcataggatatctaaacatggtgccattaaagtcactc

SEQ ID NO: 72785 - DNA, 436 bp, Oryza sativa
  unsure (1)..(436): unsure at all n locations
gcttgaaatacttcttcttttgaaaatataaacattcttaggttcttcagcaaaaacaaaggtggagggaaaaagaattctcttctagtcacttcaattcagtagtcaaattttgatatttgaattgcttatagtattccttttcccaagcatctcattggttaaaaatgtacattgtttgtgcattagaatcagtggcctagaaatgttttcatattttggatggaaagagtataattatattattagcaatagcccccatttatgtgtcatacttaaatntatccctcanacatagcttatctagtttatctactccattgaagaggaaatgatgtcaatgtgcattttcagaaactaaagaagaagatagagatattggagcagtntgtgtttggctntcatgcatgtcattgctaggtatatatgtgtagtc

SEQ ID NO: 72786 - DNA, 456 bp, Oryza sativa
  unsure (1)..(456): unsure at all n locations
gatatgtatggccgcggttttggaaatgtagtggtttccaaaaaagagggagatcctatgcaactttagtttagaaaagcacggtggcaagcatgcacacatgcgggtgggccagaggaaagaaagaaataaacggaggaggcttgtccatggtaattggaccattatgccacaggagagttaatgaaagtaaggagcccatggtaattggaccattaggccacatgagagttaattgaaaaggcatggcanggcaagcgtgtgtgcgtgcctgcctcccttgctccccanaagctgggctcattagcctctctactgggcataccttggaaggaactgcagaagggaggtccagtccagatattatgttagaatcgtgtgctgccgctatttgatcttgggcacccatattttcgtgccgaggacatcgagctatcatgcttaccatcatctcgt

SEQ ID NO: 72787 - DNA, 455 bp, Oryza sativa
agcttgcatatgctcaacatcacattcaatttgatcatggtaggagcctatagaaaaaggtattttaaccaagcgggttaccttcatcttaccacatgtattaaaccactgaatatgatatggatgtggatgtggatgggtagtcaagccaagcttcttgaccatctcttcacttgctaaattgttgcaactcccgcaatcaataatcattttgacggtatggcctttcacaagaactttgctttggaacaaattgtgacgttgcttttgctcttcacacttctctttagcactaagtgctagcttgacaattaggctaggatattgatctagcgactctggatgcaaatggacttcctcgatgtcatcattatcttgtccttctgcatggtcagtggcagctaaagcatattcatcatcacaatcactagcagaagtatactcaccatcagcat

SEQ ID NO: 72788 - DNA, 334 bp, Oryza sativa
aaactagctttcggtctggctctgccgagcatcgtgccaacctctttattatatctagcttagagcggatgcgcccccccagcaaacttatggatgtgcaatgcgtcaccggctgcattgcccgcctaagtcgattcatatcgaggctgggagagaaggcgctacccttatttaagctcctcaagcgctcggcgccgtttacttggacggaagaagctgaaagtgccctcactcagttgaagacatatctcagctctcccccagttctagtcgccccggggccaaatgagcccctactactctacttatcggcgacccctcaagtagttagtgc

SEQ ID NO: 72789 - DNA, 448 bp, Oryza sativa
  unsure (1)..(448): unsure at all n locations
agctttactgttttacaccttttaagaagcattgtaccaactcctaanaaggtgagtaactgcggtataaaaggattttaaggtattgggcacttgatcacgcgcactttggcctaagcaaaaagtgcctaagtccctaaaagaacgtgacaagccacacctgaaaatatgggctgcagacatattaggcctagaccaaaaaatatgccttcgacaccctttaaaggatgacgcatgtaacatgctctcgagtaataaatcttccgggtgatatagaccaggtgtagctcatatgaatagcttctgatctgagtgattatcccttatgagatactccaaaatatatataataatttgaatccgacttgcgcaagtattcggntgatagcccatacngngaataataatttgtccagtctttgagcatagaanatagactcatgaatat

SEQ ID NO: 72790 - DNA, 506 bp, Oryza sativa
  unsure (1)..(506): unsure at all n locations
ntatattnntcatcagaaaacatgtaaatntgtaaattccattacatattgaaaacaactcattntagagtaattcaaattactggtaactcgtcaaatcatgaactttagtgttattgcataaaaacttgcactcacagtacaatttctgtctctaaaattcatctaagaaaaatcacatataaaacatgcacaggattataaatgcatacaaaattcatttcaactcattttagagcaaacatagtttctacatatccaccaaaatgttctctaaaaacaaagtaaaataaaacatatacacactntacatcaaatgcctctaaaactaatatctttaaaataactagttctgcataagctgaactttagaagttaatataaaattcatcttagatcctttttgagtaaactcaagttctgtagaaatcatagagtgtgcacttcaatggtataaaatanaaagacatacttacagtataataaanacccctaagcatttatgt

SEQ ID NO: 72791 - DNA, 379 bp, Oryza sativa
  unsure (1)..(379): unsure at all n locations
gagcttaaaatctatatctagtggaagtgatcctgacagtctgttgaaaccaagatccaagaatcttatggaagaaatattgaagatcggtagaggaacatggccttccaactgattatctttgacattaaagtaaataagattagccattttaccaaaagattcacggatgttaccagtgaaacgggtcccttcaagaacgaagtgtgtcaatgatgtgaggatacccattcagctcaaatctttgtcatcaatgaagttcgtctctatgataaacttcacaagtgtngtgaggttggagaatgacttgggaacattaccagtaagattggtgtggccgacatcgnaaatggcaagctttgatgactgaccaagatca

SEQ ID NO: 72792 - DNA, 493 bp, Oryza sativa
  unsure (1)..(493): unsure at all n locations
tatccagaaaagaccgagttcaaagagaatgcggcatggcaagttatatattaattangaatagnttggtagtttccttttatctttagaaaagtgtgtttagtgtcctataaggactttatcttttccttttatctttaggaaagtttctttcttgtctgacaaggacttgtatcaacccatgggtataaatatgtacactctaggtctatgtaatctatcgctacgatcaatacaattcggcgcatcgccaccttttaccttttctactntattttatcatccggcgggacttggcacctgacgcggngctgcatcagtgttcaatctccggctaaagggtaagtccaatgttccgtcggcccaggcaattgtctaatctacatcagcatcgttcaaggctgcatcagtacattcgacctcttggattgtccggntgggatgatataatgctacctattatcatatgctctgtaatctagcttacatataa

SEQ ID NO: 72793 - DNA, 395 bp, Oryza sativa
  unsure (1)..(395): unsure at all n locations
agtgagtacaagcacagtactcagcaagccacaccgcgcgatgcgtaataagtgcaacggggtacaaggtgataagaatatatggggtaagctatgctgtacacagcatttaaaagtcacttagttgcccaaagccattttataaagacgatcctagagctacacagtattattaatcaaggccgtgaacccacacgaacctgccttaacccaaggtctacgatgattcagaccgaactggcaacccgaccctgngtcccagctcgtcccaagccaacccaggccaaccattccacattttagttgttaagcacatgttaagaattaaaacactgacttgtgtacattgctcggcttgccataaccganggcgcggctattcaatagatatactc

SEQ ID NO: 72794 - DNA, 457 bp, Oryza sativa
  unsure (1)..(457): unsure at all n locations
actcagcttccaagaatatactactattgataaaatatttattttattaaataattaatatcaagatgatgcataatagtcaacttanaaatatgctaataaataaaattagtattgtacagtagagtggatgtaataatatttgtctctaacatgtcttgccactgtaacaaccacacaaactaattttatgtgatgtctcaaatgaatggatgtataggaaaatactagtacttatttaatattcgatggccatataattaaatccatggcttataggttatttaaatcaagtatagccttatgattatgtaactaaaatataaacacacatagatgaatctntaacctgtttaggagaataataacagagctagatgtggaggaatcactaagtaaattaatcgatcaataccatatagaatagcatatatatgcctaaattgataccacttat

SEQ ID NO: 72795 - DNA, 401 bp, Oryza sativa
agcttatttctgatatcattccaccacgtacctctgccactattactaagtccaagtacgcaataactatattgttttatacttatatatgaaatcaactcgctccaatttggaaccaaggccattaacaactcgttgcccagcctagataacacgtgtaaatgtgtaatatatgaaaagatacacccatgcccaaaacaaagatggatatggttacagtcctaaaaaagcaataatatgatactattttgtgacgctattacatcaaattaacctatggatctagggtaaacatatcataacaaataaggcgatgtaatatatataataaccagggaatgtgcatttgaataaacaaacagcaccaggagatataataatggtgatgatcatgctgtctc

SEQ ID NO: 72796 - DNA, 479 bp, Oryza sativa
  unsure (1)..(479): unsure at all n locations
gatgatcngttggtgcttcatgcaataagagatntaacactctcatgaagtgtttccaaaagaggattagataaaataatcagtccaagcaaacaagcagagcaccattgattntaaacagagacaaggtgaatacatgacacaaacaacatttctatacatgtatgcatagaggcaaaattccacatttattttgttctcacttttcagtgtcacatactcaacagcatcactaaactatgttgacaaatgagcatatctcaatttagtttgcctgcattattaactacagccaaagatgttagcaacattccaaaaatataataatgaacaaacggtcagaacaaagaaatacgaatgaactatttatgcacatataaattaaaggcagaggatcaaagactacaaaaacagagttgaacacgtgtaactcaaggctgctccagaagcacgcggcaatgtaatcatatatgaacaac

SEQ ID NO: 72797 - DNA, 449 bp, Oryza sativa
  unsure (1)..(449): unsure at all n locations
agcttctcttattgtaagggganaagatagagcaagaatgagtactaccacagtactcagcgagccacaccggcagatgcatgattaatgcaagggggtacaatgggtaataatatatangggttaagttttgcagaacacagcatttaaaagtcacttagttgcccaaagccattttaaaaagacgatcctagagctacacagtattattaatcatggtcgtgaacccgcacgagcctgccttaacccaaggcctacgataattcagaccgaactggcaacccgaccctgagtcccagctcgtcccaagccaacccaggccaaccattccacatnttagttgttgagcacattttaagaattagaacactaacttgcgtacattgctcggcttgcccataaccgagggcgccgctattcccatagattatactctgatcagacgtgta

SEQ ID NO: 72798 - DNA, 485 bp, Oryza sativa
  unsure (1)..(485): unsure at all n locations
tcatcaatctgtatcttgattaccttgtcatgangggcgcggcttggcgcgtgcttcgcccgatcatgcagttcggcctcaacattatgcactgctctggtgattatggccagatcaccctttgaagcggccgaaggctaaagccccttgaccacgatcactcctgccgggccaggcatcttgagcttgagataattgtggtgggaaatggcttcaaacttgttcaaggtcgcacggccgaagatggcattgtagttgtacgggatgtcgacaatgtcgaacaatatttgctcttcgcgtctgtttttgcctatgccgaaagctactagcaattgcgcttggcctagaacttggactgcttctccgccgaaaccacanagcgaggccggtgcttgngtaatggctanggaaggtaatcccatcttggcatatgctctggcgaagatgacatcngtcgaactccctccgtcgactaagattcaccg

SEQ ID NO: 72799 - DNA, 421 bp, Oryza sativa
  unsure (1)..(421): unsure at all n locations
agcttatttgtctgattaatttccgcgtcagatgtttagtgttgagctgtacatgtcctgtcccttaccactggcagagtcaaacatggattatcttgcctacaatttgccaacatggtctttaaagaaatactcaagttagtataaattattgttaaccgattaggttatctctgcccaaaataaatacctcggcccccacaaattagtgcatctgtggaaattattaaagaaacaagaactagtggagcaaaacagggtggtttttgttgtctgaacacaattacatcagcaccgtagctttcatgcctgagactaccaatngttgagagaaaaatccttattaagaatgcaaagtattccatctctgtgtaaacaaaaagtaccataattcttttggtgtctatgttggcttttttta

SEQ ID NO: 72800 - DNA, 450 bp, Oryza sativa
  unsure (1)..(450): unsure at all n locations
tatccggggaatttgagatgctgcattgctctgtcctattttatcgtcctgngaagggttgcccaaaggtagtgaaattgaagggaagagtccaagaaaaatttacaggcattttgccttcctgagagagactgataccaaaagtttgagatgcaacatactaaatttatactgtactaactagtttttgactacggcatgtaaaaaacattntagctggacagaagtcatcaaattgctttagttttgccctcgttacagaggtagaatagagttcttaaactgcagtatttctgaagcacaaagagtacggaattcagaactgatgttgccctttcaatgagtatactccctccgtactcataaaagaagtcgtttaagacaatggttaagttaaaccttagatatataaatcattaataattngaaaatataaaattacatgaatag

SEQ ID NO: 72801 - DNA, 323 bp, Oryza sativa
  unsure (1)..(323): unsure at all n locations
agcttggattgaatagatcgaactccatacgagaggaatcgactcgggaaagactcaaactcggctttagggataaaatcaaaacgaactcgattcggatcaaatcctcaacgattcgctccgattcttgggggaaaagaaagaggagaacgagaggaacaaaacccctcacaaacccggaggaattgnggtcggattgaggcggatttgagaggagaaaggaggcggctcgggcggcaaatggcggccggccggaggtaggggatgaccccgacaggtggggtccacctgtcggcggctggggagaggagggcggctcggct

SEQ ID NO: 72802 - DNA, 399 bp, Oryza sativa
  unsure (1)..(399): unsure at all n locations
aaaaccactcaagcacctggagatcaaacactcttttttactgactaancttactctgcactgaatcccaaaagcaattcataaggaaatctgcaatttttctaattaatggctgcaaatcaaaatgtctaagccgcagctaaaacaacttcaagagaatgtaaattgcttgtattgttctatttcaagtccagattcaaaaggacacacaatatagaaacaaacatgtattaaaactcatcttctttctacagctattaatgctccatgcagaaacaagtttcaaagaaacaaataaagaaagtttctacaactntggtcgcattcttctacattccattgacacacaatatagttggaaaagttcacctttggccatcacatataatttcatcacta

SEQ ID NO: 72803 - DNA, 452 bp, Oryza sativa
  unsure (1)..(452): unsure at all n locations
agcttgntctaagttctattcttggcaactgcatgcattgaagaanaataatatattagtattataaatatgtgaagctgtctagtccatagtctagagatttacatcctctgcgttaaccctgtacctcccattaaccctgaggaattcgcacgcataatacctgcagaggacaatgcctctaggttgcttgtgatacttcacgacatatcatagaagaaaatagttaaattttgcaattagtgaaataattggaatacattaagtgagtgaagtcttaccggctaatatgtatgtactagcagcttctcccttggttgggtctgttctccaccctaganactngtagtagttgatgcactgtatggatgtcgtaccatttcgcattaaggaggatattttattataatacattcatataaaaaatgcangagtccgaatcacttattact

SEQ ID NO: 72804 - DNA, 487 bp, Oryza sativa
  unsure (1)..(487): unsure at all n locations
ntgagcaagattanggtatcatcatcatattgtatgatagggaacccactcccatcattttcattaattggcttagagattaagtccaactcanaagctttattcattactctctgtaacagctcagctccaaggacaaaaagaagtggtgataggggatcaccttgtcttacacccctcctgcatttaaaagaatttcctggaacaccatttaacagaacagtagaagaagctgaagagaaaaccatttgcacccattgcatccatttttcaggaaaatccatatgttgcaagacaaaaagaatagcagagtgttcaatagtatcagaagctntntcaaagtccaatttcaaaagaacaatttcgctcttcgattgttgacagtgatggatgtactcaaaggaccaagcaaggcaatcccgtattgtctttccttgataaactatataatttcactactagctgagataccccttgagctgctgca

SEQ ID NO: 72805 - DNA, 374 bp, Oryza sativa
  unsure (1)..(374): unsure at all n locations
agcttctccaggtttcatctcaaatttaatgtactcctttttgaaaagatctcgacgaagctctttaatgttatttggtccttgatgaaaattacttaaagcaacccaaatctcatgagcangttgaagatgcgcaacacgatcataatcagaacgagaaataccactcaaaagaatgttgcgagctttgcaattttgttcaaaagcagttntttcagcagcagtattaatagcttcaggaatcacataagcatgggaaacttttctccaaatatcataatcttcagccataatgtaagattgcatcctactacaccaatgagaaaaatccgttccatcgnaaacatgaggcttagttgaaaaacgagcgggag

SEQ ID NO: 72806 - DNA, 448 bp, Oryza sativa
  unsure (1)..(448): unsure at all n locations
tgtataanatgtgtctcccacttgaccgagatgtcccanaggaacacacacaaactggacatatgtacacaagtttctgttgtcaagatatttattgatgacatattaatagcaaagtctattgagaaatctccatccatagtcaacgaaaatcatcgaaaatcagcatgactgctgtctcgagaaaatggcatccgcactaattcttagaaagaaatagaatgctacaacaattccgcaaccatcactctgcctcgaacagtgacaccaatgccgatctcgctcatctctccggggccaaccttgtgcgccacctctagacaacaacctgcatggctgattacgaggtggccgcacacatgcttggcgagtgtgagcgtannggtgtcgaggccgagatctgtcttcaagccaagatcgatgcacttcagatggagtatgatcttct

SEQ ID NO: 72807 - DNA, 462 bp, Oryza sativa
  unsure (1)..(462): unsure at all n locations
agcttgcctattcattgaatatagagggagatagccaggtgtcacaaataagcttccttgatgattgtataaattcagttntcgtaataaatactcatagcagatcgagtagagagttaatttaacaaccagataatggtttcagacgtaatacataggcattagggctcctttagaatgcgggaatcttacaggaatatcagaggaaacaactaaattcctgtgaaatttctccagtagtttaccatcggcagttgacataacaaagttcacagccgaggaaaatgcattnttccctgaaatattgtctcttaacacgtgtaaggatcaccaatcaattaatattcctatatacttcctctatttcataatgtaagactctctagtaactggacctctatttcataatgtaagactctctagtaactggagatgatggatttcagcgtaccgtgagcgcac

SEQ ID NO: 72808 - DNA, 422 bp, Oryza sativa
agctaggacctattgtggttactgcactgttaatgttgtgtgggaacaaacacgatgaatggcatgctgtatttagaacaggagcattaaaaagctaggtagctactcttgttgcctgtaattcttttcttcttatggaaaaccaagataggagatggtggagttaactgttaagtacacttaaatacttactgaagaaattttgtacttgcacacttgacgttgatgaaactgcaattgctcagtatagtgaagcttcacacttttcagtcctctcctctctttggagtttagagctatgaaagaaacgttgctgggtttaatccttgatgagctgatgcttaaatggaatcttctttgtgtgtctgaatcgtatctaccaaatacacacttattatatatactatatatatgtttattat

SEQ ID NO: 72809 - DNA, 479 bp, Oryza sativa
actctctgatactgctagatacctattagagaggggactagactatgctagaatttccaattgtgatgagggatgcattggagaatgcacaatgagcattcacagtagagacagagagaagcacaaagctcaccagcctttgcatggacagcactccaacatccaaagccatgcttgacaatgtagtccctcaacctctggtcctcctcatgagaccacagccccttcctgtagttcatcttctgcttgtcgcaagaccggcaccccaatgctctcttctttccttctctgaatatctcctcctgttcttcctcctgcaacctggatgttggtcttgtctcaatatgagctgttgcagtagcagagttgtgccagacctttcaacaccatgtgaccctttgtcatttaagggggttctcacatattggtgtaaattagttaattggtgcgaatgagtaggtaatacatgcacatgcatg

SEQ ID NO: 72810 - DNA, 464 bp, Oryza sativa
agcttattctttttctctctctcatagagaaaaatgtgaaatggatttgggaatcatgggtacaagcactcctacgcgggccaaatacgttgcaacttgcgagttgcgatacattgcgctatggctcaacgacgaatggcacacgtacaatcacgaacattgtcgcagggcgcacctagacgagacaacaagaacaaggattaagttggacagtcagaggcaaatgcaatttgatgaaccggcagattacattggagcatatatgccaaaaaaaaaagaaggtagtactaacatacactggtggagaaaccatctttgctcggtcgacccaaatccacagtagtcccggttccattaaaaatcgggagtaaaaacgatttttagtcccaatttataagaacaacaggactagataatcttttattcccggttggtgtaccaaccaggaataaaaatctaacacg

SEQ ID NO: 72811 - DNA, 419 bp, Oryza sativa
  unsure (1)..(419): unsure at all n locations
acctgagagccgtctttatgagttgggaatatggccagtagaaatatctaaggatagatctatccctcgtagcaatgatgcattgcctaaagaagctgggatatgacctttaaacatgttatcagccaagacaagttttgtgagattagggagtgtattgccaatgtcaaatggcaatgtgccaccaagcaaggtctgctgaatgcttaatatttgaagagaagatagatttctgaagaatccctgcggaaaaccacctgataggtggttttcacttagggacaaccaccncaagtttgacagttgccccagttcttgaggaatggttccgtcaatcttattatttgcgaggagcattatattcaagtttgtatgatgccaagggttgaggggatgtctccgtgagatattaaagggaa

SEQ ID NO: 72812 - DNA, 254 bp, Oryza sativa
  unsure (1)..(254): unsure at all n locations
agcttgcctgcttcgtctggcgctggaagaaggcaatggcgtcnggcgcttgggccgggagaggctgatatccgtgggcccgcggcgtctggcgctggggttaggtggcggcgtccgtcgctaaggtggaggcgcanagcaccggcgttgggcgtgggccgtgtcacgtggcgctggcatgtgggggagaccgngatctcagccgccaccaccagggaagggggaagggaagcttgggttttggtttttggtct

SEQ ID NO: 72813 - DNA, 491 bp, Oryza sativa
  unsure (1)..(491): unsure at all n locations
ctcagcttcttatagctggtttgctatgtgaattctcaataatgtagtctactttaagttgcacgcatcatantttacaaagcagtcggtatatcacttggatcatattattcanggattcacacatcatatgctattatcgaaaccactcggttggttagattatttattccttgacaatatgtttggtttgttcaattaaccacataatcgtgggctacacctattaggtgcatctagtcgatgcacctgactttatttttcagccctacacagtcttcagatntggtaaaagtactcgggaagtcatggcatagatgattgaagcactcggctttggagtaatctagttcgagaaaagaatatcttttcgactgtgaaagtctcatgggctactgtggagattatgggtacnccatacccacacggcatggttatccgactagttatatgggataacttatatctatganatatgtacagatcatgac

SEQ ID NO: 72814 - DNA, 96 bp, Oryza sativa
acgcaatcgacaaaccggcaccaacgacgcggatgagctttttcctgcaaaaaacacgccggtggagaacataaaaggagcgcaaggcgggcaaac

SEQ ID NO: 72815 - DNA, 100 bp, Oryza sativa
ctcaccaggacaaaaccctgcctaacgcgtggggaagcttttcttgcaaggagtcaacgccgcgcctgacctcatcacccccagtaatgtatcaatacca

SEQ ID NO: 72816 - DNA, 425 bp, Oryza sativa
  unsure (1)..(425): unsure at all n locations
agcttgtgtatatatatagctatttgtaggtaatcgaagaaaagtaatttaaatatagtgacaagaacagaaggtgaaggaggccatttatagaaatagcatactaggactgttaaatggttatctgtatattatctttggatagcaaagatgtggcctactagtcactgcccattaattcttttcaagtttgttgaatatataagcacataatgatttaatttattccctaaataaatcatgacattgcatatgtaaactagcataatcgcatcatacgatctacacatgtaaactagacagtaaagcatgaacaggtcagatctgcgaaacatgttaaatgcgtaccgagggttntggaanaccggttgctcagtaggaataactcatggtacagtgcgttgacaacggcgcgcagcacatga

SEQ ID NO: 72817 - DNA, 343 bp, Oryza sativa
gtggacatagttctagaacttgctaagttcattccattaactcatccttgcactgcatacgacacgagcctctggctatcattcaacatgttcatgaagtgtctggcctgcaccacgtgattatctctgatacggataggatattcactagcgctctatggcaagaattgtatcggtcggctgatgtgaagtcaaacatgagctcctcttatcatcccaaaccgaccgtcacacggagtgactcaaccaatgtttcgatgcaattcttcggtgtactgggcacgctacaccaagcatatggtctcgatggctatcacaagctcaacattggtacacacttcat

SEQ ID NO: 72818 - DNA, 422 bp, Oryza sativa
  unsure (1)..(422): unsure at all n locations
agcttcatgttatctatcaaagctgacaagagttctgctatatgctagtaaacatttggttgtaataatgttattgtcagtccgccccttaaaaaacgataattgccagtatatgatctgtttaatttccttaacttgaattcttagttgcatagtgcaataattgtttcagtaattaaattaataaatagctagttgacaatagcacatctcgatcggtttcacaaagaaaaaaagcatttcttacctacatgtttctaaactaatatatattgtctgcaaaggccagttggcgcaatgcgatgcaccggccgtgtgggttcaattaagagaaaaacttttgattactgtctgtaaacatattntaatattctgaacttatgtatatcacatggaattctggacaagtcacctgatgaatg

SEQ ID NO: 72819 - DNA, 431 bp, Oryza sativa
tgagagccatgagagcatatgcgatgatagagatcgagctcatggtcttgatgatgctcaagtttctggtgttgcaagtgaatatcaagttttgggtcttgtcgatgccgttgatctccctctcctcatggagcagagctggagggcaaagtagtgcaactgcatcggcaattctcatgaagaagtaaaagcggggtagtggcagtcgtccccaactctggtcagttagatctacggaaaaggatggcatcaatggttccatggaggacaagaagaaggaaggaggtagttcttccttactccggacattgatatttagaatgaagctgacgtaacaaggcaacaatgagcttgtagaggtcctccgtgtcgagcttgagcttcccaccgttgtctcctacaatgagagactgagctaatatcgggacacc

SEQ ID NO: 72820 - DNA, 444 bp, Oryza sativa
  unsure (1)..(444): unsure at all n locations
agcttgcaccttctatggtttaaggntataggggatattacatgggtgcccttatgaaagggacatttacatgggtacgcagtgtcatttgtacatatgggccgttaatgggctgataagctgggcctggtctatggcgaacgggcctaaaaggccgggggcagcctgttggtcctccttgatgccgaactcgtcatggcgaagtctttgtagttcgctcgagatgcctttactttcggagtaccgatgcggctttccagccttcgccatcttcgcttatggctttcgccataaggcttcgcctgaatgggtttgatgtctttggcttgaatccttgctggtactatggtttcngtagatctggccgaanggcttcatggcatgccttcaacaaagtttgtctagccgatgatcctagagctaccgtgcatttcatctacagtg

SEQ ID NO: 72821 - DNA, 250 bp, Oryza sativa
caccatcccaaggcctagaacactggcataaaaatctctcctataaacacacccatataaaagaaaccttctattcttaagacctataatttttaaaaaaagaaaaaaaaaacttttaccacctaacacatcagatgcctgaccttcatgacctcaccctggcctattccatatacacaagaaatggtttacacctaatatactagaagggcacatacacttgggacctcactaactctctctctttttt

SEQ ID NO: 72822 - DNA, 448 bp, Oryza sativa
  unsure (1)..(448): unsure at all n locations
agcttggtattctctacatatcctgccctgccccaagatgccatagttattgacaccggaccggactggcggtcggaccggaaaaaaccggaaccagcgcctctgccggtctggctcatctaanagaccgcctgtgcaatcaaaccggtatagaccggctggaccgcccgattntgcagaaaaccgcctttcccaggcatacaagcaactatgccaaccaccaagccatgtgcttccttgtgtttggaacaaaggagttatttctttattagatactgaaccgctttggacctcgaccgatcagaccaataaaccagtaaaccgacggctntgccgattcaattgccggtccggtctcaataactatggtatataccanagagcaagaaggagtcgtgtctgatgcgccactaatatctcacccctgtagcctctctcagtctctcgc

SEQ ID NO: 72823 - DNA, 392 bp, Oryza sativa
  unsure (1)..(392): unsure at all n locations
tcgaccggtggcgtgtgacccacatattcctttatgtatgtcgaggaggaagtgtctgtcatcgtccgtccagacgcatttgagaagaccccgtttagcgctttcttgtatagatcgttgctgaccataaagtagatctttgctttacgggttattttctcggcttctgtatcggcctcgggcaactcctcgctgctgatgaatntgattagtgggacgcgccagtcgtctgtggtttccatgtcggcaacggcgcgttctgcctcggtgacctncgagctaatgtcggnggtgttcgggctgacttcgccgctaacctctttcaccgatggcttcatcaagatatcgagaanagtgcccggctcgagcgattntcgtctggatgcacgtcg

SEQ ID NO: 72824 - DNA, 420 bp, Oryza sativa
  unsure (1)..(420): unsure at all n locations
tatcttgagatatttgctagactgtcaggaattgatccattgaaactattatcactaagtattctggtcaggtgacaaaaaggacagaaagcatgaaaaatgatgaatcattttgattgtatgcaccaaaagaagagaatgatgaaatgcagatatacttacaacaactggagcttagaaagctggccaagagaagctggtatttctcccaccaaaaggttgtcttctaaatctaagcttgtcaaactagaaagattaccaaattgctctggtatgccaccggaaatcctattaccagccaaggacctgcaagatcatacacaacagcatttcataatagttggagagaatcgacaggagaatcatatngcacttaacctaaccatcagttcatgcaggacacaaaaacatactcacacc

SEQ ID NO: 72825 - DNA, 457 bp, Oryza sativa
  unsure (1)..(457): unsure at all n locations
ctttttctcacacgcgcacggngccttnctccctagcttccttcttactactagtagcttgagagtttgagaagcagagaggccagggttggctacgagcctacttagcggccgaaaatttgttccaattagacaagcagagagcagaatcatcatctcccgccacggtaaccctcccctcctcctcccgtttgtttggttacgccttaactaattgctagtagtagtacgtctcatgactcgtaatctccctaaactgatctgaaatgttcgacaggatatatacaggggggcctgtctgcctgcatgttttggttgacatgatcttggacatgagagagccgggttattggatttgtttggtggncgncgggcccaacctggcatcaacgctcttccttctatntgatgccctctcttcaatcttcttattcttcatcacttgctgctctgtaca

SEQ ID NO: 72826 - DNA, 314 bp, Oryza sativa
  unsure (1)..(314): unsure at all n locations
agcttctttatacctatattnttttatgggggactaagcagatgttctgttcattgatttattttggtcattgatttattttgtatgtacccgtgtcggctacctttgctgttgccgactaacatcttcaccgaccggccacctcgtctgctaccgattggtgccctcgcctgcacggctggcctattatgccgccgatgttgggtgtctacgacttcaccgccggctggccttcgccgccgccgactgctgtcctcgcctatacggttagttggttacaccacaattcacgggcgtccacgtcttcaccgacc

SEQ ID NO: 72827 - DNA, 442 bp, Oryza sativa
  unsure (1)..(442): unsure at all n locations
tcttcttgaacacccacttgcaccccatatgtgtacactcatatggtcgctctgtcacctcccaagtcccgttagcgataatggaatccatttcactacggacagcctccttccagtagtctgcatcaggagatgcatatgcttctgaaattgacttatgagtgtcatccacgaggtacacagtgaaatcatcaccaaaagacttagccgtcctttgtctcttactccttcgaggagcttcactgtcatcctcctcagtgacatgttcatgtgtatgttcagattgttctggtggtgtgattgaactgggaattatttcagcgggttggctataactactatgtgtatccttcattgngaagaagctctcaaagaaagtagcatcacgagactccataattgtaccatgtcaggtacctcagatttaactattaaaaatcta

SEQ ID NO: 72828 - DNA, 418 bp, Oryza sativa
ctaccatggaccgcatatatggcaaatgggctggctaaccaatagctttgtttcgacttgatgcagcagatgatcagtggcccctaccaaatatttggccaagggcataagccttccattagcgaagcttatgctaagtgttgcatatttgctatcgaacctaaggttgatccgcagaagacaaatctttcaagccataagttatggaaggcaacttgctctcggttggaaaatgttccaaaagtttttgcatgcctagtaatgtagttggcccaaccgtcggcattattaataccaaggccgctgatcatagtgacctccatcaggtttggcgcccttgcccatgactgaagaggaaggcgttcaatgtatcgggccggaagtagcaagccggtacaatgaaagatcatctttatca

SEQ ID NO: 72829 - DNA, 379 bp, Oryza sativa
  unsure (1)..(379): unsure at all n locations
gagctcattagaaattgaattgattttctattactagagcttggcagtgaagacagtgcagcagaatttcgcactaccggaatgggtccttatgaatctcaaagaatgatgaggggcaaggctgatacctcgcaggtgatgctatcaactgtgaagaggcttcgaggcaagatctacaaacgtctgcctaggctcgctaccaaactcgtaagcaaacagcgggacgtgaagcaagccagctacaggtgctagacggctttctcgtcaaagagcgttctatttctatggtcggccgtacaagacngatttgtttataactgacccatatataatataccaccacactagtcactcatgggaggcttcacttgtgaactac

SEQ ID NO: 72830 - DNA, 423 bp, Oryza sativa
  unsure (1)..(423): unsure at all n locations
tctccgggccggctctacacgttcgctttcatactctgtacttttaccttcgttcatgtagcatcgtagaataagttgggcgatgaccgtgttgtgttgtgccttctcctgaatgttaagtaattccgtggaacgattgaaatctccatgcatgggctaccggtttacatccatttagacaagaaaaccattnttttacagttacacaggaaatatgtgtactatcacaatgtcttttaacacatggcaaatatatgagtcaagactgaaaataatgcttntataattaaaatacagagatagacaaagggtaaaatcgtataccttctatataaaaggaggagcggtgccaaccgacgacactgaagggtagcgaccggcttgcaagcagacgactgggagtagcggcgagacttcatgtgt

SEQ ID NO: 72831 - DNA, 451 bp, Oryza sativa
  unsure (1)..(451): unsure at all n locations
agctttacgtgcctaagacttctggtccaacaatacagggacacatgtatgataaatgataacatctgaggatgctgagtggcggaaagtgagtgaaaaacaagatggagccaggaattttaaccacgaaatatcatattagagcagctatatatatatatatatatgtatatagcactccaaagaaaaatgaagacagaggcgatagagaataagcaagaacagtgataaatcataaactaagaccaagacccaggatgatgatctaagtaccattgtgcctatagaaacaccactacagcaccagctaacgtaaaagcatgtgttttaaagaacaatttttgaatgggaagaccagagaggaagttccagaatctctgcagacttttttgtgctgtgccatctaccangagacatagggaagaacgggtgggtattattatccatgagt

SEQ ID NO: 72832 - DNA, 406 bp, Oryza sativa
  unsure (1)..(406): unsure at all n locations
actaagctntcctcattgcccatcttctccatccttgatgagattgcagacattcgagcactctgccaagctaattgcatatgaaacacataaatatataatcagagtggagctcacatagtacttagactgcacaattgaattgagctattctgagaggtgcaatggcgatagaacaggtaccagtactgccggctgctgaattgtcccttgaaaactaccaaaggcctgcaggtttaacagtaattgagctcgaattattggcgaatgaacatattttctgcaggaattcagtgaacatatttgatcaggctacatgagattgagagagggtactgctactttctgacgttgagggggccctcgctcgcgcggatgcaggtggcgacgcacttggaggtgcact

SEQ ID NO: 72833 - DNA, 434 bp, Oryza sativa
  unsure (1)..(434): unsure at all n locations
agctttatgttctgtgcattactaatactggaacttatgagcaagaattgctctatcaatcaccatctactttagacatatcttctgaaacttttttcaaatccaaaagtccagtatcttcctacaaattagtgaattacgaggagctctttgtgccgaataagaaagagcagggcaatatttcaaacttgcattcgaactgcgaaatatttatacaaaggaggagagatcaagataatgcagcacggttggttatctaattggctagtcaaacatgaggtggttcatagatctttgggcttcgatcatcgaggaatagagactntgcaaataaaagcagaggattgggattccattgctgtcattntatatgtatatgggtacaattatttacgttcccaatgtgcttatgacgttgcacctcgtggatcttt

SEQ ID NO: 72834 - DNA, 404 bp, Oryza sativa
  unsure (1)..(404): unsure at all n locations
tcgatananacggatatacccaatacgtcgaaactcattgcccaatggtagagaaagaaccgttccacatcaaaaacaacaaaaactagcgcatacatgtaatagcgtattcggaattgtaaccaagccccccccatgggttctatacccgattcataactagaaagcttctctggtccttcacgaaccggagctaaaagtgctgaaatccaaaatgctaaaataggaataaggcttgctattattagaaatgcccaaaaaatatcatattcgtgaagcagaaacataaatgtactcccattaatgtggaataggcggaactgaattagtcaattcaagtcagcattgtcaatntatacagaatttctctcttttcctcggtgaaacaaggagtcggttttctc

SEQ ID NO: 72835 - DNA, 341 bp, Oryza sativa
gagcttctccaatatgtgcgcatgctcgtaccatcttatttgcggtagctaattaatttcttggcactactggctagatctccctaattaattcggtgggatggagaactaattaatttgatgtttgtcccggctatatcgagacaaccattattacgtgtgtgtatataccgaaacttctttgatgccttatgtatgtacgccatgctgcagtacgtcgtattaaccaccttgcatgagctcttaatttgggtggcattccagagagagaaataattgtggacccagcaatgcatatggtgtgtgagtacttgagaaatatatacttattatgccgtttt

SEQ ID NO: 72836 - DNA, 369 bp, Oryza sativa
  unsure (1)..(369): unsure at all n locations
tctaccgaaagctaaagggaggaggnggaacgaggaggaacatctgttatatgcactaccgngcgggacagngcgcattgaccataggccgaccgcaccggagtgatctctccggcctcgggccattgaagcggaggaagacgatgcgcccgaagtccccttcacgcgttcttcgcacgctccggctctcccggtgcttggcgatgaacggcggatgcgagacagaagggcggcaatggcgcggtggtggcgagcgaaacgggaggaggaatcgatgggagggcgccttggttaaataggaggcgatgtcggtcgcggccaaaacggcgacggtgcggtggggtgtgacgccggcgggagagaaaaggg

SEQ ID NO: 72837 - DNA, 444 bp, Oryza sativa
  unsure (1)..(444): unsure at all n locations
agcttgactctgttgctttngcaatgaggaatgagatcttgctttcccccaccatgttctccatgcccttcctacagggccatccgaccattgccctcttgtactgtccaacccgcaaggcccacatcgtccgaggaccttcaagtttgaaaacttttggacacgggtcccggtgttcaaggacaaagtcaaggacatctggagccaaccttcttcgcacactgagcctatgcaccgcctgaatcaaaagctgcaacgtacggcggtcggccttagagattggacaaaaggcatctgctcagaggctaaattgcaattccatatggcactcaatgtcatccaaagactcgacgtggcacaagagcacagagaactctcccncccggaaacgcgactganggcggctctcaagcggaaagtcctangactcgcttctatagaaag

SEQ ID NO: 72838 - DNA, 497 bp, Oryza sativa
  unsure (1)..(497): unsure at all n locations
gacctataaatctcagcttctatagtcagatttaaggacttctctcgttctttatatctttcgagtgtgtcagcaagcatgacagcagttactctccaatgcaatctgcaaggatcgtgagaaaaactgtgatctctagcaaagatggatggagaaagcaacaacatagacatggaaatactaggtgatgaacattttgattgacacgatttttaattagtattgcttgaccaagttaaaatgcaccacatttgtcatcagagacattaatttatcccaatttttctttgatagatcaagtgcaagaactgttctcattgttgtgctttagatattccaaaagtatctccaacaacaaagcctttatataaaagaaatggaaaatcatgatacctgtaataccattagaaactctcaaaagttcaaagtgtacataagctgtaatgatnnactctcaattattcttgcagcataatatgcgcgtagtattaacaaac

SEQ ID NO: 72839 - DNA, 416 bp, Oryza sativa
agcttgattttattctcgagctcgactaccgagctcgaattttaattagaacaatttatatttcaaaggatattttttaaaaaataataatttatggtttatcatattagtagaagaggaaaaagaataaaataaatatatgctgccaatacaaggcatacaaataacatatttgatcttccaatttattaaatagcaacaaaaaaatcataaattactagtctcgttagaagcttgagctcggctcgacaaagctcgcgagctttggaacaggctcacgctcggctcgtttggagctcgagctgagctcgaatcgagcctaggatgagtcgagctcgaatagctcgcgaacctcgagcttttttgacagccctagataggactatagtatgcaacgcacggtgcaagtgcgcgtg

SEQ ID NO: 72840 - DNA, 391 bp, Oryza sativa
  unsure (1)..(391): unsure at all n locations
ggggcagatccggatccgctaccggatctgcccgccggaaacacctccgtcggatccacccacgggagcactgatgccatctctgcagttgcgggaaaagcttgtggacggaggaggagggggtagaggaccgtcggatccatctgtcggaagcgccaccgctagatccgcccgtgggagcaccgatgccatcatcgctaccgtgggaaaagattangggtagagggggaaggggagagggtagaaagactatcgaaaacgccatcgccgctgcctctgctggatctgcccgcgagagaagcttanggatggagaggaagagggtaaaggaccgtcagatccggcccacgggagccgccaatgccatcgactctaccggatccgccgatgg

SEQ ID NO: 72841 - DNA, 270 bp, Oryza sativa
  unsure (1)..(270): unsure at all n locations
agcttgtttattttgtacctgaacttccgtggtcagaaagtacgtcacaggctgggttttcatttgttgaatattaaatatgttctgaattcaatagtctgttgacgtgcgctgtatttaatttgccttttttttttcattattgcagatttgggttaaaccggaagacccgaaattgctatctcctatattcggtaacctgagagcagggntcaccttaccgttntggggggttaccgaccccccgcggtatggtggntaccgcgataa

SEQ ID NO: 72842 - DNA, 384 bp, Oryza sativa
  unsure (1)..(384): unsure at all n locations
gggagagagtttgtatgaagagaatcaactcatccctcgcatatacctgaagacatcctagagtatcatcgtagaccaaatcgattggagaccttaaagatagaacatgtgatctcctagacaatatatgctttcatgaaaggcgtgacgtcgccacgttggccggccggccggccacccgnccacccaagagctagacaagattttcacctggaggatcccaccctgaatggagagatggatgtttctcatctatgccccatgggggaaatgaggcactccaattaatgcattgcgaccaccctaacatcgtaaccccatgttcttccgctatccaacctgcccaacaatgtgccctgcggatgtaacgccccgatttcgttc

SEQ ID NO: 72843 - DNA, 380 bp, Oryza sativa
  unsure (1)..(380): unsure at all n locations
tgcttggctttcgctcanggtccttgataaggattgaacccctgaaagcgaaagtatgcctgaaggtcatcatgctgttgctgcattatgttgttgatgttggtaaactgagcattancagattgttgccattcttgcgtttgagctatgtgttttgcgaggtcatgctggatctcccccgtctgcacatcaagggtgttcatcctcctagtgatttcacccaagttccaacgagtggaactcaagcgccattcacatggggatggaggcataccacttgatatangaggttgattgtccncagtggatgtcatgaggcgcatgccaccggtcctcactggcgcttgacacggttgagaccccgatgatatggcgtggag

SEQ ID NO: 72844 - DNA, 443 bp, Oryza sativa
  unsure (1)..(443): unsure at all n locations
tataccttngctcgtcccgagtaaaggatgaaaggaaacaaagacttggttggtgattaggtgctgttagtatgctgtatgtctcaaatgtacaggtgcaaggtatatgtactttctcatattaaataatctttggcacggtggcttacccttacccctgattctcacgagacattgcatatccttgccttgagcggttgaaagacagaatagcaattagcgcactaatcacccaatctttattcaactnttttccggaagttttcaaatgaatttgcaaaagaaatccaagttcctcaaatgattcactatgtctctccaaatgtatcaatatgaattcctcaaccttttaaccttttgattcctactctaaggtttgatatgtggagcttggaagggatcanacatggcatacttacatttcacattattactaagtcaaa

SEQ ID NO: 72845 - DNA, 443 bp, Oryza sativa
tagcttccttgtttagctcgctcttatcttttttcgctgcatctgtaatcttttatatttttggaagacgtggatctgtatgtcaacaattggtcgtcgtataccctggctggtcctagacagggatttaatgcacattcagcttagaaattctggttcgtgaatttctgggcgtgacaggatgcgacccctcctagtacaacgaatctggacaacccttcgtctagatccgttgtactaagaggggtcatatccgctcctagattaggtttttgggacggagggagtacacatgcaggacatcagtaattccttaatggattttagtatctattatatttggattactcagaatttcaatactcttagcatgcactttcgtactatgccccttcgctagtgcaccaactctaggctatgtctagctgatagttggaactcat

SEQ ID NO: 72846 - DNA, 474 bp, Oryza sativa
  unsure (1)..(474): unsure at all n locations
actcagcttcttatagctatnntgctatgcgaatgttcaatgatgtagccaactttagggtacactcatcatattntacaaagcagtcgggatatcacttggatcatattattcagggattcacaccgcatatgctacatattaatattaagtcgcttggttgactacaattatcgaaaccactcggtgcatctagtcgatgcacctgactttattttttcagccctccacagtcttctgatttataaaaagtactcgggagatcatggcgaagataattgaagcactcggctttggagtaatctagttcgagagaagattatctttctgactgtgaaggtctcaagggctactgtggagattatgggtaccccatacccacatggcatgggtatccaactagttataggggataacttatatctatgaaatatgtaacagaatatgacttgggtattaccgttctttgtatat

SEQ ID NO: 72847 - DNA, 450 bp, Oryza sativa
  unsure (1)..(450): unsure at all n locations
agcttcaatgaatgtgaagtgcaaagggttgtgaagtggacaggtcaccacatttggttgtatctcagcaaatgtgcacatgttctcatggccttttccagctagagtacaatattcccattccaactatatgctactaatacttatatatccctggtccactggaatgtattgattgattattttcccccttctctatgtcgaatgtgatcatttagttactcagccatgttcatatgcaggtgggttattctgcacccactcagtcagggattgtggatgaagttggactgtccatttcgcaagtcagtgattntctcttccatggttttcgctctgctgtgctacttgtactcaactttcaccggctgtaatattctcgtatgtagtactgtgatatgtatagactcattctaaccttgcagttngcactattcngatctgtactga

SEQ ID NO: 72848 - DNA, 484 bp, Oryza sativa
  unsure (1)..(484): unsure at all n locations
agatcgaaccttgttngatctttgtcgtatnttagaattcatttattggttttttcaccgtantttttttcaacctcagtttttggactgttatatactgaatttatttccattctttngattttgtgtcccaatttatacgctcctagctatcaatgaaaatgtcttctaactgattcggcaattatattcattctatatcaatatgtacatatatataacaaaatattctcctacaaaactgcagagagattgaattatactccgagttacctgcagataccaagaaaccatgctggcgaagtagacgaaacctaagggattcaaggtggagcaagtcagcagcagcaacgctgtcggcgtgctccttatggtgcaataataatacatgctgtaacgctacggtgatctcgtcgcggaagtggtcgtctatgtggaggcgttcgagcacgtncactagcatcaccgtgtaggccatactcgt

SEQ ID NO: 72849 - DNA, 456 bp, Oryza sativa
  unsure (1)..(456): unsure at all n locations
agcttccagtctttatctattntgtgctagntctgaataaaaggatgcatagtaactttattggttaaaccacgctgtggacacgaaatttcggaatcgagtaaagagatatgtgggcctatggtgctgtgtgcagctccgtgaaataaggcacatatattatgacatgtactgggatgagaaaccaggctggaagccccttcctccacagaccaaggtggaggaccatccaccttggttggaggtacaggaatgaggctaactacaatcacggatgttattttttgattcaaaggcaagatagattccttactacagattaactcctattatcatagcagtcactacctggtggaaatccaattgattcttcttgactgcttactgtgaaggaaatagaaatcanatggcaatcagttntgtagctctgatctttgataggctgattcacttatg

SEQ ID NO: 72850 - DNA, 467 bp, Oryza sativa
  unsure (1)..(467): unsure at all n locations
ctgtgtcatgttcatatatggtgaatgatatgaagccaactgtttntcttggctcangcactgtttccattcaaggaatggtgggttggtcccgcaaagggtgtgttcgatcagaccgcctggtctgcgatatggaacagtatctacttcgtggtcttggggttccttcgtttggaatcaccggccactattttcagtgagctcaaatcctacgtttggcccatgcttactgtaagcactgatatttcctttgttataataatgccttaattgagttcccatattctatattcttctttttttcttaagaatctgaaagttatgaaaaagctgtagttgtgcagttgatttgttgtcttcagtgttcttgacagcaaaaccatagcctgtgagcatggcttttggtactatgatccttacatttgtgaagggaatcgatgaattcattgctctgtatacaagtaaat

SEQ ID NO: 72851 - DNA, 417 bp, Oryza sativa
  unsure (1)..(417): unsure at all n locations
agcttaatgtgttattggtgaataactttatagtaaaataggatatgtgacaaataatttgacaatagaaaattttaaactgtaattaattatatgttaggcaattcttgaattgattacttttaaaattatatcattaattgctaccaaatactccatccatcccaaaaagactcaattcttgggtttccgtgtccaacgtttaaccgtccgtcttatataatttttttttatgattggtgttattattattgttaaatgataaaacatgaataatattttatgcatgacttatgtttttaatttttttcanataagatggacggtcaaacattagacgcggaaacctaagttttttttttttttggatggagagggtatttcagtaaaaaaaaccattcaacaaccacaaagcaa

SEQ ID NO: 72852 - DNA, 329 bp, Oryza sativa
  unsure (1)..(329): unsure at all n locations
agaacagaagggtaacaaagatcgatggatgaatcctgcaatacctgccgatcttcatgggggaagatgagctgcagcacttcgatcgggtcgaactccaaactcaccccgaggtcaaccgcggaagcggtcgacgaccaacaccggccgcgcttcgccaggtggtgcgactggagggggaacgggtcgtcgaggatgtctgcgactgagaacccgcgcttncggctgctggcggcagcgacccgggccgccattggtgcgggcgatctgaggggagagggtgtaccggcggcgaactcctcggatcataggcggagagtgattcagat

SEQ ID NO: 72853 - DNA, 445 bp, Oryza sativa
  unsure (1)..(445): unsure at all n locations
cgccatagccgatattaatcagcagagtgctcttcttcgtgctgcccgtaaaataggcgttgttcacgtgttgacggtcaaagcccgacatcgggccggtatccagtcccagcgcccggcaggcgacgatcagataggccgcctgcatggaactggtgcgaaacgctgtttcttcggcaagttgtgggctggaggtaaaccaactgcgggcatcaccgtggggaaacagtagtggtaaccgttcataaaattcactgtcccaggcgacgatagcggtgacgggcgcggtcagggtttcttgcagattgccgctggaaagtgccgggcgcatacgttcttttccttctgccgtgcgggtaaacacgatccgtgccggagaacagttagctgatgtcngcccncatttcatcatggcatanatctcccgtaacgtctcatcgctgac

SEQ ID NO: 72854 - DNA, 450 bp, Oryza sativa
agcttgcttctgatttggcatcggcgagaagtacaaccccgcgtagagccaacagtggactgagaggtactctgagggatagcatcactagacgacatgagccagctccaagaagagacaacaacgcacgctacgagagagaaaaggcattacaagctgtgcttatggagaacgaacaaaacgaagcagaactccaaaggagaattgaggagtcgaagcacaacgaagccttcttggaaagtgaacttgcagacatgtgggttctagtggcaaaactgaaaaagtctcaacgccatgatcttgaggattgtgacaccaaatatattggctctgaacatcataactctatgctaattaattattagtagtgcgactggcttgggtacgtctgtatgtaagataagagattataccacgtctctgctgcagggaatgattccatctgatatc

SEQ ID NO: 72855 - DNA, 435 bp, Oryza sativa
  unsure (1)..(435): unsure at all n locations
tagttctgaacataatatactaatattgtggtatatatgtgttcaatgcttgaagtgacacattttnttttgaataatataagaaactaccgtaaaaatatgactcggtaattacaaaagagggttgctagatgaggggtgcatactacctcttgntagctgagtctgctgcagcaaatgatgttagtaggtatagttgtataccatgttctcgtaagatactgtttactctctatttgttatgctccgctgctgtgatgcctgcgtcctatactcctagccaaacgcccacgcgatacggcgatggtggagagaggccgatatgctatagcgctttcgagtattcttgtattcgacggtccatttgcagttacacgtagcangtttatcgattgttatgtgctgatactcgctagttcattggcgatctttctc

SEQ ID NO: 72856 - DNA, 453 bp, Oryza sativa
  unsure (1)..(453): unsure at all n locations
agctttattgttatatttntgcaatgatcagatatttattggtattttattgtattattattattattattattattattattattattattattattattattattattattattattattattattatcatgccctgttccttttttcttttcaatgtctcattcaagaatcatataccatttggaccatgctaatgatgtcggtatatatagcccaatgatcatcggtacccagaccatcgaaacaaaacattcttcagttgatcttgagattaagtcactccttcatcccatctcaagaactgatcaaggaaaggaanaaaaatggcactgaggagaataatcaaggagctcaacgaccttcagagggatcccgcgacttcctgcagcgccggtgatacgcanatctttgcattacatccttgaaatcttcagatagaaatgttcagaa

SEQ ID NO: 72857 - DNA, 481 bp, Oryza sativa
  unsure (1)..(481): unsure at all n locations
tcgccatggcgccatggatcgatcgatgaaatggtgaatcctcttgatgcatgagaagaagaagctgatcaatggatcgttcctggaccggcatttctacgcctgcttcatcctgctcgggctgggggtcaccgagtccgtcggcggcgcgctcaacacgtggttccgcaccggcaagctcttcccggtgccgcacctcttcgccggcgccgccatcaccgtgctctgggccgccgcggcggcgctggtcccggcgatgcataaagggaacgagacggcgcggagcctgcacatcgcgctcaacgccatcaacgtcctcctcttcatctggcagatccncaccggcctcgagatcgtcggcaaggtcttcgagttcaccacatggccatgaacaaacaacacaacacaacacaatgcagtgctgcaattcattctcctcttaattacggtttcttttgactacatagccgatcttgcgtgt

SEQ ID NO: 72858 - DNA, 417 bp, Oryza sativa
  unsure (1)..(417): unsure at all n locations
agcttcatgttntcactagtgttttccttaggaagctcttacgcacaaacacaagaagaaacgttcagggatctttcgactaactccgtgaggtggtgagcgtttttttttcttacgcacaaacacatagtatatgtacgatgttttgctaacgtatggattttcccgcgcaattttgagcgggacacaaggttttaaatgtatgaattgattgaatatacaataatagcttttgtttcgaaatatacgtagtccatattttgtatataactatatcagtcgatatctcgacggttacaatctaaatccaccgttattatttgaataggttacanttttaatatagagtatgatgattagataacagatagtaataaaatttcccgcgtaaaattggtacgtgcttntttatattat

SEQ ID NO: 72859 - DNA, 438 bp, Oryza sativa
  unsure (1)..(438): unsure at all n locations
tncgacatatctcanacgtgattggaatgtgtaagagactctctgatatcttacaagtccattggcgttaagataccaacacttaacgtcgattaccctaaatattatagtattgttttggaaacgattattcggcaaagatagtaaatttcacttggtgccgtgcggctgaaattttgcacacatactgagctttccctgttctgatcaaatagatatgaaataactctgcagtctgcactacggtcaagcccagatcttgcatacacacggttacaaacatgcttgagcttatagagttatcatgcattctctggggtttcttaatccattatattatctanaaagaatagcgacaaatataacagtggaagtttacattctatattttcccatattcagacaatggaaactgaatacagattcaatctggtacag

SEQ ID NO: 72860 - DNA, 424 bp, Oryza sativa
  unsure (1)..(424): unsure at all n locations
agctngcctaaagcacttatgctgtcatggtgaatttatgagtgctgagctgaaaattataaaaatatttgaggaagagctttcaaagtgcagagaagagaccaatatgttacatcaaccagaccaaataagccattcaactttaatggcccttgtttcattgatcattcctccactacttaaggtgaatatcatataattctgtcagtttaattagattagttgaatattataagtcttaacaggtgtttgtattgctaataacaacacttaagaattgaatatgactgttgaatttcagttgattcgatttgtacatgcactatggatggatggagctgtacttagattcccagaagaacttatagaagctagaaagatgaaaaatgttgatcagatcttgagattccgaggagaaacactg

SEQ ID NO: 72861 - DNA, 133 bp, Oryza sativa
  unsure (1)..(133): unsure at all n locations
ngtagatntcttcacgaangcctagagaagagctcaacatatctattctctccaaactcattgtggttgatccaccacgagttctgtgtgtgtgtgtttggggggcgacggaccttttaccaacaattttttc

SEQ ID NO: 72862 - DNA, 295 bp, Oryza sativa
agctttggattttgccaccgcattggtggtggctaattaaaatacactacatggtgggctgtgggtgcatggttttgctatacgtgcccatggcgattaaggaccggttcgcgggatgccctggaagaatttatcgtacttaccacaagccagcgtgggcaacggctgggcttgtagtgtagcttttctctagccgacgtacccaggcgagggtgggcgtgatggagttgggtcagccggggtgtccggttgatcggctgccggattcaccgcggcacgaaaggggggcttgccg

SEQ ID NO: 72863 - DNA, 475 bp, Oryza sativa
  unsure (1)..(475): unsure at all n locations
tattctcagggtggtttgactattccaatcccaactcctgattatgactttccagttgtacagtatgcagacgatactctacttatcttgatagcttcctcaaaagagcttttctgtttgaaggctattctcaacacttatgcagattctaccggtttgaagattaactacagtaaatcatgcatgattcctctgaatgtggacatagaanaggtgcagcatttgtccaagatgtttggttgctcagtaggcactttacctttcacctatttaggtctgcctttgggaacaactaggccaaagataattgattntgcccccttagttgatagggttgagagaagattngctactacttctgctcttctgtcttatggagatagattaactatggtcaattcagttttatcctcccttccaacttactatatgtgctctctttccccttcannagtcataattganaacattgata

SEQ ID NO: 72864 - DNA, 355 bp, Oryza sativa
tgcttgagttctcatgtcctgctcccttcgagtcccagctcccaagattttacgagaagtattgggctcaacaaaccaagataaacagtgtgttgtgtttgtgagagacaattagtggacttggagagagaatattactactcctactatcgctattgtgagatagagcgagagcgaaaaaagtgggagtagagtaaaaataccactcccctccatcggtccatcccatccagtagtagtagggtgttgtgtggcgcctctcgccgcgaaacgttcgaaaccccacgaaaacctccaagaaaaacgaacccaacctacgtaacgcgcggacatgacggtcgcgtgacgccatgtc

SEQ ID NO: 72865 - DNA, 479 bp, Oryza sativa
  unsure (1)..(479): unsure at all n locations
ngtatcaagttagaaaccaactgtgcaatacttgtaatgcagacaaaaacatagtttgttctgatattttgctttagaaacccatcattgatattttgcttttgaaatccgtcattttacatatatgtatgcccccttaattntgccatgctgaggacacattgataaaattataattgtgctaagggcgatatgacaaatatcggctatcacatatcggcacgacaccaccgatataacttatatcggccatcatacattggtaaaacacaaccaactatgataaaaacaatgctaagggtgatataacttatatcggccatctaaaggcgatgttaacacatcggctaacatngtatcgacaaactcagccggtcacgcattaatccaaacacttggataatatntcttcaagtatttcccattgagagctcgtncaaaacttctcatcaacccttgaacatatagctccttaacac

SEQ ID NO: 72866 - DNA, 392 bp, Oryza sativa
agcttctttgctattctctccgccttgagtccggaggagttcaacaaggttgatgggcttgatgagtccaaggagatatgggatactctgcaattggctcatgagggatcacccaccgttcgtgaggccaagattgaattattggaatgaaggcttggaagatttgtgatggatgacaaggagacactacaagagatgtatgatagaatgatgatccttgtcaacaagattaaaggactttgtggtcaagagacttctccgtgcatttggtccaagaaatcccactcttgtatcaatgatacgggaaaggaaagacttcaagagactcaccccaagtgacattcttgtgaaaattgtgtctcatgagatgcaagatgaggaagctcgtgaag

SEQ ID NO: 72867 - DNA, 398 bp, Oryza sativa
  unsure (1)..(398): unsure at all n locations
tgcctccatctnctcccacttcggcattgcgatctatagtcgtctgaccccaagaagtgatggtacttcttcttggcggcattttctttgtttctttccatcatcgactgcccttgttgacctatcctggaagcaacgaactcgtcccagtgatcccttagcttcgggaatacgtcgaagttcggtgtctgccccttcaggatgtatttccggtatagaactctcttgaaagtctggaactgttctgccattttcttaagaagccactgtttcactatgttctctgtactcacagggagcgtgaacgtctcgagcattgtggtccacagcatctctttctctgatatcgggacaaagctgtcatcaccccccgatgcgcttgttttgcaccagcacac

SEQ ID NO: 72868 - DNA, 447 bp, Oryza sativa
  unsure (1)..(447): unsure at all n locations
agcttgcaagcagtacatatctgaaacagatggtttagttntgtatgccggtactaatttngttatcaaattgggtacttgtaaaaaacttgccatgagcacgtatatttgtatgtttggtttgaattggcaaatgtaccagtgtcgtcaataaaattatgtacatgatttttgctagaataatcactcttgcgtgttcatccaggccatttcgttacatttgttaaaaaaaatgatcatcagtgctgctcattggttaggaatgagcttaggaatattagtaggtgggcacacacccagagtaacataatttaatctataacctctacgacgaattaaacttatcacacataaatagattagggacttggaaaaaagatcttgtttcacaaactttatggngtaatctcaccacccacaataataggtatttacacacaagatatc

SEQ ID NO: 72869 - DNA, 431 bp, Oryza sativa
  unsure (1)..(431): unsure at all n locations
gaccttgatactaagcttcgcatcccggtaaccatcggagtctattgtgccatcacaacccatgcattgatgcatgcactgatttggctcgattaatttgagccggagatcgattaatccacggtatgtaccgacgtaccgtacgccgtcggctatggcaaaacacggccactagggctgaggtgaaaattttataaacaatattactattggatgaagaaatgatcaaaataanagttacagatattntggtggtgatgactttttcacttgaaatcatttagtatttgaaaatgttgtttgaagttgtcataatttgaaattcaaattggaaatattgaaacagagtcatatagcanaatgaccaaaacanaagtggagatcttgatattcataattntgaagtatntaatattatatttgtaaatcgc

SEQ ID NO: 72870 - DNA, 444 bp, Oryza sativa
  unsure (1)..(444): unsure at all n locations
agcttgtctcttgtttacttcttcagatcttcccccacactgacaggcttgctgacagcggtccgcaagctgctccagtcgatccccgcgacgccgatccgcatcatcctcttccgacgatcttcttcagccttcagttccctgttgttcagagcaaggggaatggtcagctcagatgatttgcatcttctactgttcaaaatatgaaacctgaacatgacttacttctccctgttgatcttctccatgtcttgccaggtgagccttgggccctcgtcgaagccctcgcagatcagctcgccgctctcgtcggtgtagcagaggatgcccatgctcttgtcttcatagacctgaaaaacaatggtatgatgtttcagattagcacanagaagaanttgattcagatgctcacagaggctagcaagaacagttactcttgtgacc

SEQ ID NO: 72871 - DNA, 428 bp, Oryza sativa
  unsure (1)..(428): unsure at all n locations
tgcataccatggtcaagtggtaatcggagctgatactctctcatgcttcatagagatgatgatcgagaccaaactcctccagagcacctctgaagtctgaaacctcacttgctgttcctctcctctcctctgtcttgatgcttcgtttcttgaaggaaccaaagtgagatggactgatggaggaagaaagggcgagtgattaagaatgggttcttgtgccgtgacgaatgaatcgaacagtgcaaagttaagcgagaggaattgaagaaaataggaggagaagaaagcgatggngatttggaaagaacagcacagcacgtcagttgagtcttatcactcatcaggtagtcgtcagggattattcctgctcctttcgggtccaaatcactttgccctgagtcctgagtcgcagcccagtctcggcatta

SEQ ID NO: 72872 - DNA, 457 bp, Oryza sativa
  unsure (1)..(457): unsure at all n locations
agcttggctttccccttatccgagagttgactactgatttgattctccagtcgctccctcccagttntgagccattcataatgaatttcaacatgaacaacctgaacaggaccttggcagaattgcatgggatgctaaagactgccgaggaaagcattaagaaaaactccaaccatgtgatggttatgcataagtgcaagcccaacaacaagaaaagtggtcaaaagagaaagctaaactctgatgagatcacaagtactagcaactctaagaccaaggttcaaaagacagggcccgctaaggatgcagagtgcttcttttgcaaggagacatgtcattggaagagaaactgtatgaaatacctagagcagctcaagcagaagcagcaggatggaaagagttccacctcaggtattaatgttatagaagataatcttgctacttnctctactgattc

SEQ ID NO: 72873 - DNA, 475 bp, Oryza sativa
  unsure (1)..(475): unsure at all n locations
acccctactggttttctctaccaaataagagatagctctgccattgaggttgctagcctctgcccagatgatagatcatttgatacttctcttagtttcttgccacgttatgagtggctagaactaacggattcttgcaatggactggttctatgcaaatatgggcgcaatacttcttctccatccgttgcgaactntgtggtgtgcaacccagcaacacgtcagtggatggagttacctgaaactcttctggaaccagaaggtcacaggtatgcaaccaaattagctttcgatccatcatggtccccgtacttctatgtcttcaactttgaagagaaacgtaacccagtggaaagatgggcttgtatatctaaagctgcgatattntcatcaagacattccacgttggttatggatgataagtgggaaccttcgaatcagaatagtgtcgattgcanccacacgtccttcttgg

SEQ ID NO: 72874 - DNA, 450 bp, Oryza sativa
  unsure (1)..(450): unsure at all n locations
agcttgcagcttggtcgctgcaccattcttggttgcatctgattctctggtaatcctcttgcatcggcttgctctgtcatcttcttcccctccattctccatgcttggcttcaattctcttggggtggagaagagtggagcttctctcttgtctgaatgggagttgagaaaagcttcngcttttatacttgtcctgatgagaggagagagaaagagcagcaacaggttatggtgattaagagaccccactaagtactaactgatgggaaaatattntaatatgtacctgaatataagaatacgtgcataagatggaaggtgaactccatcaatcgcacaagtgacacaatcagattagtggcagcatgacaatgggaatctacctgtccaaggtccttcattntcatttgtgtgaatggcaatatataatggcacgtgtcatggagactg

SEQ ID NO: 72875 - DNA, 482 bp, Oryza sativa
  unsure (1)..(482): unsure at all n locations
ggctcagattcgagagaacagcaatttcttccgttcagagcttcttaaatgggttctgaagttcttggagacaatgactcgccggtcatgcctatcatgctttacaatcctgctaaaatacctgcgttctcaagagagtgcctgaggcaacacgtgagttttcaaaatatacctcacctaacgaataaatcatgctttagttgtgaatccagtagcacacataatttcttcactgaaaattctgctgtttgactaatgtgacatgtttcataattctaggttgctgttggtactgttgcatttcctgctacaccactactgcttgccagagctaggatatgtatctcagcttcccactcaagggaagatcttattaaaggattggaggtaaagtccatcctcccgtcaatgctacnggcttcatggcttggtgcgacaagncttgatttagtgcaaaccacatacagttactaaatttcatg

SEQ ID NO: 72876 - DNA, 399 bp, Oryza sativa
  unsure (1)..(399): unsure at all n locations
gagctcgatctgttctctaactatattgaccacccgtatgcatcttggtggttctggaactcaacaatcctcaaataccttgatatttcatcgaacaatttgtatgatcagctttcaaatgcgataggacacatggcatccctcagagtcattaatttttctgataacgctcacatgggcattgtggaaccagagttgatgaccaacctatgtagtttggagaatctaaacctncaagggagcctctcctatgggaacatgacagttgctcgatagtctgtcaaattgctccaacaaattaagtgagctgaatttagcagacaataatatcagtggaactcttgcacctgtgatattccaacattttgagacttagtcactcttgacgctagcaacaat

SEQ ID NO: 72877 - DNA, 58 bp, Oryza sativa
cactaagatactcagctacacatctaagctacatatcaaagttatacatccaagttta

SEQ ID NO: 72878 - DNA, 431 bp, Oryza sativa
  unsure (1)..(431): unsure at all n locations
agcttggatgtcttccgacgtggctgatccccacgggctgggtgatccgggttagtaatgtcgtgtgggtaaagtgtaccccctctgcagaggttaacaaactgttcgaacagccatgcccacggtcatgggcggatgtgaggtgattcctagcgtagttntgtttgacaactgcttgtgaaattactgttgtgaaaaggggttcgatgtttgaaaaatcagcagctgacgggatcagctaggcccgggtggccgtttgaaaagttgttggcccgggtggccgtttgaaaagtatgtggcccgggtggccgtttganaagctgttggccgggtgccaaccttgttttaagatctaaagattgttgcacatactccgaccggacgggacgcactgtctcaaccgtgtcgtttgagaagcactcacctagatg

SEQ ID NO: 72879 - DNA, 445 bp, Oryza sativa
  unsure (1)..(445): unsure at all n locations
agatactcagcttcttcaatctgagaataacgagttcttgattgtggtatatcctacacagaaccaaacattggttttcagggggatggggacttggaanttgggagcttgaacacatataatattcttgtggtctgataaccggttgggctcttgctctcttaaaatccagtaccctgccatttatctgatctgcaatcagcaaagcatcctgtttgctgatgccctttctctgtagcctgatagcctttcttttaggagatcatttcttttagctgggtaacattatatctagggcttccctttctagtgagggaaaaataattctttggtccctgacaaaaataattgcgacaccacacaacccaatattgtgctctcttgcttcgtggggctgaggatggtatagagcttgacattttgctggctagtatagacaggatcc

SEQ ID NO: 72880 - DNA, 448 bp, Oryza sativa
  unsure (1)..(448): unsure at all n locations
agcttcgtgaataccttgagcaaggcaagtcaccctttgatcaattgcccctataattgaaaagtcattattattttgtttgcaacttgcattagtggaatcacacacttaacttgcttggcctcggtttgcgtgccagaccgacggacctacccagtagtcacactaatttccgtaggtcgtactaccctgattccttgtcgctccacccttgtggtacctcggtattcgtgctctctgagcgcgtataccaaatatcccacatacaccgttgcttgtcgaanacttgggaaatgggtttgtgaagccttcaaaacccgacatgtggtgtccgtgtgtttgaatataatatgaattgtgaaaactcgcgatgcggaggttgtgcctatgtggcactggtccgtatcncatataaggccgaatctgtggaaactcatgaacataatca

SEQ ID NO: 72881 - DNA, 435 bp, Oryza sativa
  unsure (1)..(435): unsure at all n locations
aggagaccgcgcgccgccgtcacctcgatcggatctttgcttcgctggtcgccgctgctccagaatccatcttctgtgtcaagcggatcgccgccgtccctcgcgttcggtatacgcgtcatcgccggcaacggaggagaagatgaggatgtggcggcggctgcggcctgcgaatgaagagcggccgtgtgcatgcgtggtgctatccggacggttgagggcacagagcagcagatcggacgaccaagtgataccgaggcccgctcaactggagtagtattctctctctcttatgtatggagtaggagtatcttctttctttcttgggtggaaagaaaggatacatgcggngcgcgtggaataatgtttagtttattcaccctganatcctgaatacctctatttattttttcccgaacactaggacccccgaca

SEQ ID NO: 72882 - DNA, 399 bp, Oryza sativa
  unsure (1)..(399): unsure at all n locations
agcttgataatntaaatnttggctaataagtataagcattagcaaaaagatgatgccgtagttctataagggtaggtctataaggttagggttttggctcaagaagatttcgaaaatagttcagtaaatctaaaatattcttttgtaaggagcttaatttctaaatataaataaagattatagattagggttttgtctttgcatttcaagcggttgaaaagatttgaaatttcaatcacctaaaaaactgcatccaagactaaaattacagcggtgtgcaatatgcaatatgcaattttacctttgtcacctagaatgttgntgntatatatggntctactntatttntatctgagtttgaatatntattttcatgttatttctaagtttatatgaaat

SEQ ID NO: 72883 - DNA, 490 bp, Oryza sativa
  unsure (1)..(490): unsure at all n locations
tgctcgattacaagctgacagcccttctaacaagatgcttggtgctgcaaatgataattagaatgtattatcactgttatgtgaactcttgaataagatgacacattgtgaccagatgacgaatggagtacccacgttgcggtaaggcatggcgcatgcccttgatgtcgcactctcccagcggccgtccataagcccgatttctgctcaccgccgtggccacgttggtcggctcaagctatgccttgttggttgtcgctgctgagcacgaaggacggaaggatgaagaatggtgattgggaggggagcgcctgcttgcgttgagattcgtattggacagatgtcatgtatggagacgaagtctttctgatgaaggaaggacttgggtcctatgcaatnttctgtggaatactntattccgtatgcttgcttatgggtctaggaggcactgngaatacatatattactggcaaatngttgatatttctta

SEQ ID NO: 72884 - DNA, 434 bp, Oryza sativa
  unsure (1)..(434): unsure at all n locations
agcttaagatgaatcttgagaccatgtcggctatcatcagggatgctgagcagacagttgtgcagtatgaaaccacaagggattggttgaagcagttgagaggaatagcttatgaggcagaaaacataattgaccgctgcaggattgaacaagagaggctccaaatgttccaaccacaggttatatttctcanatcttcatcaattntgttttaaccccgggaacatatttctccaaattgttattttcctttctgcttttgttgataattatttttagcttatttagatttgtaatttcattgaagaccatttccaatgcttgtccaaaaaaaaaaatgcttgcatacaatgtatttgaatattgtgaagctttgagcctttgagggctcactgtgtctaaggatactcanatatgccaacataatgtgtata

SEQ ID NO: 72885 - DNA, 422 bp, Oryza sativa
cgaagatgagttcgtctgaacaaaatcagccaaacatggtggttatggaaccattcaactaaggcacatcgctaaactcttcattcgccacgaatcatttgtttctgaaataaaagatagaatattataaaactttcacttaaataaagttactaatactgaggaatgaacaactactagtcattgtaatttgtgcagttgcacagtaagataaccttgttgcagctatatatggtatgggcagacaatgcacgactaattatgttttcagcaagtagctaaacaactcaccttaagatcaagttaaaaacagagcctctcaacttgacattaaaaattggttgttgacatatagatcaacttgacatgacatatgcttaatggctttcatctttcaacacataagtattccattttataac

SEQ ID NO: 72886 - DNA, 390 bp, Oryza sativa
  unsure (1)..(390): unsure at all n locations
agcttagcaaaccccttgtgtcatgatcagcaattacactgcttaaccttgcatcatcaccgtcgaatttgaattttccaaatacatctgcaacgcagcagaaataatatttatttttaactcatttagtactgtatatttttattttggcaacctcataaggtaacaggacatttcttaattagctagtagcgtctttgtgttgtgctcattgttttggacacaaataagaaaaatatagccaaccctaaaaaagagtaaatataatttaattgtatagagcgatgcaaatgaataaaaatataccatggaaaatatagagaaatatgccaatcacattanatatccatgataattaaaacatgctntataattgatgttccaatatct

SEQ ID NO: 72887 - DNA, 453 bp, Oryza sativa
  unsure (1)..(453): unsure at all n locations
ctattctcaaggagttntgactattccaatcccatcttctgataatgactttccagctgtacagtatgcagacgatactctacttatcttgatagcttcctcaaaagagcttntctgtttgaaggctattctcaacacttatgcagattctaccggtttgaagattaactacagtaaatcatgcatgattcctctgaatgtggacatagaataggtgcagcatttgtccaagatgtttggttgctcagtatgcactttacctttcacctatttaggtctgcctttgggaacaactaggccaaagataattgattttgcccncttagttgatagggttgagagaagattgtctactacttctgctcttctgtcttatggagatagattaactatggtcaattcaagtttatcctccctcccaactactatatgtgctctctttcccttccaagt

SEQ ID NO: 72888 - DNA, 443 bp, Oryza sativa
  unsure (1)..(443): unsure at all n locations
agcttgtgttacctctgaccataaggaatttgatgtgaaagtgataaacaaatcanggcaaccatattttctacatagagcaactgaatctaagtaattttgatataaatatcttgccccccccccaatataagaagaaggcaatataacttgctgcccggcatctgatgcttctgtgatgcctgaatggaccatagtggatacctcactaaatgaagttgttctatacttaagctgaaatgtcttggatctatagtgactcaggcgagattcttccatacaacaataggcatctatgacataggcctgngttcctctcttgcagcgcataggagtattgaagtcatcagctttgtcatgaagcctatatgcaaagtattcaaccatagtagacttctttcttttgatagcttgtaatcgagcacaacgtcngtatgtgatat

SEQ ID NO: 72889 - DNA, 433 bp, Oryza sativa
  unsure (1)..(433): unsure at all n locations
tcgagccgccgtgtccaagctcgacgagatgaggcgagttcgatctctcctttntcccggtctcctccctcgaatcgatcgttccgatcctctttcctcttgcaacttacatgcttatctctggcttttcccctgtgcagtgacgaagacaaggactccttcatgcacctcgtctctcgctacctgatcaggtagatggagattatagtagattcgattcggcatgatttctctccattttttagtttctcgtttcgatttgttgagtttttttgggtgcatttgtagggaggagaaagagatgatcgactggaacaaagttgagcgacccacccctgagatggtggtgccgtacgactcactggtgcaggctccccgaggtacgcacgttgntctgggatgcctcttcgatttcagcttgatgatcccgatg

SEQ ID NO: 72890 - DNA, 418 bp, Oryza sativa
  unsure (1)..(418): unsure at all n locations
ctcgacccgggatcctctgagccacctgcngcatgcagccttatatttttttattttatttcccaaatataacttcacttggtaattaatgaataatctattataattctaataactatntataaatcctaaaaccaaaatcacgatgtgacactggtactctggattctcttctaatggccaagttatgactataactggacttctactaacggtgtagcgattctcccactacttattgcaatttgntaagtacaaccatacacctggtcttcgcctagtgtgcttgttgtgtcatcatctacgtcaatttctgtaagcgtttatatgtacaatatttgtccgttgatcctcttttcttacatcgcctcgtcttgaagtcagtcctatagttcctttacgctgttctgacagagcc

SEQ ID NO: 72891 - DNA, 361 bp, Oryza sativa
  unsure (1)..(361): unsure at all n locations
gaactatgtacgtcacagcggntgggttgtgccggataacgtgcctgtcagtagggtgtactggcgaagaacataggcacgcggagatcatgagagctctgtcccacattcggagaaagagatgctgtggaccacaatgctcgagacattcacccttcctgcgggtacagaggacaaagtgaaaaggtggactctgaagaaaatggcagcactgtgtcagagcttctaagggagatctgtaccagaagtatatactgaaggggcagacaccgaacttcgacacattctcaaagctaaaggatcactgtgacgagttcgttgcatataagacaggtgaacaatggcaggcgatgatggaaag

SEQ ID NO: 72892 - DNA, 298 bp, Oryza sativa
agcttgtagttaatatgctagctgtccattactgctatgtaggagtagtagtaattgtagtcttgcgtcaaggatattgaatggtggcatgccatggcacttgtgggatgtttcaagaatactgaaatagttggatgttactatctggattactgcatcattcaaaaacaccaaataccatgacatgtgcatgctcatctacagtgaaaatacaccaaattcacatatgtatctaattatatagccaggctgccaatgcaagtgtgtgctggagcggtcagcacaatgcatctgggct

SEQ ID NO: 72893 - DNA, 412 bp, Oryza sativa
tgcccgcaagtacaccaaacacacacttatcgaagttcagctttatgctgtcggagcggaaggtctcacaagtttccgctagatctgaaagtaaagcttcttgtgtgcgcgtttttacaaccaagtcatcgacataagcctcaacattacgtcctatttggctacccaaagaaattcgagtagtacgttgaatagtaagacctgcattctttactccgagggcattgatatataacaataggttcctacggcggttatgaacgcagttttttcctcatcctccctagccatgcgaatgtgatggtaaccagagtatgcatctataaaacacaatatgtcgcaccccgcagtggagtcgacgatctgatctatgcgaggcacagtgtaaggatccttaagacatgccttgtta

SEQ ID NO: 72894 - DNA, 450 bp, Oryza sativa
  unsure (1)..(450): unsure at all n locations
agcttcagtatgttttcatatgcatacgctngggggttcaatatacgaagctggcaacgccacctgaatgttcttacttggcctgagatattacgacaatttgctttatctgctgggtttgggcctcaagtaaagaaaacgaacgctgaagatgtttattatcgagatgataatgaggtattacactatctcatactatatacatctattcgctctataagataattccatattgaaaattntcatgatatttggtttatctcagtgatccaaaaatatcatgtgagtactctgcatctaatactttgtatgatngctcggtttctgagattcaaaagggccaccgggatatagtcagcagtactaagggtgcgtnctattgtatagtgtgattcttgaaattagtgtactgaatgttggcgatgagtgatatcctcanatattggtgag

SEQ ID NO: 72895 - DNA, 467 bp, Oryza sativa
  unsure (1)..(467): unsure at all n locations
agcttagcatcattctcatctctcaacaaatatgtgtatcgtcgtcatgttgacaatttccatggtatttgtctgtcaattgcccacaccaaactgatccaagagctctctctcaacagagagctctctacggccggacttcgccggaaccgccgcgcactgaatcgagccaatccaccgtagcccttcactacgacactggaaggccgttcacctataggtcccaaagcagagccaacagcccaaaaaagaaaaacaattaagcacggtggattcaaattcactgccaaaccagaanaaatctctgcaacgggcgcttaccttcatctcaatggatgaatagggttgtaccgtggatggtaaaacaagcatggaactatcaattacaagtatcttctatagtgctaatccagtgctatatatagtgaatggtttatcaatgttntcagtactgggaaaactgaact

SEQ ID NO: 72896 - DNA, 324 bp, Oryza sativa
caagatggaaacaaatggataggctgatggaactcgatccaacgacactaatcaatagaactggacaatcggactatctggatccatccacgttaaattggggaatatcgcgagaacgaagcacgaagtataatcctttcctttcatatgcccgctccaaccactcttcccgtagacataattaccatcggaaaaagggatttcaccacaacaccactctacatttaaagaatcgcatgaaaaataattgagcgggattacgtaaattgataaactacaagcactctggcaacaaagatgtgagagaacggagaattgcgagaa

SEQ ID NO: 72897 - DNA, 445 bp, Oryza sativa
  unsure (1)..(445): unsure at all n locations
agcttgctatatgatatcactgtgtaagaggttgctaagttgctcgtacaacatttacaaagcaatgagcttagtccataaaactgtaatttctaaatctttccatgtattttacaaatagagccccaaaagccagaagatggatgttattgataaacaacatatttcattaaaatggtaagctcaaggcaatatgataataagagaataatatatgtggtaggagaaaaataatttagcaaactcaaaaggacactgacaatcatagtgtacctgaacttcaatagcaaatgtcctggatccatccaaaacaacagccacagcaagtccagctagtatttcagaatccaaatcatgttcagttaagaacatctcggttggattcagaacaggttgtagaccatatcctgacatttcanatacaccaagctgaanaaacaaacgt

SEQ ID NO: 72898 - DNA, 487 bp, Oryza sativa
tgggccagatactgaagcagaccaacaagtgaactgtgttttcactgttcctgatgtgatgacttgatccactcgggtagtgttgatctgtgtcctgaacagctaaccaacaactgcgaagatattgatggggttacaacttgtgtgtgagtgtgttttaagggagtaccatcaaatactcgaaggactggaagtctggaactatgacctgcctcaaccgcaatgcatgtgtatcagcaagtggttaatcgtcacgtctttctgttcagggtttgtgtggataaaggatgttattcgctgttcaacaaccggtttagttagcatgtgccaaccagacaaccctatgtgctctaatattcgaacaagcctggaagaaatatcccctatagttttaagattcgatccatatagtgtttgacatacgttcggcattcatgtattcataataaatctatgtaagatgaaatgcttagacatgttaaagtat

SEQ ID NO: 72899 - DNA, 435 bp, Oryza sativa
  unsure (1)..(435): unsure at all n locations
tatnttcagctntaattaactaaccacatcattgttctgctgcttataacaacaaaggtgagtggtttatgattattcactttaatacaccaggtgaattccttctgccatgcaggcagggttggacagaaaacacgcgaaggaattaaaatgcctggaacgggaaaaatgaaacatgtcagtttgactctgcaggttgagaacgacctgaaacatcagcttagtattggcgcattaaaacctggcgcacgcctgattactaaaaatctggcggagcaattaggtatgagtattacacctgtgcgtgaagcattattacgtctggtttcggtgaatgcgctttctgtcgcacctgcacaagcatttacagttccggaagtggggaaacgtctattagacgaaatcaatcggatccgctacgaactggaattaatg

SEQ ID NO: 72900 - DNA, 357 bp, Oryza sativa
  unsure (1)..(357): unsure at all n locations
agctttctttcttgggatctgaagtttcagatgtgtgttggatagcaactcaaagtttaaggattcacggctgacaagagtacaatactngttttctgttactgcggaggactactgagcacgtttagctggctgtgttttaacttgcctcctaatgttatgtcttgatccatgcagcagttgtttgctggatcaagacttgggatcctactgttcatntcgttatgctcaagatttctcaagtatataacttttgacggctcatattctaataagagatatcataatagagtttcctttctgggctaattaaactgtgtgttgacatgtcagatgtggagctcttacataagagtt

SEQ ID NO: 72901 - DNA, 458 bp, Oryza sativa
  unsure (1)..(458): unsure at all n locations
gggatcaacanaagtgtcttgtcagcagagcgtttccatggttcttgatatcattggtcgattcatggatatgcttcttgaatttgtccctctaagtaaagcatataccttgacaaaagatattggtcttcagagagaattcctttgcaattttggtcctcgtgctgctgaccctaagttttccagtgatcgtgaaggtgagatatcgttctggattgatctggttcagaaacagttgctacgggctcttgatcgtgaaaagatatggtcaagattgacaacaagtgaaagtattgaggttggaacaaaagatatttcgtctagctttatgaattctccttccaaaataactattttccttactgcaggttttggaaaagggattagcaatgtttgggttttcattgcttaggcagaaaacgcaacatatatgcttccaatatcttaccatctgatga

SEQ ID NO: 72902 - DNA, 435 bp, Oryza sativa
  unsure (1)..(435): unsure at all n locations
gagcgtttgttatcacaaacatggttatatcatgttcatgtgcccaaaacctacattgtaaacagtacatattgtcaaagttgtgttgagagcatgcatcctaagatgacattcttttgtgactggagagaggtttaattatggccgtataacagactaacaatgcagacctgtctccaagataatctatacctggtgcccactccatgaaatccacacggtgctgccgatgtcgatgcatgcccattaacttcaacctatatcagcnaaaagaacaacagagnacagaaagaagaagaagcacgaacaggccaatgggcacatcacactaccaaagaacccaagaatgacaactaaaccagatgccaagatggtaggataattacccagaagatgcctctttcagatcaattagacgagagtgcagctcccatc

SEQ ID NO: 72903 - DNA, 437 bp, Oryza sativa
cgccacctaagttctctgttttggcggattcagacaaaggcccttcttggtgtacttccaacaagcccctcacgggcaagggtgagtatggagcttctgccgataccatgcaaatcgtatggtgtaccacaaggcgccccctttcggccgatgttcctgccgaaacctatgttgtgtacctgcaaaggagaagacttgttctcgtgagtggcgaagtggctagggtgacctttatgctactatgaatagtaatgggccccatgggccttgccttttttgtcttcggcccattactgtttggccttggcccgatgcgaatataccgtttcgtctacccctagacacgtgtcaagctctgattgggcgggagacgatggagttatataaccccgtctgggtcaccgcttccacccccccccgttttcactttcacttta

SEQ ID NO: 72904 - DNA, 444 bp, Oryza sativa
  unsure (1)..(444): unsure at all n locations
agctttatatatctaccccgctgacttttatatatacagtgaaggcactgtttgggtttatcaagcaattgattagatgtaatatcattgctttctgccatgtaagtgtgcatttttattgaccaatattatggcttaggctgattatatatcttggtcatttccaggcgggtggtaaatcctttatgagtttattaactcggattttacaccacatatgccgtatattttcgggtgtggtgaaaccatgtgtcttttagggacttaagcacatctgttaaagcattgtgcgcatggcgtatgttcaatactttggaaatttctttattcacagcattcaagcttttttatagctggtntgctatgtgaactttcaatgatgttgtcagctntagggtgcacgcattatantttatanagctgtcagtatatcactcagatcat

SEQ ID NO: 72905 - DNA, 448 bp, Oryza sativa
  unsure (1)..(448): unsure at all n locations
tgtggcctgctgggccggcttaagtttggccgaactatgggttctgtcgaaccctggcatctcccatttcacatggctacaactgtcataccggccctataaaaggacgagcccacttcacttctcaacacactcaagcaagctcaaattcctcttcatactttagtatcagtattntagtgctatgtggagtagaatagaatagaattcggagtcctcgaagttntcggaagagtntcggtatggcttgtgaggagacacggngagggttttgtagccttgggaggccggaatcgtggtcaaggcaatgggaatggtcggcggcaaaaggggcgatgacgtcgatagtagcggctcaattcgttgcccgattttgggaaaagtagggggagagaaaatggatgcgtggagtggactgcgccatgaatttgactgctgcgcgtgagcg

SEQ ID NO: 72906 - DNA, 348 bp, Oryza sativa
tagcttgcttatttaacttaactagcaatgcctatggagagggtaaaatacgcaatcgccaacacaatcttgcatcttacaagacaacacagcaacaaggatcgataccggacctggcttgaagaaaatggaaagcccaaaatcgatcgtcttgagaggcgagtcctccttatggttgacatacaagaagtactacggcttgaggtctctgtgcatcaccccgagcgaatggcacgcctcgactacaccgatgatcacccgctccagctgcacggccgccttctcagagtagtgcccgcgctgcaccatcctatcaaacagcatcccgccagcgcagatctacatgac

SEQ ID NO: 72907 - DNA, 444 bp, Oryza sativa
  unsure (1)..(444): unsure at all n locations
ttttacatgataaagaaagcaacctcataaagttcaatnttctcatcctgtgaaaaaccagccattttcctcagttntggcagaatgtcctgaggttttcccgaagccttaacaaagagcctaccaacatacctgaagaactcattcagggtataagtaagaacatcaacacaaatcaatgatgatacagttggctatttgaaattatgagaagtaccgcagttgttccttttcaggatcatagagtttgaagaaaagcaatatatcttctctggtcttgtcaggcagaggaagaggtttaaggtcctacattgccagtaaaaatttatagcagactccctttacaatntgaaagtagatgaacagaatggcagccaaacataagagaataaagaaagaaatgcagattagcgcgagggaaaaggctattaccagtccaagttc

SEQ ID NO: 72908 - DNA, 401 bp, Oryza sativa
  unsure (1)..(401): unsure at all n locations
agcttatctctaagtgaccgagtttaaagaggatgcggcatggcagtttatctattaattaggaatagtttgttaggttccttttatctttaggaaagtgtgtttagtgtccgataaggactttatattttccttttatctttaggatagnttctttcttgtacgacaaggaattgtatcaacctatgggtataaatatgtacacccggtgtctatgtaatctatctccacgatcaatacaattcggcgcatcgccaccctttntatttctacttttgtttttacgttccggcgaaacttggcacccgacgcgaggctgcatcgtcttcgatctctggcgaanggataagtccaatgttccgtcggtccaggcaattgtatcgtctacgtcagcgtcattc

SEQ ID NO: 72909 - DNA, 465 bp, Oryza sativa
  unsure (1)..(465): unsure at all n locations
ggccactcgaaactttcacatgatgaactgcgttggccgtggtggttntggagcaatgtacaaagtgagaaatggactcactttgtgcatcatattttcctggcttcttactttatggccttttattttatcatcacttgctagttttactgtaagaattctctcttgatattttgtaataatacgttttataagtctgcaagtatataatgaataacaactaacaagagtctccttcacttatggaaacctgaaagatggcactcaaattgcaattaaaaagctgtcagctgaatcaaagcaaggggcaaatgagttcttgacagagataaatgtcatatccaatgtcaggcaccccaaccttgtaaagctaattggttgctgtgttgaagggactaacagactactagtgtatgaatatgcagagaacaatagcttggacatgcttacttggaaagtcataaa

SEQ ID NO: 72910 - DNA, 389 bp, Oryza sativa
  unsure (1)..(389): unsure at all n locations
atggccgttacgatgatttggacattgtgggctaaatacttcagacgatgatcaattcaaaagtactagccatactagagttttagattaccctttattaaaataggatatccaaattggagaatcgaaatgaaggcctttgctgtcagtctatatggacccttttgtataataggaattaattccaatataataggtattctttgtttgtaaaacaaactttgactgtataattntctaacaatatttcgcttatagtaacagattcgtggtaataagaaaatatgttcgaactctattctaaccatatcagttttagacaaaacctaaaaattattggatgaacagttaagtcaaaactcacaattggatagttaacatgtgcctta

SEQ ID NO: 72911 - DNA, 498 bp, Oryza sativa
  unsure (1)..(498): unsure at all n locations
tggcaaagccaatgtgaaaacccaatcattgcgatgganggtaagctagatggaaatggctgtgcaagcagaatttgcatttccttcattaggagagatggattctataaattgataaaacatagtcatatagctgacaatttatttaggtacgtttcatggctgagaacaatacaactttaatgtaaagacatgttgngggcatgtgattcangtgtacagactaaccaaatccaggtgcaccacttgatagatatggtaatctgtatacatcagccttctccgactttagcacatagctgtgaagcaagtggacacaatataagcaaatatgagaataaacaacatgccacagatatggacaggactgatatagaacaacataatatgaagaataaaccaaactttttcctttatttgagcatatcagtaagaagaataatgataacatatctgaagaggagaatgaagaatntctgtgacaatgatagatacgta

SEQ ID NO: 72912 - DNA, 470 bp, Oryza sativa
  unsure (1)..(470): unsure at all n locations
taacatacaaccattctacatcatcacccactagcaataattaaatatttaacctcatganaatatgcaatatcatctataatctatntaattntacaaatcaacatacaaacatatccaatcatctcttacatcattnttacaatattttaataaatctatctatcatttttataatatttaacatatactcatcaacatgttccacattaaagcgcaggcatcatttgtttgtttcaggataagtactgaataaacactgacatttcattattttttctttntactcctatctcaattgttaaaaaagtatattgaaaattacttaataattccagcagcaaagcgtggggaatcaactaattcttttgaaggatgttccattgaccaacttattcatggacataacaagtgctaagcaccttatacaatccagaagtaattcacaaatccctcgtcattctaaagag

SEQ ID NO: 72913 - DNA, 453 bp, Oryza sativa
  unsure (1)..(453): unsure at all n locations
ntggcaaagagatgtgcctatggcttgtggggacacaaaacttataagtgtggcatgacaatcatgtggtaatcaaacaaaacactatgttaagttggtcaaagttgtgacaaagtgtggtcaccatccaaacacctcatacttcttaagtttttgtgtagcgtggcttgacctatggatgtccagcgtggaatgcanaggcggaatnctcattttgcacctagtggatcccacaagtcatcctctctatttcgtcctcaaccactgtacatagggccttaggataaggagcgcttgctgctanggctagggaaaggatgagcattaagtcccaatgaccgcttgccgaccggtagtgggccacggcagaccgactgtggccgagagggatctagcggcaatgcatattgtggtcgattnggccatggantttttctcgccaacagtcatgga

SEQ ID NO: 72914 - DNA, 433 bp, Oryza sativa
  unsure (1)..(433): unsure at all n locations
actatgcatgaagtgtgttaccctagagagttctaatatcaggtactttatatgctgctcatttttcacgaattatgttanggggagtcttgttaaaattatattccttttgagttaaatcctttatccatcttttttcttggtttattaagggcctatgcatgctatgcttgattcttggttcaaaaacaacagatgcagttgttgcatctattgtccgttcttatgcatgcttggatttgcttgattctaaatgcttcaaatcagatggcagagatgttttcagtcactaagttcctgaacggtatctaaatttactttgcttgaactccagatctagcattactggtaatggatgcaggataatctgcaaggactctaagctggcttctccttgccctgtgcccagattcacctcataacctgtctttgt

SEQ ID NO: 72915 - DNA, 450 bp, Oryza sativa
tcacctgctgccagcctgccaccaagtacgagtggcactggcaattagcatactgctataaagatagccacctagctctcccaggcaacaatacttaggcgctaggcatcagtcatctttgaagccaatgtccagttactatcactaagtagccatcaagcttaaataggcattaagcaccatccagctgaagtagggggggaggggcaaaaatcagccacaaccaagcttacttggaacctgatcaatgggattgaggggcaaaggccatggatgattgaaaaggagggtcaaagtgggtagtgcagtagtgttcttcaggatgctatactagttcaagcagggacataactccagtaaatctggggaagatgttaagttcacggtcaataattacttaattagatgagttctaagctcctgagcagagataggctagttattcagtta

SEQ ID NO: 72916 - DNA, 449 bp, Oryza sativa
  unsure (1)..(449): unsure at all n locations
agtttctaggaatgcaagggagtttgtatgttggatgaatnntaaataaatttgaggagaacataaaacaagatgaaattntagggagatatcaatgaatatttgaattcaaatttataatttgatgtccacacagtgttaagaataaggagttatttggattagtatatgtcctatttcagtgaatggngatattttaattaattntgtaatggttttacaagggagatgtaaattccaaaattcgagttctgagatttttgttaagatagaatgttttggatcaaaattttgggtttactaggaatgatttaattgatatcttgccactaattcgttgatacacacaaagaatncaaagtttaaaattatgctntttaattaaaataacttttagctgctaaacaaaagtcanggtgttacaatctctaacctttctaagtgttctc

SEQ ID NO: 72917 - DNA, 492 bp, Oryza sativa
  unsure (1)..(492): unsure at all n locations
ggttcttgcttgcatgagatattaaagccgcccttcggtcggaagcaaccttctcttatgccaaacgggtagggaatgttgacgttgccgcacttcgctggagctggacaatcgggctggggctgccagatacttccagacccagccctagccccgtcagatgcaccactatgctgtagtatcagcagcatcaggctggttgccacaagtactaaggctcccatcggatggcctaatcagtaaaagaaaaagccaaaatttaaattnttgattntgtgatattttcaatatagtttctttttcaacattgatttttaagccaccaagaacatctatataaaagttttacctataaatnntattttattccataaaaaaccaaacgatggtgacctaacttcttacccaggtaatgagcaaagagggttagagcanngttaatagtactagaattcaatcatctatangtaattaacagtcaattatacaata

SEQ ID NO: 72918 - DNA, 371 bp, Oryza sativa
  unsure (1)..(371): unsure at all n locations
ttttatatgaaaaatactatctactcgtacatatgaatattgtaaaatactatttttaatccgctttnntaatttggaatagttaattcatttgtttgtgtctcgaatcattcagctattaagtattccattatattccattggattcagcctgaagtatacaagtttgtataaatatttaacgaggatgtaagacatgaaaagccagtagttactccttccttctaactagattgagtgcttaattagttatttaaatagagacaaaaaatgtatattgtgatggagaatatacctctgcgtggattagcagtagagggccaaaccaagagtggagttgaaggaccatgaaagtatctgatggagctcac

SEQ ID NO: 72919 - DNA, 519 bp, Oryza sativa
  unsure (1)..(519): unsure at all n locations
taagctccacatcagtcagtntatgaatgaagctntatgacgtagtgttcatttatgtaactttctttcttgcttagaaacagaactagcaatgcatgataatctanattctaaagggacagtaactagcatggaaaatggcatggggaaaacatgataactcatacctcaagccaaagagggaagccaaacgatgcccttggaagaatctctgattttgntgcatcctcctttttgcttgactggccttcacacgtgatttcgaaagctgctntgcttgtctcacatatattggtaatccgaaagacaatattntcttgattttccagtataatctcgcttgtgctaactgtggtgtctgggacaaaagaagactcctcaagcatagaacgtactttntcattcgtttcgagtatttctccatactcttgtcttcttattaactcatccactcttgcaatgtcaacgctaaatgtgcatctcacanggttgtggtcactctctgngacatccatgcaa

SEQ ID NO: 72920 - DNA, 518 bp, Oryza sativa
  unsure (1)..(518): unsure at all n locations
ctaagcttgccatctttgacatcttatctggaaccatggcatgtgcaccaaaagcttgatcctaaagaacagagttatttggcaaacaacatttcctgcttactgcaaagaagtaattgacatctgattaatcagcatgatttttggttcctgggaggcaacaagtagatatgttcaccgcaaaggcgtgacatactcattcgaagtaactatactcatttgaagtgatattcatganaacttctctaagctcagcatccgaaattntagtttatttctcagtttagtaggaggtcattgccttttcgcctgggatactgtcaccatgtcaaaagaagagggaggactgggcatacgagatctcaaagctcacaacctgtcgctactaatgaaacttgcaagcaagctgctatctggctccncggagccatgcttccactggctcagagcacagcacctgcagaacgagaatcctatcctagcaagaccaactgatacaccggtttggaagatgatct

SEQ ID NO: 72921 - DNA, 489 bp, Oryza sativa
  unsure (1)..(489): unsure at all n locations
catcgaatctttggacacatacatagtgtattaatatataataaaatgaaaaactaattgcacagttatggggaaatagcgagacgaatcttttgagactaactagtccgtgattagccataaatgctacagtaacccacatgtgctaatgacagcttaattaggctcaaaagattcgtctcgcggtttcccggagagttctgaaattaattttctcatttgtgtccgagaaccccttccgacatctggtgaaacgtacgatgtgacacctanaaattttctttccctccaactaaacacgcccttacatggtttatagttcttattcgtatgtataatggtacaattgtcgcattatatttcttgtctcgttcctcaatacatataatacatatatgatatcattcatgggaatatataccagctgctgagaattatctttgcaatgtagtatgttggaatagggccttattatggcatcantatcta

SEQ ID NO: 72922 - DNA, 464 bp, Oryza sativa
  unsure (1)..(464): unsure at all n locations
gtatctcatctagagccatctgcctaccatcccaatctacatagtatgacaacttaatacaatatttttcctctaaagtcttcttcagaggagcaacccctattgttggatcttctctgagcttattgataactctgtccttcacccaagagttactggccatgcaattattctccagcttgcttgtgctagcacacctatgcttgtatggcatcttctttatctacaacaagttacagatttgacattatcattcaatggcttanaaggaacataattgacaaaaaaaaaacaataaagatttagctacatacctgccaagttcgaccatctggcaaccttgaagcatggatcctccatctgcacctctntgccttgcaataggccctgtaccttgtggcttcatagtanggaactgcaagttcaacctctttcangacagcatatngcctcatacacctctt

SEQ ID NO: 72923 - DNA, 498 bp, Oryza sativa
  unsure (1)..(498): unsure at all n locations
tatggctggatagtagctatntactacttccacgatgtatcttatctagtagtaaaaatattttaatctctaatagccacttttcctgttgatgcccttatattataggactgagcgagtatatacttctctaattaaagttatacatgccccctaaaaccacatcctccactgaaaagaaagttaaactgatcaccatgtaagttcagcaggaaggtttagccaatcccaacacatgcaaatacaattatgacggcatttagaanaacacaagcatgcatgtcaacttgcagtgcagaatggaggtcataaagtaaaggattacaaatactccatccgtctcattgtaagtgcagttataattnttcgtggtctaatttgatcgttcgtcttatntaanagttnttntaanaaaaatttaaaacataagtcacgcataaataactattcatantttatcatctaataacaacaaanatactaatttacaaaaagttt

SEQ ID NO: 72924 - DNA, 510 bp, Oryza sativa
  unsure (1)..(510): unsure at all n locations
ntacctttgtggattttcctcaagtaaagccaaacatgatacatgcttagtggctaagtccaacacggggtggctttggcatcggaggctagcccatgttggtatgaggaatcttcacaagcttctaaagcacgatcacatccttggtctaacaaatgttcaatttgagaaagataatgtgtgtagcgcgtatcaagccggcaaacaaattggagcacatcaccccgtcaagaatgtgatgaccactacaagaccattggagcttctccatatagacctcttcgggccaattgcttatctaagcattggaggtaacaaatatggtcttgttattgttgatgactnttcacgcttcacgtgggtattctttttgcatgacaagagtgagacacaagctatcttcaagaagttngcaagaagagcacanaacgagtttgacctcaagatcaagaacattcgaagtgacccatggcaggagttcaagaacacgtgcatcgagaagttccttga

SEQ ID NO: 72925 - DNA, 353 bp, Oryza sativa
  unsure (1)..(353): unsure at all n locations
cgccggtccgttttcgctccgttttcggttntgacaatatttgattccattttcgtatccgaggttccgtttccaaaaaaaaagagaacaaaaataataaagttggtttccgtccgttttcttaccgttttcatccctagtttcctaaatatatctttttattaatttactactttgcgacgcgaagcaggtggtgcatacggtcacggctatggtgaagagctcgtgcggcggccgattgctagttcgtggtggcctgctccgtcgcctattccatccggcacgctgctagtgctgtagtgcgccaatgtagcgatggtggccatgtccagtgcagagagaataccctcgtc

SEQ ID NO: 72926 - DNA, 466 bp, Oryza sativa
  unsure (1)..(466): unsure at all n locations
gcttgccacagcntatcggttcgcctttggcaaaggagatgcttctaagcaagggttggagcaccccggagcaatatagctggctcttcgcttctgcttcatcctccgggagccaaccgttcttgaggtattttacgaacggngttcaccagtcctttaggtcttcacacagctctgcctggtcgattgccatgatgtccaggatctctatgggcacacttggtgcgtacaggacctcaaaaaagatgtctggcgaatgcgggcctccacaagcagtagatttcgccagggcgtctgcttcttcattctggcctctaggtaagtgttcgaccgttatgccggcgaaacacttttccatagatcgaacagcctcaagatacctcttcatcccttcttcttctgcctcanaggatttgtcaacatgactttgccaccaattggagtcagttcagatgagcaagcaccg

SEQ ID NO: 72927 - DNA, 394 bp, Oryza sativa
  unsure (1)..(394): unsure at all n locations
cgtgcgctggcatgccgacaaacgganagtcgatactatgctgatgcacccagcacattcagtgcagtggatgacaatcgataggatttaccatgaattctcaaatgacccaagaaacatgcgtctcacaatgtgtacagacggcattaatcctttcagtgatatgagcagtcgtcacagtacatggccagttctgcttgctaactataaccttcctccctggttgtgtttcaaaagatagtacattatgcttgccatgctcattcaatgaccgagacaacctgacaacgatatcgatgtgttccttgaaccgataatctatgactctcaaaggctatagaatgagggcacactaacatgggacgcatatgcacaagagtatttcaacctccat

SEQ ID NO: 72928 - DNA, 474 bp, Oryza sativa
tagatgatgagatcgatctagattatgcgatatatatgataactctgcggcttgcgtggacaggattagactgtcatgaagatgtatgcactaatcccgagaaagcaagccgccatgacaagatttacctcttcgtcggagatcgaacccgatgcagcccaactcgaaagcaaaaactcgtcgaaacaatgaaagtaaaagggtggcgatgtgccgaagtgtattgaactatcgtgccttgattacatggggtcgggccatatttatacccgaagtacatgataggttcttgctggacacgactcttatctctaacataatttaaaatacgaatgagccctttaggtgggcccttaccaaaatatctctaaggaaactagagaatgtcctaattaacagatacaattggcccttttagggactctatccttgtgtggcaatagctatggaggtcttcatcccacccgacgatgg

SEQ ID NO: 72929 - DNA, 454 bp, Oryza sativa
  unsure (1)..(454): unsure at all n locations
agaactgatatttgacttaaacaaattaaaaacaatgtctcaagtggccttggtcacttgaaacaagattcataaataccacgcaatataactcaactagttagatttcttatatctattccaatttaaattccagatttaatatgggtgatncattttctgagtaattatatttttttgatagatgatgtccccgtcaacagcaagacacttattataactntgtcaatctcaatatatatcggtccagtctctcggagatataggatgtgcacaacgtgtacatgtgtatgtgagcacatgcattngtacttatctttttttaaaagaaaattatctatagacatgtaaattaacgtgttaagtgagtgaactgtgatcttttaaataaagggaataaattcggcccttcctttagacangtgagaatatgtcgcaataatatttaagattg

SEQ ID NO: 72930 - DNA, 519 bp, Oryza sativa
  unsure (1)..(519): unsure at all n locations
ctaagctttggttatgacaatataatcctanaagtgtccatctgaagctagcattctnacatgaaagtaattatccataaataacatgaaatcactcattaaagaaagactatgtaacaaatggacagttagaaatcactcataattttagctaacgatgtttgattgtgaagcacaataaaatgtactgcaagatcaaaaggtgaagtccaatctatgtatgtgtagcacaccttgtactgatcgagagaactgtatgcccatgttcttagtttactataaccatcatagtatcttgccggatcattttccgacctatcattgcagaagataatgcaaccaanaggcattagtcggtaggattataagaaaaataaaccatagccagaattattgtgaaataatggatgccacaactatcggaagctgacaataaaagacaganaagatggaagaattactctctccaatcaaaacagaaggtgacgtcgcataatacatacagtcaaaccacattac

SEQ ID NO: 72931 - DNA, 463 bp, Oryza sativa
  unsure (1)..(463): unsure at all n locations
tactaaagaccatggagtatgacttatacgctccacccgcagggtagtctatatacggtccagtaccagattagacttcgagtgaaacttgcttgcacaagacttgcaattcaaagcgtaatccattgttcaacttgtgagtaagtgtagcttggagttctagatggatgttcaaccttaatcggtctccatcgaaccgctggtatataaacaatacattggaaaaggcaaatctcagtgggattntgagatttggtgggggattgttggaattaataaatgggccttagcccattcgaagattaattctttggaaaatcacaaaagcccaccacatgggatggcatgcatggngagtttagtaccacctttcttattctaggagaggnggacctccttaaaagggagggtgccctcctagccacttgaaggatgtgtggtggagagaagagggggaacacac

SEQ ID NO: 72932 - DNA, 433 bp, Oryza sativa
  unsure (1)..(433): unsure at all n locations
tcttcagatgccatgttctctgtctgaacactagcatcttccttcggattatcatctcccagctcatcgcattcaacttcctttggcacctgcatgtccgcacgacgcctatcaacgcagcaactctctttctgcacatcggtttcgcattccggtggcgcatacatttcggaatcctcatgtcctgtgatgtcaccatgttcacatgataattcacttctctccgtctctggcaaaataggttcatccttcaattctctaggagcactttcatgagtatcagcttccattcccagtcccacaagagggggctcttctttcgcagaatctcctgtcagattgttagcggattcattntgcttaccaacaagtactgactcatattcaccagaaacgtcagatggctttgctgcttctggttccttcangacat

SEQ ID NO: 72933 - DNA, 515 bp, Oryza sativa
  unsure (1)..(515): unsure at all n locations
actaagcttacaacagaaanaggtaatgaaactgaacatagattattaatggtgtataaagtcatacattaacgtgtccaagaccaacaattaagagttcaggacaatgttgtagaggatactccagcattgattgtactgacacggtgtgtccaacttcagcaagttggcataaaaccaccataaggtcaaggcagaaccaagcatgattgtcttgaataggacaggccaagtccggaaatgcctaaagaaaccacaaatgttaagatgtatgaacgaactgtgctgttggagacagacggacagttntatcatgagtgatgttgtgtatcttcataagtaccagcttcctcgaacaatgcgaaaatgtaaatgtatcagtaggaacggaaactgcatgctntaagaatgannattgaccctctgtattcgtccacaatgacccacaaacagcatgaagtggaaaaggctcctgcataattcaatcgttatgtcagacaagcaactntaactcc

SEQ ID NO: 72934 - DNA, 463 bp, Oryza sativa
  unsure (1)..(463): unsure at all n locations
ttctcaacgcacaagctgacattcgtgttttttatgagcgtggaatccaacgnacttctccaactcgtgatgtctattgtcctattcacaagacgaaatatcacgacttctcaagctgcaaggtctttctccgcgccatgaaaacgccacttcctatagtccagcagtcaagaacctctcttaaggatacagacaacgaataaggagcgacgttgacctcggatcgattcgttggagtaatcgacatcgatccccatgagccatcagtactacacttgctcgaagactatggctcatcatcttccagtacaccacgcgacgtgtttggcatcggtgggactagcacgtctgcgcacgctaacgcagaggcggagaaccaggcggtcatgcctggccaacactacggcaccgtcaacgcaatactgagagaggactcctatcaccctgtacttaacgatgatct

SEQ ID NO: 72935 - DNA, 459 bp, Oryza sativa
  unsure (1)..(459): unsure at all n locations
gttactntcaaatggatttcgtgccacgtcaaaactcccaccaagctatcggaaatctacaaaacaagctacatacctcatctagttcgaatctgatttgggtcttaagctaagcccaatggggtgtgcacccttaggtaaccctaggatatccttaatcatatttattcagtagccgtcatagtttagaatcgggttttgcttagattaatttgttaagaacaatttcactgctagatcggtttgtgaaaccctaacattgagtgcttaatcattcatatgcaagtgtgttgcaatctatcttgatcttacttgtgttctttgattcgcatgcagggattagccttctcagtgatgtcaaccggatttcggtacagcttgataaccagggagaagtagtgctgcgaatgtagggtttagatcgtgttgatcggaagccngatcgtgtgtgtcaaagtt

SEQ ID NO: 72936 - DNA, 448 bp, Oryza sativa
tcgcaagtgaaaaatggaatagctaatctctgaagaacagttgggtttcagaagcatatcagtttccccgaagatattaagcagttgaggtaagttaaccaacccgggccatccagaagcagctgcgaaacacagacgtatccatcttgagtattaataaaaaattgacttataatcttggttttattctacacggttgttatcaaatctgcaccatgaaaacgaaatgaaacatctgtctgagggagatgaaacatctacacggttgaaatatcttccaagctactcttcttctgaacatttgttgtactctagttgcagcgtatccaacacttcagctgtaatgtcatttcaacacaagatgttactagcccatataagtgtaatacagaaccaaatttaaacactacaaacatgtcataatttctgtgcacggaactagaacact

SEQ ID NO: 72937 - DNA, 487 bp, Oryza sativa
  unsure (1)..(487): unsure at all n locations
actcaagcttatatgagctnggattgaagagatcaagccgcacatgggaggaatcgagtcgggaagatctcggactcggtttttagagataaaacaaaacgaactcgattcggatccaaaactcaacgatttgcttagcttcttgaggggaaagaaagaggagaccgagaggaacaaaacccctcaatcaatttgaagaaacggaatcggattatgacgaattgagaggagaaagggcggctagggttcgggctcgggcggcggcggcggccggaggagggagacgatcccgacaggtgggccccacctgtcggcctccgcgagaggggcgcgggcggcagcggcttgtgccggcgtgggccgcgcgcggaggatgggaaggaaagagagagttgggccgaatntggcccaaggaccaagaaggggaacttttgaactttttttgaataaaacaatttgtaaatgttggttcaattattaaaaatac

SEQ ID NO: 72938 - DNA, 495 bp, Oryza sativa
  unsure (1)..(495): unsure at all n locations
tgtgaagtctcattagagacctcacacttgtaacacacaatgatgttgagaatggaagttgaattgcactgctaggagtggtgccctgaagttatattttgacctgtatatgcatcatgacctttcctacagatcggaggagccagtgaagctgaagttggtgagaagaaggatagagtgacagatgcattgaatgccactaaagctgctgtggaagagggtattgtaccaggtatgcagttgctccacttcagtagatttctttcaatatgttttccttgtaatgtacttgttcagtttgcatctttgcattattatgcccaagtatgctgacatgacatctttgcattacaatacaggtggaggtgttgcacttctttatgcatcanaggagctggataaatggccgactgctaactntgatcanaagaatggtgacaaatcattcagaatgctntgaagggttgggagggataataacttctcattttctgt

SEQ ID NO: 72939 - DNA, 466 bp, Oryza sativa
  unsure (1)..(466): unsure at all n locations
tgttgtgtcgagaaatccgctcggcttcaattctgtcttgatgcaactctngctgagttagaaaattgatgaatggctctctccagtcggcatcaattactcctacttcattagcctctccatctccgactntatcctttcttgatactgtcagctcatagagatgctcgacaaaaatatcagaaggagctgcttctcgttttgacccaaaattagctaatctatcggctgcttcattgttgtgtctaagcacatgagttaactctcgaccatcaaatntatcttccaatttgcggacttcttgtcgatatgcaaccatattgtcgtcgagacaggaccaatctttcatgacttgattgacaaccaactatgaatcaccacgaaccactagatgtcagatccctagggatacaacaatcttcagcacatggagtaacgtctcatactcttgcacattgtgggatgc

SEQ ID NO: 72940 - DNA, 494 bp, Oryza sativa
  unsure (1)..(494): unsure at all n locations
tatcacagcggctactagttagcagctaaatactggtacatctacatttattaagcatacggcataccatatttctttatctatataggagaacgaccttgtcctaatagagggctctaagtgttaaaaaaattgcatcttgcttttcgaagttgcaaaatagaacaaaaaaattgggcaaataaacaatataaagcaaactgagaaattgcaaacaaaatgctgcagganagttattctaaccttcttgagtagtttcattagcagaatggttttttaccatcacattgatgtctgcgggagaagcacctccagtcttaaatttttctatagcaaccgttagagactcctcccaactaggaagtcccaagataaattccactacagaacgttcataaagaatggtgccccacanaatatntacatgcgatcggatactagaagcctgttcaaatgcttcatcggaagacatatncttcatgtacccatctatg

SEQ ID NO: 72941 - DNA, 513 bp, Oryza sativa
  unsure (1)..(513): unsure at all n locations
gctctatgtagacattggttctcactggtgaaacctctctatccttttgcctatccatcgcttcgtgtccttggatgaacctaatttagagtcgacacacacgttccctgtgaaaatcgatacctaagaatactcccgggtgaaatgctacatcggtattttcccgtgtgcttgcggattctatcagtgaggttaagaaagaccaacatataggcagaggcgatggaaaccacctttgagttccagcgccaagcgatagaatcacgtgttaattntcatgataagcctaggcctagacgagttaatccacccgacttgttaaagaaaaaaaatcatgtcacttgctaatgacagtggttaccatgtttgataatcagcataacacacgtgtatcgtactaacagaccaacgtgatttatctgtactagtcattctcttcttattttaacacctcaaactntagactatgcattcaaattgaaatctggttacaccaatattttattcgtatat

SEQ ID NO: 72942 - DNA, 381 bp, Oryza sativa
  unsure (1)..(381): unsure at all n locations
taccagccaatatttaccagtaccagtgggaatagaatattctaaaataaatatgccttggaagcatagctagttctccccaattttaattaaactgacgggcgaaattagtcgattacgaccgtcaacattgaggtcgcccccgggtggtagcttgagtcgctgttcccttctttgccagggcaggagggtatattgtcgcgacgttgttctctaaactagagactaggctagacgagatggacagagggacgtaaatcgggaagatgatagatccgacgcangcccataccagcggtgtcgagattgaagatcctanggtgaggctgatgtagaggccgttgtcggatgccttgaagtcatgtctgctgaacctttaac

SEQ ID NO: 72943 - DNA, 335 bp, Oryza sativa
aaaacatcacacgttgtttagcacgggttacttcctaaaaacagtaaatgtcacattctctgaccaccgttgccatgcactaccaactgattaccgatgataagcaagagaaccaatgaatataacagttaaaagccgcgaggggtaattcgatggtgtctcgtcacttctgtgtcctcagagaatgtgacattgacaccactaccgggaaatcacaaaatgcacatgtcgctgcatggaaggctcagactttgtcagaggcatcctgtgatgtgccctcagaacttttgaccgcaggcagcttctcagctaaatctttgcgtcagtggcccttg

SEQ ID NO: 72944 - DNA, 503 bp, Oryza sativa
  unsure (1)..(503): unsure at all n locations
gcgccttgaaactaagctgctacagttatgactttggatgtaatgaattctcaacatacatatccatatctttcatatgcaaccggntggtcatcaagtgaaggatgacaaccgatttattgggactaatgttctcctttgagatgtgcaaagaaataggtctaattgtgatgaggcaaatggatgacaccattagttgatggtcaccaaaccaaagacattgccatgttgacaagaatgaaagcttgtgatgagaagaaagtcttaaagaggatggacaagacctcggcataaacatggttcaactggatggtcacaagtgttgatcttggctcgagcattgaccccaagttggatggcgcaagacaaaggtataatggagctaagaatggtttttagtctttttctagtcttgagtttggtgagaccgaattgctagatgacaccgactatnagaggggctataaacgacatgggatgacttgtgcctctagtcatatgca

SEQ ID NO: 72945 - DNA, 507 bp, Oryza sativa
  unsure (1)..(507): unsure at all n locations
tcacanaagtgaataaagatgccaatgtggaggagggaattatggttcagatgatatatccgatgatctccttcactggcaacacactttcattcaccgtatctttcagatctgtctccttaacgtccgagaccatccaccggttaaaagggatttatctctcttccaccaatggtgagattgggaatggcttggtttagggtttttctctctggatctgaaaggaacgtggagggggaacgctagcacatgaatttggtgaagtttggagtatattggtagtggaatgtgtgtcgaaagtgttgcactaacttcggcggcagtggcagtgaataggagagcgaaagttgagaagatgaagcaacggagacgatgacgcactgtgtcgcagcatttatttaagggcatggatcgcagcccattgagtgcttgcagcccattcttaggtgtggcaggcacatggtctntatgactngagcatanttgtcttaacaatatgcacgtgga

SEQ ID NO: 72946 - DNA, 403 bp, Oryza sativa
gcgacactcatggatactgcgcgattaccgtattctgaaccgagagcagctctgttgttgttctggtgctgacgcgaccatccactgatacagaccaatgaatgatcttctgtatgtattgcgggttaattattcggaagaggcgcctatgctgaagctaacttgagcaattctaagtatcaatacgtatgcaccaaccagtttaaccacaaacttaagttgataagaaaagactgatgattcacttcatatcccaacaatcaagattgagctcgatttgaccaacaattaggcgtttttgttttcctatgaatgaccctgttatgcttatctgatcttgtcagacaacaccgattctcttacgagaaatattatggtcgttgaaaaaggatctcgagatatc

SEQ ID NO: 72947 - DNA, 451 bp, Oryza sativa
  unsure (1)..(451): unsure at all n locations
nggatcacatactntacgagttcaatgccaacaagttccttagctggagaactcacagtgacatgaatcttttctagcataggccacaatttgtgcttgctattcatgcaggcgttcatgatctctctgataggttcatagcaaaactgaacaaagcccctcttgcatgtagctgtgccagtgttctttnttgtccatttctttgtggccaggtcaaagaagttctcaccccataatctgtctatcatcttagattcctcaactntgaatttggaggaatacatcttagcaaaattagaaattgcaactgcccatccgtgcagaccagatgagaacacaacagttcccttagtgggatacacctgagcatctttgtgtgaagacatggtagcattgacactatcaattagactggagagggtctgataagctttctcaccatcaacattct

SEQ ID NO: 72948 - DNA, 503 bp, Oryza sativa
  unsure (1)..(503): unsure at all n locations
tgtctgcccaagtgttgatgtggatgcgaaggcttggcttaatgcgatggacccacaggcgtagatnttccttgatttgttgtatgatagtagcagagtgaggctcagtgtgtttgaacacccgttgattgcgcgccttccacaggccatgtgcacaagctgcgaagcacgctggccaacctagcttctgttgttccggcatattatccaagattagctcgacgaaggcctgaatgttggcactgctcattgcttgcatatgaaggtttagctttttccaaacttcgtcggctagcttgcagtgaagaatgatgtggttggctgtttcaatagttgggcaagagctgcagtgtggatcaatagcccattttttgtgaactctgttngcattggtgttaagtctgtccctgaagccaaccaaaggaagaatgcggcaagtgttggggttgccttgttccagatgattgatgctggctgccataatataccatggtatgtcagta

SEQ ID NO: 72949 - DNA, 422 bp, Oryza sativa
  unsure (1)..(422): unsure at all n locations
ngagtgctggaatacacctctctctttctggatagagaaaatatattcttatgataaataaaaatagcaatggtgaactagctgaacataatttagttcaacagcaacaacatgaacaacttgccagaatgggaaaactaccttgccagcataaagtttctttgttgtgctcataacaaaaatccattttgtccctttatgaccctggcttgtatcaagtggttctccagagtgcttatggataatcttcccttctgtaactatgtattcatagagctcacgctcttgctgcagagatccagaaaatatagatttcatgtaacattatttcattaaaataaaatagtttcatgctgcaactttctacggtgtcaaatatgatgatgagttagcatgacaaactgacatattgtgtgaatgga

SEQ ID NO: 72950 - DNA, 375 bp, Oryza sativa
  unsure (1)..(375): unsure at all n locations
atgcgttacggatggcccacaacttgcagttntgtgaaaattgctctaaaaacataaatcttatgatattcaactatacaattntccaaaatcaatgattaaagttaagaatgtttgatttacgacaaaggtaaaacgaaaagtaattgaaacggacggattaacaataacatattttactcaaaataatatcatggagctttgagaaaaggttaacttgggccctgtttggaagattagcccaagactaatcttgagagctaatatttagtcatgaattggtaggctaaacattagcctaacgtggtatgtttggatccatgggctaatcgaaggctaaatggtggagagagagtaaaaagagaggagagagag

SEQ ID NO: 72951 - DNA, 477 bp, Oryza sativa
  unsure (1)..(477): unsure at all n locations
tactatttcagcggctcgatcccgttgaagtgatgctatcaggaggcctgaatccaaatccaaaatgtgtagaactttatctcttggcttctatggacaaaaagtgaagtggtgagatggaagtggacttggagaaagtcttggtttggtccccaatcaacttctttaatcatctatgcattccttacgctcggtcacttttctttcgcccaagcaagtacctctgcaggcgaaaacacatggaactcattgtgtagcaacatttgttcaaatatataacaagtaaatctaatatagaacatatgcgcatttggttgattaatacataaggtagtcatggttatatccgagctagttgtatcttcatcagctattggagggaattcattagatgctaaatgggtgttaaatgtggagttaactggtggcagtgaaactattccgagtacgttctttatgatngatgganaatgatct

SEQ ID NO: 72952 - DNA, 430 bp, Oryza sativa
  unsure (1)..(430): unsure at all n locations
gcgactgaactgtatataccagtgattaaatatgttcattacaatattangtcccacttttagcaaggtggggccaaatcaaataaaatttaacaatgttcggttacacatcaaatttaaaaagggaaattagagagtaagggaattcttgctaacttatgtatatttcactgatgtaactaagcaacataattgtaggacattgatagctacgtatatgcaagcacactaactgactgtgttttgttatactaactaatcatggacaaatgcatgcgtgaaatcccaaacaaaaataggtaagcaaaataaattaactccatgctgttgcttgattgtaactacaagttatccatcaccagaaagggaagccaagtaattaatccagttaccattngtgaatctagtacctcagtggttactctgatct

SEQ ID NO: 72953 - DNA, 402 bp, Oryza sativa
gctaacgacgcaccgagagtcatcaggatcaccatcggcaatctgcttcaagatcttgatctcatccatggccgcctctgtgtagtgctgtgcactcttctgcaccttcagcgccacatatctctgcatatatataaccaacaaattcagaaacacaaagggtatataagaacagatacatttcgtgtatgatgatggtgggattaacgaataaaacagtactcattaacaacgaaattagccattatgataccaccaaagcaataaaacgaacaggttgcgggtacaaacgaaaccgcccgcaatacaccagatgattaaaacgcatccaggtcgagatttcccacaaatcatcacgaatctaggaagggaaaaggtgggaacgcccattccacgaggaaa

SEQ ID NO: 72954 - DNA, 466 bp, Oryza sativa
  unsure (1)..(466): unsure at all n locations
tgatctggttattgaggcccgatcaaagccaatattgatcggctcgaatcttggaagattgagctcttggcacaacttcaagaatgcaacgccgagctggatctagaatacaagaatctacccgatctcccacaagttgtcgaaggacagaaggcaagactaaaatcggctatcaagaatgtcgctgatctgaccaagtctctgaaagttatccgtggaaccgacgttcaagatgctcaagccattgtagaagtagaacaaattaggcgaanagctatattggctatccagagctatctatctcaataactntctatgtaatagaccttagggaatttgtgatcggcaaagatacttctaatgtttatcttgagaatcctttgtgccgattaataaaacttccaaactttctcaaaaattntgcaacttgtggatatatatngcccccctaantttacaatgtcat

SEQ ID NO: 72955 - DNA, 479 bp, Oryza sativa
  unsure (1)..(479): unsure at all n locations
ntcattatattaanaaaaactgatgagtcgagttctagttgtgtaatgttcttactacagntataatatcatatgatgtaattggctgagttcaataaaaactttcattatatatctttaaaagaaaagagctgatcgatgaggtgagagcttcttacgatgacgctcatggtggcgacgaagacggccatggagaaggcgaggcagatggagccgagcaccctgacgcggtggggctgggcgacggcggcgacggtgacgacgacgacgagggagaaggcggcgacgttgaggaggangaatgaggtgagcgccctgagcctggccggcctgtgggcgtatacgaggtaaactgcgatgtatgcggcctctacgacgcactcgaatgcgttgatggtgaggagggggcttgagttggtcttcaccatggcgtacagtatgcacagcgtgcagctgaagagcgccaccacgtaccgcac

SEQ ID NO: 72956 - DNA, 501 bp, Oryza sativa
  unsure (1)..(501): unsure at all n locations
ggcaacagtntatgtgtcatattaatgccattggtattcaatccatttcctgataatatagaattgctcttattttccttggtaaattatgtgcaagcagtaagattttaaattggttattgtcttcatgatcattggatctttttttttccaatgaagtgtatcaaactagagcaaactgttactctgaacatgtcaaattggtcatttatctgaatttataaaatagcgttaacttcctttntcgttcacaaatttcttgctttgcaatcaatataaattcagacaaatttacaagctgttaatatatcaatgaccactacatatcctatagcaactaattaaagcttctaataatggagatatttactanaaataagatggtgttacttatttcagattcagcacatgatttatantttagaatttgtatataactcagtntaaagttcagaatganataggcacaatattttagtgaatcatttggaaataaacatg

SEQ ID NO: 72957 - DNA, 456 bp, Oryza sativa
  unsure (1)..(456): unsure at all n locations
tatatagaagctcaagttgctaaaaaattcttggaaaactttggtgaagataaggtacactttntggctcaatcaattgctgtacctgacactcaccttggacaaggctgtattggctgttgttggttgtatggcccaaatgcaattagcacattccatttactaatagccatactgcatattgtgagaccactttacatggaaaatattttcactaggacttcacatgtagcaaagaaatgggctaaagacttgaaaggtgttgtgtttgattggaatacactgggtatagtggttcaagaggtcaattacattgaattgatctgtgaccgggattcgtatggttgtagtgttcagaagtgctatcctcagtctattctattcatgcacaatggttggtcttttggtggatngcttgattggaactctaaacaatacaagaacagtatgctaatt

SEQ ID NO: 72958 - DNA, 418 bp, Oryza sativa
  unsure (1)..(418): unsure at all n locations
ggacaagtattggaccaatactcgaacgggtattcccttatttctcatgatatcaaccactcttcgtccaacgccaccggtagctccagtgaccagcaccacatcagaagattccattttctttggcacctcaccaggagcagagccagtgaaactgctaagaatggactctacaatctacagattgaacagacaaaacatgagcacaatgccaaatgtgaaataactgtaacgagaagaggtgagaaaaaatcccaatacagtgagtaaaccttgagaggattcggtggcccgttgaagaaatacagcgtcctgacaaatctgccgatatcccaagattgctggcctgcanaagctatcacctctctccgagacagccgtgacgacgcgcggcgtgctgggctgtatatgatcggag

SEQ ID NO: 72959 - DNA, 399 bp, Oryza sativa
  unsure (1)..(399): unsure at all n locations
ngaggactntatatggttttccaacccaagtagatggtgattagtgtagcttgcaagagctggggcctcttgctcagctctgggttcttggactaagtaacctagagaatgtacctgctatctcgttcgctgcaaaggctaggcttggtgagaaggcccaccttagctacttgatgttagaatgtagtagtagacttggtgaagatggttttgtacaagacgagaatggtgtccccacggaagagcagcggcaaatcgaggaggtgttcaatgcgcttaccccgccactgtgcatagagagcattgagattagtggccattntggagagcagctaccaaggtggatgatgtcaagagtagcaggtgcatatgagagggtgtcgatggtgatcatggatg

SEQ ID NO: 72960 - DNA, 466 bp, Oryza sativa
  unsure (1)..(466): unsure at all n locations
ttgtttctgaagtacaatgtccacatcaatatagctactgcaaagttccaatccaaatatatcccatgggaaagaaataccataacaaaacataagagttaaatccaacaaaataacagaattagctcgctccaagctccagctaaactagccacaaatcataatgcaatggtcctacagggtacaaagttcactactgccataagctcaggcacaggccacagacattgatacgcgcatggcagcttgcataggattctgccctcttccctcctttccaacanatgcgcgcacaaatggtttgaccccaagtttctacatttgaatatgactccaattgtgtanacactgcccanatccaagttaacttccaatctgaggattaccacccattttgctggtggtgttctcacataggcataacanatgaattattatgtccaataaaatagccatatcaataaca

SEQ ID NO: 72961 - DNA, 455 bp, Oryza sativa
  unsure (1)..(455): unsure at all n locations
ttcttctataatcttttcagatagcggtcggcactatctgttatcctgttaccactagccattgatttcgacgagtgattagtgaacgcattacgcatacgacctcatctttntctttttcttttctttntttatgatgtgtgtcatgacccacgaagaanatccacggtcgaaatcgatggtgaactaaaatgggaactttntttttttttgccgagtttgttttgtcactcgtgctatcgtgacaacatccaaggaatatggctatacggaaaaagatgagtgaatcgcgatgatgtgatcatcgtacgcaccgccacaggttgctgtacaaagttataatcaagacttgataggtcccttnttttttagctntgcagaaaggagaagttgatgtgagctaatcagaacggcgacatatccaatgaagactattagataagtgaaaacccatg

SEQ ID NO: 72962 - DNA, 267 bp, Oryza sativa
tcccgacaccaccccggcgaattcacatgtctctcggcatcaaggctcccctgataagctagttactcagcccggggtgtcccattccacccatgtggccgtacttgtcttatgttcagatgaaattccaaggaaacggtccttaagtgcaagagcgggaaaaccgtacacccagtacgtttcccggtccgcggttctggaaatccatttagttcgcaagcaccgacccaggtgtcgggtttttcaagctttttgtataaaccaagt

SEQ ID NO: 72963 - DNA, 440 bp, Oryza sativa
  unsure (1)..(440): unsure at all n locations
ctatcgatataacgccagtcaattatgaccggcccgtttgaaaaaaaaagactattttgctgttagcaaacaccacgggtnnttgttgcgtgtatgggctcattgtagtctctctgctctcgctaccagtcaacctcctgcgtctaatcgatcaccccggtcagacaagtactccctccgtcctataaatcaattntaagttnttttttactgttagaccactcgtcttattaaaaaaattatgcaaatataaaaaacaaaaaatatgcttaaagtattntggataataaagtaagtcaaaaaacaataataataattccaaaattttttgaataagacgagtggtgaaacaacgcaagcaaaaactcanaatcctttatattatggaacggatggagtagttaatttgatggnggacggaagcatattgatattccaag

SEQ ID NO: 72964 - DNA, 518 bp, Oryza sativa
  unsure (1)..(518): unsure at all n locations
tactaagctttgaagcacttgtanactggctctntatactttcgaggtacttatagactgtgtcatactctgggattgaccccagtatggttggctcaatcgtgttctttaccgcagccaaacagttcttgttggctaaggaccatttcgcatgctcaatgtcatatgacaagatgagggaaatattgtccctctctctcttttgccattcagcatctgactcattttcacctctgaaaggttcagcaggttctataggacatggagtagtcaacacccagtccacctctcccaagataaaagcaaggtcgagttctcttttccattctttgtagttatctcttttcagggttggaatatctntaatgtaacccatcaaggagtagccacctgagataatcatgtattgtgagaacaaaattaacattaaaaatattatgtgttaagtctacatcacntgtgggcgannaatagacataacacatagagccataactatttacattgcaatatcaacg

SEQ ID NO: 72965 - DNA, 511 bp, Oryza sativa
  unsure (1)..(511): unsure at all n locations
gggtttactntatntacttcccttctactttgatttctaaactttattcttattaatccaaaaacttgtgctattaattggataaaggtcttaactccctcctttcacttgtctttagatgccgcgttacaagcctgagtacctgtttggtgttgagggttttgtccaggagttgcgtacgatgtcctttgtcattggatttgggactgcccctttntatgcccagattcgtcatgatcgtcatgaagagaagtgccgagtcaaagtcaccttgaacagcaatagtgaagaggtcccctcagtgatgtttgaagctggaggaagaaactacatccatgcatgtcangaagtggcaaggatcgccacatgagaactccgtgatagctacagtgatcagttggccgacactgagtatcgctatcatcctcgccaacctcanggaagtgaccgtggcagttaccttgagactgaangaattgagaatgatgttaccacaagacattnggttgag

SEQ ID NO: 72966 - DNA, 477 bp, Oryza sativa
  unsure (1)..(477): unsure at all n locations
gggcatacaattgatggtcccgcagctttcccaacaccagactgatatggtgctgatggtcttcctctgattgtgagtatatcagaatgtcatcaatgaataccacaacaaacttatccaagtattccatgaacactttgttcattaagttcatgaagaaggcaggtgcattggttagaccgaatgacatcaccgtgaattcatacagcccgtatcgcgtggtgaatgcggtcttcggaatatcttcttcacgaatacgtaattggtgatatccggaacgaagatcaatcttggagaatacagtggcacctttaagctgatcgaacagatcatcgatccggggaagagggtacttnngtttgatggtgacttcattgagagctctgtagtcaacgcacatcctcttcgtcttgtctttcttctccacnaaaatcacaggaagcaccccaggtgaagtactcggacgtatatacccct

SEQ ID NO: 72967 - DNA, 468 bp, Oryza sativa
  unsure (1)..(468): unsure at all n locations
tatcggtggtgctcaccataggccggccacgcggtgtcgctgtcgcttcaccttgctcccattgttgccagcaacctctcgtcgctcgagaatcgagatccataaaaatcaaggttntggactgcttgccactctcccggatggcgtgttcttaaatgccactctcccggatgacttcgctattnttttcattggagagagaagatttcttgctcgtgtgccattnttgagcccgcaaagcaccacgtcacctgatccgagggcaaaatgaccatcttgcccttcttcttcctctagctcggggtctctctcctccaaccttcctccctgtgtggggccgtgttacgggataggacacgtggcgcgattntatcatatgtaaaatggcttccaggtttagccacgtggcccaatcaacgctaanggatcggacccagaaatcggtataagagataaagattcctcata

SEQ ID NO: 72968 - DNA, 487 bp, Oryza sativa
  unsure (1)..(487): unsure at all n locations
nttccttctgtggaaaaaccccgcacggatctccatgctaatctgacggtagcaggggatatcctcctgccatcgtacggcccaaggcgcttgcctcgataagagaggaatcctgagtgcccaatggctcgattggtttgtttatactactccctccaacaaaatgatactaccaattcaagggcagctataattntctatgtttaactcattcgtcttatttaaaaaaattaaaaataaaagtcacgtataaagtattattcatattttatcatctaataataacaaaaaatcctaatcatacaaaaattacaaataagacgggagatcaaagttacatacganaattcatggttgcacttataatgggacggaggtagcccctctgggatgtaaaatatatcccttatcaccatncccatagtgtatgagatanatatacgcatttcgattagtgtcgtattctatggttacctgtggcggatct

SEQ ID NO: 72969 - DNA, 440 bp, Oryza sativa
  unsure (1)..(440): unsure at all n locations
tgaagacagtctcttatttataccaacctcccaaagtgtaatttcaccattggtagatccaactgataaagtcataagcgtgataagaaaatgatatatcgtttggctaagttgtattcaatcattcatgcttaaagaatcagacttctgtacttactattgcacatatnttttaaatagatnttaataacataaagagctcgattgtacctagtaatagtgtatgccgagttggatgaaaatccatgctggttacactagatccctgtgacaatgtacaagctactgtcctgngaagatcctccactgaccataaaggttgtggaattggtgcaggataggtggcctgaacataagcgtagatgactctgaataattgatagaaaatgcaccagccatatatcttctatgcanatgcaacattaccttattaacaccat

SEQ ID NO: 72970 - DNA, 487 bp, Oryza sativa
  unsure (1)..(487): unsure at all n locations
tcacccacggagccgngtaatgtaaatattgaagaactggatggttaattcccgaaaagctcggccacaatgctcagaaccccgcgtttattgtagagtaaatttcacgaaactatatatttatnttgtggtccaagttgtagaaaaccacacgcattttgacacttagcacttgattacatatattttggtcgtgtagttgtggctctttcacgtaggacgaggacatgacatcctattaacagccatcgcacgaaattaatatgatgctacgtcctcatactagatgaaataaccatgtcgtcatatcacaagtgaatccattcatcgatagtgtggttntgtaaaactaaactatcaaaatatatgtatntaagtgctaagtgaactataaaatatgtagttntgtgaaatttactccttattataagtacagtgtggngctcggacacgggcctctccccgtctccatccccatagctgcact

SEQ ID NO: 72971 - DNA, 241 bp, Oryza sativa
  unsure (1)..(241): unsure at all n locations
gttataattcatgctatgtgaaggaagcagaagaaccctgaggggtatgaagattaggaatcaacggtgataccattcatgctgtgatgttcttgagaagtaaatagaccacacatngttttctagttctgtaggcagntgtacaggataatcgatcgatcgaacgaacgaaccattccctacgcgatctatgtgtacaggcgagcactcagaccatactttccttgatcactctcttctg

SEQ ID NO: 72972 - DNA, 392 bp, Oryza sativa
acactgacggcgacagcgggtcgccgccgtcagcgccgtccacagctgcatctagctgatcgagagcgtaagggcagtcaccagatcgaacgcgtgcacggacaccgagaggcggtcgtcgtcgtcgtcgtcgtcgtcgttggtgcacccggcgtcttgtagaacgctggccagcagcagctcgccgcgaagctccaagaggtagctgcgccggcgcaccttgccgggctcatcaagcagcggcagaaacgtggtttgatccccagctgctggacctccgatctcgtggacgtagcatctcgccaagtccacgctcacggcggcgccgtcgtggtatgcgactgcgcatgcgcgttcgtcactgtcggcgtctgcgagtcttttacatacct

SEQ ID NO: 72973 - DNA, 426 bp, Oryza sativa
gccatcaacttaacgacatgaagccagaccacataatgcctatgatcggatacagttgtaccaaagctccacgcaacaactctcaattacatccgactgacgagagataaaagcacttgatatgcagttgcacggatataaagttacggcatacagaaaatagataagtcatatgatcaacaagactgattccacaaaattaaattccccatttatggttttctactaacaagtagaacatgatgaaccaaccccactgtacagtatgcatacgaactgccattttatcatgcccaatcctacatatagatcatattggctagctaaaagcgaatcaacacaatactcttcaatagtttcatatgtgctaatgcagcttcacatgactactctgctgattaataaggaacctcattgataaactct

SEQ ID NO: 72974 - DNA, 448 bp, Oryza sativa
  unsure (1)..(448): unsure at all n locations
caggctgcgagaataaggctcttaattgatgggatccaacattcataaagagaaattttgtcccctactggagatcaatattaagggcccagctgtctgtatccaatggagcagcagatgagatgtcaatgcttcatcgtccacagttccgtaattcagtagtgagtaacgagtcttccagtcttgaccataatattagtttcttgggaagaattcagcaactgagtggtactcatgaatcgagaaggtacagtactgctgcattcacaatgctcacgaaggtgctaaagacatgagcanaaaggtatgtcgtgagttttgtttcagtctacagttactgaacatgtggaaatcattgctgtgacgcctatattattaatttgagcaatatatcgtaatgtcaagttgttagggtaccttcatagaatttcactctgttaaatataca

SEQ ID NO: 72975 - DNA, 62 bp, Oryza sativa
gactaagctgcgaagacttgtccagaccctaccttgtaactgtgctttgtttacaggagaag

SEQ ID NO: 72976 - DNA, 379 bp, Oryza sativa
  unsure (1)..(379): unsure at all n locations
tatattcaaacctaaagcatcaagtgcagaagaaaataagacatttgcaaccaaatgtaatagtgaaatgatgaaaaatataacggtagggacatggaagtgatcaaatttgaaatttagggggtataaaagggatcaggtaaatttcagggttacgaaagggattgagtaagttttcagggtacacaggaaatttactcttctttaaaaggcgcagatcactataaaacatcaaatgccaatattcaccctaaatgcaaaatcaccactggaagaaaacacagganaaataacagacgactgtttccgaacgccaagctgaagaatcaagcgcctgnaaaatgacagacggtagtaattgccatcgcccaaccggagt

SEQ ID NO: 72977 - DNA, 434 bp, Oryza sativa
  unsure (1)..(434): unsure at all n locations
tctcaaaagtggcttcatcagagaggtactccatccatagtggttagccaaccctgtcatggtgcggaacgccaacgagaaatggagaatgtgtgtcgatttcaccgacctcaacaaggcgtgtcccaaggatcacttccctcttcctcgaatagaccaactggtggactcaacagccggttgtgagttgttgagcttnctcgacgcttactccggctaccaccaaatcagtatggcgaaagaggacgaggagaagacagcattcatcacgccgttcggagtattctgctacgttaagatgccgttcggactaataaccgcaggaaacactntccagcgcacggtccanggctcacttagcgaccaactcggaaacaatgtcgaggcctacgtcgacgacattgttgtcaagaccaagtcaagcgactcattga

SEQ ID NO: 72978 - DNA, 432 bp, Oryza sativa
  unsure (1)..(432): unsure at all n locations
tcatctgtctctgagctccaataatgcagctcatcgngacgtcggtatcgtccgcatgaagctgaaccgcatcatctgtgcatttatacttatacttatcagctaaaacataaggtactaactctaatattaaagttgattgtagaaattcttcatgatagtttagtnttcagtctccactatcagatcattgagaacacgtatgtaaaagttatatccacaagtgtttatttttcatttgtaaatataccgtgacgcctttgtctctagcggagctagaacgagatacagtgacgtgccacttgcttaacttactctactatatatcgggtntaagacgatgcgagtgtctatattatattaagagtgatgcgtacatggtgaatatagatgggttcgcctgcgtgcgtatatagagatgactgcgcgtgt

SEQ ID NO: 72979 - DNA, 450 bp, Oryza sativa
  unsure (1)..(450): unsure at all n locations
tctcctccgcacatgcgggcgagctcttgctccctacaccggaatggcgagctctttcttcccaacgccggacaagctcctgctacaccatgtcagcggccttcctccccacaccggcggcggcaagatgacgcaacggatggcgcgatacggacgggcggcagcgcgtaactttagagagacggagtgtcacggaatgaaacaattcgtgtgctcgatggcatgttctgaanacgatgcgaattgagtggcaaattctaaaagtggtgcgaattgagtgacatattctgaagattctctataaatagctcttaggtgatcctttgtaacagttgattgatcagagaaatatacgagtggttgtgaccaacattagaaagtataatgcgaagaagatatgaatgacaagacacacttacgcggccagtgtgttcaatagatgtgtcatac

SEQ ID NO: 72980 - DNA, 482 bp, Oryza sativa
  unsure (1)..(482): unsure at all n locations
taccaagccacggacgcgaatggagatgtattcgatgttgttacacctttanatgattcttgcaagggttacaccaatggtatggccatgccaccatgtgttcacatctaacctcaacttgctgacggcgggtagatgaggtatatccttcttcacggtgtcctccgatggtaactgtaattntgtgtcaattatcgaattgtgtaactgaaaaaatatatcaacgatgaattntgctaatatccttcacagtgtccacaacaaagacacacagaagatccacatgttgcactataagatcaataaaataacatgttctcatcaagataacaaaactaaagattttttatgctactgccacacgcgcgtatatggtgtgccattatttctaaacatatattagtcgatacccatgccttgtagcagagaattagaagtacttatataataattcaaaaaagacatttaaaatcattcatgta

SEQ ID NO: 72981 - DNA, 342 bp, Oryza sativa
  unsure (1)..(342): unsure at all n locations
catggtcagagaatcaaatctaagctagtgaaagatctctgtgtactccagcaaaataaatntaaaagtgccatgcccatgtatgatttctttgctgagcaaattaacaaggtattataatgacaaaatggtaaggcataaagataaggctcatagttgaagagaagggcaacataaatcgtagataggtggatgtcatacaagaaaaacttgtttgcacccatggatcaagggtataagagttgctggttctacctgaaaaaagaaggggatatgccaaacttcagaatttcaacataacagaaagtcagaaactcataaaataccattatctaaatctga

SEQ ID NO: 72982 - DNA, 437 bp, Oryza sativa
  unsure (1)..(437): unsure at all n locations
tctctagattntattttccgctgcaattttcttcatggngatgactaagtgcctcttatgtaagtatttatcgctttagttattttgatgaatctgtatattaaattgtcagtttctgtatctcggcttattcctggatgagggtttttaatgcacaaattagttcagaaattacttgtgaatttctgggcgtgacagctaccgagcggacacacaaacacggtcaccacacgcacccacgaacgactaccgacactggtacacgggtaccggngtcgacaaacacacaacgggcatggtgcgactccgaaaggacgaggacggngcagtgagaggacggatccttaccaccacgcgacgaggcgtgggaacggcgacgacgaactgcgcggtggagacggacgagaacgacggagacgaacggacgacacttcagc

SEQ ID NO: 72983 - DNA, 483 bp, Oryza sativa
  unsure (1)..(483): unsure at all n locations
ntacaagacactgngtagataagtatctataggactccaatgcaacatcaataattgaagtgcccaatcagctagacatgaacaggtaaaataaatatgcagaccatgagctagaaggttcagaaaggacttactcttcagtggccaatgaaaattgaaacaattcagatttagtcaaatgttttgcatactgggcagatatttctgcgcgggtttgctgatccggtaagtcaaaacaaatgattgaatcaaaacggctgcaaattaacaacacataaaggggataaattaaaaaaagatgatatttacttcagaaacccatacaaaggataatatcatatgcttctctgggaaatgaattcttgcaagggaacatgtacaaactctccatgtgaaaatntaacaaggacttgtaataggaacaaaaagagaatgacaatagaatacanaaacatgcacacatctganaaaataactgggctg

SEQ ID NO: 72984 - DNA, 328 bp, Oryza sativa
  unsure (1)..(328): unsure at all n locations
atgcttaccccacgcctaaatgcacatacgataacgacagccacgtatgacattagcctaagctacctatgaaccacttctactcacagctgcatcaacaatctataagagattgcagtgtgtcatcgttgccaagcttcatcgccccagcaaagcagttccgactctacccctcagtatacagataagagtgatgaacacccgctgtagcaaggaacgaagccaaggaagtgaggccttgtcaaacaccctagacctgaagagcttcngtgacattgcatgagttcaccaacgctaccattgcgcgcagagggttcttggtgttatg

SEQ ID NO: 72985 - DNA, 476 bp, Oryza sativa
  unsure (1)..(476): unsure at all n locations
tgtaacttgagcatacccccgaaggggtcttagtgcatcagtcaatctacacacagaaagtgttagaatgatttggctttgaaaagacatatccttctaaaacccctatggtcggaaggtcactccaagtagaccaagatccgtatataccaagagaagaagggaaggaagtccttggattagaatatccgtacttgagtgcaataggagtgctcatgtaccttgcaaatngcacaagaccggatatagcatttgtcgtcaacttacatgcaaggtacaacacagagcccaccaagaggcattggaagggcatcaaggacatcctccattatcttcaagaaagtaaggacatgaaattgttctacagatagaaccaggacctcaccttggtaggatatgcagatgctgggtactctctccgtcccaaaataagtgcaaccataagtntcaatgtccaaatttaattatccgtctga

SEQ ID NO: 72986 - DNA, 493 bp, Oryza sativa
  unsure (1)..(493): unsure at all n locations
atggaccttgaaactcagctatcttatgctgaaataataaaatgctntagtttagaagaactattattgaaactgtatttcagacaaatgttacagttacgctgaactgtgtccgaattgtatttcagacaaatgttggctatgcactattgcgttntatcgcacactcgtagtcggtgactactcctaggttgtgctggttgatcgcccatgggttgatgaccatgcctgtcgcatactggcgcaatggacgtctgtaagccatgtaaaagttcatcgtgttgcatgcgttgagctcgctgtgacaacgacagttgctccgacacatcccactatttttgtggatatgtcttaacataatggtttcatagtgaatattaccattngtggaggtgttgattatctctcaatggctatgtctangggatataagctaatgtggttggacaactcgctcgtggatcgtacctaaaacttgctgcttaacctgagt

SEQ ID NO: 72987 - DNA, 487 bp, Oryza sativa
tgctgctgacacgcctcttctaacaggacatgtacacgaagcttgctactcccagctccttcataatgtgttattttattagtgtcaaaatttaatgaagtgatgctttcctgtcctgttctatcatattttgccgtgtctcatatcctgtgaactgttttcagcgtgtacttgatgcactatttccctcagttcttggaggaacttgtgctattcctggagcatttggttgtggaaaaactgtcattagtcaggcactttcaaaggtattttcactattcctctctatttgataactgctagcattgcccatgggcattagccttttaaaatgactgaattctgtgcctttcctgactgaaaatatcttatgcagtactccaattctgaagctgtggtttatgtgggctgcggcgaaagaggaaacgagatggctgatgtccttattgacttaccacaattgacaatgacatttgctgatggacgt

SEQ ID NO: 72988 - DNA, 430 bp, Oryza sativa
tctggagaagctgagaaataatgactgtattgtcttcttgacttcaacagctaagccttggataacaggtaaacttcaatcgaaaaggcatacagttaaattaattgcaaattacaaaggccataataaagattatgtcaaatgacttactcagggtgcaactttgatattttactaacaaaggcttccaggtcaagtgcctcatcatagttcccatttcgtatacatctgtgagcatgtagattgttaaatgtaattcttcatgattcgtcaattgtacaaatcaaaccatgttttactgaacaaaatggatctgtagcatacagaaattagagaagaatcgagaactaaacagcatatcaacaacatcaaacaacacaagatgactgaaggtctttaagaaattatataaaaaaatggcacatacgtg

SEQ ID NO: 72989 - DNA, 484 bp, Oryza sativa
  unsure (1)..(484): unsure at all n locations
tcangctattcaaacactagtgggcacaactctctgttntagtcatttggcatcaatagtactttcaaggaatctctgcaacaaccaatgaatagacagtgtcgatttgccccctgcccaccacacacacagaaatgtcaccatanatntgcactgaacaatagttgatacacaaaatagcaaacaatcacatcttgtcatttctgacccacaaagcagcaacaagttactcacaatggtgcacggcggtgttcaaaattcagagcaatttgcacatataacataatggtcaacagaaacccanactgcatacagaatactcccttccgttcatattataaaactttctagcatcgcccatattcatatagatgttaatgaatctagacacatatatatgcctagattcataaacatttatatgaatattggctacgctagaaagtctacattgtgaactgaagaagtactaactataatgatc

SEQ ID NO: 72990 - DNA, 408 bp, Oryza sativa
  unsure (1)..(408): unsure at all n locations
tctatccacctcacgcaggcaatcagctcgcctgccgcatctagacgttgtcgcaccaatcctgtcaaccgtcggagctctcgggcgacttgcgacatcgtccgccgcttatcacctggcatagctaaacacctgcttgtgagctccgcaacttggtggatgacctccaagtcgtcttctttgatgatctccttatctatgagctcgtcaaccgtgccctccttcatagcgtcttgaaacaccgacacaaggcaccgcggcttcttacctgttaaaagctccacaagaacaacaccaaaactataaacatcactcttgtcagtgagcttacatgattgcaggtactcaggatctangtacccgactgtgccttntgccacgagggcttcttcgtccattcgtgcgatt

SEQ ID NO: 72991 - DNA, 486 bp, Oryza sativa
  unsure (1)..(486): unsure at all n locations
nggaagcagcttctctgtggtgccttatgttattgcggtggtgcgtctggctgctctactttcaaattctagctatgtcacctttcctttggagaaccagttgactctgctcacattttttcttgaacgctcaaaatgttgatctttgttcatacaggcatcttgtaccattctagccatagntgctntgctgccaattgcgcaacttctctattgtacattcttctaatcaagaaggtaactcctaacccattcccgttttatgtaatgccacggattgattaagtactacgttgctattccttgataatttttagagcagcttgtacaccagattctcatacagtcataccctttgaacactttaaaaatagttatgtatttgaatagaannaaattattaaaaggacattccacactgaaatgtaactntccagtgtgtgcatattgttcattctgagtgatgcaatgtgatctaccatatgt

SEQ ID NO: 72992 - DNA, 351 bp, Oryza sativa
  unsure (1)..(351): unsure at all n locations
agagcccgtcacagatgacgggatctggcctagtggttgaaggaacaaatgcatgccagttaaacaaagaaagatgcacttgatctgacggctattggttattgatgacatggcttaacctagaggcttctttatagtgttaatgcttgtagtgggtaccaactatataggaagaatggatacacgggcgtgagaagttgtcatttggtttgtgcttctattntccttggtcttacccatacccgttatggcatggtcaaacatctncgatgacagggcattatggatcccctgttcactgtgcctcccttcctagctagctgatgttctgatatgtacccttttgtgatg

SEQ ID NO: 72993 - DNA, 369 bp, Oryza sativa
cttcttgatgccaatcaaggaggcaaacatgcagcttgtttttatctaaccatatactatattacagcatgcatgcttgcatagttgcatgctcaactcatgttcagaagcacacacacacaacttgccaaagtatacacatgcatgtatgacttcttcagttagcagagtattttagccaattgcaacatctgacagagactatatatattcagttaaacaggcaactaattgttcttatcttgtgggtatcatggcctcatggactagcacttagttgagaggcaaaagttggctcactgcaataataaaagggtttgaacatctaccagagagaggcgaaatagaatcatcttgacttgactgatt

SEQ ID NO: 72994 - DNA, 494 bp, Oryza sativa
  unsure (1)..(494): unsure at all n locations
ttgctgagcgaccatatgtctgcccatatgatggtggtgggtatatttacattcacagntacaaattgaaccttcatctaaaaactcagcatcctgaacatggtcaagaagagaatggtatgattgctgcacatgcaagtgagcatgctgtaaatgatcgtgccaatcagtattactatgctgagattgtcgaccttgcaccgaatccaaaaggagcaagacaaattcagggcataagaccctctcatctaataaagcctacaatgtcaagatttctagcgtgttgcctgctgatatcaatggagtgaagaatcagtggccatgtaagtatgaagatgacagtgaagagacagaagaagaccagggcaacaacattgaagatggctggagatatggtaaccagaatgccgatgatgaggaaacagaatatgaagaataaccanacgattctcttttgtccttactatacatctgctgcaatatatgcactaact

SEQ ID NO: 72995 - DNA, 489 bp, Oryza sativa
  unsure (1)..(489): unsure at all n locations
tgagaattttgctagactgtcaggaatcgatccattgaaattattattactatgtatcctggtcaggtgacaaataggacagaaagcatgaaaaatgatgaatcattttgattgtatgcaccaaaagaagagaatgatgaaatgcatatatacttacaacaactggagcttagaaagctggccaagagaagctggtatttctcccaccaaaaggttgtcttctaaatctaagcttgtcaaactagaaagattaccaaattgctctggtatgccaccggaaatcctattaccagccaaggacctgcaagatcatacacaacagcatttcataatagttggagagaatcgacaggagaatcatattgcacttaacctaaccatcagttcatgcaggacacanaaacatactcacaccaccttccaaatcaagaattagtcagtgtaacattggacaatgcatttctctcagttaaaatggtttatgttact

SEQ ID NO: 72996 - DNA, 423 bp, Oryza sativa
  unsure (1)..(423): unsure at all n locations
taaagccatgaatccttattatgcatatctggatctggatcctgcttaacaaacatatangatgagcagtatctgatgtaaatacagtacttcatataatattaagtatcttacaatggttgcaaatatgtatttctccatctgtcaattgtgatttccccgagcaaatgactccgtacgtttaaacactcagtccaactagtcatagcccccaagcatcgggagtcggcctatggacttcccaaacatgcatatgagtgacatgagttcgacattaatggaacacagtttcacgaatcataatttactactcggatacttttgcaattgtaaagagaagaaaataaatgtatcttatctctatcgcttctgattatttcgaataatacttagcaccgtgcgttactcggtccatccaacgag

SEQ ID NO: 72997 - DNA, 375 bp, Oryza sativa
  unsure (1)..(375): unsure at all n locations
ntcaatgccattaagaaatggtcaatcgcaaattatttttttatcttgtgaagtattgctaaataaatgatacaacttatgaatgttttattattgaattatcaaacaaacaataatctttttattattgtccatacaaaggtagatggaaacacaaggtaaaccactggaatcacacacaaattattttttattaatcttgagtaaagtataaggtaaactatacaacatcattggataaacatagctaagatgcatcctcctttgatatgttgtttatttagtaattcttgatactgttgcttgatntggagaaaataccatcatgaatatcgttgccattgttgtattcctctttcatattctaaataaatg

SEQ ID NO: 72998 - DNA, 417 bp, Oryza sativa
  unsure (1)..(417): unsure at all n locations
nngcacaatttatccaaaggatntcacacaattagatacatattgattgcacaatttatttcatttgtcatgtaattcattcaaaccatttataatttagatatctttacttttgtgctactgtttgtacctttaaacatgtcattgccactatgttgttatgctattatttattctttaaattttgccagtctaattttttgagttctgtaagattttttttcaactttgaataccctntgctgaaatcctggctccgccactgcttggctgtagcaccacggnggaggtgactntgcgacagcagtcatggctcgggaaggcaacaacaatggtgaggagagtggatccgccgcttgcaggcggagggagcccggatccactaccgtggggcctttgtcgtcgtcgtcgtcgtca

SEQ ID NO: 72999 - DNA, 459 bp, Oryza sativa
  unsure (1)..(459): unsure at all n locations
tagctgcanaattgacttctcctagctgttgctctgcanaatctctatagcccgctaattagaacgctgactgtgatacatgtaaaaatgcttggtcattgggaacctctagattaccctaggacaagataaataagcgtaagataggtcagtcatgaaacccaagagcataaaattctggagataaattatgtgagcaatataccagtactgtagcatatggctgtggctgcatctctgtcacaggttgaagttctactacctcggctggggagtcatcattcttcttctttttcccgttctgagatgatttctctaagccaccaatangtctaactgaaccacaaatttcctttctcttgagcttcaatgcctttggnttactagccatgatctgatttcctttngcaactaaaatagagaaagntagacttggataattcatattgtcatatgact

SEQ ID NO: 73000 - DNA, 490 bp, Oryza sativa
  unsure (1)..(490): unsure at all n locations
taanagatgatgttaacatggtcacatggagatgaaggaacattcatatacagggcactccattttctggtttctctcaatcttatgtagagttaatatatggacagtagcagtagttacatctttctgtcaactaggcatactacccacgtgttgctcctggtcttttcggcatggtctatattaagatgtaaacttatttattaaatcaattcaatcgtgtcgcattggttcatttatttacacttgttatgatatgatccctgttgtaaaatataagaacttttacgattctaacactatttataatatttatatgagcaattntacagtacttaaggaggtaccatgaggtttaaaaatttagtacctcctagtacttaagtatcaagaggtaccacactataaatagaaaaagtggtagctcatcagatactataaaatngctcagaatacaatagtacttggctcactagttattntctattca

SEQ ID NO: 73001 - DNA, 497 bp, Oryza sativa
  unsure (1)..(497): unsure at all n locations
tactaagcttggagacaaaggacaatttcctttaggcaaaatactcctcatctacttgtaccaaatgctgaataatgcatcggctaagctaattgtcagctcagtagtcggagcgggtggaccatggtggctgctgcaatcctggctaaacttggtagtcatgaggttcgtcaatcggccatctataacagaaactgaattcccaagattagagccgactgtcaacgatgacggagaagaactcactcatcggagatgcacatcatatggagagtacgcctctacaccaactgatgcangagcaaaactatcggctgagctgctcaaagactggttttgcaactnttatgaggggttccaaaaggaatgctcgagttggtttctctatggagactcaacacttctggaaaatccatgggacttcagatntgaagacatcaacaatgacagatatcaaaagcccagaaaaatcttcttatctgcaatcaccccatgca

SEQ ID NO: 73002 - DNA, 394 bp, Oryza sativa
  unsure (1)..(394): unsure at all n locations
tactaagcttaatggccatatccatttaatctcataactgaantactgaatttttatcactactgggctagacaagaaacaggtcatgaatacaagtgtcaaactttgacaaagtaaaacaaaaatcatttactactacatgtgttccttggtgtctgtcaatccaacaacatagatcatctctgtacaagtacaaccaaatggcacaaatccangtgagaaaccgngcccctccctgcttcactcgatgttcatgtcttcttgtgagtgtggttgtgtcgcacaaatnttgacaatntaaccctctgtaaaaactaattntacaaatgaaccgctgccaaaacttatttcaaatctgacctttttgctcacgctaaatcatgtggcgcggaac

SEQ ID NO: 73003 - DNA, 447 bp, Oryza sativa
  unsure (1)..(447): unsure at all n locations
taagctngntcgcaatatgagggcgcanagcgacgcgtggtttgcggactatcttcttctagttgggaatggaaccgacgaggtgaacaatgaatgaaacatangccttccttcngatatttgcttagagtgcaaagggaatgaaacggacctcgaaaggctcatcgataccgtgttccctaacctaaacgataacctgacggacccaaactacatcatatgtanggccatattgtccactcggaatgagttcgtcgatcgaataaacatgaagatgaatgagcggtttagaggagatgtgatgacatatcatagttntgactgagcagaggatgaccctcataactattacccgccaaaattcttgaactctctaactccaaatgggctacctccgcatctgcttaagctgaagataaactgccccatcatngctttgaggaacat

SEQ ID NO: 73004 - DNA, 474 bp, Oryza sativa
  unsure (1)..(474): unsure at all n locations
taagctttatgcatagaagtatcttgtccatcgattgagcgagacgcttactttatngatttttctatctcaggagctgaagtagcattgtattgcgcaaaacaatttcacattgagctatgcaatcatgaagactatcacaacgatctgattaatgcactggacaatgtgtttttaaggttattttggcctactttacataattttgtttatagctgcacttggaaatgtgggatatcattgntcgtgtgattgctgcagcatggatgacaacctgcaacagtccgatgcttggagagagttagttattcctcatgataatggatgtatgtattgtctcaaggctggtgtctgtgctaagcctttcccacaggtagtaatctattaacccctagcatcctcaaatattcatatcgtgaagaattactcaaattgtatttgttgacagtgtcatattgatctatgaaaagaatg

SEQ ID NO: 73005 - DNA, 505 bp, Oryza sativa
ctaagcttaattggagtctgaccctgtaggaattctgaactgatcttctacgcaatgggctttgacctgtggatcccaggatttctccagcaactgccagtacaattgtgcagagagacgagctagcacacacgcaattaaatcgtggcagtacgattcaacgagcggctaagtgttcaatttacgcagctgttcctgtcctacgggtgagcatatataggtgtccgaggccaaggggattggagatgcccaataactttatgaatatttttcattgctcactgtccagatccaatcaaagcactgaaggctggggaacttgagacgtcaagctcaacattgattcggttcaagcccctcataatttgcagatatattgggggggtgggtatcgtgtcatctctcaaggagggtactccgtttgggagcttcgtgggggtgtgtgcattctttgtgatatgcacagcattcccaagacactgacacctaccgatcgatgctgtga

SEQ ID NO: 73006 - DNA, 487 bp, Oryza sativa
  unsure (1)..(487): unsure at all n locations
ctcagcccatctagaagagtccgagttcaatgaggatgcgacatggcagtttatctattaattangcagtatttgntagttcccttttatctttangaaggtgtgtttagtgtccgataaggactttatgttttccttttatctctaggaaagtttctttcttgtcctataagaactagtatttacccatgggtataaatatgtacacccagggttattgtaatcaatctctcgatcaatacaactactctcggcgcatcgccaccctctttaccgaggtttntatttatcatctgacggaacttggcacctgacgcggngctgtatcggctntcgatatccggcgaaggggtaactcctacgttccgccagccctgngtgaattatcnngctacgttggtgttgtcaaagctgcatcgcttcgatctcttggatctctctggtttggntgatatatntgcctacctgatatctcaattctatctct

SEQ ID NO: 73007 - DNA, 498 bp, Oryza sativa
  unsure (1)..(498): unsure at all n locations
tggatggacngcggcagctggatcgatcgatcgatcatcactctggtctaagganacgttcggtgagaatgagatggatgagggggatgcgatccatggcttggcgtttanggttggttgtttgcaaaagcaggaattntcgaggatatctatggagattgaactgattattgttgtgagatcatgcaaaaccatgtgttccactggatgttgtacgagacaagagcctaatatcgtttcctcgaaaaaaaagtagtataatatcattttttgaaagacaccttacaaaaacaggcacaaaacacacgtacacaatcatccctataacgcgctcacatgtgcacgcattaactctataataaacaccnttcaaaactggatgacatatattgagattaacgacgtaactataaacatctcgctgtcaacggatgtcatataccactaagaataattaatcgtatatacgagcatctgcggtaagtctagaaacttgaa

SEQ ID NO: 73008 - DNA, 487 bp, Oryza sativa
  unsure (1)..(487): unsure at all n locations
ctctaataaagaccacaagagaggctgatagctccttcgtccttatcaagggccagaagcgtgaacgcggcaaggggaaggtcgggaagttggcaccggagccaaaaaggggcaaggctgtgacgtcgatgccggtgagcaaagcggggaaggtcgtgagggcgccggcccaatttgagctangcatgctattggtggaggacaatgtgttagccgtgatgggtattgcttgccgagagctacataagcaatacatgaagctaagcaatgccaagcaaaaaatgagggtcatccatagttggacatcacgaccaccaaccgttcctatcatcgcctgcctatataactatagggcttgatgacctcttcgacctttttaggatccggaagttggacactggtcttctaaaatgctactccttgtaagtgcataccttctatacttgtgatatgattggactatatctnctaaataaatagttctata

SEQ ID NO: 73009 - DNA, 411 bp, Oryza sativa
  unsure (1)..(411): unsure at all n locations
aactcagctttcgatacctcgcttggcagacccgcttcttaacttttcatcctcatgcactctaggcgtacacngnttctagcagtgagaggacttcttgcgcacccgggaagggaagactcacacaaatgcattaagttataattattgttaaattatcacatggcagtcctaccaatggcgacaccactatagagcctctgccttacacatcaagaagccactatgcatggatactgccttcgctcaactatttactccgctaggtctatccccatacgagaagtgtggttgtacggggtccgttcatgcttaacttcatggctctggccttaattgaccggggacgatactagtctgttccagataccactctaattcaccgtccgccccagtctaaaatatgtattt

SEQ ID NO: 73010 - DNA, 403 bp, Oryza sativa
  unsure (1)..(403): unsure at all n locations
tctcatctgtggaaatttaaatagcatctctgcacaaactgtgcatagctgatcatctgaatgccttatggccctattgcaggcattatccagaaggcaaggataattacggagtgtttgcaccggttctgtaaggactgcatagaanaatccatgtggcttgggtatggtccctaacattattcacctaaaattctgtcaatgccatttcgaaagaatggacctgactggggttttgaaatagaatgtggtacttactttttatgttaaactgagtgatacattgtttttatagaaatgatgaatgcccagcatgccgcacccttgcaagtagtcattcgttgaaggtttgatcctaatttgacgctttaattttgacgttgtatccagatcttcacaagga

SEQ ID NO: 73011 - DNA, 494 bp, Oryza sativa
  unsure (1)..(494): unsure at all n locations
gggcaccctcagcacanaccttgtctctaaaatgggtctaagataaatcatacataaagcatacacaaacttataaaatgcatataaagtacatctcaactcattntggagcaaactcagtttctacagatccagcaacttatgttctcctataaagcaaaatgaaatagtatacatactatacatcaaatgcctctaaaactattacctttaaaatgactagttntagataagctgaattttagaagttcatataaaattcatcttagattctttttgagtaaacccaagttctgtagaatcaccaaaacatatacttccaagttataaaataaaattatatacttactgtatgataaaagcctaaatacttatgtaagtaataacagagcaactntaaattgtaaaaattgtagaaaattcatctntagtctaaatgaagtgaaccanatatctatagaaccagcanacagtgngcttcaacatagtaaaat

SEQ ID NO: 73012 - DNA, 484 bp, Oryza sativa
  unsure (1)..(484): unsure at all n locations
ctaagcttganctgnnnnaaagagaagtatcaaatcggcaagaggtctcctttgtccattgatatcaaaaggcacctgcatgatgttatgtctctaggtgttggcacacaactcttgattacaccagataccactttgctactggagctgnncnntctgaagaagggggatcggcgcaaagcaatatttctacacaaggcaaattatctggatactntntatgctatctggtatatattagctatttgtgggtattcatggtgcttacactgggattctcaatagaacacattatgttcctatattgattaggtatctagttatgaaggtttgacttgactcatggaaaatatcatccttctttatggaacaatcagtttacttaactaatgatagctggtactagaatttttggattaacactgaagaattcttcattgattccagcttcctcatcanaatattacattagaagcatcttggc

SEQ ID NO: 73013 - DNA, 514 bp, Oryza sativa
  unsure (1)..(514): unsure at all n locations
ctaagcttctaaccgcggcctgcgtgggatggacgacgtcccagaacatgtatctcgttcggntgtcgcagtacacgctcgccggcgagcataggaacatggcgttgttatctcctatgccacagcacgctgctttaacctccttatagcctattaaaaaaacaaaatcactgaataaagtgacaaatgtggagaatcttaatcctaataaaccatattctcttcaccttaatatatataagaatctaattcctgtatagatttatagtactaccccggtgccgtctaatatatgtactacctcctttntctttaatatatgacacaattcactttttcacgtaacatttgatcattcaacctatnttaaaatttagtataaatatgtgaaaggataagttcgaattataatttcttttatgataaaataagtcaaaacaaaataaataatattttatattnttaaataagacgaatgatcaaatatcacgttaaaaaacaatgatgttatata

SEQ ID NO: 73014 - DNA, 328 bp, Oryza sativa
  unsure (1)..(328): unsure at all n locations
aggatcctgatctgaacaacacaccaccaatattctcacctgcaagatctcttgcaagccttagcatcagtggcaggataggtggcctgcctacttggatccaaaatctggaacaactctctgacataactctgtgcgacacctccttgaaagactctgatataaagatcttgtgtgctagtatcaacctgcgcttcatcaggctcttgcgtgagtcgtacaaccagaacaagctcagttttgaacagggattcagaaaccttgagaatctcatcattganggatcatgcaccatctctgatgtccattgtgatgcgagagtggacct

SEQ ID NO: 73015 - DNA, 506 bp, Oryza sativa
  unsure (1)..(506): unsure at all n locations
acacatagattactctagcttattcagagagctatccaacccatgaacaatgtatccattatctcaacttttatcagcgagaaagggctcacactccaaaggatactccaccggacaaaaccacatgaggctacccaaacctataggatgtgcccacttctctcttttcttttgggacttgagaaaactcgcgaaacttgtctagacaagcccaacaaatgcacctatatgcatatgaactaatatggcacaagatcatncacatgctcgcttcatagacccctcttgatagtacggcgcctatctagaaaatccggtctacaccaaacaccaagaccggngaaagactacgaaaacattattagttcaattatacctttgccttgcgccatcaaacattgggttaatgcttgagtcaagatcaacactcgtgaccattcgcttgaaccatgtntatgccgaggtcttgactatcctttgtaagaacttctttcatacaatttgac

SEQ ID NO: 73016 - DNA, 358 bp, Oryza sativa
  unsure (1)..(358): unsure at all n locations
cctctctgtgtaagcaccctttgttaagtcatatactacatatgtcgcgagtgcacgtagtgacaaaattaaaagtaactgctggagatgtaatggctattgtactgtatacaaccattaattctgggattttatattntagctntttaaaacttattntacaaacagaaatntagaaaaacttattctataaatgaaccctttntcttgacgccgagggtcaatgtttcaatgcgaatctcagccctcgtagcagttaagtcttgcagatgtgaagaggatcggtgtcaaagagaatgtaaattttttataaaaggattagaatgtaaaatttttcttcaactagaccctcgacaac

SEQ ID NO: 73017 - DNA, 290 bp, Oryza sativa
  unsure (1)..(290): unsure at all n locations
atatatgtccggcatgcatgtatacatcaatgcaccagctaacctttcaaatntcaattaatatatactccatggacaatggtacctggattccatgaattcatgaatttatgattgataaatagtaacatactaaaatgtatataaataaaatcaaatatctctgattagattaaatatctttctcctaaagaatctttcaacgcctctaataagttgaagaaaattccacaatattttataaagaanaaggcaaatagaacctcgaatccataaatgattgtatgatg

SEQ ID NO: 73018 - DNA, 484 bp, Oryza sativa
  unsure (1)..(484): unsure at all n locations
ntcagactntggtctggcaaaagcaggcccaactggggatattacccatgtttccacacaagtcatgggtacccgaggttatgcagctccagaatatgttgcaacaggtcaggaatgatcttacttttgagttcatataattcacaagttggtacagatntattaaatggcagtctgcttactacccttgatgttggtcacttcttcaaaattatgttcaatcagctagaattagagtagtttacataaaaggaaaagaagctagaattagagtgttgttaaaccaccttgttggtgctaagcttttattttggtgacatctaaaatgtacagtagttntgaattaacaaatcttggtttgccgtatctatttcaccaaatgacatgctgactggtattgtactatgaccgatagcaaatatttgtgaagatcctctatttgtagtatcatcatctcattggcatatctactaatggcattttc

SEQ ID NO: 73019 - DNA, 479 bp, Oryza sativa
  unsure (1)..(479): unsure at all n locations
tatatatccatgtgttctatgcttgttcatacatatatttggggcgtttgtcatcaattaccaaaaagggggagattgaagcatctangcccccgttggtaattntggtaattaatgacaagcactaattatggactaaccattgtctttgagctatatatnttaagttaggaccaagtcatatgtgtgcatggatgattattgatggattaaaattgacggcgcacaagctagtgcttttatttagaattgatcgaggtgtanggcgatcaaatttgctagtttatttgttagtttcgccgtactatcaggggggtaatgacctatcanagagatgaatttatatttcacattaggtcattatgcatttaaatntgtgctcacactatcacaacacacacttgctatatatattggtctctgttcactgggttccggctgacaggggcagcagacggcacactgcagctgacgggtgc

SEQ ID NO: 73020 - DNA, 433 bp, Oryza sativa
  unsure (1)..(433): unsure at all n locations
tctgcagattggttcagaacatttgaggcttaacatagctattctgctggctcacatccagccaatattcacatcaggaaaaacaaaatggaaataggtaaacgctgatccatagcagaatcctaccggtgcagagatgctcgagtgtaatcaaacgagaattgatttctttattgatttatgttttcaggtttgttagctggggtgttctcaagtttgttaatcggctgatagacatatttacaagtacaatgcaggtgaccgaccgagcgtgacatcctaataatccccacataattatgtctcggcagctgttatgctgtctcaaatccggtgataattgcagtgagttcgacgganaataacataatggcgcacgaggcacacttgatccactaacacaagtacataagactcgttggacaatcacctg

SEQ ID NO: 73021 - DNA, 249 bp, Oryza sativa
  unsure (1)..(249): unsure at all n locations
atggtagacgacgtattgttgacaatgagacaccctgtgatgaactttgtgatatcaagatatggtggcctagtcttcaacgaggcgtgccgtgataatttcattgatctcaagatataggtcccagttttttgaggtgcttataggagtagtgtattcgtgcgtgtgcgtttatagggatgagtatacgcatattatgaccgcccgctggttctatatatatngtcatttttttaagaaaagtcatca

SEQ ID NO: 73022 - DNA, 412 bp, Oryza sativa
tctaagctataggtcactgtgctgcatggacacggaatacttctttgtttcttagtctgcggtatgtagtggtgcttggtccttgaagatgtgaaaacaaaatatgtataggatagaaacctgaatacgatgttgcgttttcgcttccaggacatttcggcatccagctactctacccttattttgcccggcggtgctgaaactaatttatccctgaggtgaaacggcaacttcattgaaccaacgctgtaagagattcggatggaatgtgtcttgatgatgacacaccttcaggacattaccaatgcaaaggacagttaatctaaaagactgaactgttcgcatcttaatgaatactgcccttgatagagcttacaggatattgtagcctattcgaaactttgggtataat

SEQ ID NO: 73023 - DNA, 412 bp, Oryza sativa
  unsure (1)..(412): unsure at all n locations
gatcataccaacatgtggggaactcgttgatcgatatgtacacgaagtgcgtggagatggatgaggctgtcaaggttttcgagtcgttgcccagtgtcactattgtgtcttggaacatccttataactgtgattggtcaaaaaggtagctgtgcaaaggcagtggaggtacttagcctgatgcaagaggctggctntgagcccaatgaggtcacttacagtaacttgcttgcttcctgtattaaggcaagggatgttcattctgctcgtgcaatgttcgacaagatatcaaggccaagtgtgacgacatggaacacacttttgtcatgatactgccaggaggaacagcatcaagatacaattgagtttgttagaaggatgcagcatcaaaatgtgcagcctgaccggactac

SEQ ID NO: 73024 - DNA, 459 bp, Oryza sativa
  unsure (1)..(459): unsure at all n locations
ngaaactngtgatgaatgcacaacaatgatgagaaaaatntttgtgtttcatattataaacgtactctccttgagaaattagaacatctaaaacaaggtgacaaaactgtgcgggagtactttcatgactttaaaatttgtatcacttatagtggtttaaaagaaagcaatgagaacacaatgactagattttttagagggcttaattctgatattcaggctgagcttattaatgtgacatataatcatataggccacttgttcatgcttgcttgcagtgttgagagcaatattttaaagaacccaagggagaaacaagctatgcttgtgcctcctattactgacacactttgcagggagctcagaacattcaccatgaggagaagagcaatatgctcgagatgtcatctccatcactcacgaaggaagaagagaagactgatgcacctacattatctg

SEQ ID NO: 73025 - DNA, 512 bp, Oryza sativa
  unsure (1)..(512): unsure at all n locations
tgaagcctcatttgtgtggtatggtaaccactcaatctgcattagttgaagagatgtcgttggttagtatctcaattaaagaagtaaatgtctaactagaagtgatattggaagtacttacatgttgaggctgcaagcagtccatctcattgacataatgcttgtatgccacatcccggtgagcatgtgcagtggcagtactctcaaaaaggtaggccactgtcttctccatgtctggctcattgtagggccaacgagtgaaactntgcctccacttaggccttccaaccggtagtcttaaccacatccacatctgaatcaatagcacacaaccactcatgttggatgatggtgcctgacgacaacaggcctcacagagctgtctatatgtccacgccaactgaaacggcccagatcaccaatgttggcgaccaaaggaatccatatcgccgaagcaatgtcacccncagcatcangaaacagaacccnctccaacaagtgcaagatgtatg

SEQ ID NO: 73026 - DNA, 454 bp, Oryza sativa
  unsure (1)..(454): unsure at all n locations
tgatcttacctattagggcaagtgctctgacgagtgccctagatctctgaaactgatacttcgcgccatcgtcgcaagagacatttaacttcacccaatactatacacttggttagatggtttaattgagcatttctaatcaactctgccatcggttgtctgtatttttaaaagttgaccaaattgatcagccaccatgtgtcccaatcatttcatactgattnttccagatgccctaatgcattggagtagtactatcacttttcagcanaatgattaatatatntcatcctagattacattntactttgacttcactacaagcgtactgaataaatgcagttcttttgctagctgtaagccgcagtgcaattactcttggtaattcagttctcttgctatataaccttctgagctcccaataatgttaatgcacaccatatatgcatggcat

SEQ ID NO: 73027 - DNA, 436 bp, Oryza sativa
  unsure (1)..(436): unsure at all n locations
ctcagcttgataagtataataatagtatgtgcagtgttactacacacattttagtatgcgtcttttntgttcgaggtgaaatagtatgcgtcttatgttcataaatatatatatttacatgcacagattagcagcgcaacgttttagtgacttcgtatttatgtacgctctaattcatcacattatcacagattcacagtgaaataattttacttatattttttcatcataaagaataaaaaaagatgtaaaatgtcaaatctagtactagttgcgcacataatagatgtttccgtttatatttcacagcttctctactgttctacagtggtatatatactggtatctatcagaccatcactagtattatccctggagaaatgattaatttgagctacagcattatctcgttccacactagcttgggtattnttct

SEQ ID NO: 73028 - DNA, 383 bp, Oryza sativa
  unsure (1)..(383): unsure at all n locations
cacccgatcgaanacaagccatacgagaagaacttgacanacttctcanagctggcttcattagagaagttctncatccagagtggcttgctaacccagtaatggtacgcaaagccaacgggaagtggagaatgaacgtagatttcactgatctgaacaaggtgtgtcccaagtatcacttccctctacctcgaatataccaacttgtagattcgacagccagctatgagttcttgagttntcttgacacttactccagctaccaccagatcagcatagccaaagaggacgaggagaagacggcattcatcactcccttaggtgtgttctgctataccaagatgccatttggactaataagcgcagacaacacatatcagcgt

SEQ ID NO: 73029 - DNA, 470 bp, Oryza sativa
ggtggtagggttcatcaaccgcaagagctaaccactccttctctatgttattctattcatgacgcaacttccatgaatttaatcttacttgctctggtgaactattgacctacccatttgcctatttatgtaaatagctcgttgcacacattgcttctgatgcaacccttatgccattgggccactttgctgaagcatccgatgctcatagttatccaccaatctgtgctggcgactacgtcgaacaggaactatcagtaatcaatctgatatgaaagaatggattctagacgttatgcagatttctcgtttaccttacaattcatattgatcagcaaacggaacaacagtccatgctgatatgtatcttcattggctgaggctcacatgctgaaactgttgggttgttccctgcacaagctgtacatgtccatgcttcaaaacctcttgttaagatagaattgtctctc

SEQ ID NO: 73030 - DNA, 436 bp, Oryza sativa
  unsure (1)..(436): unsure at all n locations
cagtaatgtccttaaattatctattatttgaacaaaacatgtgatataatctttacttatgccaaaatgttgatccatttgtactttatttaagtcatctacctagatatcttaatattgtgtgaaaactgantttatcagcatgtgttntatgcagtgggttaagtgccattttgttaaatgggtggatcctgaatgggatgagctggccgcaaaaacaattttatatcttagtgagagaaacattgtgcttcagaagtcgctcgatgatgtgaacaaaagttggatgtctttgtacgcgaggaagatgcgcgaggatgacctctggagccgcaagtttaccgatgcaaggatcaatcatgtcaatgacctagataagatcaagtcaattggtgatgacctagccaagatcaagttaattggtcttggtgtgatg

SEQ ID NO: 73031 - DNA, 514 bp, Oryza sativa
  unsure (1)..(514): unsure at all n locations
tggacttctcttctgcacaagctgccgataggctgggattgttgtttcattatccttgcgctcccgacggtcggctagtcttagttaggctttctcctgatgctgctcaatgtagacaggcggagtgaggacatcggctagttcatctgggattatggctggaacctcatgtaaccgagtcctaattggcccacaatttaccactaagctgtctaatgatgatgcctctagccgatgagagatgtcttcaagggttctcttcacattatcggacaatggagctaaagacttgctagtagtgtcttcttctgtttcttcatcaagataatctttaatatcgaaagagaacagatgggcttatgcctgcaagaaggatatctaaagattgagtctcaacatgagttatttggtcgattcaagtttcttatagacaacacttactgcgactgtatgagcagctggntgtacttcttcttcaacatgataaactcctgcacgcgatggagtgtgatcg

SEQ ID NO: 73032 - DNA, 461 bp, Oryza sativa
  unsure (1)..(461): unsure at all n locations
cgtacatagcagagccaactgttgctgaaacgatataagctactactccctccatcccaaaatatataacgccattaactnttttaaacatgtttgtctgttcgtcttattaaaaaaatttaaataattattaattcttttcctatcatttgattcattgntaaatatatttttatatatacatatagttttacatatttcataaaagtttntgaataaaacgaacggtcaaacatatttaaaaaagtcaacatttatggaacgagggagtagcatggaatttctcgcctcagccatgtatccaaaaccgttacctgctcatgtcctcgatgccgatttgataattgatactgtaggtcctcaagttntatgtctccacggctatgtctgtcgcagctcttgctgagcaatgaattgtgtcatatatacttgcactggaatcttggatacctggacaaatg

SEQ ID NO: 73033 - DNA, 486 bp, Oryza sativa
  unsure (1)..(486): unsure at all n locations
tggctcggctggangangaagaagacatatatatatgggtggtgacttagtcccagttggtggtatgaaccggggctaaagatcgccgggatgtttacaccaaccgggactaaagtatctttagaccaaccgggactaaagatcccgagggggcctgacaggccctgacagcatttgaaccgggactaaagatcatctttcgtcccaaccgggactaaagatcanatatgcccgttaccctntttaaccgggactaaagatcatctttagtcctggtttttgttgcaaccgggactattgtggaattagcccgaccgacgaaagatggtttctccaccagtgaaccacagtagacaaagtctctcctaattaaaataatattaagtaatatgtcctataacttaatgtganatactagagaaagaaatcaattaagacgcatattcgattgtgttttattactacatggaatgaaatatgatatgt

SEQ ID NO: 73034 - DNA, 411 bp, Oryza sativa
ctaagcttcaagactggtcacaagtcgtactagaatcatagcattcatgtcactcttcttagaaagcaagtctaatgcgtatatatgtgtattcatcacaccgtaatcgaagtgacacgaaagtaatcattagacaacatagccatcttatagttgagatagacttataattagttataagtattgttcttcatatagctacggatgccagagatttctagataatatatggatatatcaccttgtgagcttagggcctcatcgattggctttttcataataagacaaaacggcttattagagaacaaaaataagtttgtaggtaaaacttttatatatgtgttctcggtgacttagaaaacaatgctgaaaaagaaactacgttgaatatatctcaaaatcaatgttaaa

SEQ ID NO: 73035 - DNA, 467 bp, Oryza sativa
  unsure (1)..(467): unsure at all n locations
cgatagctccccaccacttgtcaaaggcaagaagcgtgaacgcggcaaggtgaatgtcggtgagttggcgcccgatccaaaaaagggcaaggctgcaacgtcgatgccgctgagcaaagcggggaatgccgtgagggcgccagcccaatttgagctaggcatgccattggtggaggacaatgtgttatccatgatgggtattgcttgccgagagctacataagcaatacatggagctaagcaatggcatagcggaaaatgagggagtcatccatagatggacatcacgaccaccagccgttcctatcgtcggctgcctatataactataggctntgatgacctctgtgaccttntcangatcacgaaagtggacactggtcttctaaaatgctacaccttgtaagtgcataccttctatacttgtgatatgattggactatatcttctaaataactcagtctaatac

SEQ ID NO: 73036 - DNA, 488 bp, Oryza sativa
  unsure (1)..(488): unsure at all n locations
gcttgcactgcactcttgtgcntccatctncgagacgagacanagatcatggcgactcccaaaccctaaatcccgctctcactggagagcagaagcaagtaagaggtggagcaatggcgcggcggagcaaaggtaggcaaggcgccgccctttccccccgaagaatttgcctgcttcactgtttggatctggatttggtttggtttggtttggtgcctctcaggcggcggcgcggagggggacggcatgcggatgcangtggtgtggcggaagggcgcggtgcggctggtgctcgtctccgccatcgcctgggcgctgctcgtcatcctcgccctcgccttccacctctggtcctgcaactccgacgtcccctttctctcaagtgctcccttctccctccccgcccgtttcatccatcacccatggaagcgacagttccatcaattngctcgctgtgtctctacanactagcagtagctcataacagt

SEQ ID NO: 73037 - DNA, 438 bp, Oryza sativa
  unsure (1)..(438): unsure at all n locations
aggtagagcatacgagggggactctggaaccgattaagaanactatttagctataactcacttattatcatcatgtattttaacatccgtgttagcttaaactctatcgaaatcgaagtaaattaaacaagtgctgcataatgatcttcatgcttttgccaaaaaaaatcttgctgctgcatgatgatgtcaagggtgatagcgtgacgcgacgagaaacgcgatctattnttggaaagctntgctgggggtagttcctctcggagtagtattatagtatgaggctatgagccaaaccaagccgccgcgagagctcatctttgacgtcacgtcactgcggtgtcgccggtgatgagatgacgaagcggatatgcatgcgaaagccgcgtctgcatttgaccgcgtcgcgcgcgccggggaatctgggacaccgagtcg

SEQ ID NO: 73038 - DNA, 513 bp, Oryza sativa
  unsure (1)..(513): unsure at all n locations
agcgacctatgatactcagcttatcaccatatacaatctattgcatataagttgtgtactgttcaacttattaatccaactgaaatttattagtgatcctctagattcctggggaagttaacaagctaccttagtgttccatggaatcgtgattgttcccttcaggggcacgcccaggattntaagattgggtattcgaaatggaaagggggtaaaaaaatttttttacaacatgagcacaatatttggtacgtataatcaacaatatggcgacaaaactcgatccggtttctgaacgaacacgctacttagccccgcaaatcgcagcaccacgtctcatctggttatcaaccgtgccgaaacccggttaatctcgccgagaaggctaatccctacatgcgaatcgaagaacacaagcaagaacgagatagatngcaacacaatngcatatgaatgattaagcactcgaatttggggtccacaaaccgatctagcggcgatactattcttgac

SEQ ID NO: 73039 - DNA, 467 bp, Oryza sativa
  unsure (1)..(467): unsure at all n locations
tatntagcccatacttgttgacgttntagacaggagtacacatacctatgagtgattaattagtatgcctacttcctgttntactcctaataaatatggttntgaggcataccaaatcataacctgctcttggtttgagtggccatctcatgcaaaagtgaagctaccaatcctgagttcgattcttggtggccacattnttttgcatggcactgtggacgcgtgactgttggcatgcatgcactttttttcaggcgttcatgcgcgcagtcgccgggaaagaattttcactcgcgcgctcgctacaaaaattttgccaagtgcgtttgccgccaataactcaaatattggcgctgggttgcagcagaatccactttgccatctncatctatntatgctgtgcaatactagctaagttgacgctccaactccctacatactccatcttgttaacatgaacttgaaca

SEQ ID NO: 73040 - DNA, 432 bp, Oryza sativa
  unsure (1)..(432): unsure at all n locations
ctcagctaagatcgtactttctttgatttcctctgtggagattctctaccatgatgaaattatttcctcagatgtgctcatacatcaggctgcgtttntctctttacagaacagaaggagcatcagaacttgattcagagcgtgaagaaatcatctgcaacggtgcttaagttctatggcggtaccgtaatctgtagccaacacaagaggaagcttangtgtcttgagctatgccctgtcaatgatcagcttgttgctactaggtatgtntcatgggctggttaatgtatgccatcaatgcaactgattacggattagaggttagcgatgccaagttctccgcaaaataatgatattccataacaattcagtcaaatttcttggtaatttggaaagaacgaccgatggaacatgcacagagaaccaatatct

SEQ ID NO: 73041 - DNA, 470 bp, Oryza sativa
  unsure (1)..(470): unsure at all n locations
tcctcatatgctctctctttctcccctcatatgctattagcatgatgagatctggatgtgcaaaagaagggtctaatcagagtcaacaggtgacacagggtggtgagagattgatacaatttcataccaacaatatcgcgcccaagctatgagagcaataaatctcctgcaatttcgatcctaccacgtaccaaaagtatgttctcaactagtcacgaggaaatcggtaattgttaaaatggtaagatgacttaaagctacttgatgaagtatgtgtcagtagaattgcggagctaagtctggtcttagaatagacggtcagagcggttgtgctttcggcaatagcaactatgaacctgaggaatgccaagatgcccatgggaagcaggctcggtgcaagccctgagatgattgagaggaatatgtcactaatgctcttactcatangtgaaaagactggaccagtgagt

SEQ ID NO: 73042 - DNA, 409 bp, Oryza sativa
  unsure (1)..(409): unsure at all n locations
tcatgtcgaggcccttcagaacagagcaagtcctgagactgtttatgtgttcaacgatgccctttgngagagcctggatgctgntgtcaatgcgttggacaatgttaccgcaagaatgtatattgactcccgatgtgtatatttccagaagccactcttggaatctgggactctgggtgctaaatgtaacacacagatggtcatacctcacctaacagagaactatggcgcatccagagatccacctgaaaagcaggcgccgatgtgtactgtacattcatttcctcataatattgatcattgcctaacctgngctaggtctgagtttgagggtttgcttgagaagacccccactgaagtaaatgccttcctatcgaatcctggtggatatgcaactgtagcaagaact

SEQ ID NO: 73043 - DNA, 406 bp, Oryza sativa
  unsure (1)..(406): unsure at all n locations
tcaaagggtgggggtacaaatgaggaagatcgcgtggaggtatgtgttttanatgtgatgcacggatgcggggaattgggtggaaggacagtctttaatgtggagtcaggtttgacgggcgtgaggcaagaagtggatggaagtgggatctatattagaagagataaatacgatatttctgatctgatacccgcggacgatccctagcctagcttggcaatcccttgaatatgcaatgcattttcccttgagatgaaatngctctttctcaaaaaaactatcaaatcaactcacgcatattcccttgcttctgttaactacgcatatcttctggttctatacttgctagctagcaacctcttatcaaaatatatagtaaagactgtgctgatcgcgcaactgatca

SEQ ID NO: 73044 - DNA, 470 bp, Oryza sativa
  unsure (1)..(470): unsure at all n locations
tgtgaagattcctcataccaacatgggctagcctccgatgcctaagccactccgtgttggacttagccactaagcatgtctcatgtttggctntacttgaggaaaaatccacaaggtaaagctttcccttgagaacacccttaaagactaccgaggaatcattccttctatagacggtcacatccacatcggtaaaaagataattgtaacccatagaacataattgagaaacggacaaaagattgtagtttagagattttaccaagagagcgttggcaatggaaagatcattagagattgcaatcttacccaatcccataacatttccctttccatcgtccctaaagactatgttaatctgtgaagtgccatttggatcaagaagtgaaaatattgattcttnctcggtcatgtgattggtgcatncactatcaatcacccaacttctttcaccggagacataattctac

SEQ ID NO: 73045 - DNA, 470 bp, Oryza sativa
  unsure (1)..(470): unsure at all n locations
tgacgcaaccnctacctggcgcgccaactgtcgaaactagatttcagcaataataaaagggggtggctatcaagctaggaaagtgtatgggtttgaagacaaaaggatttatacaggttcaggccttcttataaaagaagtaataccctactcctgtccggggatgaatccgccgagtgtgttattgattgtatgatttggagaaaatccaacctctgcccctagaggcacccggaccccccttatatatgggaaggagtccgtattacaaaagataatctatatccctaacggaataggaagatacagataaaacacagtcgtgaccgactaagtctcanggtgtttccttgatacacaagttaagaaacaaacccgagatacaaataagatattctatctacattangtatcctgtacccagtccanatactatcgccgtgtagatatgggatatccatatatctcac

SEQ ID NO: 73046 - DNA, 440 bp, Oryza sativa
  unsure (1)..(440): unsure at all n locations
tactcagctagacaatatagntgtttctggtatattgatgtttcaatattatttgacagtcacatggtttgtaattcttgccctaagataattgttgtacagttagcaaaagatacttaattttgacactaaagttcatttgggatcctcagtaataccttccattgtttttaaggcgtcgccatagcgtcgcgaaggcgcatggcgctctgctggctccagggcgtcctgacgacataccagccagtgtatggcgaccccaatctcatgccaggagagaatagggggattatggcgaccccaatcccatgccaggagagaagagggggttatggtgacccaaaacatcaccaaaagaaagaaagagagagggagagaggattccatcttatctggaaccctagcagcagcgacgacgtctcagtatccacgactcccat

SEQ ID NO: 73047 - DNA, 447 bp, Oryza sativa
  unsure (1)..(447): unsure at all n locations
gatgggttattttaggattacaattaagtaaaagttagataatagctagctagccctgtactcggaagtcaatcgctgatgttgggctgccatagcctgaacaatgtttctattgctgatattattgtacattatgaccttgcgatataactaatatagttggacgtanaattttaaagacagtgaatccttatattgtanggtggatagagcattatctaagtcagtcttccacgggatatatatatctccagcaccgcgcacgtgcgcacataaacgccctgcgcggtgcggcagcacgcggtgaacgaagctggtgagaattgtctgcaccttaccacccccaacccaaaaaggcacgtgtgtgcagatagaattatatatagcttgcaagctagctatatgacgtggtgcgcgccacgtattacatacagtcgacaccgatcg

SEQ ID NO: 73048 - DNA, 418 bp, Oryza sativa
  unsure (1)..(418): unsure at all n locations
gaggctcatatggactatattgtatactagaatatgattagagtngagtagaagaagtcggaagaatttcggtgttgtcggtaatcttctcctatatcttttattcagtatattactctgaatntaatataatattcttcttgactaatttagatttattttgtgagaattatctcttggttagttcctaaatagtatacgggattattggtcactataataaactaaaatatagtgattgctttggtaagttataaacactaaagtagatattaattgcttagacgtggtgtttacgtaatcgttatccagtaattgctgcgtatcccatagtacgtttgaggtagggtgtagaggtggtgacaaccctcgagatcactgaatcctccctggtccggtacgtagtagagtgacatct

SEQ ID NO: 73049 - DNA, 453 bp, Oryza sativa
atgggcaggcatatcatatgttccatgtgaaagcaactataataatttttttaacatatgatccatgtcaaaaattatgtcccatttctggtggtggtggtagcggttgttaaagtcgtaaggatgagttcataccatatatttattcatatataagccatcagtcatcactaatcgttgcaagtctgtaatccctgcgaacgtgaagatttaagtgcaattcgttttatggctaatcactctatgtagaatttaaaaaccttgattccgtattttacattttgtcatgaagtatttgcacaataattgttttttttaaaaaaaaaaggtgcatgcactactgttgctacagtcgatgtatctcattatttgccacgtttgttccacccctttcaatgtataaattaatccatctgtttcatgcctcaatcatttggtcacaccacagctatc

SEQ ID NO: 73050 - DNA, 411 bp, Oryza sativa
tactcagctaagttcacgttagctatccagaacaaactttggattgtcgtttagccctttgccaaacttggtctacttcgctaatgatctcggcatctgcttcatcagttccagcgatcactttcagagaatttgtcagttcggccaagtgtttgacagagaattttagactctatctctggtcttcagtggctttgggcagaacgacaagcttctgttcttccattgcaatctgtgcattgcattgctctaactcggctaggagttctatctttcgagcatttagccgatctatgttagcctgtgtagagcttggaccagcttctaattcatcaagacttgccttttcttcaatgatagaaaccctgctagcttggatggttgcttcaagatcttttcttctcgacgatc

SEQ ID NO: 73051 - DNA, 292 bp, Oryza sativa
  unsure (1)..(292): unsure at all n locations
acgacaagatcatcttaagctngccaaggtgtcaaagattttgacaatatagcagnttttattgacaaattttggtagactgatacactataagaaacgtttatgggtctttccgactagctntacaaagtggtgggttttggagctagccggtctggattcgaagcctcgcttattctatttatttgatattagggtcattcttaataattgcggtctctgatacactaatacactatgagtatatgactaacaaacanacaggtacatatgccacttaacaatcctcaag

SEQ ID NO: 73052 - DNA, 357 bp, Oryza sativa
  unsure (1)..(357): unsure at all n locations
tccaagatcgatcaatcagttggcaagacggcgaacggcgacttcgttctgtgtctgggctttggaacctggcgatctcctttcncacctctnctnctacctncaaatcctntgcttagcttctagagtcttttagccccttgtatccttccaccttctacctcaaaaccttccactatagtaataaaaatcagtggcttcttatattggattcgcactgctacnttctgagttgctattgttccaagcgagagaactgggatcctaacataatcttgaccatttagagtcctaggttagggtcataatgacaagagggtcagaaaaggtggaagatagagggcgggggggagtctc

SEQ ID NO: 73053 - DNA, 430 bp, Oryza sativa
  unsure (1)..(430): unsure at all n locations
tactcagcttgtgcaccttaccagaagtagcttgcatgaacattgtttgctgagctangaaaactctagggaggtaatcatgtctatccttatatgtatgggtcggatgaagaggatgatgattccgaaatagctgcagccgagtgggttatgaacaaacaggttataccgtgccaatgggtgaagaactcatgaaaagaggagaggtatgactttgacataaccaaggctgataagatatttgatttgctacttcgagaaaaacagattcaacttcctgccggacatacaattccatcggctgaagagttgggtaagaagaggtattgtaagtggcataattctgggtctcatacaactaatgactgcaaggtcttcaggcagcagatccaaacggctattgagggaggaaaaatcaagtntgatgatt

SEQ ID NO: 73054 - DNA, 502 bp, Oryza sativa
  unsure (1)..(502): unsure at all n locations
tctgattgcggngggttgcgtggactgacgtgcttgcagcttcttttctcggatttgggcacttgtcggcgaaatgacccattccttgacaattgaagcaacagatatcttcccggactcggcattttcttttctcattntggttcctctgtcctggcactggagttaggctgaagctggactcttggcgaggatttgtgtttccttgatgcttctctccgtgggaattggcgggttggtttgccaccttcttcgtcagcagaaaactgaatcgacaatcttttggtacatgatcagttccttcacaaaagaaacaagtgatcctgctcgttggacacctatcgggtggatggtcttcctcacaatgaacgcatgtagaggcacacgagctggcaacatgaccgatttctccacaacgagagcatgccttaagttctactttattctggttgaaacctttgggagaactttcatcttcatcatctgaggagaactgatctga

SEQ ID NO: 73055 - DNA, 448 bp, Oryza sativa
  unsure (1)..(448): unsure at all n locations
ntctttgtgtgctactttgtgggtctgggcgctngggatggttcgcgtattctgctgcgaggacttccgcttgagctttccttttcccattattgcgattcttcttcttgcttgactcaggtgcgtccgtggctggtttcttttctccctcggtcttcggcttatcgntcttgcgtcttagcgcatcatctgcgtgggcgcatcgctcaacaatctcgaacaatctccgagtggttgtgatgcgtcttgtcgccaactcctgggtagtatagcgatctctgacaccggattngaaggcgcgaattacaaaagcgtcggtgatttcaaggattgtatttctgcactcgttgaagcgccgaatatatttcctcaaggattcacnnccggtctgtgtcaacgcgtgtaggtcgtcttcgatcgcgtggcgcttgtanggtcccttggaaag

SEQ ID NO: 73056 - DNA, 500 bp, Oryza sativa
  unsure (1)..(500): unsure at all n locations
cttctattaggacctatgaaactaagctaaagnttttccttntgagcggagagcttagagttgaaactatggatcangcaacagcatgcatcatacataagaaaagacaccttcatttcagaatccatctgtagagctgcccttttgaactcggcgattgacttttgcaggggagatgagctgacaggcactcncagcaatctcttatttatatcgattgcacccttctgcgaattgagagcaaccattatgacactatgattggacttctcataatgcatagaagttgcatggttttgaaaaagaaaatcattaaatctgtttgagaacagaacgataagttacctcaagctctacagcataagtgctgtagttgaatggtaggatctcctcatcggaaagcctcagggcgacaagccctcacatgcttgccgctgcaaagagagagaacgttgactctaacatttcgcacatggagatacattaacatgatccgtttc

SEQ ID NO: 73057 - DNA, 151 bp, Oryza sativa
tgaacctgcaggacaccaacatgtgcggcataagctaccactggccgagcagcgaccccacccactggggcgccagcatcatcacccgcagtggccgcacagaaatcccctgatgatggctaccagctgtataccctggcagcaccaccac

SEQ ID NO: 73058 - DNA, 304 bp, Oryza sativa
  unsure (1)..(304): unsure at all n locations
gacactttatctgattgtggcctcattgacatcgggtttgatggagacatgtttacctggcggaataatagccacacagaagagggctatattaaggagcatctggaaccggcggtggcaaatcatgaatggagggtgaagttttcgagctctctggttgtcaatggggatccgaagcactctgaccatcggccagtgatcattactacatgtgggggaaggaagggggtaatgcatatgggatcatcaagcttcaggtntgaagctgcgtggctggctgaagagaattgcacggaagtggtga

SEQ ID NO: 73059 - DNA, 511 bp, Oryza sativa
  unsure (1)..(511): unsure at all n locations
actaagcttttattcctaccccaacccacctgctatgcaacctccatattcctgttccgaattgaaggcactanacactgcttatccccctacctcagaaaagcccggtcacccatctctcctcccatgaacaatgtgcagctggagaaatcatcgtgcagagtatggtagaccatgattaccatggccagccaaaggggacccacaggcaaccacagctaaccacatgataaggggaggcttcgagaaactgccactgccagcaccagtagactgagccagcacggaacaggactatttgggcataggaaaacaaatgacagagaatagtgagagaggaaaggaaacaagataagaaagagtcttgtaatgtggacccatagacagttttctagtttatggggtaaagtggatgtatctgaacagttcatgggtaaatacactttgttcaatcttttaaagtaccctccctggccttaacagatgagcccctcgatatcaggaagctcat

SEQ ID NO: 73060 - DNA, 448 bp, Oryza sativa
  unsure (1)..(448): unsure at all n locations
ctaaccattgtttgtctgcctgtttatntcaatgaaccactctcatctttacagaaatgctttgaagatcttgagtattcctaccttattgatcgcgcttatgaatgggggaaaagggtatttcttcttcctttcactatttaatatgttcatgggcatgcatgtgcattttcaaataacattccaaataatagcaaattaagagtttgaaccgtgtatcctccaacttgcatctatatgtttatttgatggatatacttccttctacttacgtgtagcatatatccaattntctgagatcaatttgctggtggtctatacgtataacacaattgggatctctattatntagcaaacatatttgactgcttagttcaaatgtgcttgcctttcagaatgcctgtcctacagttgcaccaccagatgccatcctctttctttgtctatg

SEQ ID NO: 73061 - DNA, 522 bp, Oryza sativa
  unsure (1)..(522): unsure at all n locations
ttacggacactataaaactaagcttatatagctgtcccgctgactctcttatatagtcaaggtgctgttngngtttatcaagcaattgattggatacaatatcattgctttttgccacgtaagtgtgcatttntattgaccaatattatggcttatgctgattatatattatggtcatttttcacgcgggtggtaaatcctttatgagtttacttactcggatgttataccacatatgccatatatntccaggtgtggtgaaaccatgtgtcttttatggacttaagcacatctgttaaagcagtgtgcgcatggcgtatgcccaatactttggaaatntctttattcacagcattcaagcttctttatagatgttttgctatgtgaactttcaaagatgttgtcaactctatggtgtacgcatcatattttacanaagcagtggtatatcacttcgatcatgttatttggaggattcacaccgcatatgctatatattgatatcaagtcacttggttgata

SEQ ID NO: 73062 - DNA, 473 bp, Oryza sativa
  unsure (1)..(473): unsure at all n locations
tcgaagaaggggttgtccacatgtatgaacactagatttggtacatttgatctcaggngaccaatgctggcgtgttacagatctccttgatcctcgtatgccttgattttactcaattaaagtgctgtgttgttatctacccgtatgcactatgtctgtaggactatatgattgtagcgaaccaaaattagatatgcaaatacaatggatgaatggtcgaactacatagtgcgtatggatcagcaaaataacaaccatcatatgcttaatatattggtgggttccaacatgaaaatctatgttcccacattctagcacccttccacttaactaagaaaaagatgggacaagatatttgaaaaggaagtactgaacccttttgaccaagagaatctaacagcagtgacagactagatcatacatctggttctatcatcaaagtagattaactgtacccaaattctggacaggaa

SEQ ID NO: 73063 - DNA, 337 bp, Oryza sativa
  unsure (1)..(337): unsure at all n locations
tgccttctgcgcncactcttaacatggcacgccctccctgtgttcttctaccacgccgagcacttggaagatggaagcgccggctggctccgacgaccgggtggcccatccggccatcatggaggcgctcgggagaagcatcgcgcatggcaccttgtgctggagggcgacccagggtgcccagtggtggaacgtgtcggcgatgatccaatcaggcctctcgccggcggcgtcgcacgcggcgcccaggaactccgcgaacggcgcggcgagggcgtctaaggccttccagaggagctcgaacttgccggagggaacgtctgtggtgcactcggtg

SEQ ID NO: 73064 - DNA, 489 bp, Oryza sativa
  unsure (1)..(489): unsure at all n locations
tatgttgatgatgtagtcgtcaagaccaagcagaaggatgatctgattgcggatntagaagaaactcttagaagcattcgtgctttcaagatgaaactatacccggacaagtgcatcttcggagtaccgtcagggaagctgctcggatttatggtatctcaaagaggcatacaggccaacccatagaaaatcaacgccatcctcaatatgaaaccgccaagctccgaanaagacgtncaaaagctgactggttccatggctgcgctcaaccggttcgtctcacgactcggcgaacggaggatgtcctttcttaagctgctgaagaagactgacaatttccagtggggacccgaagcacagaaagccttcgaagacttcaagaaacttctcaccctccaccaggttttggctcgccacatacgcaagagccgctactattatatgtgtcggcgacctccaggttgtgagtaccgcctggttgtcagcgtg

SEQ ID NO: 73065 - DNA, 453 bp, Oryza sativa
  unsure (1)..(453): unsure at all n locations
ntcttcttgtccagcccagtcatgcacatctcaagagtgaccacaggttgctccgggtgctgggtggcatagtagacatgccacttctgccctggctntgcaggatctccaatcacgtatgcgttgccaccagatttgagaccgccgaagtagcggttcaggactgcaacctcctcagagaagttcttgtgtggagagggctgtgcttcangaaaaatgaatgtcccacgagagtacttcacagcttcaagtggcagagatagctcttcagcaagctcaagaatcctcggaatggcgagcaggagcttggtagtcccacaggtcttgatcacaatcttgtatgggtacacaaagaggctcgattcagaaaggacatacgagtcgaagacctcattggagagctcagacacaatggtgcacctcgccagatcaagaacagagtcaatctgagca

SEQ ID NO: 73066 - DNA, 531 bp, Oryza sativa
  unsure (1)..(531): unsure at all n locations
tactcagctgacttattcttgtaacatgacgatgtccttggcttgatgactatcttcccatggtgtcattcattagcctcatcatagtgggacctattccttttcacacctcanaggagaacattagtctcaacaaatcggttgtcatccttcacttgaagaccaaccggttgcatatgaaagatatggatatgtntgttgagtattcattaacttcacaagtgtcatatactcgtatgcaagctcaagtgcaaagatccgatataaataataggtgaacaacatggatctagaacatgcacaataaatgtataggaattgctccccctanatatatgcatacaaataaatatacacgagatgcaagtgtatgcataattagagaatgaccaatggnnggttatcctatacatatagagaaggcatatgtagtaatgatgtagaccaacatanaacttataccttcatgatctccatgttctcaatgtaaatgagactaaataagaataccattcgagtaacattagtctc

SEQ ID NO: 73067 - DNA, 475 bp, Oryza sativa
  unsure (1)..(475): unsure at all n locations
cggacatgaanagcacatatgattagctggttcttctttctgattgcagagacacattttccgtgctgaacaatggttatctatagcaaatttccctctgtggacagacgatagcggactagtaaccatgcgagaagtatatacttgagaggagctctgcaataccaaattagttcccaattaggcgaatgcaaaccagggggcagtcgtgcctcatagaatttttttgttgtaacctccctagctttgtactgagcctgaaaaaaatagaccactagcagtagttggaaggtgattgggataatccaaattcatactaattgctagctctattgagagataatccataccgcctgttctatatacttgcattaatcgagtgtcaactggtattttcattggttcaaacaggtgttgtcacatatcaaatggcctgaaacacttgagactgattatatctacagtgagtaaaaca

SEQ ID NO: 73068 - DNA, 477 bp, Oryza sativa
  unsure (1)..(477): unsure at all n locations
gtatccccttaccactgaatccgctttgaagaagatcgaagacaacaacactctggtcttcattgttgaccttaaggctgacaagaagaagatcaaggctgctgtcaagaagatgtacgacatccaggcaaagaaagtgaacactctgatcaggttagcactttccttcatacttcattntatcgcttgatttgctaggtagtgtagttaactgaccctacttgtcttccaggcctgatgggaagaagaaggcttacgtgaagctgacaccagactacgatgctctcgacgtggccaacaagattggcatcatctaagttagggtgctgcagtagtcttttgtgtcctggtctctatgtgaatggagttttgtagctattacttagcgaatgcctcagtggctaagttatcactattttgctgcacacttnncatgaattgatataatgcaagtgacttatcgtgagctattatatg

SEQ ID NO: 73069 - DNA, 455 bp, Oryza sativa
  unsure (1)..(455): unsure at all n locations
tatatgtgaaatcattggagaagtcagcacatttttgttttgctgagagagacaaataagaattgctgtaagctgcctaattacattgactatttactctacaaagctatgtattgtctcataaaatactgatgaaacctgttggatctttgatgtgacgctaccaacatgggaggctggaggatgactaatgcaagaggttgacttgtgtaagacattgtctataagcatgtgctttntcatgattttattagcaagacgtggttctaggtttttcatagctaatctccgtatgtgtctctgtgtgcctgtttctggattgcctgcattatctttagtcctcaatttttctactgtaccgctcattgttgcataagcattcattagtgggtttntagctccttgaattgttggtgtntacccatatgtaagaatattttntgaacttctgtact

SEQ ID NO: 73070 - DNA, 194 bp, Oryza sativa
ctgggacattcatcataaatcgcaactgctgccgtggcagaaaaaccatcctcttgcattggtgagacgactttcatgcgatccgattggaatttcacactactacaaccgatttgttggccaataataatacatctcttatagctgctgcttcaccatggttgcatccaccacatgatgaatattactatgtg

SEQ ID NO: 73071 - DNA, 364 bp, Oryza sativa
  unsure (1)..(364): unsure at all n locations
tcagcttcaagatanggctgtattttcatcggataatntgcatgttttctataatctaagtgtgtgctntccactaccagagcgagacaagtctcaactcggccggggcgagaagtaacaaatttatgtatcaagaattgcacaactcccggagttggcttcgaatatggtttntcccaaccaaaccaattttccaaacttcccgataatagtggtccccaaacgaccaatcacttncagggactcccggtcccgctatcccccgacagctaaatgcttcccaagcattaggtttccanacctttacatcctttcataaaatagggtanaaccanactacactaaggatcacctcacatccgcc

SEQ ID NO: 73072 - DNA, 507 bp, Oryza sativa
  unsure (1)..(507): unsure at all n locations
ctcagctgcaaattatcgaaatgccgactagaaactgttttttctaacagactggataatngatcaactgtagagttntaatgaaagtaaggagctgaaactcaattgttgagctgtcttcggttgtgtctggaaagccaaatcagctaggaagaagtcatgaaaaccattactcagagatatcctttgttatcccctgtgatccatataaacaagaggaaaaaccagtacaaaatcagataattgtgatggcacaactacctagacacatagtaaactagccagaagacaaggatatcgagcaactcatactcattagtttgtttgaagcatcaattgatcatatattcatatgcacctgagtaatctccatgcatcaaacagatgatcttctaatatgccagtttatcatcctgatcaaccatatccaaatatcatcgattatctcaaatactcaacgcagcagtgaaaaaagatctggtaacaacttgtatttcattcactgat

SEQ ID NO: 73073 - DNA, 472 bp, Oryza sativa
  unsure (1)..(472): unsure at all n locations
aaaacataacgcgtgttccaatatatgctcaaaatcttcttcatacatgcatatacttagtatacagcagggttttcaatttccaaataaggtttttgccggtggtgaccaaaatttccaaaatcatcaaaaatttgggttttntttgaccgaaattatttaaaaatttgattaattttgaatgaatttgaataaaatttgaccaaattcacaagaaaggcaaaaaaccgaacatttcggatgagatatgtgctggtggggggcaaaatttccgaaatttcaatccctggtatagagtggttttccggtttgtgagaggttccgatccaagagccaccaccgtattttcttagtgaaaaattagtacctattaatactcggatactaggaatataaacatattatatatagcagaattttaaaagaatattttagagagaagataatatgcgtgcacatcttttatataatg

SEQ ID NO: 73074 - DNA, 365 bp, Oryza sativa
  unsure (1)..(365): unsure at all n locations
tctntatgttgtctcagagcatctccaacaacctctccatgttactctctaagctaaattntagctattctagccaaaagacgtctttcaacatcctctccaactggatggctaagccatccggctagccaaaactctcaccctccctccactagtcaaattaggaagctaaaaatcactagccaaccatgggcctcatacacattccacctccatctccttcggctcttctccaggacggcgcaggcggccacgacctcgacgccgccgccgtgcaccgctgcaaccaccagcttccggcaccgctcgatggctgtgagcgctacctgcatctccaggatggcgcagcggagcccaccagccgc

SEQ ID NO: 73075 - DNA, 279 bp, Oryza sativa
  unsure (1)..(279): unsure at all n locations
tcacatnnctctataatattgaagcaatcatcaatcatcttctttcaatagaaccccgctctnctaagcaaccaattcatcttgtgggccgattgatgagttccacaaattccttcatgtacccctcttatagccactttagattgatcttcatctaagcacttcaacaagacaccatctatgtttcggcgatataaatcctcatcaagcaatgtgtatttgaacgctttgccgcaaaatttccgatcaaccttaagtgtgggatcttttanatataga

SEQ ID NO: 73076 - DNA, 169 bp, Oryza sativa
tctacctggctcaactagctaactagctaggctttgtgcattgcaagccacaccatgcacacagacacagtcacaccaagcagcaagatgcgatgaagagataatcgtctgcatcacactcacacggatcgtttcgcgcccggagatcttgacgcgatctaccaccgtt

SEQ ID NO: 73077 - DNA, 223 bp, Oryza sativa
  unsure (1)..(223): unsure at all n locations
ctttatatatgctgccgcagcactctgagatcccggtcacgagcctanctccttaggagcgattacattacggtcgtcgttacaactcggctggaaaccctgcttcccaacttaacgctggagacatcccttcgcactgggaatagcaaaagccgcccgacgccttccacattgccaaccaaggcaatgccctgatgcggatttctctaccattggcggatta

SEQ ID NO: 73078 - DNA, 499 bp, Oryza sativa
  unsure (1)..(499): unsure at all n locations
tccctccagttctgcatcccggtcgcttggcaccacccaatgcatttcatggntgtgttcttggctattgtgcggatgcgcgcgatgtaagagtgagtggtgcgtnctcaagcgcgcgcgctcgcccacaaggtgttcgaccaaacgccgcaatggccttttttttgttcctctttatgacggctatagacgcctggttttaatcacaggatgggatcgatgcgaatgtgcgagttcgtggcagatgggcagttgctatgaaggaggcagtatcaggtagtattagcatacacaatcgctatcttttccaaaatccaagtagaanaaggaaaaaaacacacacaaaatctatatctatatttacattgtgaagcctctgctgctgctactaatgctactcattgctctgtagaaatcggtgatcacggagtttatgcacgctggtttgtcctccagagggatcgatcaccttgtacaatggtatgcctttctttttctt

SEQ ID NO: 73079 - DNA, 502 bp, Oryza sativa
  unsure (1)..(502): unsure at all n locations
agcgatttaaccaaagattccaaaggagaaaaggttgaggatatcccggagattggttcccctcaaccaattctgccggagaaggaaaggggcggccggattggaaggaaacagcggcggcggctctgcggcggcgcgctatggtttcggcccgaggaagacgacgggcctgacaggtgggacccacctgtcagcggctgcgatggcgcgcgcgcgcgcgggcggctgcggactgtgccggctgggccgagaagagagagaaggcggttntgggccgactntcggcccanagccaanagaagactntntaaaactttttcaatttanattatttcttatatgcaattctatttattaaaaatacttccttagctcaaataaatcccagaaaaatctaggaattatagaagtaagcaaagtatttaatgaagatttatctggcccaattttatattttggaattattaataaacttagattttcttttcaagacttttaaaat

SEQ ID NO: 73080 - DNA, 501 bp, Oryza sativa
  unsure (1)..(501): unsure at all n locations
ntattgagacaaggatcatgaacatctgcctcctcaatatatgttntaacagctggtgcatatctagccaaaccataataactaagtntggaataagaacgtaccccgcaaccatcacagcccaccccaacgtgggtatgcaatatctctgaaggtttccctttgcgagtgccttccttcctgcttggaacacctgaacttttctcttgccttgagttatacagttcttcgaagcgatgtttcagaaagttcttcagatttgagcatactgtaggttcagcgggatgtggagctccacaaaattggcattcaagttcctctccacccacagatgttaaacatggcatgcagtaaactgttcataaaacaatgtcatatttccaacagaaaagaagtaataacatagttctgcaatnatttatcctanattcgagcttaccatggccacaattcaggaccgatgggtcatacanaagttcctggcaaatgagacaagccaca

SEQ ID NO: 73081 - DNA, 418 bp, Oryza sativa
  unsure (1)..(418): unsure at all n locations
ccctctcaatgaacttggcatgcttaaaaaggtaccaaagctgagccttataattgggtatagcataaatagcggtcaagctgccaactttggtgagctctgtgctcttcggtcgcttacacttatttggggggcacacccaatatctacacacgggagttctccaagtcatgctgctcctcatgcaatgccttgtgttctccccttaggtcttgagaagctggagctccgttgttttccccttgtagaatngcctcactgggttagtcctgaaaagctgagaanattgaagaagctctacatcagcggaggtaacatcagtgacctgngtgatttgaagtcctgngaggagactgtacttcggctaaggttcctcaaacatatgaactattcatggactgccctgcatgattcattc

SEQ ID NO: 73082 - DNA, 514 bp, Oryza sativa
  unsure (1)..(514): unsure at all n locations
actcagcttctacaatggcgatgaccctgacagaagcttctatgattgttattatcctgatcatctttatggaagtgatgatgggcagccaaggaagagatctgaagatattatactgtcaagggctcagaatggctttgcatgtagagaaagcctagttaaggagactaaaaaagtatttcgctcagaggtactatcctcttagatttgaattctttaccactgntattctattttcatttccatttttcatgcccatatatagaggtatagtcttatctagtgcagacttcttttacaagctagcccgtgcatgagaaactgtcacacatggaccattgtattaaagacaaggttagctcagcggttagactgcgaaatangtaaatgtcgtagttcagtcttgttcgagtgattgaatctccatcatgcacgaatagcatatttggcgcctctgctanngtntgaacgtggcatcttctacgacaacatcaatgctaatgccgcacattat

SEQ ID NO: 73083 - DNA, 212 bp, Oryza sativa
ctatgaaactcagcttctcaccaacgcgcgaaccaccgtttccccgataacattgaagaaatcaaacggtggtaaaaaaacatgtgaatatattgcattatactcgattcacatactaaaggcaggatttatttgaccggtccttccggcctattggaccagagcgccaactaatcccttgaggaaaccaggaaaaccctaaatgattggtt

SEQ ID NO: 73084 - DNA, 488 bp, Oryza sativa
  unsure (1)..(488): unsure at all n locations
tcctgtctcntttggtttaagcccanattgttccctcattatttcagcaatcacatcagcccacggtcgttgctgagctaccccttatgactgttgctgcacgggctcgaactgaccgtattgaggcgcaaactgaggttgagccaatccccctggctgatattgggcttgcagggaaggaggttgatattggtaattcaagttaccccttagtaattatgaaggttcggctggatattacgtaccaaatgctcaggaacaacttgaggtattactgtgccatccggctgtacgtggtgaaccaagtgttctgggacaacttgatttaaaaattgttgcacaggctgaccaccaggcgttgcaaacccggccgatgcacctattgaaccttggcgctggatcggctgaacgaattgctgtcttaacagcgtctgctgagtcggctgcagaggctgctgccttggtggtgtttgctgaactggttgcat

SEQ ID NO: 73085 - DNA, 340 bp, Oryza sativa
  unsure (1)..(340): unsure at all n locations
ctaagcctggtcatgctcgctatccgnnctcctcgttgacaacacctgatcttgttttgttgttcgaaagaaaaggaaagaaagaagtgggcgctaacacacgggccctgcatattttttcttctcacttgcacatgggccccatatnttttttattttctttttactaactaggatgccatatcaacaaaaatagatatccatgctaccatgggacccaatnntaacttggtttataagttaaggggttataaaaattctagtattggtgcttangaatgtcgattaaactcggtgtaaagataatgaagggcaagtagacttatcttcttacaggtgt

SEQ ID NO: 73086 - DNA, 412 bp, Oryza sativa
  unsure (1)..(412): unsure at all n locations
taagcttgatgatctgagcgattgcacatgttctggacattgtatgatgaatagatgganactgtttactttggacaggctgctcaggatggagctcgaaaaatacatgaccagaactaagagataaaacagaaaatgcagatgcaggaagagcaacaggtagatgatgcgttaattattgcctctatattcattctagaccatataggcaattggcaaagttgcatctgcctgcagttactanagtaatccctatcactatatttcgagggtctgccttttatctgtattagaaacttcagagtcattgagaagtgccatcagggcttagtttactcgatgtcaatgaaatacagagtcatcttcctgtacctcttttgtgagagtataaggatattgtgatcgaaaagag

SEQ ID NO: 73087 - DNA, 512 bp, Oryza sativa
  unsure (1)..(512): unsure at all n locations
tggatttcgtgggcgatcagccgatcacatttgcgagcggtggctacttttgtcgtgcagctgacagtacagagacgtgctatctgaatatcctactgtatctctgtcggtgcctacctgcagacacgtncgtgagcctggcaactgggccgaaaggccggccgagtgtaacgagatatgctgcctggtccggtatgccatactgggccgttctcggccgctataacacgatgcacggtatgggcctcacggtatccagcccgcacgtaggtttgcaatccggttcctgcccacagacatggaaaagtccactgtgtctccctcaatattggtcaaatataattcgtatccctcaactacanaaccgggtataatgtatcctccaactgttaaaactgtgcatcatgactcctggcagcctaatcatcaataaaatanaataaaatanagtaaagtgggcctcacatgtcatcatccnctcccctctcttctcttatccatttatttcttcc

SEQ ID NO: 73088 - DNA, 207 bp, Oryza sativa
ctcagctggtgacccattggatggtcctgcgacctgaaagaatggctcttctttcggatgtcatgaccatggcatagagcagcttatgatcgtagataatccgtaaacatatggaataccgttgtaggacgacggcgcgacgacgacggacgagctcgaaggtgaccccgacaggtggggtccacctgtcggtggctggggagggga

SEQ ID NO: 73089 - DNA, 321 bp, Oryza sativa
  unsure (1)..(321): unsure at all n locations
gatccctctatgcggcatgaggtatccctgggtcggcttgtgaaaggtattgacgcgaacctctgacaccaaccagtgtctggagtaagtgcgcttcttgtgggttaagtgctccactgtgcagaggttaactaacttgttaaacaaccgtgcccactgtaatggtccgcattgatgcgggtcctgttgtctacagttgttatgctgtgctttgtgaaacgtgttgtggtggggaatcgaaccagaatcgcctatgtgctgatggatgacctgactggcagaatcaatatgcggattcggaaagtttgtgncatcatacac

SEQ ID NO: 73090 - DNA, 400 bp, Oryza sativa
tcagcttgtgggattggagcgcaacaccccgactacaattcttaatcaagagggttgtagaaaaagctaatcgctagcgggtagatttagagataaaatagactctagaccgattagatcgatatgagatactacccgctcgtgggcaacggaggttacgggataacctacaaggggattgactctctagtgatcatgggcaatcgataagatggactaaactgggtaagtgcaacattgtgaaagtaagtaaagaacattcataatgtagactgggctgtttgatcaacagcttacccttataaggtgggtgatctacatttatggtctctcatgttaagacacgtcaactagtgaaacatggaactaaaatcattcagcggaatcgaaccgtaaatac

SEQ ID NO: 73091 - DNA, 516 bp, Oryza sativa
  unsure (1)..(516): unsure at all n locations
acactatgaaactcagccttggtagcttccactaaccgtttgaacgagatntaatcctcttccggcaagaaacggcttctatcccaatttggatcctctgcagcggagaggagagaatgcagagagagctacagtgctctgcattaggatgtgttgtttgctgttggatccacatccaacggtcaaaaacaaatcgctacagcagatctaaacagtaaatgaaaacagtaatcaagcaaacagtaaaaatactgtttacaaagtactttgctacagtaccaaaagactgtttgttgcattggttcgctgtagcagactcagaatactatagctacagttcctctctgctgtactgtagaggacatgatcccttgtctctagggaagttatgcgagtctgtattaccgtgcatgtactctctccgttccacaaggtaagtcattatagtattttccatatttatatngatgttaatgaatctaaatttatatatctatctagatacattaacatcga

SEQ ID NO: 73092 - DNA, 470 bp, Oryza sativa
  unsure (1)..(470): unsure at all n locations
tactcagcttactactctcaagcacgtggtaaatttcttattattattagcatgacgcccattgtatcaggatgttgcaagagaattgagatcattttatctcttggtgttcatcagcataattccagcatgatgaacaccaattgttntcttaatacaaaaatagatgctttaaagccagagctgccttgcccacatataaaaaacgccaacaagcgactgatgttggcaagaagaagctcaacttggtttgcagaagatgactagcatttaccatgaatgcattcgtagcaagtttcagaacttcagaagcattggtagatatgttgttcattcacttgttctcatctatcaattcatttgagaacatgttcccccctgttcatcgtctagatactngcatgcaacatgatcctggctgtgattgatcagttaaattaatgtaatntactaattgatataataaaggg

SEQ ID NO: 73093 - DNA, 419 bp, Oryza sativa
  unsure (1)..(419): unsure at all n locations
ggcttgcaagtgccgcgccgatcgatagctntcgatcatttattataagacagttctggtcggtcttttgcgcggcatttcgggccaccacacgcactgcaatcgactagtgctcggagtacgctgtgccgtatcgctctctgccgcatatatatcgcccacgggacccatgccacgaggaatgaggtcagggtcaactcgcccggaccaaagcttcattggatagtgcatgtggaaattgttaggtgcacctggtgcctcacctaaaccacgtgtgccgtgattattcaatgtacgatctgtttcgtcttgaaggaaaattacccatggcatgcattatgccagactgaacacactgttagtatttacagctctgctgagaaaaaatttaataaccacgttnttgtgatcgatctcag

SEQ ID NO: 73094 - DNA, 460 bp, Oryza sativa
  unsure (1)..(460): unsure at all n locations
gttcngatatggacgcctggccgatccaacatttattatactgtacagnatgtntgnntcaggaatagtgaagcagcattacgagatgtgaccggagaggtagctatggtatctatagctaccacgtgctggctggagttctgcaggcaccaaccgtaccaaactgccagcaaggctgtccaaatggtgaccgtcctggattattcataggatctctgaattctgaattctgaagtctgaactctgaacctgtcttaaatattcggccctggttagttacgagtattttttctaaacttacaactnttcatcacatcagacctttcatacgcacacaacttttcagtcacatcgttccaattacaacaaaacttccaaacttcagtataacaacacagccttcgtgtgttctttcttggaccctgtacagcaagtgaacactgcatacctcctgcagcag

SEQ ID NO: 73095 - DNA, 492 bp, Oryza sativa
  unsure (1)..(492): unsure at all n locations
tctccacttcatcaaaatcttcaatagtttcaccaatatcgttctttgtagaccgatattcttgcaccctcttttgtaaccattctaaattagcctctttactcattatacaaatttatatggcttaaccgtgctacactagccagctttacagagataggtacaaatttgccatcggagatactaataaaatcatagctagaaagatccctccccaataagcattgaatattcctatgacgccactcaaaagtagcatcggccattgcaacctcggccaatgtatccgcttgaacaatttcaacatcatcgccgtcccattgaattaaacattgatgcaaggtagaaggcacacaacaattggcatggatccaacaacgacccanaataacattgtagttaccttgcacatcgacgatgaagaaaagcagtggtaacgtctgttcccacggtaagctcgcgaaagaacccttcacctcgtggtcacattga

SEQ ID NO: 73096 - DNA, 519 bp, Oryza sativa
  unsure (1)..(519): unsure at all n locations
tttcgttagtctttgcaacagtcgaaataatntattgagcatgtcttatctcactgcanggtaattggttctcttcttttcactcctattgactctactttngntntttacattttactgtatactgaacacatggttacttccagacttgcgactgtccttggttcattggaagatgctctaagtgatgctccaagagctgcagagtatcttggacggcttcttgcaagggttgtggtagaaagcatattgtccttgcaggaggtgggtacattgattgaaaaaggtggagaagaacctggagagcttgtacatcatggcattggagctgatgtccttggtgcagttctagagtcgatcaaagtagaaaagggggattcattcttgaatgaggccaaggcaagctccaaccttcagttggaggagtttagaccacagcatctcaagagatcgaagttggatgccttcatganagcataaagaagctttgttactaggtaagtcgggtgttctataatg

SEQ ID NO: 73097 - DNA, 441 bp, Oryza sativa
  unsure (1)..(441): unsure at all n locations
tactaagctntccaccagcacctgtcgtggcatcaaccactataatggtatattacaacggctgccaccctgaagaatgcggcacaaaccacttctttgtattgattatgatatacaaaatctgaagaacttcaccaagggcaagatgtttcaagcattgattctttaagacaattgcagcttgatacctgcaaacagaggatattgaaacaccataaaacagaattcaagaaaaagatacagaggattaacacatattgatgggtgtcaggccttacttggatctagaattctttatagcagagctgccagaggtggaagatatgaacctatgaacagcatcaaacgtatcttttggatattttgcatttatatccattatattcacacatttccaaagattttggttcttccccaaatagaatgacatangacctaaca

SEQ ID NO: 73098 - DNA, 455 bp, Oryza sativa
  unsure (1)..(455): unsure at all n locations
tcacatgcaagtgtgtcacatcatcactaaatagcaattattatctatatttttttaaatcacgtgcaagtgtatcacatcatcatacactagcaatntattatctagggtattttaagtatcatgtaaacatgacatattatttacaactttattgtatttttaaaattcaatatgcaattaatgtaaaattattatttacatattattttcacattattcaaacatatacatctatcatttctatcatttctataatgtataaaattcattcatctatatatcgtgcgcatcatgagcgtttcacagggcccagtggccaagccttatttgatgcacgtgctgttatgcttacataggccggtccatggaatctatcagaatgggctgcannaatggcacaaacggaagatggcacgcttaagcggcagaatattcttttctgaaattgaact

SEQ ID NO: 73099 - DNA, 508 bp, Oryza sativa
  unsure (1)..(508): unsure at all n locations
tagaacaatgtgaacgaagatgatcaattgaaccacattcattgttactatttggaccacctctnttcctgttcctggcattattcatagctcgagcaattctgttagcaaccaaagccaaatcctcctcctcgatctgttcgagttgatcatcggatgtggcattaaaaacaacaagaaaagaaggcttagatgaagaagcatcaacatccaaagaagaagaagaagaaaccaaagcactcgacttagaatcaacttttcgagaaagaacattcatctcatgtgttttcaattntgtataaagtgaatccaaagtcaaagtagacatgttaaaacagactcctgaatagatgtacctttcatctcccanatagacatatcaagaccattcanaaagtgacgagaaatcttagattgtggataattagtatcatanaaagaatcaacagatctagtatcactcanaattntattaaacctagaaagatagtcatccanagcttctaca

SEQ ID NO: 73100 - DNA, 327 bp, Oryza sativa
  unsure (1)..(327): unsure at all n locations
acctcatcaaacacaagtttttgactgtatattttcgcctatcgacactcaaaggcgaggagttcgaccattcctggaacgccgcctctctcaagtgcttctatgtctagaatgggtggcacccaaatcgccaacttgtaaaaatgtacatactgtcatgtaagccctttggcactatgaaagcctttcggcatgaaaaaaaaaggaagaaagagagnaaaaagacnaaaaactggatgtatggctattatccaccatggaggcccgaactagtataaaatctgtgtcctctgccttcatattattttcgagtgtgtgattgataat

SEQ ID NO: 73101 - DNA, 264 bp, Oryza sativa
cacctagctttaacgcttccaagtagagcagtactagcatacacagatattggcccccgtattacatcccatgccttggaacttgtatgatatcccgagacctctctcatcatctattgacgcagtcttggggactgcaaggacagctccaactcctaaagttagctccagagaagagaccggagtggagacgaggagcagcctaaacccaactccataactctagttcattttgtgagagagctccacccaactctaatccta

SEQ ID NO: 73102 - DNA, 469 bp, Oryza sativa
  unsure (1)..(469): unsure at all n locations
tatataagaaggcgacatactatcatcgcaagataaagtcgagaagaaagctatgcacacccatcgacttacagatagtaaaaggaattgttataacaattggtcgttataacagttgtgaccattgtaacttgtaacgtctctcttttcctactaatacccaaaattatagggggaaggagggatcactctcactatatgcacacagcacagaaccatctaattatataaaataatgacaaagctagggaggaatttgcagtgcacacacataaacttacaggggcacacatataccatataatatcatgctaagaattaaactaccagaagaaaatatgaatgcataataacaaagaagaagagaataccttcagcacanagggagaccgaattgacatggatgggaaaaagcatggaaatcagagcaatatcaactnctaattaaacactagacttgaacaccaag

SEQ ID NO: 73103 - DNA, 483 bp, Oryza sativa
  unsure (1)..(483): unsure at all n locations
tctgattgcaggagttgcgtggactgacgagctggctttttttttcttgngctgggcacttgtcggcgaaatgacccattccttgacaattgaatcaacagatatctttccggactcggcatattcttttctatcatcaggttggttattaactcgaggttagaacatagttcctctgaaatgagaccctangtctcctttgacagtaaacaattatacacataattccatatcagcatcttccaaaataaccctgctagaacttgcttttattacacatgtctcccttattacatgaatacaaagccctgccttaaacataaagggaaggtgcttaacatcggtacattgtatcctcaacaggaatcatccataaacatagcaagctcactgtttatagacatgaatatatntatttactacatgagtgctgcaaactttcgattacacaatgataagtagtgaacttgaaaccacaagcgt

SEQ ID NO: 73104 - DNA, 491 bp, Oryza sativa
  unsure (1)..(491): unsure at all n locations
actcagcttcgcgcatcattatggatgtttatggcctggcttatttatttaagcagctgtgagtgagatacagtgagcaattggagaggagaggccttggaccccatcccagagttggtggcctctgtttgcaggcgtgccctatagtagtggagtactcctgaataaaagaaccagtgctagtaatcaggacaaaataactgcactcaaaattacagcaactgtaaatacacatactcatatattgacatatcacataaccctgcctttcttgaanacctaactgaacaatgttcttattttctggtgagaaaccagaaaggaaaaaagtcaaaaacagatgatatcgcactaactgatcagatagatgggttaaagaaagggcaggcacatctncggagctacaaaatggtggctgaactganaccganactganactgaaatcgccgtgttgacgaaaggcaggcatgcaagcaatgcccaacagttg

SEQ ID NO: 73105 - DNA, 481 bp, Oryza sativa
  unsure (1)..(481): unsure at all n locations
ggcttcctctcnccaagagntttgagggcaccataccttttgtcatttatgatgaccctcatagcctagacatattatatcagtgtcaagcaattcattaactgatatcgattcaagtaaagttacatacctgatcccatgtccaatcagactcaacatttgatgattcaagcagagctttgaacgcatttttagcttcctataagtcaaaagaaaagtgtacctatatgagcttaaaacttgaaatgcacagtcaattcttaatatgtgcaagtttcccttaccaacttattagcataggtcacaggttcttcttcactagttttgtcttctactggagtaacattgatcttccctggaactgccatggtctttntggcctcctacagagaatataagcagcataaatgtacaggtatacacatataaacacatacatacagacagacacacaaacacacaaacacgagagtgagatata

SEQ ID NO: 73106 - DNA, 465 bp, Oryza sativa
  unsure (1)..(465): unsure at all n locations
atccactttgaaaagaatcccactntgtttctttttgtgagaagtattccatacttcatgaagtattactatcccctccataataaatctgtttttgagaaatgcagtctggtttcttgcgattatataatttataacgttgtccagcctattcatcagcacttatgttatgatcttaaagcttacattcagaagacatataggtctgaacttttggatttgtgctgcatcttttgattntgggaccaaagtgatgataccaaaattaagcctctcaatgtccaaaacacccttatgaaaatcattaagaagttcaagagaatctgttttaatcaagtcccaaaacttcctgtaaaagtccccagggaacccatcatggaccagggctttngtttgttcatataaaaaccactttttcacttcttcagaganaaggttaatcagcaagctgatcttctctgtatc

SEQ ID NO: 73107 - DNA, 495 bp, Oryza sativa
  unsure (1)..(495): unsure at all n locations
gctgctcgctgagctgagctctgtgaaggatggtggatttggttcttgtttggaagggaggtggcgcgggcttttatatatggtttggtgatgcactggagcttatgtgatgagctaggccagttgagttggagcccaagttaagccgctcaccgggggaagaagcatccattcgtccatctctgctagctgcatgttatgctgctgtcggtaataatattgcgcgtgcatgcatgcatgtcttgtctagctgcctgctggctataggctacatatgctcnctcttgggctgagctagctagctctcccataactggggaatctccaggattgatgggacttgtgaattctctgccaattaacacgtgtgaataaatgaattattgaatatgaataggagcctacaaggtcaggcctttgcctttccaagcttgaatatcattggatatgtgcctgcatgcatggctgtgctatatattctgtgaggatagaatt

SEQ ID NO: 73108 - DNA, 420 bp, Oryza sativa
cttcggaccatatacagtgttggagcgtgttgggcaagtggcctatcggcttgatcttcctgccggaaggcaaaatcatcctgtggtccatgtttccttacttaaagctgctgttaaacctgacactattgttagtcctgaactacccttgcagattacggatgattcagtgttgctttagccagaagtggtattgcacataagtctcatcaaacgtggtaaagcagcagtatcttatgggctaatccagtggacaggcgtgccagctgaactcgccacttgggagaatctacattacctgaagctgcgatttccttcggctccagcttgtggacaagctttgtcttaaggtgcggggggagaattgtgtcatcagtagctgtagactgatgatacgctgagatcggctgactcctgtat

SEQ ID NO: 73109 - DNA, 508 bp, Oryza sativa
  unsure (1)..(508): unsure at all n locations
tatcgagagatcaagagnaaaaaaatgtcaacgatgcaagacatgttttattgccgataagaanaggaaaacggccagntgatgaacaaaaagtagtagtaaataaacttaatacaccaactaaaggaaaattcagtattaggacactgaaacacgtagtagaaattagattcgagagcttgttctaaagtaacaaaccaatagtattttccaacagggtactaacaatatgatacctggccaccaggaaaatcacctctgtaaacttggccagtgaaaccttcaccaataaagcattctttactgaagttcctggtagctgctaagatgtcaacagcttgaaactgttttgcagttagaaagtttttggatgtctttgcccaaacttttgttttcatagctctttcaggcttaatgacgtcactagaggaagcctcacagtcattcataagagaattccaagagtacaagacctcatttgctntanggactgtaaaatgatatgtat

SEQ ID NO: 73110 - DNA, 507 bp, Oryza sativa
  unsure (1)..(507): unsure at all n locations
tgcttgatttggccttgcaagatcattctcaagtgaccactattgtttcttaacaaaccgcgtgatcactttgtggtatatgtatggaaacttcccatgaggagggtcttccattcatatttctcttactttcttttcattggtctctctctcttatttgagtatgcaaacctcctgagttgttactcgggagcacgatgtatggtccagccgttgacatgtggtcagtgggttgtatttttgctgagcttctcaatggaaagccaatattgacaggaaagaatgaggtattgcatcttgaagctttgagctatcaattggataactgaagtgccgttgcattttagtntttcatttccctccttagtgcattatttgtgctgatacatgtntattgtttcttccctcattttggcgattggaaaantgaactgtcagttatcatgcagatgcagtcttgatttaattntgtaaaacacgttcccctacgcattgattacatgcact

SEQ ID NO: 73111 - DNA, 509 bp, Oryza sativa
  unsure (1)..(509): unsure at all n locations
ccatgaaactcagcttccattgcacgagatgcaaaggaataaccaatattgctccatcttgtattgtgatgctggaattaagattaacatctgcactcaaggaaattgtaaggagatcaataatgtacagcaggtaatccaaaaggtctagagctcacacttcacacaagagctaaaaataaatgaaataaaagtacacctgatttctcctacaactggataatggatatattaaggaacctcagaaccaaagcataatctcaatacagtacagcaagatcaggatgaagaaaagacatctccatttaaaatcatatgataatatgatatggatgacatttcaggacatataagaaaatntatatattaataaaaatggcctcaagaaatacagggtatgaaacgtggtgctatgtacactattaatatnntttcatntttcattgatcggtactttnntaagtntattgaaaagatantgtataccttgtgcaaagaacatctctgga

SEQ ID NO: 73112 - DNA, 504 bp, Oryza sativa
  unsure (1)..(504): unsure at all n locations
tggctggtctggacaatattataagcatgtctggtttctattatgcacacgctntgctttgctagaaacagggcaatccttcttgttattttctaccttggcgggtgaaaacgtattctgaaagcaactcctcgatcatacaatttaccctactactctagtcacatttttagacctattattcaccagattattattatgaattatttgatacatactttgttaaaaaaaatacagttccttacaattttccttctacttatattatgtttgaacggactcgagcttataagattcttgtccggtagtgatcatcaatttgttaagaatgaaatgggtggatctgtttcacaaaatacgtagtagtagaaatgatagagctactccaactccatattcggttgagtgctatcanatatgtccaagatatgtagaccgcttgctataaattatctagttggtttataacatacaatatttcgttatttatcgtgaatatatnta

SEQ ID NO: 73113 - DNA, 343 bp, Oryza sativa
  unsure (1)..(343): unsure at all n locations
cctgagctagcattgagtccatgctaatatgatcgctacctgccccagtgaggcgcagctgctacaagtgcctgaatggctcaccattagcatgaggcaatggtcggcttggtgatcaatgggacttgatgtgcnggccatggcgtgcattcaaccatctcgtgatagacatactattcgcaatgctgagcgtcgaatactcgatacctctatacttaaggatttgcaatgtttgactctgtatatctctagctcctcatccaactcctgtacatgtggatgtactcctttgaatcaatctatcaaggaatcaccctttttcctcgagttcgctccagatact

SEQ ID NO: 73114 - DNA, 484 bp, Oryza sativa
  unsure (1)..(484): unsure at all n locations
acacaagaatctcaagctacattactggaatgactccaacaatcagatcagacatcttgttantacttataattataattattgattgtttctttctgtgtgatagcttaaagaaatagtgagaggagaggaatgaagagaatatggtcgaaccatagagggaaaggaaaggttgggtagtgctttgcacaggttggtgggagaaggatggaggagactctctttttctaaatgatttagctaatgatcaaatgctattgtttctcagatttctatattttaaggtgtgcatatcacatgttatgaatttctatgagggtagattcagttataactggagaccgatgataagatgatttgtggtttcctttcttctaagattcttctaatatctttaaacgtgacatatgttgacttaatagtgaccccgcattttctctaacttctattatatagaataattattgatgacatagtatatatt

SEQ ID NO: 73115 - DNA, 491 bp, Oryza sativa
  unsure (1)..(491): unsure at all n locations
tgaccctccgcggntgccttggttgctcgcgatatctttgttattttgagtttgngtggccataattccggccagagtgtttaagtcgggtgtctgagtttcgtcattgctggttgttgcccgacgtcagcttgccatctgtgtaggttgatggagtaagcatcctaattctctaactagctcctatggctttatcccattaagggagttgtgtcgatatgaactttgtttcgcaagcatggtggaataaactcatttacaacacaacaacaatagatatcataaataacatcacagagtttcacaaatggtacataaatcatgatgcaattgactgcatatatacgcagtccaaataaggttcatccaaacgatacatcataccaatcatcaaactactcgtcaatctaggtaatggaagggggtgtctcgcatactatcccaaaaccatctgatacgagatcgatgctgctatgagtccgtcagtctag

SEQ ID NO: 73116 - DNA, 482 bp, Oryza sativa
  unsure (1)..(482): unsure at all n locations
gcgtctttctctcattgcaatagangtgatgtntttaccacacaatanagcatgtttactctgattaaggttggatgatgtgcttgtacatgcttttgcttactctgtctctcttaagaatattgttttgctttgagtgtgttttactatttaaatactaacccatccctcttggactagaaaaaaatgatttgctaaaaaaacgaagaagacttgttgccattgtctacactcgtgctaatcacttgtacaaaatgagcagctatgatgaattggtttattcactggtcacantttataagctattcatattgggttttagttcttattatggttctcatcatataatgatcttatcaagtgtgagcatagctagttgacatatcgtctaagcagctaagcacatgtgtatctagagtctgcgattaccaatttatcattgtaatatagtgtatcatgcacgaggacactgctgtatcaat

SEQ ID NO: 73117 - DNA, 339 bp, Oryza sativa
ctgcagaaaggccatgtgttaaaagtccagcatctagacagctgttctagttacataccactcatgccctccattctttcctcttctgtgtcgaagaagcatctggcggcgtggatgcaaaacaaaattgactttgtgtgtcattaccgctgatacataaatcataatataattctgcgcgccacatgagtcgttacttagccaactcacttttcatattacggccgctttcaatgctaaacatggtattttaaaaaatttcaaatacttaaaaatcgaggtgataaggagcgctcatagaaaagagcacgctacttcttctcttgtccattctctctc

SEQ ID NO: 73118 - DNA, 487 bp, Oryza sativa
  unsure (1)..(487): unsure at all n locations
gcttggaacctgcatcacttgcaactcgcagatacgaacgaaagatttcttgttcacgcttggccagaaagggtgccaggtcaattttgtcacttgctgggatggtgagaacttctatgcgcctccaaatacttgcattaggatctcctacaatggaatgttcaactgatgcaagtttgttagcaagcttaaggatactacctgccagctcatcttgttcttcttctttgtggcttggtttatgcttcagagtcttcttggtaggtgatttcacagatctacgcttatgccctgaataagtgccatcagtagtaggactattgcgagctatcgtgtcagaatcatggccaccatcttccaatgcanatatgtattcttccaactccttgatgctaccactgccatcactatcactgctaccatttgcattgaactggtcaattgctagtgaaccatcagcttttgaacaaccaacaaataattcttc

SEQ ID NO: 73119 - DNA, 475 bp, Oryza sativa
  unsure (1)..(475): unsure at all n locations
gttagtttagtctctagagtatagttgtttataaatagaatagagtctttagtcatcggagtcttcggaagagatcgggtatggctctagtagcttttccatcttttgtaagactcgtactatttatagaatattcttctcaatatatttatggtactttacttcactctgatcatttgagtatcgactttctgatatattattcgagatataattgtctagctagcttactctggagatgcaatggtgtgggtatgatgttcatttatatgattactctatgtcaagacgatgattgtagagtagtatttggtagcataagcgaggtgcttangctattgaatatcattaatttgggttatatgttgcgggacagtagagctgggccactgatggtgacagctcagcacgggtattcatccacgttagtatataatcctaagttactttcctagggagggtactcctccgtatt

SEQ ID NO: 73120 - DNA, 382 bp, Oryza sativa
  unsure (1)..(382): unsure at all n locations
tatcaagtctactttcanatggatccagccacatgtccatatcttttctggagcggccgcaattgtcattttactcccgactattttctgtccatggtgctgcgtcacctcttttggcccaatgggctgtgtatccatgttgggcccattangggcgcgtcctanggttggagcacgaccctatggtcgttcttcccctctttttatacctctagtcgccgccaagaacaggcgggttttgatgatagagttagcttcttgctaccggctcgcagcgcgcgtgttggctaaaccgcccgtctgcctgtaatcggaaccccaccatattgtgtttgatagtgaaactttcatctttatctagcaatttcagtgcttgtcctac

SEQ ID NO: 73121 - DNA, 474 bp, Oryza sativa
  unsure (1)..(474): unsure at all n locations
tggtcgatcttatgagatcgaattgttgatgatgatgatttctatctcatcgagggacatactccggtcgggttagatctcctatagccgaagttgtcgagtagtatgttgtcggagaatccatctcttgaacccatctcgtcgaaatcctgaagcaccaaaatccccctacctggcgcgccactgtcgacgttngatgtcgcaattctggtatttgcatagtatggggatcgtcggtgctaggatatacgcgagactgaggtaaaagagatggagacgaggatttttatacaggttcgggcccctgaactgtcaggtaataaccctacatcctgttggccggagccggangtgctnttattcaccataatcacaccagtactatatgtgggtagcctatctaactgttgtcgacatggtcggttgaaggtctgactcgtagtcgacaacagggtaaccttgctcctcgagctc

SEQ ID NO: 73122 - DNA, 503 bp, Oryza sativa
  unsure (1)..(503): unsure at all n locations
ggcattanacacccaaattcccgtgacttgctgagtactattgtttcaccctcgctctatataaatatatatatagttcctctgccttgaagtgaagatgaagtgaagtgaagattatggtttcgtcctagttcccagccgtcgcctgtggtgtttgggtgttagttcgttggttccgccgctgctgctgttattggtgtttcctcgtctgcgtcgtcggttgcattctcgggctgttatgagttgcaacctaagttaaggtaaataagtcctctatttattttaaggattgcaatgattcatatttgtcaccgtgagtaccagcgctatgtcctgngactggtactgagatcgcggtttcgtatgaagcggttcgcgccgttnttcctacgacgcgctccggtcaggtgccgttgcacggcggtgccagatcggtgtgtgacactaagcttcatatgcgatggatgtcatgtntatgcaaagagtcaagtatattgtctggt

SEQ ID NO: 73123 - DNA, 504 bp, Oryza sativa
  unsure (1)..(504): unsure at all n locations
gaccataaaactcagctttgttctttaaaaatatgtcctgttaaatgcctttgttttgtttgngaaatattgatgcgtaatttgcaaaccgcctctacaagggctcatctgaaaaatgggacaggagggtgggaatattttttttatttggaactggggatgaagagttaggatgaaacgagatgagatgactggatgatggctagtattaaaaattaccctatgatatgttggaaaattattatccaaacaaatcctagaatagtttcctgactctattatagacttttatagttatatgagaaacattaaagcacgcacaaacaccactaccttcacacatcacatatagagagacataagtgtactcttttacatacttacagagatggagtccaatagcanatatctagcacaataaagttccaattgaggctcactagaattaactttgatatcatcaaccacaactaaatcaccaaggtctgatgctccaacataatg

SEQ ID NO: 73124 - DNA, 500 bp, Oryza sativa
  unsure (1)..(500): unsure at all n locations
ctggggttctcccatctttaacaatgcgtaaccaatgtctttctgtgcatngantatcttcacacaatctgaattatatcaaatgacattaatgtcaaagtactgacgatgctnttcgaaaaatgccactcttaccctcaagacccaacgtcatcaatttcaaatagccaccaggctgtagcagttcaccaacaattctatcaggctccgtcatgtcccgctctataacatgcactcgttgcccatcctaattcaacaaacgaaaccaggaatattagattttctttttcaggatatttctgtttttaccacaatgcatcgcttgatggtaacgagatacatgactggcattttactattgagtgttctgttgtcggataacatgaatgatactagtacaatagaagtgattcattctaccaaatacaaaagacactatggtatctcaatgtgnttgtatcaatagcaatgttgactcttcacgttctacaagacattat

SEQ ID NO: 73125 - DNA, 424 bp, Oryza sativa
  unsure (1)..(424): unsure at all n locations
taattatgaacgctagctaaaacagggtaaacaggtggaaatatatagttatctgtattcacatacatgtgtcaaataatatattcattgcagtcactcacatataacgatccagaaatgaagaaacaacatgtggagtaatcccatgatgcatgaagtagtatacttgtaccacagattacaattagtagtgctgcactactactaatgaacaaggatattggtatgcatgctatcttgtcatgttaaaacatggcaactcattatcagtacaaaatcaacattgctcactgactgccacactgttagcatccacaccaacatcaggcaatgttatgcagttactaaaagtctacatgcataccacaatctcactggaacaaagctggcaggttccaagcacggactaactgngacgaatggt

SEQ ID NO: 73126 - DNA, 488 bp, Oryza sativa
  unsure (1)..(488): unsure at all n locations
tatgcagtctcctgctgataccccgccttgttgtatttactcggcatacttggccttctgtgctgcttaagctntacaagtttgggccacctgttccttgtttgtacccttgcatgcgtacttgtagaccattctttagagcacttgtcctgatggttctgcggggagcaatgttgttgtgttgggtgatttatatggngattttgttctcatgtggcctattgggccagatggtcgtggttccatatcttttcatctgaagtgaacggcagacttcctgccatctgtttcaatattgtgttatcattggttaacatttcaggtctataggttattggacanactacttgtgtgctggaaagttgtataaagcctagtatttggcattgtaggcctttntctgaatactaactacctggacacatattntcttgtatatcctcaccgctgctcgttgagtcatatttctataaagttaagtcttactg

SEQ ID NO: 73127 - DNA, 484 bp, Oryza sativa
  unsure (1)..(484): unsure at all n locations
tagctagcctgccatggtccttctgcagacaaacaaactgtttttatatgtgggaggtagcttacaggtcttgggagtatacagggttttatataatttggtttacctgaactttgaaatatgaagatagtcagtgtaaattttaacctacttatgaatgttcagttcttcccctgaattatggtaagcattcagctgacccgtggttttccaatgggagatccatatgttgaacttatgtttcatttatttattagacttcctgatggagaaatctgtaatatgactgcatatcttcatgttcacagtgcctttcaagtttgatacaccatctccggatgacgtggtcgctacaggactaacatcgtcgagaaagtttagaaaaggtattatctttgcattcncccactctcatgtnagtagactaactcagactagtgaaaaggatgcatcttacaacttaacattacatctatatgtgaac

SEQ ID NO: 73128 - DNA, 465 bp, Oryza sativa
  unsure (1)..(465): unsure at all n locations
cttagaccccgcaatgctgcatgttgttattgcgatcggcttaaggtaaaagtcgatgacaccaatgaaagattaatttatgtttgcccaacatccagttgtgatgctcgtagttttagctcattctggggtgtctgcaactcttgcactgtcacaactacactgatattgagggaaaagccagtggattgtcgaactgttgaatccaacgatgatggngtttttgtcaagagtgatctgaagttcatcatctttgatgatctccatgtagctcctgcttctacaagtaccatgtttcccttgcttggtaagtttgggctacttgagcaacgcaatatcgaggaaaaggttcttgagcttaattcgcacaatgtaacaatatctctctctgaaccgganatgcattgtagtaactggagaatttacatatttaatagtaatgttacagacttacctatcgtcatg

SEQ ID NO: 73129 - DNA, 451 bp, Oryza sativa
  unsure (1)..(451): unsure at all n locations
catatacgcggaacgtacctgacaaaatgacagtcaatcaccatctttctttaacattaaatgagaatgcaatatggaaccccgcagaacttacgcttgaggacaataacgatgggagcaccgatatccatgacacctgtgaccaccacacactnttctggagagcgattactctaacaacacctcctcacctttgtgtcatcggatgaactttgcgggtaaaacttatttctagatgaccagaatagcaacgacaagttgagaagctcccacacctcaatagacccattcgagccgtgttaccgatccaaatcgatctatatatttcatatatacataaagacataaaagaaactaataactctttcatactaatattactctagcaacaacataatacatgcatgatcctcctactttctagccaatagcatatacatatattacatgt

SEQ ID NO: 73130 - DNA, 455 bp, Oryza sativa
tcaacatttacatagtaatgcaatgctgccattgctattagtattaacaaagaaacatctaatagaatcgggagaatgaaagtataccccgagaacacgtcccactgctggattttgaggcagtattgcctccgttgatgtcgttcatcttcttgtttccaatctccattgacatcttggtgaaggcgccgatgcaacaacagtagccacgaagaacaagagcagtcgcgcttgaagcgctatccaaaaacttgattgcccgcctatccgtgcaagttctcaagtggacagagttccggaggcacctgctcgtcccttacacctgcgcgcgcaggtgaacagaaccggtgaaggattctgcagcttatgatcagaggaggaggaactcgaagtgcaagagtctgtaaagaacttcttcagtcctttctggtcgctgcggagtatatatatgcgag

SEQ ID NO: 73131 - DNA, 498 bp, Oryza sativa
  unsure (1)..(498): unsure at all n locations
tcacaacgccttagaataactatgtgcattgacaatttgtatattttctatacataagggtcaggaaaatgaaataataaaggtaataaatattattttgaagtattaatagctagaaccttcgttgtctcaattgttatgcgaggttagtctctacatagctggcaagtcgactaaggtgagctctttccctagttattccaactctcccatgctcgtttttgtgcacacgtttttcaaactgctaacatggtatgtnttttttaaaaaaaataattatatactaaagcttgtttttaaaaaaatcatattaatctatctttttaaagaatatttaatacttaattaatcatgcaataataagcgtttcgtgtacgtgccgagaactaacctcttctctcgaacgcagcctaagaagctctaccatgcaacatatcatgtgttcgttattgacgcatgttcccaactaataacatggatctacacacacacaccaca

SEQ ID NO: 73132 - DNA, 415 bp, Oryza sativa
  unsure (1)..(415): unsure at all n locations
ctactcccatggagacgcgactgaagttgagtaaatcatgttctgctccttcggntgatgccacggattatcgccgaatcatgggatcgttgtgttaccttgtgaactcaaggccggatntggcatatgcagagggctacgtgagcagattcatggagaagcccactgtcgaacacttggcgaccatgaagcgcgtgctgcgttatatcaccggcaccatcaactacggctgctgctacaagaggaagaaggaagctgctcatctcgtcggctacagcaacagcgacctcgccggcgatctcgacacccgcaagagcacgtctggtgtcttcttcttcctcgatgagaacctgatcacttggcagtcccagaaacagaaggtggtggcaatatcgtcttgtgaggcggagtacat

SEQ ID NO: 73133 - DNA, 521 bp, Oryza sativa
  unsure (1)..(521): unsure at all n locations
ctaagctttagttgtcgcaatcgtgggtattagtgtgtggtgtgagttctcgtcatgaatggattctctcgtcgtcgtcatacacactactgtactgcttttaggatgattggaccaggcatttaccggcgattcttatggctaatacactacttttttttttctgctagtaccaagtagtatatccctagatcacacttcatcaaagactgaaagtgtaacatgtgctaattaatatgctatattattctcgagtaaaagtgcatgcatatctagaccttaatgttcttttcttcaaaaaanaaaaagaaaaagtagtatgcgtctatgtctaattagcttgagttaattacaacagcaaaagtaaagggaaaggaacgagagtgttaagcatggacttacgaagaagcgggtgatgaggaggaagaagaggaagccgcagcccatgacgaacgctctccatcgccactgcaatcaaccaatcagtcagtcagtccaattcagtcacgaccacacacaca

SEQ ID NO: 73134 - DNA, 400 bp, Oryza sativa
tgacaactatcaggaacaacatctctagggccagacggacaaggtttacgctcgagatgacgttgcgatggtggttctatggataacacttcaagggtctcgcccgaatcttctttttgaatgaaacgataaacatcctgttctaaaagggattcaggggactcatgaagcagaatcgccattacttcctctatgggagcattaccaggagggatgtacgtcaggtgttctcatgatcgatatgaagaccatccctaaagtctagagcgcatcccgaacatgaaattcttctgtcttctgggctgatggcttgagagaggattccttatccgacacagacgatgcggaaggatttgattcggattccgatattggaagttcctcttgatttacaccgatg

SEQ ID NO: 73135 - DNA, 410 bp, Oryza sativa
  unsure (1)..(410): unsure at all n locations
cttcagggcctatggaattcaatgtgtctatattctgtaatcaccacaagagaanaagcatccatgttatcaccacaagagaaatagcatgactagagtatgtgtttaagtacctctgccaaggaagaaggtggcatcataccaaggatagatattttatttttaatttctgtctcaagtgcaaacatagcttgaatatattcttctggttgtttctgtgcctgctgctgcttttagcttctgctgcttctgctgtgttgtttcttcttttgctgctctagcttctgtngcaacttctganagtggcaacacagtagatgagccacaagcaaatgaatgatagtgcaacacgtaagaaccaacaaatgaagaagcacaatcagaagaattagcatgccttanaatcattc

SEQ ID NO: 73136 - DNA, 510 bp, Oryza sativa
  unsure (1)..(510): unsure at all n locations
tattatactaagctcaccccgacgtgtcgatcactcctcgtctctcggtcctctttttttaacaacgacaactccgacatcagaagttgcgatcggtctcacgagttcatttaagcagaagtcggngggctactgtcagggttacgggtaaggtataccctctacccttcgatatacgtcacatatcgatatggtatacttgcgcgcatacggacgttttcggcataagttaaggaaattcattatggagttcacagatgtaaggagtcctactcggatagaactgggtcgttattgtatcgtatcgagtccgatgtctccgagtcctacttggagaccagttgacctgcggtacaaaagcgacccctcaggaggacctaaggcatcgaatcttaccgccaacacatccaccatagcctacgaagccggagcttacaggagccaagtcgccgggtgatctagtcgaatcaactcgactgcgatctcgtcggtatcgtcgagttccactat

SEQ ID NO: 73137 - DNA, 211 bp, Oryza sativa
atataatctcgtcgggcttgattgatgaacataattgctatttccctgttccatcattaaagaagagaatgtgtttgcctactatgatcccctttattttcacattcacaattatgtggatttctagccttttattattatcttgccaaaagaaaagaatcaactcccctcactacagccctgtgaaactccgtgattacagtctcttttt

SEQ ID NO: 73138 - DNA, 436 bp, Oryza sativa
  unsure (1)..(436): unsure at all n locations
aaaaagagcagcggatttagtagcatcagctgcaataaaggctcgttgtcattatgttaataaaaagtnggtcagtggtatgttaacgaattggtcgattactaaaactagactttctcaatttagagacttaagagcagaagaaaagatggaaaaattccaccatctcccaaaaagagatgtggcaatctcgaagagaaaattatctaccttgcaaagatatctcggcgggatcaaatatatgacgaggttgcctgacattgtgatcgtcctcgatcagcaaaaagagtatatagctcttcgggaatgtgccattttgnggattcctactatttctntagccgataccaaatgtgacccagatctcgcgaatatatcgattccagccaacgatgacactatngactcaattcgattgattcttaacaatagtatt

SEQ ID NO: 73139 - DNA, 486 bp, Oryza sativa
  unsure (1)..(486): unsure at all n locations
actcagcttatggtatctctgaggaacccacattgatgatatgtttttaatgacccacaacaatgacagaacgccccgagtaatcgacccgtttcccaagcagaagttcgcgaaacctcccctctttaccttcaattacatctgaaagtgatttgtatactntattgtgaccatccctcngtggttgcccgcgggacccactatcaagaagtgtatccacggcttcttgtaccaattgttcctggcacattactaaatctgctggcgctaattcacttctttttaatagataggcaagaatgttgttccgacggataactctcttataaagttcattaatatccgaagtcactactttatccccagacctataaacaatgggtcttatattcggaggaagaactggtaataagcacaaaaccatccattctggttctacatttgtttgaataaaatgtatctgcaatttgcatgcgtctaatcaaa

SEQ ID NO: 73140 - DNA, 500 bp, Oryza sativa
  unsure (1)..(500): unsure at all n locations
gctggctttgctgacccctctctaattgtctttttcttctgcacagagagctgctgcacaaatttacgccactgtggctgcatttccatcatcgtcgtcggattatgtatgcttagatcgtaccagactagctctgttttttcggctacttcaccgaattattggctctgattatttgcttatatcgtctctgatagtatgttccctcacnaaaatttcatttattatatcggtcggactatttgttaaattcatttcttacaacatntaatttatctctataataaagtatataatctgtgacaaaatccatataaggccgagtttagttccagacttcttctttaaacttctaacttttccatcacattaaaactgtcttacacacacaaacttccaacttttccgtcacatcgttccaatttcaaccaaactgttaattntagcgtgaaataaacacaccctgtatatcaaacatgacctgcatatacatcatcgtc

SEQ ID NO: 73141 - DNA, 450 bp, Oryza sativa
gctacggccccaggaggaggaagattttattttaaacctcctgaatgctgaggcagatatattggtcaagttaagatagaagaggcaaaattaacagaatattagctagtttcttatcaatatgctgagtcgaatataatgctgatacgctcttctgcatttgccagatatgcataagcagaacagcaagctgatgctgatcaaggcgcatcagaacaagctatgctagctatccccaaggatctcgtgatacttttgtgaaacagaggcttttccatccgagaagacaaatcctcttaattcccatacacacagctcccaaattccatactatattaatcccattacacccactctttctcattaatactaaattcatgcaacagataacatatactcgatatgcatatatctgtaactgagaccatttctcaaaatgacacctaattt

SEQ ID NO: 73142 - DNA, 382 bp, Oryza sativa
  unsure (1)..(382): unsure at all n locations
tttggtgaccaactgtnaccatcacaccttagatttctgatattcctaggtggnntggagtagaatggtaagttactcattngtttaaaaaaacaaaaagaatggtaggttactctctatgcttcataatatacgataaagtctttatcaactctagaggctgcaagcatgcaacgtgcagtaaattggtgtgtagaatgattgaaccttacattaactgctgtgttttactgctctctgcagatgtttatctcgctggaacagtcatgctgatctttgtgatgggcttgtacaggctgttcatcancaatacttctactgatgttccttctgagtctgacagagctctgcagggatcatccttatttgggatgtttgcttt

SEQ ID NO: 73143 - DNA, 411 bp, Oryza sativa
  unsure (1)..(411): unsure at all n locations
tgtgtgcctgacggaatcgaatacggataggtcgaatgcggtatcatattctgattatctcgaatacgaataagaatcgaatatgatcgaacacgaatacggaaacatttntttctctgaacacgaataccaactcaacttctaatagaaacaagtatcgacatatataattggctgatgggatatgaaatataatataatctatgaatatctttaacaatttaaataatattaatagtgtggactaatgttaagagatgaactactattaaaatctagacatgtatattcaaggtcatatagctataaataaatggggtatgtctcatggcttatgtggatatccaaatagcactgtttacggattattatccgacggaaaccccgatccatatgcgtattcatatgcgg

SEQ ID NO: 73144 - DNA, 397 bp, Oryza sativa
ggtgaaattagttttgatgcagcaagtcagggaaaaagcttcttaattgttggtaccaaataaagagcagcggatttagtagcatcagctgcaataagggctcgttgtcattatgttaataaaaagtggttcagtggtatgttaacgaattggtcgattactaaaactagactttctcaatttagagacttaagagcagaagaaaagatggaaaaattccaccatctcccacaaagagatgtggcaatcttgaagagaaaaatatctaccttgcaaagatatctcggcgggatcaaatatatgacgaggttgcctgacattgtgatcgtcctcgatcagcaaaaagagtatatagctcttcgggaatgtgccattttggggattcctactatttctt

SEQ ID NO: 73145 - DNA, 384 bp, Oryza sativa
  unsure (1)..(384): unsure at all n locations
tcctgcagtactcatacagntaatacattgccccacgatgactcactatccatgcatgcactcagcaaataactgaaagggcccacatgtcatccaaataaaggaagcttcctgtagtaatcagttagttaacccattgtctcacgattagttgatctgcatgctccattcaaatgttttcaaatgctaagggcgcgcgcggctgcttgataatggcagggatcctcctctataaatagatggagtggggccagcacggagaataagagttcgctggggggagtggtgtgagggctggccaatgcgagaggctactgcgctgcatcgctgctagttcgctactgcaaagcaattgacaccgtgctggtttctcgctctgctatg

SEQ ID NO: 73146 - DNA, 337 bp, Oryza sativa
  unsure (1)..(337): unsure at all n locations
tgttcagcgcgatctatgccacttcatccaccgtgagtgctgtcatatgcgaggagaattcttcgacccagagggtgccctaactacaagtgacgaattcaagcaacttctggagtggaacaatgctatgccataatgtaactagatggtgtatttgaagtgacaatgtaaaaaaatattgtaatatatatattttgataacacttttcacttatgcaatatatgtagttntctcagtactaaatgcttgataantactaataatcttcctgcatcaatttctattaaataactaaaaaagaatatttgggcaaatattattgtatcaaatttcaaa

SEQ ID NO: 73147 - DNA, 314 bp, Oryza sativa
tgctcatatatatgggttccaccattcttagttttatccgttgattatgatggattctgcgttatccaagaaccacctatggataatgttacttgtacattaactgggaggaggggtggggatgactttataaccctcttttacactgaagtccttctgaatatttatcaatacagggcagtcaacacacaccacactcacaccaccttatgggcacagatgtgtgtattctctacacactattgttatcgggacacatgtgtctaaagcatatatagcattgcgagttatcgactcatgcttatgcacggaca

SEQ ID NO: 73148 - DNA, 474 bp, Oryza sativa
acttgcaacggcttacagctaggcagtctacatcttctgtggttgggatatggagtatacgagatggcagagagataaaatcttgatctcacttatgctgtgaaatctcaattggtcgtgtgcatgctgaaatataatttgcacacagttttactctacaacgtacacgaaaaggagcatttgatttttcttttttggtaaacatctctctctctccatccaatccaactacgtggatggaggttgagtgcgccagatgtcatgctcctacttgttggccaaccgtcgacaatgcgccggcgcactggctgcgtgttgaaagtgtttagttggcagtatctgctgaggctatgaggtgcacttctgcatgggagggtaccaagaatacgggcgaaattctagcctgtctgggccgataacggcgacgcttgcgggcgctgcatggtggcgttgtcgcggaatattaccctctct

SEQ ID NO: 73149 - DNA, 485 bp, Oryza sativa
  unsure (1)..(485): unsure at all n locations
cacctcttggaattctgttagatgttggtgctggcaagaatgaggttcacgaagaagggctttntggaaatctgctttattgcgtgctggcaaatttagaaacaacgaaatgggaagatttttcagaatatggatccttcttttgatagctggtggaatgcttctaagaatgagattcttctagatatgtgtagaatgaatgatccacttaggcaattggtctctgattggttacaaactttatagttctttagggaggttgtagcatattgtaatttttattttttgctgctaatactttttcttccttttataaaatacactactaggaaaatgtctagtagttttccttttcaaaaaaaaaccctacaacccanagcccaaacattgtattgcctggctgtgagaaattccaacgttgtctagaagtatttcacatatcaaacaaattatttgancctaccactattagctttaacccttca

SEQ ID NO: 73150 - DNA, 422 bp, Oryza sativa
ctgagaaatgatcgtgcttcctacttcctgtatatagctagaagccaagcgaatgatgctgaggctgaatggaacaagttatttggtgctggagaatatgataaggcattgtcgctatatgagacagctttgcaaattgctgctgagctggaatctgccgaagacatacgctccgcatgtcattcaaatcgtgctgtatgcttcttgaagtcggtaagcctttctattggtctttaaatatggaggaaatagatgatttccatttggttgtcatcagtaataaatatccttatgtgaattcgcaacaggatcatggtagatgtgcttatttcattaatatgtgacccctagtaccctaccatcatgatatgtacgcctttaactatagatatctcctaataccaggtatacttcttaatgta

SEQ ID NO: 73151 - DNA, 316 bp, Oryza sativa
  unsure (1)..(316): unsure at all n locations
ggacctttcgctaccattctgcaagtgcgcctctaaagctccaccaccaaccacccatctgaaatgcgtggacaccactacaccgatactannatggtaccatgcttcgactagctacatgcgtcagtgccacaccatagcgcttgcgtcgctgcaagcctccatcttaggggtgaatgaacatcctcgagcatctggacagtgtcgggtgaggtcacaacaacattccgcgttgcctctccagctacaacacattcacggatgtacatctgccgacttgcatcctacctcaacatcctactcattccgcctccac

SEQ ID NO: 73152 - DNA, 233 bp, Oryza sativa
  unsure (1)..(233): unsure at all n locations
ggatgaactcattggcaatgcatcatgtgacttctttattgataacaacttctcatatatgggacaagtagaagaccacgaccttgtggccctggaagtattggcgcaactntcagcatgtcatgaccactgcatatagcagtttcccgacatgtggatatttggtctttgcatcgtgaagtacttcactgacataataactgggccgtagtattttgcaccctcgacaatga

SEQ ID NO: 73153 - DNA, 243 bp, Oryza sativa
  unsure (1)..(243): unsure at all n locations
aactactnaacttcttaccctaccggtgattttttctataaaatctcccaaaccccaatgcagagtgctccctatattcaagagcactactaatataagagtgctctcagtataggcatgtacagggcatgggcttgcagggtatagacattattctatgatcaatcaacaccctctattctaggacctcctgccatcaccactcttcacacacaccgccctcacctgatcaattctacggcg

SEQ ID NO: 73154 - DNA, 306 bp, Oryza sativa
  unsure (1)..(306): unsure at all n locations
ctaagcttnggacgcggcggtgccactcaccgccgctgcggtgcagatgtgctgcttctgacgcagcggcagccggatccgcgctgaggccaatggtccgcgctgtgcggtccacatgtcagtgcaattgtccgtccatccactactgacgcccccggcggacgacacagctggtggcggcggaggatataggtcgtacagccatcaccatgaccgagcgagcgtgtgccccgcgtgcatcgctgcgatcctgtatcgagcgcaccggatcgagcccctgcgcggtgcgtcctggagatacctcct

SEQ ID NO: 73155 - DNA, 464 bp, Oryza sativa
  unsure (1)..(464): unsure at all n locations
tgcnaaatgcgctaggatntccaactggatgccttagaaatgtgccacgctntatagtaactgtcaaagtaccaggcaagcactgaagaagcaattctgccttttcttggaaccgaggtgggccagactgtatcaagtactgaagtagcggaatagcctctgaggcagcaactgactgagctttaaatatttctgctgcacaagctccccatgcttgtctaagaagatacagtgagtccagtgcagcttcctgngttgcctcagaaccagtcttgagagatgttacaagatgaggaatgcataaggtagcangttcagtgacccttaagcgagggaagttactaagtagagcgttaagagccttaagatactcctcattagcactcccagatgcccatatgtccttctcaattgaagctgcatgcanaacattgtaatcagatgtgtaagtaaattctcagtat

SEQ ID NO: 73156 - DNA, 413 bp, Oryza sativa
  unsure (1)..(413): unsure at all n locations
tccgacgatcgagctatagatagaaagataatttggactctatcttangtagagagatcaagtatggcaacgacgcaagcaaggcagcaggcaccaaggtaaattaagttgacagatgatgattngctagctatatatatcatttcttagggtgtgtgcatagttagctaactattgtcggtttcaatcgacctctgccatatattttcatactaatctatattggatacaattaattgtccttcagtttacatcatgcacagaagttatagttatagctaggttgcatatgcacatattggaatatatttcctgatcatgaataaactcatcaaaaattaccacatatcgatctctggaagattttctctacgtacgcatgcatgttgngtntgatggagctttctctcgtc

SEQ ID NO: 73157 - DNA, 494 bp, Oryza sativa
  unsure (1)..(494): unsure at all n locations
acacataaaatactcaagcttagcagaaacaaatccgtctactgagtgcaacatctatacactattctttcacgagcaagtgacaggttaacaagaagcgtatttctcacggtggtcgtcagctcccaacaaccaagcaacagagaaccgtgcaggttgttggatgaaatgccattgttcacttaactaagtactgcaagggatttctgatcaaggtacagttgccactcatcgccattgccttcttattgaagctgacgtccaccttcagagcaaacattctttggcccgttgtagttcagtatgtctcgagtagcatctgcgcgctttcaattggaagggagcttcagataattgtcatacaacgccaatgttattgccaacctaatctgatccctgaanaatggaaagtncacagacaaacagtgcgctatttgaatgagtttgagtgcatggtgatctggcaatggtcgatgttgcccaatacagaatgt

SEQ ID NO: 73158 - DNA, 486 bp, Oryza sativa
  unsure (1)..(486): unsure at all n locations
ggagtggtgngtggcggtggagcagtgagcttgagtggtgtgtggcgacagagcgggagctgatatggctgctacgtccctgtatccaacgttggcctgccaccctggaggtcattggccggccgttccggagttcgttgatagggagaagaagataagaaaagaaggaagaagatagaaaacatgacattgctagcaaggttctaattttacaaaatcagcatcagctaactgatatcgtgaataatataatagtagtttcataaatcagcacatctacactgacatgaattcgattaagcctaataatataaaatagtcggtggacagcacgcaactacacgcacaacacaagagtccaaaattattcgttcctgcagccgggtggctagctatagtaagttgtggtatatgcataccttaagtgctcctcagatcgtcgccgggctgcatgcaaactttacagccaaccacgcgcctatacgc

SEQ ID NO: 73159 - DNA, 356 bp, Oryza sativa
cacaaaaactcagcttagacctacataactgacaagcttaagagcatggtttctttatacaacgacgattctgtccaccatccatcatgatcccaaagacttgctctcccgccagtagagtcaggcatggctatactgaggacaggcaccttccctcctctcaagaagtgactgcatcatcagacaaatcatcatgcaatatctcatcccacactagttaagaatgtagaagctgacccagtgtgatacacgtcccagtgctcagtaaccgcgagcacggctattcgaatagatctggattactcacactgcagtggatgtacactgtacccgcacatcgagagtagccacacatg

SEQ ID NO: 73160 - DNA, 480 bp, Oryza sativa
  unsure (1)..(480): unsure at all n locations
tctgctgccgncggcgaagggtctaaactctgaactgctctcttgcatcgcaattgcaagcgacaagtcgacgacaacaactgaagcgtccgaaaccatcgtcgcaagatagctccagtaatccagcagcattgattttgtgcacatcatttattcggcggatttcattgattgcacaattctggacccgattcttgtggcgattgggtctcctgcagtacaatgcatggaggacattgtcctcaattccttatcccacatctgacagagtatgattgcaacctggtcttacaggaccatcgatctctcgtcaacaaggtgagcagcccatatatnttcacatccggatgcagaatatgcgtcacaatccctgaaaaatatatttaattctcagataaacctacagtcctcaagtagtttctgaacaaagctctncaaattcctacataactncattggaatgatggaagtagtaatagt

SEQ ID NO: 73161 - DNA, 481 bp, Oryza sativa
  unsure (1)..(481): unsure at all n locations
tgttggcatagaggaaggagcgcggtcactcagttgttgtactctcctgtggtatttattatggctacagaataatctgtaagcgcatagatatcgttctagtcttcagccaaaagtgttctaaggtattgtatccatatggaacgtgtgtgtataatctaagaacggcattcatccaaggacaacaactaaatggtagaccgaggatagagaggatttccacgggttaattttcttaattaaggtaggtaaaactctatcaattgttntgtgcaccggcttacccctaatntgccaaggagactccggcctatagctctatgatgtaaccgaacgtggaggattacaaaggatggacaaggctgtcaccacttgccgtgcatacctctacaacccgtggagcacacaacanacaaaggtaacatccagcctagacatcatgtctatgctactaattactaccctaatcccgatgtcacat

SEQ ID NO: 73162 - DNA, 432 bp, Oryza sativa
  unsure (1)..(432): unsure at all n locations
tcgaaataannatggtgaccctagctatagtaattagtaacaacaaatagttttggccgtaaaagtcatagaacaaatgtaaagaaatgtactcgctccgatcacatatatttcacgtttaatacaagattcggttaaacttttaaaacattaacaatcgattttatgttggagtaagtttataaatgtttcaagtttataattttatatgataatgcttttcatacgaatttagtaccaattatttttttaaaaaaaactaagcatttaaaaaactactatgcccaaagttttagaagtttgattaaacctagtcttaaaggttaaatatttgttacttccttccgtacatacatacatacatacatacatacaaaatatgaaacggaggaagtactgccttaccggagggagtacataatagcattaggg

SEQ ID NO: 73163 - DNA, 355 bp, Oryza sativa
gtttctaagagagtgcttctctacaacgcggacactacagtgcaccatgcccggtcggactattacaatgtatcaatctttaacagatcaagagttggcccccagccaaacgatttggatggcctccctggcccagctgatcacatcagccacagtcaaaagcaacgtgttccagcacaccatagcaattttacaagcagtgatcgaatcaaaactacgctaaggaatcacctcacatccacccatgaccgaggaccgatggcggctaatcgcggtgagagacgtggcgccaagggaggctatcaacggcgagctgcggctgtcggccgtgggctaattaacacctataggagag

SEQ ID NO: 73164 - DNA, 463 bp, Oryza sativa
agttcatgttaattgttctattctatgcgcttaattatgataatatcttataaaggccgatcttgaggaccacataaacatattggaattatctaccacatcaagcccctcagtacaagaactgtactgaatggcattatgcttaaacaagcaaatataatatttctcaatcctttcaagaagaacagtaaaacaaaatcttaggattatctttttgatggaagtattataaaattctggggatgctcatacgataggatgtactcatatgatcatagcggcgagtgtgtgtatacacacgtgtatacgagagcatcatctcatttgttctgcgtttcagagaaagaattaatgtgggccgggttaattaattgtctaagctcatgcagaacattccatcagtagtcaactactcattgagtctggatctaccaatctcttgtgtcatgacaataccgaaatg

SEQ ID NO: 73165 - DNA, 459 bp, Oryza sativa
  unsure (1)..(459): unsure at all n locations
tcggaggatccctacgcgtactaccaggagggtgatgaagactacggtgcttagtaagtcttagttacggtcgttgcctgtggcaaaggcgtgccgctgccttaagtccgctgccttatctacttctgcttttggaatgtattccggaccgctcggttagatgatctaagactatgcctacgggcttatgatgtaataattcgcactagactctcgtatatgtgcatttggtatttcagctatgaactcgtgtgtagcagactacttgatccacggaaatggtaccgtttacacgattgattcctgttataaatacgggggtccacatttctacgatgagtttacaggagttgatatggcggcttttccagtacatacaacaaataaattgtgccgaaaccttggagtagccactttatataatgtatctaccctatagttcanacatgcactaactta

SEQ ID NO: 73166 - DNA, 376 bp, Oryza sativa
  unsure (1)..(376): unsure at all n locations
actcagctttgacntctgagactctattccaaaagaaaatctttcttgccatatactcttattctgtcgtcattcgaaagagtatcagagtactctaatcagaagaatttcttggctatctttattggggtgtaaatcactacattccaccacatcgagatcttgagtttcgcgcaacctttttattcttgacttttatagatgcatgtagagtcgtcgctccccggagagcaccctttcctggcttgtcctgggactgagaagttctcccgacttgctagaactaccgcatataggtctcgtgtcagtcgtctctctaccacatggaaggagtgaacacccgcacacccgcgatacgctagtcgcgcttcggtgg

SEQ ID NO: 73167 - DNA, 461 bp, Oryza sativa
  unsure (1)..(461): unsure at all n locations
gtctcggcgatgtgaccagtgaatctgttcccttcaagaacaaagtgtgtcaatggtgtcaagttacccatccagctcatatcttggccatggatgaagatcctctcgacgataaactntgttagtgttgtgaggttggagagtgacttgggaatatcacaggtaagattgttgtggccaatgtcgaaaacagcaagttttgataactttccaagatcagcagggatggtacctgacagatggttcctgctaaagttcaacgaacgaagctntgggcaaccgccaaggctggttgggatatcaccatcaagactgttggctgacagatcaaggacatggaggtgagtcacgttgccaagctgctgggagatggtgccggttaagccagcatctctcatattgagagtggtaacacgactgtggtattggcgatcattgcaagtcacgccggtctcattgca

SEQ ID NO: 73168 - DNA, 483 bp, Oryza sativa
  unsure (1)..(483): unsure at all n locations
nttcgccgatcagtgcaatgggtccttcctccggcatcgactatctcgtcttcccacccgggcagacgtttcggttcggcagcctcgacttcgtcaccgacaatttcggcaagatttctctccttgacttggaatcggaccagtcgggagagaaccggatctcagtcccgtttggattcccaaacgcggctgaaacctacttcaagaccatctcaatcgagtcggcttcaaaccactcggctgagatcgcatcttctccaacgacaccagatcaagatgatggggcttacccaccagtcctgatgaagctccccgacgatttagcggccgtctccaccacgacagcgtcttcatcccgtaggcctatgcggaagtcggtctcaacaccgatttcgcctagcttcagggaagtcggcgtcatcctccaaccactcggcacggtttcgacggatcagctagatgaccactacagctcttccaccg

SEQ ID NO: 73169 - DNA, 413 bp, Oryza sativa
  unsure (1)..(413): unsure at all n locations
tgcacttagcaccanaccgcacccacatccatactatatcctatggctgaacaacagtggtaaggcgaagggtaacaaattggtgcacattatatttgcaattggaaattaccatgatgttgttgaatgtgatgttttgcccatgcaagcttgtaatattctgctaggtagaccatggcaatttgatagggattctatgcatcatggtaggtcaaaccagtactcttttctgtaccatgataagaaaattgtgttgcatcccatgtctcctgaagatattntgcgtgatgatgttgctaaagctgccaaatccaaatgtgagagtgataaaaaagcccaatctgatggcaagaaacctgagacaatcaatttgaaacccagatgcttacttgctactaaatctgatattaatg

SEQ ID NO: 73170 - DNA, 469 bp, Oryza sativa
  unsure (1)..(469): unsure at all n locations
tgattctcgaagatttggccgatgtcctaactccagatgcttatctctagcaacatcagttcaagctggaaaaagccaagctaagactagccgaacgccgtgagcgcatagaaattgaagccacaatccaggctaatcggcagctcgtgcatgaagaanaaaccaaacttgatcagctatccgaaggtccgatcaaatctaatattgatcagctcgaagctcgcaagattgagctctcggcacaacttgaagaatgcaatgccgaattagatctggagcacaagaaactagccgatctcccgcggtctgtcgaagagtaaaaagcaagactcacatcggctatcaagaatgttgctgaactgactaagtctttgaagatcacttctggaactgatgctcaagatgctcaagctattgaagaagtcgaacacactaggcaaagagctcattcagctatccagcaatactt

SEQ ID NO: 73171 - DNA, 252 bp, Oryza sativa
  unsure (1)..(252): unsure at all n locations
taataatatagacgaaatttatttttcttaaaatgatccagaacagaattagtatactaaaatctcactaataatgaaaataataaatgacatgcttgctaactgcctctgaaataccttttttttttttggttcaaagacaaaacttaaacaacgatgtatacaaaattgtccgatacggcgagatcatgcatatctgttataacaatntcttccttttttttctctttcagatattattacgagtggagc

SEQ ID NO: 73172 - DNA, 396 bp, Oryza sativa
acaacgcaaattgttgtaatgccccgcatccaccatcacgagatgatcaggaccgttcacacgaaagcccagcctgaacggctgagattatggttcggacgaaccccctggcctggcttttggcccatctcctcctctggtcctcctctatctatctctcagaatcttgggctgattctttggtcttttgatgaagtgcacaactcatccttgtgtggatacatgtatctcctcactatagtctgattatcctcccaacttctgtgtttaacacctgcatacaaatatgcaccaactcttgtggaatatgtgagatataacaacttcgggtgttattatatggactttatgtatatgtaggccgcgtagaatctgtatttattaccaccaacacct

SEQ ID NO: 73173 - DNA, 266 bp, Oryza sativa
  unsure (1)..(266): unsure at all n locations
cattacctgaatagatgcatcattcangcggtacagcaatgtttcaagttgagctcttgaaaggcaagtatggatatgatgcacctttcaactataaagaggagcccgacttgactgcaccctttgaaaagtcaagccttatatttcagctaaaaggcgcggtttaatttaggttcaatgagctattgatgaattaagatagacgatgacgatcatctaataatcttacttaatatactgcaatagtcgggaacatgctcctgtat

SEQ ID NO: 73174 - DNA, 407 bp, Oryza sativa
  unsure (1)..(407): unsure at all n locations
tgtactctatntagaatacttgtctatatacatttatggtattgaaatactttccgagtatatgaataccttctttacattatgttcatgttatactgaatatactgctagcttatctgggagatactttggtgcgggtataatgtttgcttatgcaattacactatgtcatgacgatgatattagagtagtatctggtagtttagacgaggtgtctagattacgggatatcattatttggggttatatgctgcggatgagaggtgggctgctgatggtgacagctcattacaagtattcctccacgcatgtatatagtcctaagttaatttcatgggtaaggtactcctncgtatttagccccggttgtatggccatgacgagctgtcgtaacgaactcaacagtc

SEQ ID NO: 73175 - DNA, 447 bp, Oryza sativa
  unsure (1)..(447): unsure at all n locations
aaagagttggtgtgtcgatgtaatagagtgagaatacgttcaaccttgtggagtccgggcgttgactctatctatgaaccatacgaaacgttacatgttcatgtttgaattctcatgaatttctttcaaaaacagttggttttcagctgtaaccgccgtaagacgacagtttcttcgtttccagagatgctgcttgcgtgtactacaatcgcagcagcctactcgaccaagttgatcttttcttccgatggctgaccccagcacatatttttcagccagcaagatatatataccatgaaaaagaaaataaactcaanaccctcgtgccaaaacggaccacaactcgtgcggggccaaacgggccagcccaaactctaagccgggcccgtccatacgcaccgtcctagctgggccggaanatgagcccgtgtagaatgccagtggatg

SEQ ID NO: 73176 - DNA, 411 bp, Oryza sativa
  unsure (1)..(411): unsure at all n locations
tgatctccatgtaactccatattgtatggcgaaggggaaattcaatgtcgagncaatgacccagatcgcgcaccatggccgattctttattgaacaaataattcagttggtgaacataaattacaattattacaattaaggcagagcattatttcgttgtttaacatgcacacttgccaagcagcaagtcctgcgcttactcccaatgcctagaaggaagaagagcaaaacgaacagaatcccaatacagcgtttggaagcttgtcactgaggcccctgttaactacacagaggatcaggccatattcccaaccgagtgtaggagtgaggatttggtggatatatggagataataaaaggtgcccattatttacggctcagaatgggcggagggcagcagacatttctgct

SEQ ID NO: 73177 - DNA, 433 bp, Oryza sativa
gaacatttcggcatacgaccaacataacaatctttgttcttttctgatctatacctaacatttcttgacatctttctcacagaccgagccaattgttgttgcataaataacaagtaggtactcgtacccttaagctaaaggagaatgtgtgaaccaaccaacgtgggaaataaaacagagagagagactcttacctttctagagttcacctctggatatatataaggatggcattgagaagatcaccttcttgtccttagttacacaaccctaacaagaggtgtgtttttcataccgtaaaaaacaaatcctcattacacgcgcgcactctgccactgtgtttatgcatacacgctcacacctaatccctatatgcacctcaataaaagaggccaccatatatatttcgagataccgaagtactacaaacatt

SEQ ID NO: 73178 - DNA, 340 bp, Oryza sativa
  unsure (1)..(340): unsure at all n locations
aacatattactttggtggcaactcgcattattaaaatcacacactcaacttgctggcctcggtttgcgtgccaaaaccgacagacctacccaatagtcgcactaattcctgtaggccatactaccctgattccttgtcgctccacccttgtggggcctcggaattcgcgttatctgagcgcgtataccaaatataccacatacaccgatgatngtcgaaaattgggaaatgggttgagaaccttgaaacccccatgtggtgccgagtgtctgaaataaaaaatttggagaactcgcatgcgggatatgcctctaggcaagtcccgcattccatataagac

SEQ ID NO: 73179 - DNA, 465 bp, Oryza sativa
  unsure (1)..(465): unsure at all n locations
tcggcttatacaactgcaggtacatccaccatccgccttctatatacattcctgcacggctggctggcgatagataccacgcctgctcctatcaacacacattatttcataccgatgcacttgtgtgccttgagcaacaactctatgtctccgtgcctttttgattntatcttccatgtactntgtcactacgttgccaaacactatgttgttatcggccatggacggaccaattttcttgtatcgatccctaaagtaggcttgcgtgccgtgaaggatgaattcaacaatagcaaccaatggaagtacccgaactcctcgcattacccagntgtacacctctgccaaattggttgtcattatgccataccgagatccatcggtgtcgaacaatagagaccacttctccttatgctcattctcaatccactgagagaaatatctgatggccgaacctgacctcct

SEQ ID NO: 73180 - DNA, 389 bp, Oryza sativa
  unsure (1)..(389): unsure at all n locations
tctctcgctcagccncatggccgaacgggcagtggcgcacaatctctctcctatctctatcggngacgacggggagcagaacctgcgccgtcgagctcgtactccactgtccccctctcgtcgaagtcttgggcgggaggaggcgctctaggaggtcgaaagatccgcgacttcgccgcacgcgggcgatggagaatgacgtcgagacggtgagcgtcgtctcctcgtctactgtgatggcagcacgccccagggcgcgctccangctgcgggcgcgctcctgcgtgacccgcccgtcatccctgatccagagacttcaatccgacgttggctagatgacgtgtgcaaattgctcatgacagcgcagcagctcctatgcgccgactggc

SEQ ID NO: 73181 - DNA, 453 bp, Oryza sativa
  unsure (1)..(453): unsure at all n locations
agctcgacacctntatatntacttgctgaacatttagctgtgattgaatgcttgtgcaagcatgtgctgctccatgttagaatgtctgcatacatatttttntcttgcaaaattaactgtaactntaaatattttttcatgtaattnttttcagtttcttcatatatgtaagttttgtactgttactgcagtcaagaagctgttaatattgatggagttcactacaaattctcatctttnggttcttcattcaaacaaggtggagaattatcaaatnttgtaatgtctgtgttctgtcgatatatgtttaaatcgattcatcctttcaaatccaaaagacactatttcttctcttcaattgaggtaagtgtttgtaatttntaatatttttattaaatacaactctgttacttgcaaattgagtatgtatgtttttatatcagaatgatctta

SEQ ID NO: 73182 - DNA, 178 bp, Oryza sativa
atggatgagtttacaaagattcttcactctagatacgcactcgcttgctcgcttctggagttgaggcataatctccctctctccccaatttctctccttattttcttgaggcaaagagcacggttctccttttatatcacaatgggagagcacatgcgcccgctctatctaccctcta

SEQ ID NO: 73183 - DNA, 429 bp, Oryza sativa
  unsure (1)..(429): unsure at all n locations
tctagctccgctcctgcattataacttacctctcaatatntttctgactctctttaatcaatgtttctatagttggaagcacctaagactgatttaaatattaggagtttaaagttcaagcaaacgatcatgaaaaaatgaaatattctggaaatttgaaaatgaagtcatctaagtttcatcttaaaatctgacttgcatatagaaaaaaaggaaagaatatagtatatattaagcagtaaagtgaaccacttttaatagtttgaggataaaataagataaaaaatgtttagggtgaagtggtcctatgaaattgtttgagagagtataatagaacttttatttcttttttaataatgggaataatttctagggtataatggaaatagtttagtttatatcggaacatagatagagaatacgtttgtt

SEQ ID NO: 73184 - DNA, 471 bp, Oryza sativa
  unsure (1)..(471): unsure at all n locations
tggctagacgatgttgctgagatgctntcttaggtctacgttcttctactatgaccagagaggatcacctaagcatgaagccgatgactgctattgatgttgaaattagctctggtaaattaaacatctatacatgtttttgcttatcacgtgtgttattaacaaataaatatagaaaatgtgagaaagttgacattgccactatccgaatcttagctaggtacatattgcaccaccatataccatgactacgtcatggctcaaggacaaatcagtgtataacaagtaggggccttggcccttctgccaattttatttcttggttatacctataagctttgttatccctatcttttatgtggtaatcacaggccccactcgttcctcttcatgcgtgtaccttgacgtgcaactctcacattgtcaaccacattgctaacaagtgtgactggaagctgactccagcatgtc

SEQ ID NO: 73185 - DNA, 484 bp, Oryza sativa
acagcgtttcatccgcacttccgagttcagcacattcagcttgaaatcaagagaataatccttggctggatgtgcaagatcttttcttgcagtgcattcagtactgacgtattggatggatgtgacatgtgaattgcgatcgagatgaacttttccatgtaccttttctccaattaaagtggctaaatggatccaataatggggttgctttctctttcgcttgcttggatggttgaggggttctattaaatctcgcgaaaacgaaagcagaacgccctgccccatgattgcgaatgatatgaccacgcgtgtgatggaaagcgacttgcttaatactagtagcataattttttctgaatgttcagaacttcagatgatcaaaacctgaaactggagttcagagttgtgcgtgtactcgtatgactagccaacaaccaccctctaatgtgatggactgattgatggtcgattctatgagcccact

SEQ ID NO: 73186 - DNA, 368 bp, Oryza sativa
  unsure (1)..(368): unsure at all n locations
tgtttgctccctcggtggtaaagcccaacctctctcccatctacatgaatgtttcctcgctaggtgtgggggctaagttttctagccctattctagccttaagttgagtgtcgggtgccgtcaaagcccgggaccccctgtgctggctcttccgtagcggctagctttggtcccaccggttggctacggtgcccggcctggctcaactgtggacggtgatcgctggctctagagatattcggctctcacacacgggcgatagtagtcgtccgtgtagaaagaagagatattgaaaggaggccaccganaggaaagatcaaacataatgtgtagcgtgtggacacaggcttgtggaacctaacctcgtt

SEQ ID NO: 73187 - DNA, 492 bp, Oryza sativa
  unsure (1)..(492): unsure at all n locations
ccttgaaactcagcttgcaaattatatgaagctacgcgactaganatttatcttctatgatcgaagttatatactctataacataggccttatacacacaagcaatggagagcatacaaaggctttggaatattatttccgggcactagaacgaaaccccttcttaccacaagcttttaataatatggccgagatctgtcattacgtgcgactatctccactatagaaagaaaaataagaaaggatcaaattttctagtatttactagaaaagggggctttctacatagggatcgtcaaaacaacgattttgccctatcagctgtaggaagaaaggacacttcacgagaatcataatatgaagaaagaaagtatggcctatactactctatggatagagttctcaaattgatagagaaagcaccgtatagatcaaatattgaccgactgcgtcgatacaactaaaaaaaactgcttacttatcccatgatat

SEQ ID NO: 73188 - DNA, 446 bp, Oryza sativa
tctgggtggtgattgaacttggactctagatccacacatttgaattcattcatcgttttcgaagtgctattctgctcaaatatttgtagtcataatagcagcattatctaacttctatatagtaaatatgggcaatatggatcttgaatttaattataattaacacaaaaaatcaaataaactgagaaaagtacatgtaacttgagagtcatgatcatttagctattattatttttctatatattatgtgttaggtagaaaataggaaaagatatcttaaaaataggatatgagaattggatcccagagatgagtatgatggtggaggtacgtacgtacgtgcaagcatgctcacatacggtaggggtggaggtggtggtaccggatttatatttgtgagatgtagcagttataattatcgtgtctacctaattaaaggaaaatct

SEQ ID NO: 73189 - DNA, 478 bp, Oryza sativa
  unsure (1)..(478): unsure at all n locations
ntggctgcacgctgagcttcctgaatagcacgtctctctgctttagaaagcttctggtnttggtgaactggggctggagctggagcaccttcattctgtgtatcaagaagaccttcctttgattctaaaataaagagcagaagaaaaatatgtacagcttgtatatggtcattctttaaaatagtttttaaaggaatgctgatcggtaattctcagccatttgcatctaactagcttgtgaatacttaacataaatatacagtgaaagccacatggacatagtgcaataatgcaatacccatagatataaacaacatgaatgacaatctcaatctcctctttgtggccagcgttgtatgataattcatccatcatgaataccgaattctttgctaacaagttaacattgatttggcatcaatttcgctgcctgaatacaantattagtctccagagataanatatatgtttcaacact

SEQ ID NO: 73190 - DNA, 486 bp, Oryza sativa
  unsure (1)..(486): unsure at all n locations
tattcaggatataacacacatgtagcaggagacaagtgggctagactgtcttatatgattatggaaccttgtnttacaggagacagcangaacactactataatatatgatagaaagctggaaaaattgaaataacaaaaataataagtgtagagaaaacaaaataggatgctcaaacagtaacattcacaaaacccacagaccacatttcatgttatacattcactagattcctaaagtatgttcatttgtcatcatgagatgcataaataatgtaacccctgcgacaagtgaaactaagctatttctcgaataggatatactgccaactctaaaagataattccttacttagcattaatacctaaaagcttctgtcanaaattggatgaatatcataggtattacataaacttaaccaaatgaaggaaaacgtgcagaactgagcagaagctattgataaaaanaaagacatgggtagggtaca

SEQ ID NO: 73191 - DNA, 458 bp, Oryza sativa
  unsure (1)..(458): unsure at all n locations
ctcagctgtagtgatcgagacttctaatagagttacttgtactacacgatccatcttacaacggactgtaccacaagagagacctctatacacctagtaatattattatttatttgtacattgacgcgtggacttattatgcactaaataaaattntctccatgacaaagatatcataaatgatcctactaattagtactcctaatatatgcaatgcagatgaaatacatttcgcaacaactatatgatattagcactagaacaaaataaaccctacttttaagagtagcggagatactccatccactccagaaatatataaacctatgaatggatgaagtagtactgtgaatctgaacaggcagtcaatttggattcgtagtactatacaatttctcatccgattatagaattctatcatttgcgatagagtgagagtgagtgagttacaactcgat

SEQ ID NO: 73192 - DNA, 380 bp, Oryza sativa
cttacttatatagaaacacacacagaagtgagagtacgtttatcttatggtgtatctgaggagcgaaatggtagtgacccacaagctatattctgtataaaaacctgacgtctgggagtttcataagagaacaataaaaaaaaactccaacgtgattaacagttggaaacttggttgttctatgcaacttggcttccctagtcaatgaagtactcccttcggtcttacaaaagacaaaccatgggttcccgtaccaatgtttagctgttcgtcttatatgacattttgtatcattagtatttccattgatgatatatgatctaacatgataaatactttatgcatgactcatccttctaattcttttcatatttatttca

SEQ ID NO: 73193 - DNA, 342 bp, Oryza sativa
  unsure (1)..(342): unsure at all n locations
tacattgaatattgaataatatgattgcacacaactgcgagaaagtctgtaaggtatgaatgtagtgttatgacttatgtaaatcagcagtaagctgcatcttttcatcgtcttaaatatatggagacataaacaacctcgcagaaagatactgcaacatactagagaatttgtcangtcagaggcataccctgaccaatccactgcctaagactgttgatgtgttcatgtaatttgtctgaataaacaattccatgagtgaaacaccctttacctttgtttcccagtttagagaactgacctcacagagcctgttttttctaacatcaacacagtacactc

SEQ ID NO: 73194 - DNA, 472 bp, Oryza sativa
  unsure (1)..(472): unsure at all n locations
ctaagctcttgacatgcactgaagttaagcagatctcacatgcctcgtgtttntacatcaataggcagccgtgaggccaatgcgcacggaggcgtgcggcgactccgtcgacgactgcgtgggcggcatttgattaggagacctcaagtagttgtgtgaattccacgggtggccgaccgtcgccggggctgtggatcaatgctgctggaggcaagcaagtgcagaggcggcgggcaggctagcgcgtggatttgggatttttttttttttgcttgggttctcctttctttatcctttttatgcgtcgaatgtccttgctcatgaaaagatgggtaataacattgattgtttggacaattggtcgccttcttgtatatatgcaacttatatgttcctgaaaaaattgggcaaaaattgatttgtgtcgaggtgccatataatctcatagttaaagttccagcatgtatgtcag

SEQ ID NO: 73195 - DNA, 388 bp, Oryza sativa
agcatctgtgtgtgtattctgcaagatgaacatcatatcatagagttgtatttgtgtattagccgatacatgctacatctatctgatcggctatgctatgaacatatatagtctacttgttaatatatatttctatctaagtgatttatactgtctcggcatggctacagatctatcccaatcacttgatttaagtatatatcgacatcaagattatatattgatgatatctacagccgagcgagtagattcagctctttattacctatttataaccgccgatcgatttatatatgacatctgctcatagataaatgatatgtcatcggcacttagccgatcagctatcgtttataggtttaacacgccggttctatgtccttatttc

SEQ ID NO: 73196 - DNA, 438 bp, Oryza sativa
  unsure (1)..(438): unsure at all n locations
tctgataaactgagagtntcggctaacccatcactatactttctatatattncttgctgagagtatccctgatcccactgataacgagtaggcccaaacaattcaattgtggtagttgctgacccataccacatagtttcggcaactacgaaagctgcaaaaaaaacagcagcgatactactggaaagtacagtttcaatattgcccatacgtaatcctttgtatagacgttgaggtggacggacactataatggaatatgcccgcttatatgcccaatgtacccgcagcaatatgatgagaagctattccccccggaacaaaaggatcaaaaccttctgcaccccacgccggatttacagcttgtacttttccagttagtccataaggatcagacacccatatgccaggaccatacagaccctgttcatgaaatgcg

SEQ ID NO: 73197 - DNA, 456 bp, Oryza sativa
tgtggtgtgggttgagctatgctattgatttctgaatctggatggtcacggcttgtgttctacgtgagagtggaggatcgtgatgcactgcacgatttctttttcttgtgatgcggacgctcccttccttgttctagaagacgctatgcttgtgcttattcgggattggcaaaatgtgtggacaatctgagtttagatgggtgcggttccactgcagatgctattctgatggtttatggatatataggtgggacaaattaaattgataggagttctgtgagcatggacatgtatgcttattttctcgtcatagaatatgcgtgggacgctcctcgttgctgttgttgattaatacactgttctaatctgcctatgtggaggttgcgtatatctgatttgttgggtatcaagctacaaggtcttttttctcatcatacactctgaccttggtgatat

SEQ ID NO: 73198 - DNA, 494 bp, Oryza sativa
  unsure (1)..(494): unsure at all n locations
ngactacgtaatcctcaagcacaccgactaggggtgtatcccattaatttcaaatcctngaagaggcagtcgaaacccgcatcactcaaatctaactaagtctattcctgcaaaacataaattaaacaacatatggcaaggctcagtacattaatcaaattaatgtactagcaagagcactatcaaacctacatacatgaaagctctaagtcaaaggaagactatatgtggtttcaattttcagcataaagtaaaattcacaaaccatctgcaacgtaatttaagcaaagcatttaagcaatgtgtaaagcatattaattatggaatgatatcaacataaatagatagacatcattcccttacaacacaacggatagtaagtcaatcatatcacatactagatgaataccccgcgcgttgctgcgggaatttgtataataatctggatgagattcggatggatgatgtnttaagagaagataatatgctacatg

SEQ ID NO: 73199 - DNA, 301 bp, Oryza sativa
  unsure (1)..(301): unsure at all n locations
tctcgcgcgcgccgngctccaatgccgccgcttgtcccgtggcgcggctacaggtacgacgccggtattgttgcgccatcactgtgccgccataaatcgggcgcggtttcttggcctataaagatgggcgcgtgcgcacgcggcttttgcataagcgcggaggcaacctcgcggtgagcccgcagctggggaaggaagagacgagactaaaccactatgggaaataggagcaaaatcaacagctagctgcagactgcatgcatctgcagttggttgagtggtccgcgcgcacgtggaggga

SEQ ID NO: 73200 - DNA, 387 bp, Oryza sativa
ggggcttcttctccagtgccctgagccgctccggcggcacggatgctgatgatgatgatggagcggcggtcttcttcaacccaggcatgggctctgggcgcggtggtggccggttgtttgcccccgggatgacaagctgcggccgctccggcgccttgtgctgtggaggagatggcttgtggtccctctgggtcgtcgtcggtggcagcgacggcttgtggtccctatgggtcggcggcggatgcggcttgcgatctcgataccgggcgagccgatcttgcgcctcggcgagcttcttcttcgcggtgtccagctaccgcggcgtaccgggaaccatgagaatcgatcaagatcgcaacatttatcagacaaaatagcatgggaaag

SEQ ID NO: 73201 - DNA, 513 bp, Oryza sativa
  unsure (1)..(513): unsure at all n locations
ttgccgacaatggtccgcgcagcagcatgattaccacanatactttaatgtatatccttcagcaattgtctcccatcctccatagatacacagcgctgtagtattcctgatggacttctcttgtatagttcagcttcatgaataatgtaaagtctgctgcgcctggagatccgctcggcttcatttttgtcttgagggagttcttgtttagtaaaaaattatatgagaggttctctctagtcggcttcaatcatgcttacgccttgagtatccatggcttcaattggttcttttctgggcacggctggttcataaagatgctcaacgaacacatcacatagggctgcttcctggtttgaaccaaattgccangtctatcggccgcctcattgttatgtcgaaggacatgtgtgagctcgagtctgtcaaattatcttcgacttgcgacctcttatcggtagcggtcatatatcatctagacctgacacctcttatgacttgattactaccact

SEQ ID NO: 73202 - DNA, 233 bp, Oryza sativa
gaaaaaaatttcctttgaacctttttcaaccagggaaaccatttaccggggggcgtttacacactttggggtttcccccccagggggtagattttttcaaaactggtttaacatggcgggggctttgtaaataacgaatttccgcaccccctgatttgtttacggggcaaaaggagatcttttctttatttccgggatcggccacaaaaaatgaagtttatgcgccctctttt

SEQ ID NO: 73203 - DNA, 204 bp, Oryza sativa
agtggcgtcacgcgcgaccgcttcccttgataaaggcgatcgccctggcataacgctcgtggctactgtcggtgatatgggaccgggagtatcgtgactagaggcttgaggcagacacaaccgcccacgtggcctgtcaccttctgggacgtcgggcccgatggtgaggtgaccgccctcctcctgatttccccgagggggggt

SEQ ID NO: 73204 - DNA, 371 bp, Oryza sativa
  unsure (1)..(371): unsure at all n locations
tgcccgcgggcacaccgaacatgcacttatctgtgttcatctttatgcgggcggagcggagactttcataagtttccgctaggtctgagataaagtctcttggttgtacgtcttcacaaccaagtcatcaacatatgcctcaacattgcgtcctaactggctacccaaagaaattcgagtattacgttgaaaagtatgacctgcattctttaacccgaacaggcattgtcgtataacaataaattcctatggnggtaatgaatgcagcttttcctcatccttcctagccatgcatatctgatgataaccacagtatgcatctattaaacacaaaatgtcgcaccccgcagtggagtcgacaatcttatcta

SEQ ID NO: 73205 - DNA, 521 bp, Oryza sativa
  unsure (1)..(521): unsure at all n locations
ccttgaaactcagcttagtattcgctgcanaatcgatcataccttctcgatgagtgacatgttgtagggcttcaccttctcaacgtctatcctctcattgctcttgctgtacaggtcgtatttgctgcagaagaaaaccattcatgttcagtacattttcatactatatacattaagatgcagggtgatcaatctgngggcttacttgaacacacgcagccatttgagggtctccttgtcctcatcgttcatcagatgcatgtaggctccatgcttgtgcagggctgaatcatggacaaagatagcaaaatttagctaaaacttacttaaaacttgtaattctgacaaaattganaaaaagaagactgtcgcgcgcacttacggtagaatgaatgatatctgatgatgaacaagcctgcagaaggaagagtggtcttgttctccttgggcacctgagatgaacaagaacaagaaacacatcaacatttcagagaanactacaacctcagtactagaactga

SEQ ID NO: 73206 - DNA, 379 bp, Oryza sativa
  unsure (1)..(379): unsure at all n locations
ggccatggattcagatgttcattatcctacgaggacggatgtctatgtctttaattgngatataagcatacaatacttggccaggaagaaggatacgtacgcacaacatttggagtttcgtgtacatacaatacttgccgaataactcatttgtgtcaaaattttatgtaggacctcaagtggactattcataataaagttcatcgagtactggaatggggtgtgtctgactaaaactttttgtcatgtaacacttgatgtaaaacacgataactatctattgtatctcgagagatacatatagttgtgatctatgcacgaagacatcgatgaatacagaagaaagatagcagcgattctttacaactctccatccaac

SEQ ID NO: 73207 - DNA, 229 bp, Oryza sativa
  unsure (1)..(229): unsure at all n locations
ctaagcttgggagcctcgtggtcgaccagtggagcgagacgctgccgttcttgtctnaccacnccgaggacatggtcgtgtacagcgccctccacgacgccttctcctccggctggcttcccgaccgctcattctccgccgttaagcctgagtcgcatgactactacgacgggtcctccatcggcagcttcctcgcgtcgtcgtcgtccgaggcggggactccccgtga

SEQ ID NO: 73208 - DNA, 223 bp, Oryza sativa
ggcccttaactcgctccggagatcgccttttggcgaatttttgtacattagcagaaagttttatgataatccaattgtgaaatggaacaattttacctatatatcttataaattctggcctaatgtcatttgcgaatagctaaatactccactatatcacggaatggatttatttatattcagagataaattatggacgcttgaatagcgcgctcagagaaca

SEQ ID NO: 73209 - DNA, 484 bp, Oryza sativa
  unsure (1)..(484): unsure at all n locations
ctcagcttgagaatatagatagaccggagagtctgtgtgctcgagttcttctggctaaatatttcccatctggctcgctagttgatactaaatgcttcacccggatggagggcaatagagtatggccttgagctactgaagaaaggggttatttggagggttggcaatggtcaacagatcagaatttggcgtgatccctggatgcctagatgccattctcggaggcccataacgccgaaaggtacctgtagagttaagtgggtctcagagctaattggtatggatggcagatggaacgaacaaatggtaaaccaaattttctggcctattgatgctgagatgattctgaaaattcagctaccgacgagggaagcagaggatntcctagcttggcatccggatagactgggcatcttctcggtaagatcggcttacaagctgggcctttcgcttgcannatgtgatagcagttctagctcgtctg

SEQ ID NO: 73210 - DNA, 322 bp, Oryza sativa
  unsure (1)..(322): unsure at all n locations
ggacaccactnttcttatacctcgcattattcatagatcacgcgattctgttagaaaccaaagccaaataatctctctcgaactgtgcgagatgatcatcggacgtggcattaatttaagcaagaatagaacagcttcgtgttcaagcaccaaccttcaaaataggtgaacaagataccactgcatccgacttataatcaactctacgagagagaacattcatcttatgtgtcttaagtgtcgtgtaaaccgaatccacagtcaaagtagacatatctaccgactcctgaatagattaactttcatctgccagatagacatg

SEQ ID NO: 73211 - DNA, 339 bp, Oryza sativa
tcactccctctatagcatatgaaacaatcatcaatattttttgccaatgaaaccccacccgtctaagcaaccaatttatcttacgggccgactgatgaatgtcataaatcctttcatgtactactctcctagcaactttagatggatcattatctaagtaatactctatctatatttcggcgatataatatatgaacgcttgccgccgaatcttccgatcaaccttaagtgtacgatctttcaaatatctaatcaaagagattctccaagctatttctaactcatgggtacaaatgtccgaattcacaattaattcggccttttaatcaatagtaacgt

SEQ ID NO: 73212 - DNA, 492 bp, Oryza sativa
tgacattacggaccactgggtctagtaccagggggtaccgtccctggtggaccactcggtcaggatgatccgagcggtcaaacttgattgcaatctctgaccatcgaagatactggggcgtgtcgggctgaacagcattgatctcccgttcagtcaacttctgcttccgtttagactcataagccagggggccgccgaagatatggttgagctccttgcggtgatcttgaaaacctgccagggtgtcgccgtcgtccttcttcctcgacgtgctttgttcttcgtcagagttctttcgtgcagtcttggtgtattgatccgcgaattgcttgtagacgaaacaatctttggccacgtggttggaggtaagatggtgcgggcattgggagatcatgatcttgtcgaacgtgttgacgcgcgaacgctgtctagaagagtgactggcgggtgcaacaagatccgcaagcttacgcttgcggccttatgattgta

SEQ ID NO: 73213 - DNA, 479 bp, Oryza sativa
  unsure (1)..(479): unsure at all n locations
agcttcagagactatctcncaaagctttcggccactctccttatatattgtccatcaagntgcatggccgtgcagcctctttggtgacattaaagaaatcacaatctggagggaggcaggcttcatggtacgcgaacaacgattggcattattccttctgcagctatatctctcccactctatgtaaacgcgttcgacaacttcctgtggacgcttatctcggaacaccatctcataatcctaatgaatttgcttagcctactcttgggccagcctcggtaaaataaatgttatcagagttatacttcatttgctggaaacataactccgcaaacataactaatcatgtgtatccttacaaaaagctgctctaagctgcaataatttatgctgataaacgaagtggcaaaacacgatgtcttttgcactatgttctgtcagagtttcttgaagaaatctctaactttattgtgattagt

SEQ ID NO: 73214 - DNA, 437 bp, Oryza sativa
  unsure (1)..(437): unsure at all n locations
ctcagcttacatggcactaggtagcatcatataattgaagagaaatctctaataatatgagtactacctgcgaaactctctgaatttagaccatgttttacgagattntatgaaatgccatgacatttctatagattgaatgatgcatccaggtggtaagtgaaatcaataagcgcaaattgaaagtatgtgcttaatctggtgcanagcaaaacaaggtacactttacccattgcaaagtgcaacttactcaactaataagaaggttatagacaaaggaaaggggggtaattcctaacaaaatgttgcaagctcaaactctgtcatatactgtatcttgaaaaattactactgacccttttgtgcttataaagatnttaaagaacattttggaaaaccctctgcacatttntcacaaacagcacgagctactatgt

SEQ ID NO: 73215 - DNA, 408 bp, Oryza sativa
ctaagcttgagaacagaagtatgctgatcagctgggacaaacgaaagttattcatttatcagacccaaaatatagtgattaattagaactataccactaagcaggggatcatacagtcgagtcgaatttgatagaccaactcattgaatttagagcggcattcattcacagtaccagtttgggtcaacaacaacaattcatccatcttaacactgcgcagatacacatcaaattcaccagaggttgctgatttttatataggcaagtcatgccaccccacctctagttttcacgcctggtaccaattagcagcttacccaattaaatttagtgcagccgcagagaccataaaacccttagtaatttaatagaacgagaaatacgtcttacagttatcaatccacatac

SEQ ID NO: 73216 - DNA, 470 bp, Oryza sativa
  unsure (1)..(470): unsure at all n locations
actcagcttagggatcttataattaacttttcaatagaaaattatttttatagttacatattataataccttaaaagagttaaacgagctgtattacctccattatgaaaattcacacttatgacacgtggtttgaaattccctaagaaaatattgctgtattggatgattacatatgtagaaaattgtttntggttctcacgatgtgactttgtggctcatgttttacgagattcatctctctctcttttgtatgcacgagcaaatcaagtcgcgcacatggctggcccaccaaggcccacgtcacgctctacgcagtgaaacaattcattcggccacgtgcccacatgtggaccccagactcatgtgatttgcgttctctcgtgcgatcgcgctagaatttttatgttntttcacctattcttattactgacgttatttttatttcccctataaaacatacaataata

SEQ ID NO: 73217 - DNA, 307 bp, Oryza sativa
  unsure (1)..(307): unsure at all n locations
taagctgcangaatgcctgtgcttccaatgattatccatcaaaagcatcgacgtcaacctcagctagcttactttttcactcttctgcaatcgccttggccagctcccttatttcagagctccaagggtggttgtcacctggctccttcgcatctagtgcaggagttatagcttccattcaaataatgcagcttctacgctggccttggagaataatctgtttattcccaggtgaactaatatggtcagatgggaagaaaccctncaaggaaccaagcactaagcgtgcacggtcagtagcacatct

SEQ ID NO: 73218 - DNA, 393 bp, Oryza sativa
  unsure (1)..(393): unsure at all n locations
tggtgctgacggccttcttctgactgtgagtatatcagaatgtcatcaatgaagaccacaacaaacttgtccaagtattccatgaacactttattcattaagttcatgaagaatgcaggtgcattggtcaagccgaacgacatcaccgtgaattcatataacccatatcgcgtggtgaatgcggtcttcngaatatcttcctcacggatacgtaattggtgatatccggaaccaagatcaatcttggagaatacagtggcacctttaagctgatcgaacagatcatcgatccggggaagatggtactcgcttttgatggtgacttcattgagagctctgtagtcaacgcacattctcttcgtttgtctttctcttcacaaaatcaccgagcac

SEQ ID NO: 73219 - DNA, 386 bp, Oryza sativa
tctccagattctcaccagctaacttctcaccagctgcttcttataatcttaagctctcccaaacatgccctatgattcaaatcttcttctatgatagagctataacctttgctctatcgttatgtagcatctacctaccacatcgcttgtctacttacttcgacctcgggaatcttcctagacataaattaattatcttttacatgccaagtcttgtcacgtagaaaccacactaagcgttacctcaacacaaccactctccagctttcttccaatgcacaaagcaaccatcacctggcactcaccactcctcatggagctccccactacatacgcccaagcatgagagaggggaaagggcagatctagcctaccctgccaccgtc

SEQ ID NO: 73220 - DNA, 479 bp, Oryza sativa
  unsure (1)..(479): unsure at all n locations
tanacacacanaggctcaccanattataacaactatcagtgaccttcggagtggaattagatcacgtaaagatctggtcctatttctttatcagattctgtttactaactactcgtatatttatatagtgggatgcagtctctattgcttattgcatgtaaattaatcatggccctgttgagccagatcagccgtaattcaagtcatcataccaaggaaggacgtacatgcatgaccatcatcatattcattcattcatatatattctatgttaagggtgcacatatactaattaggttaagaccctgcatcctaatcctggctaaaagatccccatggctgtgcagctgtttgaggaatcctcttgagtttctgttcatttgacttaaaccgtttggatccctggtttgtttcatatataagttaccacatcttgcaccaactanctatttgattagtctcttgcagatgaaacattg

SEQ ID NO: 73221 - DNA, 413 bp, Oryza sativa
  unsure (1)..(413): unsure at all n locations
tatcaccagagctgatgataccgaagatgtcgtgagaaatcttcttcagatatataatgacatggtatgttgccctacttttcatgaattctaatttctgttcaaaatggttcctacttccagtttttgttcaaaatggttcctacttccaaattctattcaaaatggttcctttttgttagatttaaatgcaatgttgtagatgtgcaaaactgtggcaacggttgtatatacaaaaggctgcatagtcttaagatcatcttatctcttatcttttaggtatttaacgtggntcttggaagatataaatcctgcaccatgttcgattgctcagtangggtattggtgtaatgatttgctttcacagtctgtagagttgtataattacgcttgtcattnttctgaactttaca

SEQ ID NO: 73222 - DNA, 451 bp, Oryza sativa
  unsure (1)..(451): unsure at all n locations
actcactcctagctaatgctattttttaaccgaatccactgtattaatcttaccaaattttggtgttaacttagaattcccagaatcatgcgtaaatggccacttactcttgtatactccatccgtcccaaattacaaggtctatattttttatacggttatcaatgatatacttttaccattaactcattccatgttatgtttccaatcaatatgatattagcattacatgagagtactttaaaatatatatctagtgatataacatacataatagntagtatagatatgattagcatgattattagtcaaaagttatcgagttgatattctaaaaaagagggtgcacgccctataagttgggacagaaggagtaacaattggttcttataaagtgtggagatattacctaatattatcgtcacgaacataacatactgattnttttctg

SEQ ID NO: 73223 - DNA, 413 bp, Oryza sativa
  unsure (1)..(413): unsure at all n locations
catatgtactaattaccagatgcagaagattacattctggtgtcaatttgacatctgcatgcatatgctaaatcactatgcaaagtcagaagaaattgatatctagtatctaaatccaatgagttgaataaccttgcaggagtacctctttgtaggttctcattgctctgctggctgcaaagcaaacagagggaaagccaggattcaaattaagttccaaacaaattaaacagaagtgagctgaaacttagttaggtcgttacctttgtgattaaaacattacattngcataaacaatgaaccttaagatttaattgcattcatttgcctcttttgagattggtcctcgattggagacctattagcagtacgctgacgtctaacttccaagcccaactgattggacaatggac

SEQ ID NO: 73224 - DNA, 398 bp, Oryza sativa
ccatggatggatgccagtgaaacgtggcagttcatgtgatggcgtcgatcatgatgtgctgcaacttatgagtacacgtgatcttctctttttctacgagtacttttaatgcagaaacatgtgaaatgaagtttggtcatcttgagctaggagaaaatttccaccaaaaaaacatggtgatattttgcaaagggccataatgctagcaaatttaggtccagctcattcaacccatctcaatcatggattcctcactcagactgtggtttaaccacaaattttagatgaaaaccactgtagaaaaatatatgtacgatgcaagttaacccttacctaagtgtatgatgctgaagatacaatggcgggttcagatatccacaagactactttcattaccc

SEQ ID NO: 73225 - DNA, 437 bp, Oryza sativa
tctggagcagaaccaccatgccaaatcccatcgcatgaagtaatgaaatataataagaacaaccaaattctgattcgttcctatacgcacggagggcagaggaaccctataaatcccctaatccccaaaccctagagaagtccccacctcaccgaggagaacgatacagcaatggggatccaccggaggggttggcgtccggaggtatcgcgggtgcggctggtggaggcctcgtcagcagccttggcggaggcagcgcgcttcttgcttttctcgcttgagggagggagccgacgacaaccgcggaaacgagagcgaaaccgtcctccctcctcgccgacatggacatgcccgtctgccgctaaccataatcagacccgctctcctgagaccctcgcgcgcgcgctcgttctgatgccagtgcgagcgttctgctt

SEQ ID NO: 73226 - DNA, 233 bp, Oryza sativa
cctactacaatcacatctccttatattaagatcaacaatgtattgagatcctctgatgctaaccttaaatgctcccatcccaacacgcaaagcatagcatgtaatagccatctctgtatatttctcgaacttgcgatttaactttgggcagaagccaccaggccaattactttctacgtcttttagcttggtggacaacctgtccatgatctgagtactaatgctcttaagca

SEQ ID NO: 73227 - DNA, 358 bp, Oryza sativa
  unsure (1)..(358): unsure at all n locations
aataaagaaatttccaaagtatttggcatacttcctgcgcacactggtttaacagatgtgcttaagtccctataagacacatggttccaccacacctggaaatatatggcatatgtggtataaaatccgagtaaataaactcataaaagatttaccaaccgcctgaaaatgaccacaatatataatcaggctaagccataatattggtcaataaatatgcacacttacgtggcgaagagcaatgatattgtatccaatcaattgcttaaaaacccaaacagcaccttgacttatatataaaaaagtcagcgggacagctatataaagctttactgtttgacaccctntaagatgcatt

SEQ ID NO: 73228 - DNA, 497 bp, Oryza sativa
  unsure (1)..(497): unsure at all n locations
gacactatgatactcagctntctatcttccacagatattgtaagatattgcatcatttcattgcaagggagacttgctattttctactcaagattccaactacaatagcaatcagagaaccaattaattattggtgattggtatgaggagaccactctactgtgaccattgaacaactgtgactgactgtctttntctgaagtgttcctgttggattggcaaaaagtgtgggtattactggctcatggntttctttgaataattctcagaattcatatattgatattgtgaaatgagcacatcacttcacaatttcaacgatgcagaatatatctttttcgccaatcaagtgtacgtcaatattgagaatatttgagtgatattgacacnccaaaaagcaaaattcttcatcagagaataagctaaatatccatctaaacaggaaaaatgattcagtaatgaaaggtaatttcctaatgaaagatatatcacaaata

SEQ ID NO: 73229 - DNA, 395 bp, Oryza sativa
ccactcataacgaacactataaccagagcgatgatattctgggccagaataagaccatctccccctataaccgaggattccaagatccaaatccttggcgtcttcatattgcttgtagagtgttacggacatcctctccagcaccggcgcacttgctagtagcagatgcatgagacgtatctggtccttgcaaggtaagaagctactgatctccacaattcgaaggcactcaagagagatcgtttccttctcccaaccctctggttggtcacagatacacatagaattcacacactgaataccgccctgcgaattagatcagcactaatctaggtcagaatggcagataatagtttcatcaacatctgcgtgctgacctaataagttgccagtaa

SEQ ID NO: 73230 - DNA, 400 bp, Oryza sativa
aaagagaagagaaaagctactatatccatacccgaactcttccgaaagcttccggactccgatttctactctattcctgttccactagcataagaatactaaacaaacttgagagaatatgagagagctcttgcttgaggtgtgtattgaactgaagagagtgaactccttttataagtaggtaatgatggttatgatggttggaatggtccggaataccatccaaccgtcattggtgatcaatcccagcggtccatcaaaaccctgcatctatcggcgctgcgggaggttcggtcgaactatgggctggcccaactagcccaagtttcggctggtggcctcctccattgctttactttatatacttgtgaattttggcccaaattatcatgtcaattct

SEQ ID NO: 73231 - DNA, 449 bp, Oryza sativa
  unsure (1)..(449): unsure at all n locations
ctgagccctcttcttaagatttttagcttagcattcaagattattgcatgggtatttcctctaacaggaatggaccaacaatgctgcacaacatcttgaaagcctgtgacattgacccaatagttctcaaacctgaagatagaagatnttggcactgaagtctcaattgaaatttgacagggcacatgatctgagatgtactttgaggttgctgtgaccatggtgtgagggaacttaagagtccaagctattgaggtaaaaacccaatccagttattgcagaagaggctgctcttgcatattgctccacgtgaagattcttcctttgagagggatttctactaagcctgcattgctgattatttcattaaagatgagaatgtcattcatgtctnctcctangatgtgtctgttctcaacagaccttattaaaatgaaattccccattat

SEQ ID NO: 73232 - DNA, 331 bp, Oryza sativa
  unsure (1)..(331): unsure at all n locations
atctcttctctggcggcgatacactaatgtgagagatataataatgacaataacacgtgaaccctatacaacaaagaacgtggcttatagattctagtggattgtgctcctagcctacatgtaagntaaatttctcgggtaaacgggcaaagcgggcatgcttagtgattacccatacccatgcccatttacccatcgggcatagatttcgacccaattagatacccatgggtataaaatggagaacaaacccaaccctaatatggattttacccacaggtaaatgggcgaactggcacgattgccatccctactaacgagatatacttca

SEQ ID NO: 73233 - DNA, 307 bp, Oryza sativa
  unsure (1)..(307): unsure at all n locations
caccacaagaacaacactggtgcacacggtgttatagatctttatccacanaagctatcagtgtgctgagagaacaacttacaagtgtaacatgcttctacacggacaagaggaaataaaatacacttaccccatgaactacatattacaggatctgtacaaaactcaaaagcaagcacacaagtggcgcaaaaaaaacaacctatgcggcatccatgaaaatcagctgaacctgatcgaacatcctacacatatattccagatgctttcttcttcccgagggattgtgggtntacagccaccgaat

SEQ ID NO: 73234 - DNA, 307 bp, Oryza sativa
tgtatcctctcattgcattaagcttgcgtaagaaattacacatgagacatcgagatatatgtctatcatatgaaaaacatgagagctcttatgaattccaaatgtgtcacgaaaatttcacatagaaattacatgaaaaagtttaacatatctatcacatcaaacaagcaaagcttccaaatacatttcatgataaagcgcatatcagagtacgattatcgtacgtggaaatcttataacacaccgcttatgacatattaattttcacatatagcctcaagcttcaccataagtggatgcacctttg

SEQ ID NO: 73235 - DNA, 476 bp, Oryza sativa
actaagcttataaagtttctccccttatgttcaagcactaaatctaccatttttctgcatgcatgtatgatctccttgccaacaatgttgggctcaagtaggtgggaactttttctcactctcaatactgaactgcttccagtaagaaccgtactcttgagtgtcaaaaatactctgtccttcgaaatgttttctatcttcctgttgagacttctaatcttcacagcaacctcatgacgtgcctgaacattagaaaagcaagtggaaattgacaggccagtgcaagcaattgacttccttgatgacgatgaaggatgatcagttagtagaatgcttcccttatatctagccaagtcaataatatcatcaacatcatatagaacttctcttagctgaccaagccaattgtcaactgctgactcttccatcctcctttcctcagcatcactaatacaacaatgtatgagttcagtctt

SEQ ID NO: 73236 - DNA, 466 bp, Oryza sativa
  unsure (1)..(466): unsure at all n locations
tgtcctagntctcccatccttgcgacgaagcagcttagcgaatccatgcattctgtctaccgctgggcctctttgagtcttgtgggcgacttcatgttcttgattgccttgatcttctcggggttggcctcgatccctcgtcctgagacaaggaagccgagtagcttccccgatggtactccgaacgtgcacttctccgggttaagcttcattcgatatctgcggaggttgtcgaacagttccctcaggtcgtcgattagtgaatcgctcgtcttggttttgacgacgatgtcatccacgtaggcttcgacatttcgtccaagctgatcgccaagtgccccttagattctgcgctgatatgtgttccgggcgcttatcaatctgaatggcatcttggtatagcanaatacaccgaagggcatgatgaacnngtgtttcttctcgtcctcttntgccatgctgatct

SEQ ID NO: 73237 - DNA, 416 bp, Oryza sativa
  unsure (1)..(416): unsure at all n locations
ctgcaccgggacgctgtttgttgttcctaataaacaattcttacatggctgcttagcccacaagacagtcggcggtcagctgacggtcagtgattagcgattaattatatagaacgggtttgtgctttgttagtgcgatgtttcatggatgcatataaaatagaaatgattgtttaaatcaaggcaggttcttcactcacagtctcacacctgcatgcaaggacctgcagcaaccatggtaccaaactaccatgaaggtgcttangcttcttccaccacaagataacgaaacacatgcaacgaaattattgagactaacctgatcagggttcactggttgtttcaggacactggcaccaacgctgtattagcaacatactctatcattactggatcgccaatagcttttagcgatg

SEQ ID NO: 73238 - DNA, 381 bp, Oryza sativa
  unsure (1)..(381): unsure at all n locations
gcctcttcgcggcacctcgttgcccgcgtgccctcttctgtccttcttgttgttgacttccacgagcctcctgctgctggttcctctccacatacctttatccgtgcccctcctggatcccctccgggttcccctccgcatccctctacacgatccctttcttgttcaaatactggattggatcctccgtcccctcttcttcgttccagaactggctggttccctccgcaatggtatctgacaatatctgttcctcatcgcgatcagccatctgttcatacatgaaacatctgctaagtcatgagacatttatgtnttaacaatcttatttgctaacaatcatatgcttatgttaggtgacgcatattttaggaccctatc

SEQ ID NO: 73239 - DNA, 473 bp, Oryza sativa
  unsure (1)..(473): unsure at all n locations
agaactcagctgctgcacatctagaacaatactccttcattctatgtgtttaccagngtctaatttcttcaaataattaattatgcacgacaatattgcaaactctataaaatcaataaggcattgccgctccaaatgttacaagagttgtagaacaacaactttgttcggtcataaattaatggtatcacatatagtcgtatatatggcaccattaaattatcttttctttaatcacgggaggtaaaattatgatgattattactggcatgctttctaagctctcaaacagaacgaatattaaaaggaacacttttaaaatcaaccttttaactctctaatatttaatttatttggttatgcccttaaataaatatcacataactcagtncatcgatcacccactcactgtatacacaatatgccattaaatttctttgaatatattgcgacttattaatcgtttctctgcc

SEQ ID NO: 73240 - DNA, 488 bp, Oryza sativa
  unsure (1)..(488): unsure at all n locations
tgtctcattaacttgatcctatggctccactctggtcttgtattatcatgtcatgtgcctctgtactttcaacacataactgaaagttatgcattattgttcaatctgtttgtcttgcatgatatgagaacttgttttcactcctcattctgactatatgatttcctattatgtgttcttgtctgatgtagttttatctgtgtgccttccatgatattagaaccagttccgtgcttgattatgtgggggcagcttaaggtgtttctaatctgctataatatttctcatgcttatatagttggaaagtgcattgaagtccacacaggaggcacaggacttgctccgcaatcaaactgatagtgcaagaacatcaatgctcaaggatgaagaattcaagtcactggcattccaggtgccattcttgtcgactccctcctcanaatatcgctatttctagtgcttaaatttgtcccaaatatactattcta

SEQ ID NO: 73241 - DNA, 437 bp, Oryza sativa
  unsure (1)..(437): unsure at all n locations
tannacatggattacttcttgcttncatttatcttatatatttacccaagctatggagacaaaaatggttntcatcacttctcaatgggaattgggaacacatgacttctaagacaattcaaaggtttcccccatatatgcaacaccacattggataacatagtaacattagacttatccttggtgggaacagccgaggaggctttactgttctttacattgatccgcataccattttctggtcaaatgttctaatatttatgtaagtttaataagtagactgtaggttcttaaaatttacaatactttttttttgcgatttcgacattagtgatgtccaaacataactcttataggtttaactgaatgtcacgattcacaaatacccttatgatgtacaagcttataaccagatatatngtcaattttctttgata

SEQ ID NO: 73242 - DNA, 441 bp, Oryza sativa
  unsure (1)..(441): unsure at all n locations
cggagntcattccaccaagctaataaacatgaataattaatttatataagaaagtaattcatgtgaacaagattggtggatcaaagtttaaggcacaatcaaatagagatgaagtgcctgtaccttatcattgattttcagaagaacattggtatagtactgatcattcatcttaacactaggaacaatgcattgagtaataatacccatctcatgaaggttnttcttcttccatggccctacaaaacagattgatgagatggtacgaatattgaagaattcatgagggcagaaataagtaatgtgtaacctattatgctattaccatagagatcacaatntttcctttctgcgtaaacacacagcacaaattcatgaggaccacgaagggttgctttcactttttaaacatgcttcaacccttacacaggagacatctct

SEQ ID NO: 73243 - DNA, 469 bp, Oryza sativa
  unsure (1)..(469): unsure at all n locations
ctcagctagtctaaagntagttcggctaagtgtgacaggaaaccacattttcaagcccatgttccccgtttaagctcgggccacgcgacaggaatcgtggacgcacgccagtgatgggaaacagaaaatcatcctctgatagtaggcgctggatatgtttgctagctgatgaaatccagctaccatgctccatgtcttatgatatttngtgcaactgtacttactcattaaaatagggagattccatctaaacaacttccttctgtccctaatctcagtcttgatcctccaaatttttaataagaaaaatacggctacacaacaaaatatagctgtatagagtgtacacagactggtccatatcttaattagtagaacttctgctgataatttactgttcatctgcacttttgggaacaaacataggagtattgatcaatagagcagctagctggtacaaagtctacta

SEQ ID NO: 73244 - DNA, 488 bp, Oryza sativa
ctaagctgtatagtacgtttgaccagcctcttactccaagtagaatccacattgtttttctcagaaagtatgaacctctatatggattaataattaaagaataggatctaggagtatctcataaagcatggacacacattccagcataaataaataacaaagggtattggacttgtttcttacctatatccttctcgcagcgtatctttatcagtcatgatgggtgcacgaatatccacattcttgtcatggccataaaactgaactgttcacagcacatttgtttttcagtgggaacttataatatcaagaaaagagggagataccaataaaatgccagagccaatcaatgaaacaataattttgtaaacatgaacatgatctccaaccacaattatttatacattcacgataaaggatgcgtgtgtgaagctacattctgggtcttcatttatcatagaagatttcacttacatatctaaaacaaa

SEQ ID NO: 73245 - DNA, 408 bp, Oryza sativa
  unsure (1)..(408): unsure at all n locations
tatcattgtacttccctatcttgactgtcaacatcaagttttcttcttgtcattgtcagtcggaggctatcatcataataatggagtgtgattttttattaatttaatttgcttacttggtctatcattgccttgtttggtttttctacttaatctgcgaggactgaaagtttttaatagcttctttgggttttaggctcaacaaagcttgataaaagctnttaagaaatcaaagacttggctagatttatcaagcacagcataaatacaccagtattgtacaagttatgcctccatttgctacatttatactcagtcaaaatcagtcttttcatcatcagagttattactacttggctgaaggtcggtattgcgcgaattggctacaacgtcacttgcaatcttgtc

SEQ ID NO: 73246 - DNA, 460 bp, Oryza sativa
  unsure (1)..(460): unsure at all n locations
tagattagaggtaccatttgagatatcaaatattntacaaatcctaacctatatacattattnttctttgtatgaaccaatgttaggtgatgatgaacacaccgcccataccttatcatcccacatcttatatatacccaacacttaataaataaaaaaattattacaagtctttctaaaaaggacttaaaaacagaaaaacaaatatcagcgattctttctgaaatctcagctcgttttttttataacacttcctatgcacgggttacatttcgtcatgtgtcactcatctgatgggcaacatgcaaagccaatcagatggcataaatgaggagaacgagatggttttttgtgtgaaagaaatacaatattgtatgattntgcatgaagcggtgaggttcgaagctcaaaaaaaactctnnttttttacatataaacacttccacgatatttctcaact

SEQ ID NO: 73247 - DNA, 496 bp, Oryza sativa
  unsure (1)..(496): unsure at all n locations
tgtcgctctcctggccatgccatcggatgcgcattggcgcattgctgatccgaatactaccgccgtcgntgagttgntcttcctcctcttcttccagccctgcgagaagctcggacgcgttggtcatcttgatctttcaactgccctgccccagccgtcttcggagtgctctaatcgatcggncacattctccgtcccctccgccctactcgcagcttgtgttggatgtccccttcgtcccctccgccttactcgcagctagttgtgttggatgtccggaggaggacgaanaactaatagctctcgttgcacgtgggattggatgatctcctcgatcagtgtgctccccttgattgaagcatgtttcatctcctgaaaagcaccatgatttgctcagcatgatcttggacacaacaatttgctcacctcatccaacgaacatatcccanacgtacgcctcanaatcagcaagaataagcaccacgtagatcgatct

SEQ ID NO: 73248 - DNA, 386 bp, Oryza sativa
  unsure (1)..(386): unsure at all n locations
attctcttttcaattatcttgtaaatattggtactggaatattccttattttcataatgtatattatatttttttctgaagaacaaattctgctgctagtaaggaatctaggatgtccctcatgaaataggcaacttatgcttattttgtcatacctgatcacttttctggcggtaataattntcttttacattggttaacacatccacaaacttttaaataaatcatgttgtcaattcgctttcactgagcacatgttatgttgagtggtgcaattatttgggactggtataaaatcatcatttggcggccgttctaatattggaaaattcactctggggggttactttgtatatntattcttatcttgcacagcggaattacat

SEQ ID NO: 73249 - DNA, 471 bp, Oryza sativa
  unsure (1)..(471): unsure at all n locations
tgttgttccacctggatctggaatnttgcatcatgtgaaccttgaatatctgggcagacttgtgtttaacaatggtggtgggatcctttgccctgattagcagaattgccgtacttactttgatacaggatttaaaaacttcatatgatattacatgttaaaactttgtttggttaatctcactaacaaggggattggaggagaattaattccacacctatccccctcaatttcctttgatcccttcttcatgggattaaccgcacaagacttaacatgggtatatggctgcattactatatattaagacgatatataataattntgtactttgacttttaacaataaccgtaggtagacttttagctgatcttaataatcatgaaaagagattgaaaaattaatattgcccacaaagctcttagattattctagaataaataatacatttatgtaactacccacttttat

SEQ ID NO: 73250 - DNA, 423 bp, Oryza sativa
  unsure (1)..(423): unsure at all n locations
tgcagcatacaagtctttctctgacctgtcacctgtgctcctatttactaactttaccgcaacacaggcgcttcttgatgagattggtggcatggcaacttcctgcatccatgtcattgactttgatctcggtgttggtggtcagagggcttccttcttgcaggagcttgcccaccgccggggagctggaggtatggccttgccgttgttgaagctcacggctttcatgtcgactgcttctcaccatccactggagctgcaccttacccaggataacctctctcagtntgccgcagagctcagaattcctttcgaattcaatgccgtcagtcttgatgcattcaatcctgcggaactcatttcttcctctggtgatgaagatgctgctggtagcctccctgttggctgctctgctcgtgcacc

SEQ ID NO: 73251 - DNA, 287 bp, Oryza sativa
aagacacgacgcatacatacccatccactcctcctcgaccgataacagctacctcgcacgatcgatcgaacgaactcctcaaccgacaaggcaggcaactctacttgctctatcttcatgcactgctgatctagggcaagagcataccttgcaatagcatgcgaccaagatcttacatcgctccttctgccacagaatacccgtaagcgtaagccaagattgaacatgccatgggactctggatcaataactgaacctcgaaatgccgaaagaacacttctcactct

SEQ ID NO: 73252 - DNA, 471 bp, Oryza sativa
  unsure (1)..(471): unsure at all n locations
acaaagatgggaagatgagcttgtagcttatatttttctagtttggtaagnctggattcatcactgttcaagataaaatgactagaacaatgttggcagaatattaaatgagttatcacatagaataattctccacaacatcaagacataatgagaaaggagtagcattaaatttgaatatgaatcaatagtgtttgcattagaaaaaaatagtatccagtactgattcataatgtggatatggaaatcatggctactttcttttattgcggtggcccttagctacttcctccatgcccatttaattgtcacatttgcaaataactccaagatctatgcaagaaacccttcttcttttcaaaactaattctcatcgatcaacatgctgttgtaggcatacatgatacatgttcatgtggatatgcaaaagtgcaattgcatacatgggagacatgccacgatgtcatttac

SEQ ID NO: 73253 - DNA, 363 bp, Oryza sativa
  unsure (1)..(363): unsure at all n locations
acactatgaaactaagctatctacttgcaaatattactattccaaaacctgcatgttgtgtagctatgaagtctggtccacaaatatgtaaacatggcatacaagagaaaacacacaatgaaatgaaatacaagatttcatcttagcgatacatcatgccatatattcatattntggaagaataatgtaagataagccatctcagcaaagccttgccatgttgagaaccgcgaggatggattgtcagtatagaaaaccaaatactttatacaaaagttcgtgggcttgatatgtagttgtcaagtcgatattgactataccgctaagtttgttcgagttcaacaatctaccattgatattggc

SEQ ID NO: 73254 - DNA, 442 bp, Oryza sativa
  unsure (1)..(442): unsure at all n locations
tnctctcncacctncctctgtcactctctggtcaagcggcggttgcagcatcagcttcttgcgtttacggtggnggaagggaaccagatggacttgcttgcgcctctttttcctgtttcgttgggtgggtgtttatttagttttcttcacactagtttgtgtcgattattcgaatctgtatatatgtagtactagtatatacacaaaccanaaagaaaaaaaaacatgttcttattgagcgcaaggtangagatcaaaggtggtttatccgatccgccatggctggtggccggccaccaccgtcttgttccttttctctttaactagattgacgagacgtanggagagagactacactgtaactataatgtacccgcgtgttgctgcgggaattcttaaaaacaatattgtgcgtatggtcgcatggatatgcaaaacactg

SEQ ID NO: 73255 - DNA, 496 bp, Oryza sativa
  unsure (1)..(496): unsure at all n locations
tcttcttgacacccacttgcaccccacaggtttacacccatatggtcgttctgtcacctcccaagtcccgttagcgataatggaatccatttcactacggacagcctccttccagtagtctgcatcaagagatgcatatgcttctgaaattgacttatgagtgtcatccacgaggtacacagtgaaatcatcaccaaaagacttagccgtcctttgtctcttactccttcgaggagcttcactgacatcctcctcagagacaagttcatgtgtatgttcagtttgttctggtggtgtgattgaactgggaattatttcagagggttggttcgaaccactatgtgtatccttcattggaaaaaagctctcaaagaaggtagcatcacgagactccataattgtaccaacatgcatgtccggtacctcggatttaactattanaaatctatangcaatgctatgatgagcatatcccagaaaaacacagtccacagtc

SEQ ID NO: 73256 - DNA, 474 bp, Oryza sativa
  unsure (1)..(474): unsure at all n locations
taatattcggcacaccaattagaatagatttcttcgttgtctgatactcacaggaggatattgcattaccaaataaactggttgatcttttcaaatcatggtcggtcaaacatcggaagatctatgcaagcctaaaggagaaggtcaatttccgcactaggttcattgttgtgagatcttcaagagaaactgaggcacattgttgacacaacacaggagaaatattggctggtggactgcccgcctctaaccaaaggctttttgaaaatcgtcagtttccgcactaggttccacactcccgtgtgaaaatcggtttccacgtacggtagcattaagccaaccgactggggaaagaaggagaacaaaaataaaaattaatattcataacattgagcgtccaactagataagtagcattaatccgattcacatcaaantcanaacttatcccaaatccataatcacanattctatg

SEQ ID NO: 73257 - DNA, 350 bp, Oryza sativa
  unsure (1)..(350): unsure at all n locations
ctatatttntctataaaatttgattaaacttacaaagcttaactacggagggagtagcaattaacatatttaatttaataatcagttgactaactaaccttctgctcgagctgcttctccaagctactcaacttctcatcctgtttcttcagctccttggtcagctgcagagacatacacagtacaccgaagtggtgtcagtacagtgagtaagctagtgaccggcgcatggcttgcccaatgttgcatcggtgttgattgttggagtggaaaagtgggggtttagcttggaaacaactcaagcaaaatggtagctaattacattagttagctcgtgaagcaaatacctc

SEQ ID NO: 73258 - DNA, 406 bp, Oryza sativa
  unsure (1)..(406): unsure at all n locations
ntnngtgcgatatggcacanagcccaccattcgcaatttcggtccattaatattttgggaggatcagagcagctcatcaggcccacgcccaccacaccggctcatctgcgtgtctttccttctctccttttcctatgacgtgaggcgttcttttcttcgtgtcgcatttcgggctccttgtgccaagataaaaggaaaagttcaatgggctttcaaatttcatttcaaaccttacgaatgtggccgacaagaaaaaagaactaacgaaacgtacgtgagggctngcttttcttcgtgttgcatttcaggctcgttgcgaagataaaaggaaaagtggcaacgatttcaatgggctttcaaatttcatctcanaccttacgaaatgtggcccgaaagaaaaaataac

SEQ ID NO: 73259 - DNA, 466 bp, Oryza sativa
  unsure (1)..(466): unsure at all n locations
ctttcctgttcagcccaatggccgaacaagcaaatgcgcacaacctctctccgagtgttagcggtgacgacggggagccgaacccacgccgtcgagctcgtactccaccgccccctccacgtcacccgcccattgtccctgacccggagtctccagcccaacgttggctggacgacgtggccaacttggtcatgacggcacggcagcgcctangtgctagtgggcggtcctccgccaccaagacctctggcgctgctaccaccggctccgtgtcgtcaaggcggagggcgcggcgagcggcggctgttgctcgccattcagccgccactccttcgtcagcgcctccgacccangaagatctgcgtggggggccggatgcccgcatcagtatcgagcgcccgcgtaatggccggcgtgctgcccacgcaacgganggcgccttctcgtncggagtgtcacatcaaca

SEQ ID NO: 73260 - DNA, 456 bp, Oryza sativa
tgtgctactaactctacttctttgagtgctttgcataagcttaatgagaagcttatgggactccttcataatggcctacttaagtgccatatggatagtaaggccctaaaggagtacctatgctatcaaagggactacttcaaccatgaaggtcttgggtatgttcctccacctaaaggaaaggtggacaagagtgatgatcaagaagccccaaggtcttaacaactttgttaaggaaaaatgtatccttcctaatgattatgcttctcattgctcttttgatgcatcttatgttcttatgaagaacactaatggtcgtgttgttgctaagtatgttggcccacacggaaaaaatatttctatcaagagagtactttaggtgcctaaggcacttgttactaacatgagaagacccaagcaagtatgggtacctaaaactataaattgatctcttgt

SEQ ID NO: 73261 - DNA, 417 bp, Oryza sativa
ctcagcttgcacggtctctgaatgctaagtgctccacatttctagtttttttagtggtggtgcgtccaatcacaagctttcgattcgagttaacatgcagcccccccaaagaaagggaatttccgtgaaaagcatgcaataagagatgaatttttacaattaaggctctcaaccataacgggtgtgaagcagcaaaatagcattggtttcgaacatacgaagcatccttaactattcttttcacgaacgtcacacctgtgcgctcgagctcggagtactactgtctttatcttgttggctcgaactggccggatgtgactctgatctccatgcaagagatgctcggagagacctcacggtatcttcatattctttcttctttcagtaaagcacttggaaagcctttacgacgggttg

SEQ ID NO: 73262 - DNA, 407 bp, Oryza sativa
  unsure (1)..(407): unsure at all n locations
ctgtggctaattgtgctctttccttaaccgaacccacttaagaatcttaccaaattttggtgttaacacatatccccttattttggagtatgagaattcatgcttcanaattctcttctgtcttgccttcattacttcaaaattgatcatccgttgcttcttgccatcagctctcacaagacgatactatctacattagatgaactagactatcaaactcangaaggaagaatttgtccttggtaggtgctgacaatccttgaaatgaaagatccgctagaatggctttcgttctttcataacttgacantttttacattacatcaagatatgataatgaaattataatgttgtgaattcgtttttaaatatctagctagagaacaaataatgatataattctcatg

SEQ ID NO: 73263 - DNA, 371 bp, Oryza sativa
  unsure (1)..(371): unsure at all n locations
ngaactctctcttatgccctctacttcttatgaatggctctctgaatcaaacttccaccattaggttgctgtgaaatcgatcaagattccccttttctcatggaagaagcaattgaggcttgccatcaaactatgtcaaatagtccagcgatggaagcacatatgtgtgtaatacaactacaaggccatgaatgttctctaagaatatgtgtgccaatatgtaatcaatggttacagcatggttntggcgatttttttgttagcatatctatgcactagtttcatactcaatagtggttttttttttcaatacagaaataacttgatgcctaanttggtacctcaagatgcatggaattacaaattcaatg

SEQ ID NO: 73264 - DNA, 487 bp, Oryza sativa
  unsure (1)..(487): unsure at all n locations
ttgcgagtctatgactatcggtttggctaggaagtcaactcttctcaattctaatgttaacttccgggcatatttgagttgcccttatattccttccaggggaatgtactatcattggtacacgcaaattttgggttttccaaccatttcttttcacaaaagcttgcgatatgaaagaatgggaagctcccgaatcaaacagaactattgcgggtacggagttgacagagaacatacccatcacaacgtctggagcatcctgngcggtttcagcttggatgtgattcacgcggcctcgaccaatgttgttggaagcacgtgaaccttgtccacttgcctgagagctnggacgagactgagctgccgctggagtaggagttntggcagtgctgccattagcatgtcctgagttgggggtggtaggattctgaggacactgtctaacatagtgacccatctggttgcaccggaaacacttgactgctga

SEQ ID NO: 73265 - DNA, 440 bp, Oryza sativa
  unsure (1)..(440): unsure at all n locations
ggtgcttgngcatgggcagcggcgacagaggccttatcatatctcagcttaattgcttgccgntgctcggaatcctcttcgcccctggcgtacccgtcaatgatgcgaagcatgtgttcaagcgtttgctgctctttgttggcgattattcttgtgagttcgccctcgagtagcccggctgaagcggcgttgatgacagacgcctcggttatgtcttgcacttagcaccgagcctgcgagaagcgacgcatgtactcccttattgattctcccggcctctggcgaatgccgagcaaatgctgctatgtcttcggctcttcgtaggtgcctcgaaagttaaggacaaagacatcgcgcaattgctcccatgagtaaatactattggctggtanattaaagtaccaagagcgggcgatgccgtctagagcgagaattattac

SEQ ID NO: 73266 - DNA, 404 bp, Oryza sativa
  unsure (1)..(404): unsure at all n locations
ctcagctggcgactcaccgctattgccacatgaacanatttttttattgggggactggatgtcgatgtcgacacaattgtaaatgtcttcacttttatttgtcaatgattntgcttgtattaaggcatctaacagtagtatccaggaaaaaaaaatgtgaatggcatcatgtgactggatgatggaaatggctaaatagacataccaaatctactggtctgcatatataactggtgaaacttaaaactgattaatgccaaattagatattggatgcttattttgtggcataacttacactcaggtgtgcatctttnttcaccaaacttctgcagaccgacataagtccctttaacagcactgttattgtacacaagtatagtanggacatttcgatctgggtag

SEQ ID NO: 73267 - DNA, 429 bp, Oryza sativa
  unsure (1)..(429): unsure at all n locations
tgactcggatagcactgccagctgggtgatgaggaagagaattaaactgtgcatgttcatttctcctcctcatccaccattgcggcaattggaggcgcttnttgatcgattgatagcgtggtctgggctacttggttatactgaggatggtaatgtggcatttctacagacgccacatggcgtcatcatggctccagctntgataactataggagttcacagctggtgcttccctatcggagagagttagcattgggttgtatcacccatctcaagcttctatttgacaggtacatctgttcgtgattctagcaagtaatgaactgagtaatatgttaccttggttggctgttgaaaagtcgaacactaccacttgaatgccgaactgtattcatatcagataaaaatacgtgtaaatctgctatattt

SEQ ID NO: 73268 - DNA, 470 bp, Oryza sativa
  unsure (1)..(470): unsure at all n locations
taaggaagctcatgacaacctcctttccactactcaacattgttctcacattgatgttgacatatcttgtgacttgcttgatgatagtgcttcttgtcatattccccatgttgcatcatctagcatttctaccgcttgtgatgatgtcacgcccggaatttctatccaaaattccaaacgcttacatgtgtgtgaaccctcgtccaggaatcagccgaggcacacaataacaaattgataatagagtacaattattactctaattaataagcgaataaaatgtcattacagaggtagatagttcctctcaatcaataaagatctaagcagcgaanaaaataagataattggcgcagacgactccactccacaggcagcttgaccagggctacacctaatcctccacaccatcagcatcactgtagaactcctnctctgatgaatgaattgcaggtgagtatatgacatac

SEQ ID NO: 73269 - DNA, 444 bp, Oryza sativa
  unsure (1)..(444): unsure at all n locations
ctaagtctactctgntgattaccaaataaatcaaatacttttgccgagtacaccaaataaatcaaatacttttgccgagtacagtagcatacaaggaaaatnttaagaccgtatattaatttattcggtcaaatattttggctatgagctatatggccgaaattaatcaaggagtttcttcatcaactatgataagcgggaacgggttcaacaatactattacacaatacattatgaccgaccacggcgtcgtgagaggaaacgccccgctacctcaagttgtagtttcaccaaaaggtaacctccgattcgcccaacccatactttgctattcaaaaggttaatgatcgntgtgtagatgcatatgctacttctaagtttgcttctatacaatatgcttataatgctatgggggtcaatgggtgtntatatnggccattacac

SEQ ID NO: 73270 - DNA, 474 bp, Oryza sativa
  unsure (1)..(474): unsure at all n locations
ttntctctaccaatccgggatataaatattcatcagcacctctatatttcacagcactaaatctcttcccgccaccccgtacctctgataatggtctaaaatcattgaagccacttgcgacgacgttgctcaataatgaaaatttggcgtgaataatattcaacaccagtgcagcatcatcattacatacttacagccgccgactaccgctttcgatatattgactcaattttccagcctggttaaaaatagcgaccagctcagtcgcaaatatagtgactaccctaactaagcaacaataaggaatacactatgactgttcaaacaagtaataatccgcacgtcgatattgctgaagataatgcattcttcccttcagaatattcgcttagccaatataccagtcctgtctctgatcttgatggcgtggactatccaaaaccctatcgcggtaaacataaaattcttgtgatc

SEQ ID NO: 73271 - DNA, 331 bp, Oryza sativa
  unsure (1)..(331): unsure at all n locations
ctatcaatcaccatctactntagacatatcttctgaaacttttttcaaatccaaaagtccagtatcttcctacaaattagtgaattaggaggagctctttgtgccgaataaaaaagagcagggcaatatttcaaacttgcattcgaactgcgaaatatttataccaaggaggagagatcaagataatgcagcagggttggttatctaattggctagtcaaacatgaggtggttcatagatctttgggcttcgatcatcgaggaatagagactttgcaaataanagcagaggaatgggattccatttgctgcattttatatgtatatgggta

SEQ ID NO: 73272 - DNA, 389 bp, Oryza sativa
  unsure (1)..(389): unsure at all n locations
gacctatctgatgagaacactcaacaacttgtgctttctcatcccatgttntcatcctgccaaatccatcgttgccataaaaaaagaaaataccagagaataaaacgaaatcaatcaatgtggctccttggtcttccaaccaatagagtcctttttgcttcactcgtctttgtttttcttttttgtgtccaataaagagccccaggtacaaagacatgtgtgggggtgatcttgcacatcaacgccgaaaccaaagcaagatcaccctatgagtgatcagccatgacgaaccacacaaagcgaattgatgcagtcacaaccaatgaggggacagtcaaaccttcaattcaactgaaccacctctatcatgaatcgctctctgtgtatac

SEQ ID NO: 73273 - DNA, 448 bp, Oryza sativa
  unsure (1)..(448): unsure at all n locations
tataaatgaaggtctctatttaagatatgcgtgtaattgattatgcatacatttgatgcatgctttgcttagcacttcacaaatcattatgcaatatagtaaatataagtgtcaaggaccttggcacctggctcttgaagaaaaacaaaagatcaaggggaaataaagagagggagagggatcacgtaattgactgtgaccagtgtatcctgtatggtcaaacaacaaactcaaatataaagtggaaatttcagccttgattcttctgacttcttctactctactctcttcctaattctagtatacaatatagtacaatagagcctcttataatttagctcaaacttganagtgtgtgtgagagtgaatgaagtgatgtccttatataagtaggtatgacggttatcctctatgcgaattgtctgaattgccncataaccgccatcat

SEQ ID NO: 73274 - DNA, 441 bp, Oryza sativa
  unsure (1)..(441): unsure at all n locations
gtttaaacgtcatctattatggatntgtaatcataatctacattgaaatgagaaacggtggatgatcgacatagaagtttcgaggataaactaacaaagggattttattataagaaagaaaatgtgcatacctgggaattcattaccatattttgccttcgtatttttgcaagatattgagagtaggatcccagaacaatatgatgaacacctaaattcaaggagatatgttcatcttcaacaatctttctgtctttctgaaggaacattctacatagagacttgtaggcctgtcagaaatgcagagcatcaaccttcaaccctggagaaaagctttacatttatgcacagaatctagtcgtattgcttgcacaataagtatgccaacctgtggtaaatcagttatcattctgtctatcaatattcgacatcatcacccac

SEQ ID NO: 73275 - DNA, 489 bp, Oryza sativa
  unsure (1)..(489): unsure at all n locations
tcaaacttggacaaaactctgctagaaacgcatacaagagaaccaaggcatagcttccatgcttagaagctgttgacagcacaactgcgtagctctccctccatcttttcatacccaccttgccttgagctgcccctttaattatgcatggatcagacctatgtatgtttgttttccaagtaatctatatctccattgggcatgtcacctttagttatgcatggatgtctcctttatagatccacctgttgatgntttctgctaatcgatgtctccagtgagcatgcatgtcaaagttggaagtttgtgtgtgctttgatgtaatggaaaagttggaagtttgaagaaaaaatttggaaccaaacttgtaggctgttgttaagtccttccaaagatgaaagtttgtgttgaaattggtacgatgtgactgaaaaatngtgtgtatgacacgttgatgtgatggacaaagtcagaaattggatctaacac

SEQ ID NO: 73276 - DNA, 472 bp, Oryza sativa
  unsure (1)..(472): unsure at all n locations
ctcaacgtacaaactgaaatccgtgcttgctaagagcgtggaatccagcgtacttctccaactcatgatgtctattgtcctattcacaagacgaagaatcatgacttctcaagctgcaaggtctttctccgcgccatgaagacgacgcctcctaaggtccggcagtcaggaacctctctcgaggatacaggcaaggaacaaggagtgacgttgacctcggattgattcgttggagtaatcgacatcaatccccacgagccatcggtccttcacttactcgaagattgtggctcgtcatcttccagtacaccacgcgacgtgtntgccatcggtgggactagcacatccgcacaggctaacgcagaggcggagaaccagacgggtacgccggcccaacatctcggcaccgtcaacgcaatactgagagaagctccttacaacctgtgcttaacgatgatctcgcacgttggac

SEQ ID NO: 73277 - DNA, 283 bp, Oryza sativa
  unsure (1)..(283): unsure at all n locations
cggattgcgagtaatcttttcttagttcgaggtttcgtattatacgtcattgcgaaatataaattataaatatacattaaantttacgctaaaatttacgattatatacatgcctttgaacgatttgtgaaaatatacacctaccacagttgaaaaatatgcgagcgattgttttaccaacaaccggaacaatccagcgacgtgagcgtgcagtacgtgttggtcccgtgggcctgccgcgcctgccttgcggtaccggtcattatgcgggatgcatcatgct

SEQ ID NO: 73278 - DNA, 405 bp, Oryza sativa
  unsure (1)..(405): unsure at all n locations
catagatactcagctaacattttcangaccttgagtcattgactagttctgccattgcatgatgtccacagccactaatcttaaaactcctaattagtgtcctatcatgtggatccattatctaaaaaagtgctatcatgatcattagtccattacatgatcgaatgcaacacaagctgcatgcgacaggaaccgacaactaatgtccaaaccaattaaccatactagccaaacttcaaagatagtataacttacccacgaaaagctatcttgaggagctaatgatcctaaagccttatatagttaaatggctatctaagagacggctatctatgcccagcgaaggcaaaatttatctcatcattcaagaccattcaacatttatgcatggaagaagctaatact

SEQ ID NO: 73279 - DNA, 410 bp, Oryza sativa
agcaaggagcaatatttacatgtattgttttaaagtaatatttacaaagaccgaataggcactaaggtaacatctctgctatgcagttggttcccgccgtagcccacgatatttactcttctttaatctttgcggtgaggggcgccgtgcttagctccttgtttcggaagattcggcgattatgctcgttccaaatttcccaagagattatgagaattagggatctggtccccagctttggtaacccttggcatgtggcgagagattcccaccattcgtgaaccacgctcgcctgtgcccaatttgtcggcgccatgggcgcacaggctaaccggttgacaatggcatcccatattttcttggtgtatctgcagtctgccagcacgtgaatagcggtctcattagtgtgt

SEQ ID NO: 73280 - DNA, 428 bp, Oryza sativa
  unsure (1)..(428): unsure at all n locations
ntatgcagacccaaagagtttggaaggtcaagttttattaattctatagtgatgaacgcagctctgcggcgtaaatggattgttataattgaatctggccaagatgatctttgttgcatgctacttcacaggaagtattgctacaatgatggggagggaggtttctctcaatctacacaagacggtggctctctagtttggaaaagtttacatgctgtgaaacattggttgacgctatggagctggtatgaaattggtgaggggaattcaactacttattggaacgatgtctggcctggagaggcgccattgaaagttactttccctgcaatttatatagcgtgctncaaccataatgaaacagttaactagtgcacaactcangtggatgggtgatatatcttatgagatccttgacagagttggag

SEQ ID NO: 73281 - DNA, 419 bp, Oryza sativa
  unsure (1)..(419): unsure at all n locations
tttcgtttctggtacagtgcagaanattataaaagtttacttaccgcagcaattgaaggtatatcagactgtccaggtgatccatgggaaacatccattcccaatattattgtcgggaccttggatacaagaggaatggaaggggatgtttcaatttgaagcagggagttcaagccaccaagctgattaataaacaagcaaaaatgttagtgctgaccagaccagatataaaatggtacaatgcgagagaaggaaggatgtgaaaatccacaaacctttgcatttatctttaacagtacatttgtaatatactgatcattgaccctagtaggggccacacattgtgtaataatcccaaattcagcaagacatttccgcttccagggccctattagagaagaacatgtgaatgccataga

SEQ ID NO: 73282 - DNA, 407 bp, Oryza sativa
ttcagctgcgccttgcgcggctcgtccatcttcgtatgtggcggcaccacgtgcgtggagacaggacgaccgcagagcacgatcgcctctctaatcacgttcacaaacggcgtatccagctgatacatctgcggaatttgcaccaaggtctgatgatacccggccgctttcgccacgtccccgtcgcgccaggctttcatataattcaccgacacctgcggcgcaaagttgtcgctcgccgatatcgccccgtcgccgcctagcagcagggtattgaacagatgatcgtccgaaccgcacagcacggtgaagtgcggatgggcacctttgacggtatggatcatgctgcgcatgtgggcgaccgagtctatggcgtcttttatgccgataatattgcttgcgccagt

SEQ ID NO: 73283 - DNA, 392 bp, Oryza sativa
gcttgtgtccagactaagtctatgtggccagaagatcactgacatggatatgatctataaaaccctgtccaccttccaacctggtaacatggatttgcgacaacagtacagaaactctaagtacaccaagtactctgagctgatagaagttctgatggttgcagaacaacagaatcaagtcctcatggataatcattcttctcatcctactggttctctagctgtgcctgaagcacacgctaatgttgctgagagttcttgcgaccgcatgagaggccgttagagcgggaaatggaaagagatacgatgtgccatgttcaaaggcataggaaagggaaaacccattggcttaggaaaagccaatgatgaaaaagatgaaccaaatggggaag

SEQ ID NO: 73284 - DNA, 483 bp, Oryza sativa
  unsure (1)..(483): unsure at all n locations
gcaataagatctcaacatanagggcacatctagtatatcaattaagcacataagatataatgctaaatcaggtaagatcggttgaaaccccgatactaccctaattggcaaccaaagacaggctagagattgagattctaatcatgacttataagggtaaacttaactgatgcagctataagtatgaaaagaagaacaatatctatacaatgaagccgatggatgtttcatagggtggtggataccctatataatctaagtcaacgttggtatttaacctaatcggctgccctctattgataaatgttaaccgactggaggttaaataacaatattgccggagattatatagaatatatgataactcgacaacttacataaacaagattagagtgttatatagatggaagcactaatcccgagaacgcaagccgccataacaaagtttacctctagttgaagatcgaaacagatgcagctcaa

SEQ ID NO: 73285 - DNA, 459 bp, Oryza sativa
tgagtgtgtgcgaaatttgagctgccactaccactagttattatgaacgcgcatatttttgcgtatgtttcttgttttctactaacaatggcagggatacgcaagataattgtggatagctgtgctcaacatcgacatcttcgtcgagacatgaggagggatcaacatgaccattatgaggtaagtgatgatgctctaagtaagatcaaatctgcactgccttatttcgtgggaaactatgatcctcgtgcttacattaattgggagctagcggttgatagtgaatttcaaaagcatgtcttgtcggagaaacaaaaggttatgtgtgcctctagtgttttaattaaacatgcttctaatggatggaaacatctttgtaggtataacataataccacaatcttggaaagacctgatacgatatttcagagatgtgtatgttcccatgtattatgctgac

SEQ ID NO: 73286 - DNA, 439 bp, Oryza sativa
  unsure (1)..(439): unsure at all n locations
tgcattagtaatagaaataaagatctgactattaagtgggacatatgtatgtctaaattcatagccataatcccttacatttagagactatgggtgtaggtataaattaaatactttctttttttagaaatgaactccacaacagcttataacatgttgtttaagcaatgcagtataagaaagttctttttcttaanaggtatttntagaagtgtagagcaaataatctataacagtggtccagtgaaatagctgataagaatatgccatgatcgtccatgcattcacctgctctcatgggggattaagcatcaagcacaatacctaattgggcatttgggctggctggtccagcaaattccacctcacaacaccagagagagctaaacaattcttgggccactatgggaacctaagatagattggagcccttccttta

SEQ ID NO: 73287 - DNA, 220 bp, Oryza sativa
acttgcattcattatacaagggcgactgactatcatccaacatctaactacacttccgaaaaagactatcgctgatcatagggtccttaatgacgtgcaacagtgttcatagacaacgaatgtccatatctatgatctgttcacctaacagagaaggtgcgaacatgccttctagagctgaggcggggaactctacattctgatacaacagaccttcgac

SEQ ID NO: 73288 - DNA, 430 bp, Oryza sativa
  unsure (1)..(430): unsure at all n locations
tganactcgtgatgaatgcanaatactgatgagaaaaagatttgtgttttcatactatagacgtgctctccttgagaaatgggaacatcttatacaaggtgacaaaactgttagggagtacttttatgattttaaaatatgtatcacttatagtggtttacaagaatctaatgagaacacaatgactagattttttagagggcttaatttctatattcacgctgggcttgttaatgtgacatataatcatataggccaattgttcatgcttgcttgcattgttgagcgcaaaattttggagaatccaatggagcaacaagatatgcttgtgcctcctatcactgatgttttgcaagaagttcagaanagtctccaatatgagaagaacgatatgtgtgagatgtcacttccatcactcgcgaatgatgag

SEQ ID NO: 73289 - DNA, 310 bp, Oryza sativa
  unsure (1)..(310): unsure at all n locations
atcgcatgaaattcctacataaatcctttgatccacaggggccctaaataggaaaatttcctataggatttgagtcctacgaaattcctacataatcctttgattcgaatcgtagttttgaatcaaaatcctacataattctaagaaattttctttttatggtcccaaattatagattttaaaattcttcaaagttgatttttatggggtaagagggctaagcaagtactcctgataaatggttgggagaagcaagtgcataagaaaagggtaaggctgatnntaatttatctaaaccatggttctttta

SEQ ID NO: 73290 - DNA, 356 bp, Oryza sativa
cacacacttatcggggttcagctttatgcgggcggagcggaggttctcaaaagtttccgctagatctgaaagtaaaagttcttggttgcgcgtttttacaaccaagtcatcgacataagcctcaacattacgtcctatttggctacccaaagaaattcgagtagttcgttgaaaagtaggacctgcattctttaacccgaagggcattgatgtataacaataggttcctacggcggtaatgaacgcagttttctcctcatcctccctagccatgcgaatctgatggtaaccagagtatgcatctagaaaacacataaggtcgcaccccgcagtggagtcgacgatctgatctatgc

SEQ ID NO: 73291 - DNA, 443 bp, Oryza sativa
gaagtagaacttgcgcacgatcaagatagacattattttatgatgcgcatccacaaatcaagatggccaagactctaaacaagaattagttgtagccacgcacggtcccaagcacaaattttgaagtatgaacaaggacttaccttgcacattaaacagcagtacctcgccgaagactccccgattttctgattgcagttaacgcaggttcgaccacgcccttgtaatggtgtcatcctggggttcaacaggatccaatcccgattccagtctttcactctctgtatatagttccaattgtacccccagcgacccacggggtacttggcgaacgccgcggggtctccactttcgagcaacccaatctgcaacaagaagaataggaggcatggtgggcaacacgcacgagaggctcaactcagctctcaactcgatcggagcgc

SEQ ID NO: 73292 - DNA, 500 bp, Oryza sativa
  unsure (1)..(500): unsure at all n locations
tntacaagatctctagggattctaactaatattcgactatattgtatatttctaagttttttctttttgcaaatgattgttttcttataatgttacaaacggtattatttgggtgtttttcgaatgcttcattagtttcttattaatgttggacatgctatctttcttgttttcacatgcatttatgataggatataaaaatatttcaattttaggtataattatttatatttttattataaatataatcatgtaattctttatttaaagattcaatcttcatgaatatagtggtttcatcgaatcgtagatcaaataagtaatttaggagaagaaattgttcaaagtttgctttgcggatgtctgctccatgcatgcagaggcagaggcagtggtattggtttgttcaaagtttgtttgcgatcgaaatattgttttggctgctgctgtatggatgcacangtagtgccctggttttagcatttcatcggcgccacatg

SEQ ID NO: 73293 - DNA, 387 bp, Oryza sativa
cgcacaagcgaagtgcttaccctttttgacgccgaaaaccccatgatcctctcgtaaagtccttgcaaagcttcgcatggctaaaatgtcctgtggatcctcacgcgccaaatgccctgaattctccgagaattccggtcatggcgcacatgacacgcttgggcgacgaacgtgaccccagatgttagcggcagaacggcacgagaccacgagtctctcgtcaagacacgtaccgcatctggataatgccaccggcaagacgctcaagcgccccacccacccattctgatcgaatctgcggcccgtccgtgccgtcgcacgtactggtgcgcgcacggtagctacaccaacacctgcgacgacccacgcactcactgacgatgcaat

SEQ ID NO: 73294 - DNA, 439 bp, Oryza sativa
  unsure (1)..(439): unsure at all n locations
aaaaagtatatacatatgtttcttcacttatccaatagtggcattctcctcgttttctatatgctctctcatgaaattcattgcctgctgacacatgcattcgtagtttcctactccctctggtatcaaatatatggatgttngaggggtgtgctctttggatgcaaattattgacgttttggtatttgattgccactttggactgctatacctttgcatgcatgtaatgcttgtcttcagtagctcatcaactgtagcaggctcccaacttcccaagcaacgacgcattaactccagctttgaaactaaaggccatagccacacaggtcgcatgggagtttttgaaaaagagctacanctaaagttttaataggggtaaaacaggaaataggcaacctaattaatcacttcttggtaagtgagatcctgtccaaaacg

SEQ ID NO: 73295 - DNA, 488 bp, Oryza sativa
  unsure (1)..(488): unsure at all n locations
gggctgcgttctcccaccctcacagtgtcacggaaattttatctattcattagcacatgattaattaagtatctgctaatgtttttcaaaaatggactaatatgatttttttaagcaactttcgtatagaaactttttgcagaaaaatgcaccgtttagtagtgtgaaaagcgtgctaacggataacgaggagaatctaatcctactagcctgtaaagaacgcagccttgagaggagaaaagaatccatattgatgctgacggaagatgaacaaatgcaagtaggcaatcatcatcagacactaaaactgaaagatttacctgctccaaacantttttttcctgacatgtaactctgatggagaaagtgaacacacacgcctctncaaattctctcaagcgtagcatagcaaaaaggcccacgaaagccagagaaaatggtatcacggactgaaacttcgaacccctggatcagcatgagcaagccac

SEQ ID NO: 73296 - DNA, 388 bp, Oryza sativa
  unsure (1)..(388): unsure at all n locations
acaatttcatgatatttctatatgtctaataaaaacatagctcatcatatgatatattacgacccataaatatagagcttttctacaggtatctaaagtcgtgcaatgcacgaccaaatggctagtttgtcttgaaattcacataagttntcaaatgttcatatatttaaactgttggctatttcaatttttaagctaattaatattttggcctttggttagaaacatctaggccgaagaagacttgtaatcctagtaagcctatntgtctcagttataggttgtacaatattctttgattaattattttattcagaaattatagcgattgaggtatcttaatttgaaatttgtcttacattcacatattatatcaaatgttcatata

SEQ ID NO: 73297 - DNA, 482 bp, Oryza sativa
  unsure (1)..(482): unsure at all n locations
ctcagcttggagcctttcagccagctcagcttttacgaagcttatgtatatgtnacttnatntnttatatgacagactagtatgttaatagataaattagtatacatttatttaaaaaattagtatgtgttggtattatatattaattntaagttatcttaatctttttatttagtattattaacttaaataattagtatttataatataatcaaaatatacattatcatatactcggtcgagctagcgagcctaaccgagctcgaagacggattaggctcgactcgagcttgtgtctagctcgagcctagaaagccaggctcgcttgtactcggctcattgacagccctacaccttataccaacaccttaacaagaaactggttattgccccccatatcgtctaaaccaacttcaagtctgagagattttatccagcgtaactccacacacacctacaatagcagtcgcaacaacaccaca

SEQ ID NO: 73298 - DNA, 388 bp, Oryza sativa
  unsure (1)..(388): unsure at all n locations
tccgaagcgatctccatctctggccgaaggctttttctattgtgcagctggagntgtgtcctcttgatcactaccactgctactgaggtgttangtagccaatcaagttgcgcacttgcagccctgcagtttttgttccattggttcctgctctttccctctctctaaactctttgaagtggtccaaaaactgcatgctggtcatctgaagttatttggtctagacatagtcactatgaatgaatgagactgtattctaaagagagcttgtatgggggtggtctttcgttgtttgatgtcactcaaatagctatatttcttttaaatgagaatatatattaacatgtgatatattactgcacaaacatatcaattaaaattcgacctt

SEQ ID NO: 73299 - DNA, 481 bp, Oryza sativa
  unsure (1)..(481): unsure at all n locations
tgctatacgtactaaatttttcttactttactttactaacaatcatctcaatcgttggatttaagtagatggaagttacaaaaaaatctagatgcactcatagcataacagtgttagtaaaaatttagtaaaaaaaagttactaggtatatccttttccttaagtaggtgcacaacaaggctccaagaaagtacaagttgcttacggctggcacggcagcatgggcgcacgcgtactaagtcaaaaaggaggaagcggagggttgcacaagtccgactttgcttggaagttgcaaccccatacttggagatcctgtgactccaagttaacaactcgcactatgtntagcttttaattaacctcctccggtaaaaacaaaatactatgagnttttccctanaggtaatgattattttttttcctaatggtaattaaatattactacctattgtgacctcgagcgctcaactgagtggatgtt

SEQ ID NO: 73300 - DNA, 333 bp, Oryza sativa
  unsure (1)..(333): unsure at all n locations
tgagttccacagagaatattatatatctttgttagaaatttcaaagagccaagcgctagtgtctagcgctgccttcaccgagagacccgactgtgtgcctctataaggcatttttttcggcagggggtctaatgtttattagctcgatatttttttatttttgcagctggccggcagagggttccctgccgtgccccaaaagaggggaacttttcactgatttttntttttgcgctggaacggtatggcggatacacccctaccgcttgccattgcaatgggggtgggtgactctggggtggcgtatgaataaatcaaatcaagctaataaac

SEQ ID NO: 73301 - DNA, 382 bp, Oryza sativa
  unsure (1)..(382): unsure at all n locations
cttatcagaagatcgaaaacgatacgagttactgcccaaatgcaggaaaaaaaaaagccgcgcgatgaaccccaccatttttgacctgcatnttcccagctttcgacgagagaaaagatcaaaaacccagcgaccaccgtgcggtcggcatgacaaaaacgggcgttgaaacgagggacacggctaggaagcaaatcaatcgaccaactactgcttctgctcccatcggatggcgtaataagccaaagaanaagctaaatattaatattttaagtttaattttgagatatttttaatgtactttctttttcaacatcggctcttaagtcaccaagaatacatttataagaagtttacctacaaattattgtattttctatta

SEQ ID NO: 73302 - DNA, 499 bp, Oryza sativa
  unsure (1)..(499): unsure at all n locations
tatgtggaggaaagagatattgataaatatagagggttggctctcttgcttagctagctattcacatattttaagatagatacattgaatacatacgtaagagatagagagaggaggagaataaaaagaggtaaccttatagtccatttactatacatgttaactctaagataagctataagttcattggtggctctattattaaacttgctctaatattaccctctctagatttttggatcgcatgtctagttaaaaagttgttttatgtactacttgcgttaaaaaagacttncatttcatcgtttagaatttgtgtaaaagagtggatttctccctcttacctaacgcaattcactaatcgtgaaggtttatcactccaataacctgtatctacttcttaccttggtatgtttttaaaaaaatgacttcttacctgcacttagagatattgagtattactntcttgtaaatgaggactactctcatcccaatttat

SEQ ID NO: 73303 - DNA, 470 bp, Oryza sativa
  unsure (1)..(470): unsure at all n locations
attaattacctatgctctnctgcttgtttaatcacagtgtatggnntaattttaatctaatcgtcattgtatttcatttctcaaatatttgtctttaaaaaattctagaccatagaagttgtactctctgtaactatatatctgtatgactgcaactcgatatacttaaaaaggagcaaagttgttaaaattactatcctacattaactagaaatgaaatttttagttatgattgtaatcatataattgtatatcaaaaattgtgaaatcgtatagatgacaaatataaaatcttaaaatcagctcaccttaattaagatcgtaatagaagtcgtaaagtaatcaagatttttgacaaccttacaagggattagagtaggtggggatgggaggaagaaacaatctttaaggcttaaagccactctctccatataaataactaatatacgaagaatgtgaccctctaggca

SEQ ID NO: 73304 - DNA, 488 bp, Oryza sativa
  unsure (1)..(488): unsure at all n locations
agcttaccttaggaagatcaatcgggcagctcacccaatttcttatctcgtcgaaataaacgaaagtaaaaagggtcgcgatgcgtccagattgtattgaacgattgttgttngattagacgggttcgggtcatatntatacctgagatacaaaatatgttcttgtcggacacgactcttatctctaacaaactctaagataccataagtctttgcgacagactnttgcccaaacttatctctaatgaaattacataaaatatcctacttaatagatacaattgccttttcaggacccaatccgtgcgtggcaatccatatgaagcacattaactcaacccgacgacgtttaccgagtcacattgtcggaattggcccaatcggctaccttgtccgactcgaactctactgattctgatcgcagccgattcttattctgttttcagaacgatctatctcttggattctgcttcgattntatcttcatc

SEQ ID NO: 73305 - DNA, 501 bp, Oryza sativa
  unsure (1)..(501): unsure at all n locations
ttcatctaagctgctcatggatatggtaatagattactgctccacttttcttttattataaatctcatcaacctcataaggaatagtacagataggcacgcgccgaatattattgtaacttagaagcatttcaagacaaaacaagatgaaacgcatgtgacgtggagtccgggcctcctcggccaagcttgttacttagcaacctagccgatgtattacagggggtcaggcaacttgaaagtgcgggcgccctccggcgcaccgaggatgtcgctccactggtcaccgatgttaccgacgatggtgaaaccggcatcctccagcttctgccgctcgccggacttgaatgcaacgacagaccctaggagttcgccggcggtgtgcactgctggcttaaatcgtcttatgtatataggcgaatcataaactaaggatgatatatatttggtgtgatatttcgcaatntccctaattattagacaaatgtatgcacgaccagct

SEQ ID NO: 73306 - DNA, 508 bp, Oryza sativa
  unsure (1)..(508): unsure at all n locations
accatagatactcagcttagctgcttaacccagacattcgattaccaatcttttcttttactgngctctgaagcangctcctgttcttcttcangattgaattgtgctcacaagacatgaacttcagatgaaatagaggttctctgaattctgtttggtcaggcaatcaggcagctgcatcatacaagaagaatgtagacaataagtacaaaaaaaaggtgagttcagattaatgctacctcacctaacattaacaaaaaaaaattggtgcttgtttttcaagaagaatgcatgcggtaagtttggtacagagtagagatcaaagcagtaaacagcagttgtgatcggttgggaaggcataaacatcttcctaattagaattaaagagttgcatgtgattggctgcatatgcaggtgatgctgaagctggatggtgtgcaagtcagctttgcagactcacaagctcacaccttatatgaccagaattaatatattctagtcacaaagt

SEQ ID NO: 73307 - DNA, 488 bp, Oryza sativa
  unsure (1)..(488): unsure at all n locations
tganactcagctacaattcagcgcacggagaaggaaattatttatttgtttgtgaaaaggggaagcagaatggactatgacaggtttgtggcaaggtggaattggaagggatttgcatgcaattggactagtatggggattaatatcaatacaagtgcttatgtacctacagttttaacaatactggatgtaattgctttcgtatatgtccatggcatggctggtaagttcctacagtagtcagtaacactagacatggtcaccactcagcacatcaaatcagaaattatattaagtgtggcacatctgtaatctaaagtgaaacacaggtgccaagtccagtatgcaattctcaagtttagggatccacttgaccactgtggtaaggttataaacctatgaagcattactanttatactataaatagtaccaacatatcagtgagcatacctggcaaccagtactgggaccaagcaatattacttca

SEQ ID NO: 73308 - DNA, 147 bp, Oryza sativa
  unsure (1)..(147): unsure at all n locations
tgctcggcagctggaggaggaagaagacatatatattggtgngggactntagtcccggttggtagcaccaaccggggctaaagatcaccgggatctctatccncggttggtgctaccatccgggacataagtcccacccaaataaat

SEQ ID NO: 73309 - DNA, 433 bp, Oryza sativa
  unsure (1)..(433): unsure at all n locations
tatgaatcatgtcattgttattccacccctcctttggctcctctggcggcggattgtggtgcggttccaagtccggaagggggatgtctatgggcagaccttcttcatcagcattggtgagagagaagctcgaagatcgcgggatgaattctggagcgtcagtccaaatccataagtcaaaagtgcggntgtagttcctgcggtgggaatactcttcaacataatgaacggagcactgtcttccaatgatcttggctactgcttcatctgtacgggcatgcattgggagcccctcaatgcatactcgagctctgaatctgaaacacgccgggacaccatgctagccttcttcccacgggcggaagagatagactcgcccatacttggnggcaagccgtggctgcctcaagatggcatccctgtcactctggct

SEQ ID NO: 73310 - DNA, 429 bp, Oryza sativa
  unsure (1)..(429): unsure at all n locations
attaatctcagcttacgtatcttcgagaatacccgcgatcgacaagaatttctggttctcatctattcgcaaacaatcaagacgctgtacaaagaccaagaaaaagatcccatntagactaaataatagtgcccataaatagatctcgaatttacagaaatactggaagtggaacggggtcaatcggacgaacggatcgagagatatgaattttggacagttaaataagagttttctggacaaggagatgatttatcggaattttctggaaaagaatatcccaagaatattctttaattactcattgacatgtgggaccaacaagggaggaaagatggacttatgtgtanggaagctgaattggtggagggggaaatatggactcgttgcatgtgtgtaacgctctgcaaggaggcaggacatatgaac

SEQ ID NO: 73311 - DNA, 285 bp, Oryza sativa
taactactgcacagtttgttacgacttttttttattcctcttccagacatgtcctgaaggcaagcacagacataattgactgatgtgacacatacaacagttacagcagataaactgtgcacttggcccccttaagcaggaggctggctttgatgctcctgatctccgggctctcgaacatgcggctcaacccgggagtgctcccagaacccgaaggcgcctgactgaccactcagtgacccctcaaaaaaccacgcgcgcagtcgcgcactccgtctgcgcaga

SEQ ID NO: 73312 - DNA, 426 bp, Oryza sativa
  unsure (1)..(426): unsure at all n locations
acaagtcacaatcgatatattttgcccttttcaatctaagaaccttcttgtaatatctgtgcatagaatatatttaatttgaaaggaaagtaaaacataaaattgcagaatggtagcttgtattgtgcatttgtgccacctatgtcactaagctaagctggcgagtccaaatttttagagagcagaggaccacatacagctacagtaaagcgaactttttaattcttttcgcttgttttaacccaagttcacggtgtgttcatgctggatgcatcattagttcacaaatccgggtgagctaaagctgaatgcgaccggtcaatcggcacaaaagcatgtttggaattgaccatgttatgagaacangagcanagctagcatgcatgcatcatcttgagtagatgacaaggttcggacacaacaagc

SEQ ID NO: 73313 - DNA, 289 bp, Oryza sativa
cgaagaggaagaagacaaaagagactcttctgtccagaagcacacggagagcaggaaagcaaggggacacgacaaagcaacggacacgccggagaaagcgcacgcaaagccccacggcccaagcacggagaaaacggcccagacaacacagacacaaacaagcccgaaccacacaccggcacaccaagccacaagaccaaccgaccggaacccacccgggcccagccgaccaaccacccaaccaacaacgcaaagaaagggagagaacaagagaaaaaccgaccgggac

SEQ ID NO: 73314 - DNA, 472 bp, Oryza sativa
gtgcttccataactgcggaccgactcttttattcttatcttgccagaactgccggtgctgagatgacttctattattttctgctggattgaattgctaatgctggcaattatataaactgaggattcactttgctgaccggggatcggtgtagttttcccaagaccttgaaactgacttccgtaacccacagacaatgactttgctcgacctgctcttgattcaaccacaagtattttcaggaaactggcttggtctgtccttgtctggattgcagctgttcctgatgctacttctttaagccaaactgatgacctgagctcaccggcgtaccttcgaattaattagacaacttgggatcagatgtactctgctgacgccttgcagctgggcctttcaagactaaccaacttgctgcactgtgttgaatctttaatggatacggcaacaaggtgaaccataactcatctctg

SEQ ID NO: 73315 - DNA, 418 bp, Oryza sativa
  unsure (1)..(418): unsure at all n locations
atcatgggggagcatggcaagtgatggagctgagggaactgacaactacatgtgttatctctcgcaaccacgacgtagtgacgtccaccccattgaaccccagccgccgtgactccgccttgctcgctgacctcatacttcatcgaagggaaatcaaaacatgctgctctttgccccaaggttcgtctttgctgctcctccaacatgtccttaacttttgtgggccacttctttccacacaggatatctacagttgcctctttgtgtctatcgacaaaccaactattgcactntgaaaatgtgtatgccacaatagctgtaaccggcagtttccgaatgcctctcaatacattattgaaactctcggccatattactagtcatgatgctatgacgacgcccgttggtatcaaatgctc

SEQ ID NO: 73316 - DNA, 443 bp, Oryza sativa
  unsure (1)..(443): unsure at all n locations
actaagctntaaagtatgttgcactgaacctgatggttgagataaaatttctctttctttcgtgcaactaaacccatattagaacattgacattatattcataatctagatgatgggcccaacttgtatgatctaacaaacaaaggataacataaaaaaacaccatacagctttcctatcaacctagtggtggtggtgtcacccccacctcgataagctgtgcacacactttaaattcaatataacattaaatacaacgataaatatttaaacacataactggcaaataaaataacttctgtgaacaagagacaaaagatacatcaacaactctaccataagtgagataactgcctaactgatcacagntcctaataacaacaaatacctacttttcaagataaaaagtactatgtctcatcactcaagataagtggataaat

SEQ ID NO: 73317 - DNA, 355 bp, Oryza sativa
  unsure (1)..(355): unsure at all n locations
tttgggctgaagcaatggcagnggttgtcccgggcctcnatgcattggggcaacaggacgaacgctaacctgtggccttgcagtgatgacaagatgtcgtcgcaaatcaagatgcccttgaggagatcaacccagaacatggtgccggccaacgagaatgccgtgtcgatgtggaacaagtaggtcgggccacagacatgtggagggagagggacgggaggaatcgatgactggattcaatcgccggcgttcttaccctcgcgaatatggtggctatgaggagcgcagggttgatccctctatggaggtggaggtgatcatgtctgcgaatatgtagtcatcatcatctgctcct

SEQ ID NO: 73318 - DNA, 409 bp, Oryza sativa
  unsure (1)..(409): unsure at all n locations
nntgtaatgtgagatttcagtgtgcagctgtcatgntccttattatgttacctgaaatggtccatancgttgtgtaaggtgatgagtccttgtacaatagagtggcatccctccttgatgttatgggcaaggttaacttcttttatctacaatcagtactccatttatgccctcatattgagccaggaaatgcacttacgcttgccttactctgaaatcagtcaagaattttcctcggtgacgttggcaaaggtgcagacatgaagctcgttgtaatatggtcatggggaggtaccaaagaagtccttcacattcaatattctagcaaccttactcctgtagtctgttgatacttattaatgaatgagttctgatcttcttggcanaatactgcagcatgatggtttcg

SEQ ID NO: 73319 - DNA, 478 bp, Oryza sativa
  unsure (1)..(478): unsure at all n locations
ctaagcttctctacatctggagttggcagtgagaatcatgtattcactatccatgctactagctctcactgtagccctagatcagaataatgtanatcgaaagtcccgcaacatctatcccaattcatacaatgagcatanaaagggtaagtggtgtttatcaaaaaacacttaaaagtatactgctcatatcttgattcaagaattatcaattactgtgtgagaattatggtagtgattctgcaacaaaagagatgctaatagcctaaaagtcaagtagactgatagaccaatctgaactgaataaggaataatgaacaatgtgacttttatcctgaaagcagcaagcctgccagtgataatgatgcagttgctgctagtgtgcatagcacatagtgagctggcattattaagagctcgaaatgggtctttcatcagaagtcacttttaaactgaatgaagaaacgcataacatcac

SEQ ID NO: 73320 - DNA, 320 bp, Oryza sativa
attcttctcgaatccaaagacctagatgtcatacttggaatggattggctgacaaggcacagaggagtgaatgattgcgctagccgcaccatcaagttgaccaatgtgaaaggagaagtggtaaccttccagtctccagtgccgcagaagccagtgatcagtttaaaccaagctgcgggtgaagaacaagaggtagtagtggagaaaaccactaagaagttggaggatattcccatagtcagagagtatccagaggttttccggatgatctgacaacaatgccaccaaaaagggatatcgagtttcggattgacttggta

SEQ ID NO: 73321 - DNA, 406 bp, Oryza sativa
  unsure (1)..(406): unsure at all n locations
actagctgacccgcgcgtcacgcggggatttttttctttcgcaccctcacgaggcacaatctacgggacacagaatcactgaactcctctgactccttgtaccccggtcaccgcacatatctatccattagcaggtactccaatgatccaatcccctcagattaatacaggctcggcggcgcctccgcgcccgcgacaagatatttcagattctcccgcaccgattaccatgacgacaaggtccacaacgacggaacgacctcgctccatccacgattntctcccatctgaatgtacgcaaagatcgggctgattgatacaacgagcagaatcaatcttgttctctccacatatgggcctatggagagagaacgatataaaagatcgtcccatgatactgctatgt

SEQ ID NO: 73322 - DNA, 430 bp, Oryza sativa
  unsure (1)..(430): unsure at all n locations
ntgaagggatcaaacattagatcactaaatacattatatgctctgttagtattgtgaacatcaatgagtactctttccgtcctacaatagaaacactattaagtcaaacatatttaattgttactattaataacaagaaaagtagaaagatcaatcgtataaaattgatgttactaaatttatcattaaacaaactatcgtaacatgtagttactttttatttaaaattcctatagatattattaatcaaagtagcatatcaaagattatccaagataaaatgctaactatagcgagagtgagaaattgacaggccctcgggcgatttccatgcataatcatcatcaagctttgatcattactctattggagagtagtaagtatttaagttgtggttggtaaaatgtgatcaaactagagtgtgagagaa

SEQ ID NO: 73323 - DNA, 440 bp, Oryza sativa
  unsure (1)..(440): unsure at all n locations
tgcttcattcgaaatgtgaatcttatgtgttcttttgcaatatatcgcatgaccattcacattaattggggaagaatatacaaaagattacatgtagggagctagggacctcaccacagaaaaaacttaactcaggtgctagagctaaattagagtgagttcacgggctttggttaagtacctgattatttttcccctcaggcttgcatttcttcaatctgaagtgcccctgttntagtgcattccgatgatgttagtcacattgtngtcaacaaacaacacaaaggtagatacaaaagtctcatgttcaaggcagccactcactgatcattgcatcagccaaaacactaggcatagcaattccatttgtattacttcanggtggaaattaatgaataatgttnngtttgcattgtggcaggtactcattgaacatatgg

SEQ ID NO: 73324 - DNA, 476 bp, Oryza sativa
  unsure (1)..(476): unsure at all n locations
tctgcatcacatgatgaacganacgaagcatgttactcttttctgttactatcgcagctggtacctatgctatctaccatactgtnaggtgttttgtctgaagctgaatttcacgtacctgtcaatctgtcattgtctatgcatataaaagtgatgggatatccgtgattcatatcattaaaatataatccgccgaataaatcactaaaacgtgctcttggaggctggagtaaccatcttgtggcttgtgagctgtctatgtttatcatttcaagtgttctatagcaaatttcgtcctcaaagcacaacctttttattgcaaacttgaatttcagctgtctatccagatttttgcagtattagatggtgtctaatcaagtgctagcttgctataatttagaatgaangaaaatgcactcttatttgatcttcactaaatcttaaagaaaaatgtctgaggtcatgaaatacctgca

SEQ ID NO: 73325 - DNA, 473 bp, Oryza sativa
  unsure (1)..(473): unsure at all n locations
tggcatacaatngatgttcccgcaactttaccaacaccagactgtgttggttctgatggtcttcttacgactgtgagtatatcataatgtcatcaatgaaaaccacaacanacttatccaagtattccatgaacactntgttcattatgttcatgataaaggcaggagcactggtcagaccgaacgacatcaccgtgaattcatacagcccatatcgcgtggtgaatgcaggcttcggaatatcatcttcacggatacataattggtgatatccggaacgaagatcaatcttggagaatacagtggcacctttgagctgatcgaacagatcatcgatccggggaagagggtacttgttcttgatggtgacttcattgagagctctgtagtcaacgcacatcctcttcgtcttgctttcttctccacaaaaatcatatgacaccccaaggagaagtactcgacgtatgtacccc

SEQ ID NO: 73326 - DNA, 497 bp, Oryza sativa
tctaagcctccagatctctgagttattagctttcatccacggttcttcacttttatacaacatccttcaatggcttggtgttgatcataaatgcaattactgtctgagcctccagagcatggatacatctccttaaagtgtccactttgtgttgagccttggatgtacaataataatgttccacagatggtggtaagctgtcaactgcagcttgattcactgaatttgatggagagttggagatggcatctggctgggacagcacaggtcttggaacagtaattgactcaagtggaacaacactcatagctctaacaaggacttgatcgtgacctcaacttctggctgctcgtataactgaaaatggtatcgctgcagaaaccaagatagtctggcgctcagaccagcttgcaagagggccaagaatatctctagatgaagtacgcgatttccttcctacatgttcaagatttctatgcatatcttcacgatattga

SEQ ID NO: 73327 - DNA, 290 bp, Oryza sativa
  unsure (1)..(290): unsure at all n locations
tcactgcatatttcactggtttttcttctcaagtaaattgcattgtctctaccttgactntacttgcactggtggagaaaccatcttctgtcgggtggtaaagatggtcagccaaaatacacaatagtcccggttgcaataaagatatctctaatcccaggtcacaaggttagagtagtttttttatctttagtcccggttagtattaccaaccggaacaaaatatctatttctagtcccggttggtaacaccaaccggaacaaaagatctctattatctttagtcccgg

SEQ ID NO: 73328 - DNA, 426 bp, Oryza sativa
  unsure (1)..(426): unsure at all n locations
acatacaaatcggatgtgcctaaaaggttnacaacttcatcctccaatgttgtttttgtcatattacattcgtagctatgatttgcacactattttgtctctaaaatctagctgtaagtcgatgacggagaaaatttgtgtggggaagaaagaatatatagaaatttatgtgatttgctaaagaaggttttataaaatagttgagaaggaaaactatagtgaaagttaatcttgaatactagacaacatactaaaatgaatattaaaagaagtaaaacacattaaaattagtttaaaactttagaaatagtaaataagaattatttggtgtaatattttatgattcttgtatgaataaagatatgtcattattgtatgactgctgaaacacgttgtaattatcttataattattgtatgactatca

SEQ ID NO: 73329 - DNA, 468 bp, Oryza sativa
taagtttgtcgatagcgggactgtttctttatgagccggatgttgacaagagaaaggtgaaataggaaggaatatgaagaatatgacaaatacaattagggacatttcctacattttcatttctattcaatcagaaatgaatattttaatgaacatagcgtttaacaaaaactagttatattttgggagtatctcctctgacaaataaacttttactttgtccagaactaaaccacgaagtcacaccgttctaccttctactcagcaaattttgctaaagaaagcaaaacacacacacacatatgcaaatgtatctgaatcatagtgacactgactgctttccgatatgtacagtaattcagcatggacaatattggatagctctccaaattcaacagggctcacaatcagcacacatttatgtagtgatgcagacgaaaaaggatgatggagacctgaagcttaatg

SEQ ID NO: 73330 - DNA, 414 bp, Oryza sativa
  unsure (1)..(414): unsure at all n locations
ggatactatctgccctctcctcgctgcttncttcttaccattcattcttcggaattnctcctttcaaccctgccttggttcagccggaggctcgctcactgcttggagcaaccttttctctgccactgtcctctacaactcaccgtctcatctgaccacctccttctgtagctcttccgacaacacactccttctctatcatcaatgtctatgccccctgtgacgaccagcacaagatcctcttctttgatgagctctccaccaccactctcaatctaactggttctgtcatgatcctcggtgacttcaacatttatagatacccccacgaaaaaaataacgataatatcaattggtcggagatggaaacattcaacgactggattaactccgagagcctccttgacattgaca

SEQ ID NO: 73331 - DNA, 325 bp, Oryza sativa
cattaaacaacgagcaaaaccggcgggagactttcacacattaaaagtagaacactaatagtggttgaaaagatagcactgagaacacaatgacgagattttttagagggcttaattccgaaggtcaggctgaggcaactaaggtgacatataagcatataggccactcgcgcatgcaagctcgcagtgctgagagcaatagttcaaagaacctaagggagaaacaagctatgcttgtgcctcctattaccgacattttgcagggagctcacaacattcacggggagaagagcagaaggatcgaagtgccatctccatcactcac

SEQ ID NO: 73332 - DNA, 470 bp, Oryza sativa
  unsure (1)..(470): unsure at all n locations
tagtaacattcaactagcccnctgtatcaactttcaacgaactgtttgctgctataatgcatcacctaacgagcagaataacaagagcccaacccctaaacagatccaagctccaaaactggagtatagccccaacacacaatagactaagaccaacacaatccagccaaatcaaacccagattgagctgaatcgatcggtcttatgaacagaagaaataattgaacgcttggttaccgtatggattctgtactacacaattataaaattagaggggtgctgaattctttacccgtcagacttggaggaggccgcgctcgccggcgattccgccttggactgcacgcgagaagaaacacaaacaaacacaacatagagcagttcagtgaaaccatcagagcccagcagagcatcgtagcgaacggaagtatatcagctcagagagcagaacgtctcacgcaactgcaacg

SEQ ID NO: 73333 - DNA, 443 bp, Oryza sativa
  unsure (1)..(443): unsure at all n locations
ctacattagactatgctttcttctcctaaaaaagttctcggcaaaaagaanaatgaataanaaggggaggaaaggcatgactatgaaaaanatataataaaaagaagaagaatataaatgcttgctcccaaatcattgagcaaagttggaaagaaaatatagccatgccccttccatattcatgccaagaaaacaaaacggaggaggaagtataggaaaaaggggagaatcatttccattattccacaaaagatnttacttttccatttttttttcaccacaaataaagactcttgatctagaagtatgattgatgatcttcttgagtccgtatttttagctntacaatatatatatgatgcaagtatgtcacaatttatccctaccaagctccacatatcagccttagaatagggtagattttggcacactttgccttgatt

SEQ ID NO: 73334 - DNA, 489 bp, Oryza sativa
  unsure (1)..(489): unsure at all n locations
tactaagcttccgtatagttacatgatctggatatgcatttcttggcttttctattaatggaactngattcacatcatatcttccactaacatcatgtgctttgaaaatacatcagtttccacttgacatctaatcacgattttctgtatccagcagtaacaaatgaacaaagcatcattcatttttcttgaagaatactctgtagctgaaagtattcttttttgcggtaggcacaataaccttcactgaactgcactgaaataaataaaatcactcatcagtggtgatgtacaaaacatatatcgagttttattgtatgttttgtccatgttgcttatgagaattgttcctgtaaattctgagagtctggcaatccaccaagtttacatccagaaacaaaggggcgttgcatgagctactgtctttctttgcactagtaaaagcaaacaacctagataccaaccctcttacttacctaatgattgtac

SEQ ID NO: 73335 - DNA, 456 bp, Oryza sativa
  unsure (1)..(456): unsure at all n locations
gcttgctgctatcgccatagccgatattaatcagcagattgctcttcttcgttctgnctcgtaaaaaaggcgtcgccacgtgttgacggtcaaagcccgacatcgggccggtatccagtcccagcgcccggcaggcgacgatcaaataggccgcctgcatggaactagtgcgaaacgctgtttcttcagcaaggtgtgggctggaggtaaaccaactgcgggcatcaccgtggggaaacagtagtggtaaccgttcataaaattcactgtcccaggcgacgatagcggtgacgggcgcggtcaggagtttntgcagattgccgctggaaagtgccgggcgcagacgttcttttccttctgccgtgcgggtaaacacgatccgtgccggagaacagttatctgatgtcggcccccatttcatcagggcataaatctcccgtaacgtctcatcgctga

SEQ ID NO: 73336 - DNA, 423 bp, Oryza sativa
acagagcgtacaatttatagccttgtattttctcgcgcagctgatcgccaacggatgtgtccgggttgatgacaccatggccggcaactaccggatcgtctatcggatcgtgctttctcaccgcgcgcacgcgttgacgccctctctatcgatgggagcctaatgccgcgcgcgcggcgtatgcgtgagtgtgtcatattttgagttgactacttaacgcttgtgcaaattctctcggcgtcaactatcaaaaaagggagaaaaacatactactatatagagacacgcgcacggtgtgcctaaacaaaccgacatcacactctctggattagatacatggatataatatatgcactcatcatatcgaaggatataccataaagttaccacgagtggtcgatctttaccgtgttggtttgacca

SEQ ID NO: 73337 - DNA, 344 bp, Oryza sativa
  unsure (1)..(344): unsure at all n locations
tccaagaatcagaaatggtactagtgttactcctcatgctgcggccatgaccatgaccatgacaacatgggatggtgaggtctatgatggtggacaatatatcaccaccgctctcgtcgntggtggctttcctacagttttctgggctgtccgtgagcttgtctatgatacgcaggccaaaccagaccaagtcagaatccatgttgcacttgcacaccctcttgttgttggacttggatgtgctgagcacggaagaagatatggcatagaggatctgaggataactctgaaccacaagatctggactaagtttcagcaccactcttgcggtatggcctctgata

SEQ ID NO: 73338 - DNA, 479 bp, Oryza sativa
  unsure (1)..(479): unsure at all n locations
tctggtctagagccacactgggatagatcaaccagggtctatattcatatggtaaatctggtggagcgccttgagcatgttgctagtggagtcagtgaagcactcagtctaccaaggaagcccaggcacagcagatacagcatcatgacaagctcagttgcccatggtgaaatcttctggcgagaatcagaaatccaacagttggtaagtactctnttaagctctcaggttgatggtgataatccagtctcggttgcctccattgttggagttggtggcgttggcaagactgctctagcacagcatgtgtacaacaacactagagtagcacagtactttgacatgagaatgtggatctgtgttactgatgcctttgatgagtccaggatcacaagagagatgctagagttcagttccagcagtcgatttaggcatgacagcataacaaatattaacaggcttcatgtggcactgcgagc

SEQ ID NO: 73339 - DNA, 477 bp, Oryza sativa
  unsure (1)..(477): unsure at all n locations
ntagtcccatctaaacagggcattataaacgtttcgttctattgtgtatgggcagcaactctttgcttccacctggatcttctcttgttgcaagactaagcctagcactagcatacacgcaatcaaactgttcacaccttccatgtttcctaacttgttttccaatcagatttactcgaggatcaactaaaggaagagggctgtggttgtgcatacgattggagagtgagacacgcctatttataggtgaagcctatacagatgattatgttattttaattcacaatagttatattgatgatctgtactctgtattgtttgtttagagaccaagccacttacactagtacataatagactnttccgtgcggtcaaaatacattttttccgtgcagaggacctgcccgtctacacccaggtatctacgaaaatccattattttgcgttcggacgggcggaccgcacgtgataattgat

SEQ ID NO: 73340 - DNA, 390 bp, Oryza sativa
  unsure (1)..(390): unsure at all n locations
taagcttgcggcatcacaggagctccagactcccaggagatttttgctgtcatcagctcccgcgancgaagggacatcacggttagggttaccgggcacgggtngggcctgtggctgcggctgctgcggatgcgatggcgactggaggggggagagcgtgaaatatatgagatcaccggacgcgagccctagggccgggagggtaacggaagggtcagtggtgaagagctcctcngaacggttgagggtgaagcgcaccgactctgcgggcacaggctgcgccgcggacagcttggtggcgaggaatgccttgacgtctgagagcgtggccgtgtccggcagctgcacgcagagggtctcagacgttntatataaatactatacattttt

SEQ ID NO: 73341 - DNA, 459 bp, Oryza sativa
  unsure (1)..(459): unsure at all n locations
tatcctcgagcatgagatccaagcaatgattagtttatccattccaaaatattgatggtctttntgctgtcaatagacttgctgcagttgtgttgacgctagcattatcagtcaccacttggacaacatgttgttcccctatctcttctatgtacctgtccacaagttcaaagatatatttgccatctttcctgtcacctgagcattccactgaatctaagaagagtaccccatgagcactatgcacaactaaattcatcactcccctacccttcctatctgtccatgcatctgtcatgataaaacaacctgtgagctcccatgattccttgtgctccttgaatccatccatcacctgttccttccttttctgtaagaacgatccactcatctcatatggactatgccctttcagacttctaccacattgtccaatggcctctaacatatgagcaaagc

SEQ ID NO: 73342 - DNA, 433 bp, Oryza sativa
acaaagaggtggtccattggttacatccataattgattcttcattctctcacaaagaaaactgggctttggaggatcttcgcaggttaatttccttctgatgtcaatatgtttcatatatatgcgcctaattgttacctcatacttgaggctttaccagaaaaaaaaatcatttacattcatatattgttttaagatatgccaatgcatcacatttaatagaaatatgtaacaggttgcagatcagtggttggcagaagttatctagctataacaggtcctccaggtgggggatcagaaacaaacccaagaaagaagcttttaatgagctcaaacttcataaaacctctgataacattgcttgaggaaatctttctcctaatgaagatacctgccacaatttaagtcacgaaaatgaaccagataagtcagca

SEQ ID NO: 73343 - DNA, 484 bp, Oryza sativa
  unsure (1)..(484): unsure at all n locations
cttctccgcgtcgagcgatgataccgaagggaccttcttttctatgtgcgagcttcccttttgtctgaaacctgtgcacacctcgcaatggcgtgactcgaaggtacacatagtcatccactgcgaattccagatcacggcgtcggttatctgcataacttttctgccgagactgtgccacctttagattatcccgaatgattctgactttaacttcagcttctctcaggatatcagtcccgaacacttggctttctccaacttggtcccacaatagcggtgtccggcatttgcgcccgtacaacgcttcatagggtgccatttgtatgctggcttgatagctgttattgtatgagaactcggcatatgggagactcttatcccaagtcttcccgaagtccatgacacatgcgcgaagcatatcttctaagatctgatttagacgctcggtctgtccatctgtctgcnggtgatacgcggtgct

SEQ ID NO: 73344 - DNA, 364 bp, Oryza sativa
  unsure (1)..(364): unsure at all n locations
acacgcgctggagcgggaagcgaacctatgaagtgatgcctctacaacaccctacaccagaagagcttncgtgacaccgcatgagaccaccaaggctaccattgagcgcagagtggatatggtgttatgaggggttaacgccaggacgagacctttatggaggggaactgcgccaaatggcgccgacgtcgtcatgatcggccatggtctgtcaaggctctcagcaacggttacccattacaacagcccacaagcatcctgcacaagatatgtatagtctttactatgtctatctgattagcacctcatgttcacacatgtcatattatctactaactcttacctttacctcttggaagattca

SEQ ID NO: 73345 - DNA, 380 bp, Oryza sativa
aaaaggcgtcgtccacgtgttgaccgtcaaagcccgacatccggccggtatccagtcccagcgcccggcatgcgacgatcagataggccgcctgcatggaactgttgcgaaacgctgtttcttctgcaagttgcgggctggaagttaaccaactgcgggcatcaccgtggggaaacagtagtggaaccgttcaaaaattactgtcccagcgacgatgcgggacgggccggtcgggtttttgccattgccgtggtagtgccggcgctacgtctttccttctgccggcggtaaacctatccggccggagaacagtgctgatgcggccccattcatcagggataaattcccgtacgttcatcgctgcggggtctccgcagcgt

SEQ ID NO: 73346 - DNA, 370 bp, Oryza sativa
  unsure (1)..(370): unsure at all n locations
cttcgaagctcagaggttgcagaagccaaaaatatcgtgacgtttataggtctatgccaatatgtgcctcgactgatcagaataagaccactgtatctccaaatcacaaagtctgctggggtaattacagagacaccatggcctggtgctgtgttgatccttttaatttacttgctcggcagtcatgtaagtattctattcaataactctggatagtcaacaatgccaaataaattgtcctttgccagagcaatatttaactgcaatagtgaagagctgaaaacatgatcaatttccttgtaaggataaatgaatttattattgatcaaaataaattcngctaacttggttngaagtgtggtatgggcgt

SEQ ID NO: 73347 - DNA, 431 bp, Oryza sativa
  unsure (1)..(431): unsure at all n locations
ttttgaaatcactacgcgatttatttcttctaagttgggtcgaaaggagacttgcgtctcgattcgacttaagagatgattttcaacaactcaaatggtaatgtaccaacctcccgggtcagatcattacttttcggctcccagagccatttcacttgattaggcggctcccagagcctttttcattnttgcggactcccagagtccagctgcccagcagcaaagcaatccgcttccactcgggaagcctagtctatgatgctcgtagacattccgaatcacacatattcgtttctgaccactcatgtcatccatctgccacataggctgattcttggtacgattcccacaccacaacaacttttcacaaagcactgggcaacaaatctacgccacgggaaacacctcacatccgcccttgactgtgggca

SEQ ID NO: 73348 - DNA, 486 bp, Oryza sativa
  unsure (1)..(486): unsure at all n locations
tnctgatgtaccaattgtgtgcattagcatgcttgaaggtgattttgtgatatgttctggggaaattcttcttctcccttcttattttcctgcttggatgatgctttcgaggtttgattcaacaaacaaacctattacaatgcgtttgccagtggatgctatttctaaaggtttgttgattccatattaaaattgcatagcttactcttagtatatcttttgtggtttttttttctcacatggctgttgcttggcagaaacccaacatgaagattcctgtaccaaagaactggacaatctaatgagagccacagataagaattggcagtgcccttggggctacactataatagactacgtggctcctacttttagaaagatacttgaggagaactttatttccctctctagtgcaaccctcactctgaatgatggacaagcaaaccatgtaaagtggtggtcacatagaatgaagctcaacaacca

SEQ ID NO: 73349 - DNA, 493 bp, Oryza sativa
  unsure (1)..(493): unsure at all n locations
taccgggtctaatatggaacatatatacctatgcctgctcttcattacctaaccgaaagtccgaaacccagtcagtacttgtggatnatttgcaaaacgtgacataatatatcaaatggatagttaaaaaccatcaacaaattcagagtttagaccatcttgcaagcatcagcattcaacagctagcacaagcaatgaacatgtcggggtcaggtgatcctgacaattttgacgaaatctgattgcttgtacatagaggataacgcaatggtttaagtaataagtatggtcaatatataatgacaccgtatctcaattttctatacaagccatcgcttgtgattaatattatacgtgtgttttgtttttattggttcttgactggcccccctctcctatcatgcataatccttgctccgccgtgaggaagggaactgtacagtgtactgttccgganactggatagctttccctacgttcaatgcactacgtg

SEQ ID NO: 73350 - DNA, 466 bp, Oryza sativa
  unsure (1)..(466): unsure at all n locations
tggaactgcagtcgggaagggattttttatttngtttgtcagtgaagcaaggatggctcttccctctcctatggcgaggaagccggggaggtagtcgtcagcgaggcttctactgaggctcttgtggcggacggcgaagcagtcatggggcttctcgtccttgttggtgagtggcttctctctttgatctcagctagcccacacggtgacctgatgttgtttacacatgattcagttggtgaatatggacatgtcttgttgattcccaacctagacgtgctataatatgctactagtatcaactatggagatttaagattctttttttttcttgaaaagcggtgcttatgttattacttatcaggtctggaaggtttgtgtataatgatgcatattcgtctgctctgtgttagtgataattaaaaaacgtggagaacattgtggaatcatttcatatataactgaa

SEQ ID NO: 73351 - DNA, 323 bp, Oryza sativa
  unsure (1)..(323): unsure at all n locations
tacataanggaggcatatgcggctggcacatatgttgtgagctatgctgtgcctgttgatcccatctgtctcatagctggatcttagcctcatagatagcgagaactataactnggatgagtgcatgtcatggccatctaatggtgttgtaaatgcaaagtgatgccacaagcttttttttttggggttattagcttctgtagctttcattccatgacgagcgaactattacctctatcgcaatagaagcagctgtagctgatgattccggaatccggcttactttcgactgaatgctggatggaaattgctcctcaagctga

SEQ ID NO: 73352 - DNA, 435 bp, Oryza sativa
  unsure (1)..(435): unsure at all n locations
actcagcttaagccatgaatcccntttatgcatatctggatctagattctgcttatcaaacatataggatgagtagtatctgatataaatataatactcgagaaanaatcaagtattgtaaaatatttataaatatgtatttctcctcttgtcaattttgatttccccgagcagatgactctgtacgtttaaacactctgtccgactagtcatagcccccaagcatcgggagtcggtctaggcatttcccaaacatgcatatgattgacatgagttcgtcattaatggaacaaagtttcacggatcagaatttactactcaggtacttttgcaattattaagagcagaaaataaattatattatctctatgcttttgatttcttccgagtaatacttagcaccttgcgttactcggtccatccaacgagcccccg

SEQ ID NO: 73353 - DNA, 439 bp, Oryza sativa
  unsure (1)..(439): unsure at all n locations
tatactatntcagagttattctggatancttaattacattatgtggatatcatcaaatctttcaacaatattgngcttgatatggtgcattatacagtgntgactcgttctgtcattntcaatttaagtgtgctgatgctttggtctcatatgtacctaagttttgtgaacttatgtctaccaataacagcattagtaatcattattgaagaactaatgtacgtcttgcttgcagcctgtagaccagcaacaacgcctttcgcaatgcttcgacaagctgatgactgatgttgctacgaatttggaaccaaagaacagagataaattcactcataatcttacaacattcaggcatgaattccgtgtgaagaacattcatgcatgacagctgttcatgaccagctgctttaaggtggtgcactcatgtgctgtaaatact

SEQ ID NO: 73354 - DNA, 439 bp, Oryza sativa
  unsure (1)..(439): unsure at all n locations
ntccatgaagtacttgcacgcccaaatcggagntcgcatgatgtctttgttgtcgtcagaagttggcgctgccctgcagtccgaatccaccccgcgcgaatcctcttccctttggatcctctccatcgttcctgagtaaaacacgagtgcacgcgtctccgaggtataaagacgaggaatatgaactccagaaagaactcacctgataatttagttgacgtgcacgagcgcgggtaataagaccatcatgctgtatatggngggacgtggatgtatcgatggtgttgatgtcctcatcagtgcattcgtgtcaaaatatcacttcgtgattcgcgcggtgaagcttttgtaattactaccaatatttgcataggtggtgcgatgttgtcaccggcatgagaaagtcaaaaagctccacaacatgattcttggacatatt

SEQ ID NO: 73355 - DNA, 486 bp, Oryza sativa
  unsure (1)..(486): unsure at all n locations
ctaagctacgcgtaattggccagagcaacgaacacgagtcctagtataatactatgaaatgcaacgcgtgcgtgatgcgatgtacgcagacgtgaattcttggctatttaggcaagtcatgaaaccttttaatgacaacgcaaaataggtagagcgctaaagctaggctaccgctaccagtcgaggccatacgctgattggaagctctacagcttatagaaaagaaataatttgtcggtatttacatatgtgtaattccttaactatgtaaaagctaatgctgaaaaataaataacaaaaaacatcttaagatcaacttaaaatttaaattctggcattcgtttataagctactacctccgtcccaacatgtaacaacttttggctatgaattagacacataattgtccagattcatagctaaaattgcttatatnttacgacggatggagtacagggcataagatgagagcacttccctggtttt

SEQ ID NO: 73356 - DNA, 460 bp, Oryza sativa
aatgtttgaccactggtagctctcttctctactcatattgatgcgtgtatactgttattattatctttaggcctcgtgtagcaaaagtcattacagatatgatttctggaagatccaatggattcggttttgttagatatgctactttagaagaagctgagaatgctcggcaggagatgaacgccaagtttctggatggatgggttattttcgttgatcctgctcaaccaaggcagcagaagcctgctcctcgtcctgacactgattcatcacacactggcttcacaacaaacaaaactgtatgatggtgtggttagtcactgtggtgttatagctacaaaacttggatacacatgtttccatgcctcattacattccacacgtgtctacatgtctcataatattctgtagttgtccgatagatatgtcattcacatgggatataagatgttcatgatca

SEQ ID NO: 73357 - DNA, 479 bp, Oryza sativa
ctgccaccaaaactgtgacgggagagaaaattatttgcttttatccctcaagaagcttgatcttggcaatgcgccagtagctcctccaaagcctacagccgaattcacattgggcatgccattggtctgagactatgccttattcaagatgggccctgcatgcaaggagtgcacgggtactacatggagaagtccaacgcaaggaggaagaatagagagaacctcatgttgggccagcatgatggtcaaccgttcctcgggcctactgccttcatcggcggagacttcaaaggtctatgggacctctacagggagcgagcgatcgacaccaaccttcttaagtgctactccttgtaagtacttctttgtacgcgatatggtagcgactgtgcacgaattaagctaccctgactcttgtcttgctcgtacgtaacctcgaagcatgtcatcgtaagcaccccatgttgcttactcgatca

SEQ ID NO: 73358 - DNA, 499 bp, Oryza sativa
  unsure (1)..(499): unsure at all n locations
acactataaatactcagcttagtaagagtagggaacttactgtaaaatatgttatttaatctatctgcttctgaaaaaactgactcgactaaaccagataatctaaacttaggtcgagtttagttccaaactttcttttttctaaacttccaacttgtccatcacatccaaactntctatacacacaaacttttaacttttccgttaaatcgttccaatttcaaccacactttcaattatatcgcgaactaaacacacccttatctagagaggcctttagtaactagcacacgtagaaatttaacgacacatctccgatctcggtcaataggataattgggtcgtattggtcaagtgcatcctccacttcttctaagctaagctaagctaagcgttgctgttgctcagatattttcaaataaaataagtgcaaagacacttctattgaagagaggagcttaaatgtatgcattaattccactatagactactccctcca

SEQ ID NO: 73359 - DNA, 390 bp, Oryza sativa
tgcttatgcctaaatttcatatcgaatctctatatcgatatgattatatgtcacatcaatgaatgctgcccttgaaatggttaactacgaatagggagagggagaccgtgttaacatttctgcctatgcaataacatccggtggtgctgaaacctaaatgttgacgcacaacaatattgctaatggtacttcgcataacttataatatacctatgtttataccatcatattatatgtaaactgatgttatgcatcggttctcttgcagcgtctaggttccacataggaagaatcgtactgtaaactatatagcaggtgactctctaagaagaaaatattatgtcgcgttatatggtcttgcgttaggggagagagtggggaacataatat

SEQ ID NO: 73360 - DNA, 495 bp, Oryza sativa
  unsure (1)..(495): unsure at all n locations
ctcagcttctggtgccttctaccacttgcatctatatangatttctcttttcttactctccaaatatactagactagcactggttgattaccaattgagttggggtaagattgctgatagggttgcttacagcatgcaggatgaatataatatttacgacaataacttaagtttctgaagcgacaaatcaagctcatccttgtgctagctgctttccacaatagaattccgtggggtgcagaacacgttctggcgtgcagaaagcacagccgccattagcggcggcggtggtgagatcggcatcggccggccgcttgctgagcacagtgcatgtgtcgacgaataagctgtgtacgtatggggtgaagcggatcgagctcagcgaataccaggcccgatggtcacgcccgcaccgacagcttctgtgctgcctgccatgtccaggctcctcttcttcgcctcgtgcctttctagccttccttccgcccgataccc

SEQ ID NO: 73361 - DNA, 402 bp, Oryza sativa
ctcagctgtgcttttgactgcacgctattgggtttctctttttctcttgaacattggagccaatgccccttgttcgtccacggtgttcttcatttcccaacgctttcgtgaggatgtcatcctcgcgtttttgtgagctgacctcttgggaggcctgtctctcagcattcagttcgacctgaggtacagttaggacacgttagacgaagaacaagatacaacataatgaaacttattctatgtgttcaacttacgattttctggtacaccacttgatcttctggatgtgggaacgaaagagttccgtcactattcttcttcatccttgcccttgcccagttccttgttcgctggaccgggatatcagcaagcacttgcatggtgttagattccgctgcagct

SEQ ID NO: 73362 - DNA, 366 bp, Oryza sativa
  unsure (1)..(366): unsure at all n locations
atcatctagntatattacacgttatttctactattatctatataaactcttgcaacaacccatggggtttcatctagtatatcaaatgagcgtcttaaaagaagtttgtcccccactagaattttgtcaactgaaatactaaaccctgtgggtgtgactgttagaaccaaatcaatctacttcttttggctagttgtgcaacagttttatttgacgtgacatgttgacttgaccaccatagctaatgtggtacaatnttatttaaaaaatgatcgtggggcccatatgtgagtgagggttctgtttcctctctccctctgcagtagtgaggcaaacataaaatgccatctgtcatacatgtcagat

SEQ ID NO: 73363 - DNA, 343 bp, Oryza sativa
ggtgacatcttttccacgaattgtcactcagactggccattgacctgaaaacaatgtgagtatgattaggtctgccataagtacagcaagagaagaatctattcttggagcatgaatgactagatgctgcagaaaagacaaaatcctgtatagatagcgcttctgacatcaaaactaagttcttcttgggtagttatgcaacaaattgtgatcatttgggtatttccatctaacaacccacgaagatactttgtatcaccaaattcatagtgtcatgtacaaagaatagtttcccatgatgaataggggagctgcaacagctatatctcatgcacgcacgatc

SEQ ID NO: 73364 - DNA, 487 bp, Oryza sativa
  unsure (1)..(487): unsure at all n locations
tgcccgcaggtacaccatacacacacttatcatggttcagctttttgcttgcggagcggaggttctcanaagtttccgctagatctgaaagtaaagtttcttggctgcgcgttcttacaaccaagtcatcaacataagcctcaacattacgtcctatttggctacccaaagaaattcgagtattacgttgaatagtaagacctgcattctttaacccgaagggcattgatgtataacaatatgttcctacggaggtaatgaacgcagtttatccttatccttcctagccatgcgaatctgatggtaaccagagtatgcatctagataacacataaggtcgcaccccgcagtggagtcgaccatctgatctatgcgatgcatgtggtaaggatccttatgtgatgccttggtaacggcggtgagttcatgcacttacaagcttgccgttcgccttggaaaaccaccgggttctccaccactccgatgg

SEQ ID NO: 73365 - DNA, 449 bp, Oryza sativa
  unsure (1)..(449): unsure at all n locations
tcagctacctattacatttgatcatgttgatgctatggaatgtgttctattcatctagcggataacacagcactggggnnggaatttcttgtctcttacgtgaactttggtgtatggctttcaacatctagtcatgttatgctagctgagctagtgcactcatgtgcacacttcgctaaccaggtagttgatgcttctacttttgctatctttatttgtaagctttgctgaaggttcatgtccagggctcaattgttgattaaacatcaggctcttcttgcatatggcttgagcagttcaagacgtgctccatatgctctacacccgtatgtatcgattgtcaatttggaaatgctgcttttgtgacatataaatatcactttccttcattactggtattttctctggaccataaatttagtcccattttgcatggaaatcaggtattt

SEQ ID NO: 73366 - DNA, 375 bp, Oryza sativa
  unsure (1)..(375): unsure at all n locations
tattcaattgtttatttgatgaaactaatttagtattataaatattactatagttgtttataaacttagtcaaacttgaaacagtttgactttgaccaaagtcaatacgtcttataacctataacggagggagtaaatatttaggactgatgtacatatattgtaaataacaaaatgatatgcaaattgtaaagttacttccaaaanaattatcatatttctacagggaaagacgaaggagtattatacgtctnttacaaaaagtactactagatggaataattctgctggaggtcatgggtggaggggtggctntggtctcaatgctggtccgagcggaggtggatttaatggcgctgagttccagcattcttt

SEQ ID NO: 73367 - DNA, 420 bp, Oryza sativa
cattcatcatatattacataacaggcggattttacttggatatattatcatggatcacaccggtatgctacatataatttaagcgcttggttgaccataattatcaaaaccactcggctggttgggatatctattccatgactatatggttggtttgtgcgaataaccacatagtcaggggttacacctgatatgtgctactattcgatgcacctgactatatttttcagacctccacagtcttaacatttggtaaaagtactccggagacacatgcgaagaagatagaactctcggctttggaggaacttacttcgagagaagggtatctttccgactgtgaaagtctcaagggctactgtggatattatgggaaccacatacactcacgggatggttatccgactatatttacgggta

SEQ ID NO: 73368 - DNA, 449 bp, Oryza sativa
tcgtcacaacagcgtcaaccccggcattaaccaaggagtttcttcttcaacaatgctggtgtggactcaagtcggcgaaatcgtcttcccgggttacaccacggtgccgatctcgactggtccatcaatgaccggaagcgagaacaccatggttacaaccctgaatggctctgcagaagtggagaatggaacatcgacgatatccaagcccaagaaggatcctaatgcggccaaatcttgtccttccgacgagaatcacgagccgacaagaaccacttctgaggcaacaaggtcttggtgtcctatccacaaaaccaggaagcacaccttgcaagcttgctgggtttttctcgacgtacaagctgagatccgtgcctgctaaagcgtggaattcaacgtacttctccaacccgtgatgtctattgtcctattcacaagacaaagaatca

SEQ ID NO: 73369 - DNA, 418 bp, Oryza sativa
  unsure (1)..(418): unsure at all n locations
tcgcatagaacttgaaaaatactctttcttttactttgtccgtatgaataagatattctgtggatggntctaatgtgctaccggctgcgaaatatatatcacaaaaataataaataaaagttgtgtccctctcctcagcactagatagagcaagctaataaaaaaaaagaggatccatgcgagcacacccccaccattccccctatgtcaccaccttccacaaccggatcttgttatcgatgctgtttgggtttgtgttctgaggcgtcctttgtggataggctcgagtctctacttcgactagcctaggaccagcactgtacactatacccttgagcgattattcaatttgctttggctaacgtggtttctaattatctcttgagcattgttttcaagccaccaacaacgtcaccac

SEQ ID NO: 73370 - DNA, 460 bp, Oryza sativa
  unsure (1)..(460): unsure at all n locations
tgaatcgctagagtggntgccgcgggtatcgaagatgtgtgtgtcttgtctaagagggtgaccacggttgcagggctgcttcgtatacttgatgctgctcttgcatttggcgaagcgtgtcctgcaacctcatcatgtcttgtcgcatagcttccatctctaccctttgtgccgttgacgcttcagcttctgtgcttgcttgagtcgtagctcgcgttgtagcttgagttgaggtgggaatgatcgaagttgctgcttgggttatggcgatcgtctgcatgacttcgcccccttcttgccctccccgcccttcgcctcttggttgctctaacactatgtcggacctcgcanactcttcgccggccatctacgcttcaccttcgccctcctttcccttaggcacaactctctctctcatcgacttcttgggtggcatcagtggtttcgccctgggtctcta

SEQ ID NO: 73371 - DNA, 360 bp, Oryza sativa
ctttatataacttgaggccgggtgtcaacctgaatttttatttctatcaagaagggaaagcatatgagggactgcaaatggatgctgcatcaccaagcattggctgcaccatattctcatcagccgttcatgggagagggtctcttctcagccgggcagtctgggataaccgatgagtggagaaggttttgatcggagttcacaaagctataaaagattaattgacatcagaagtctgagagacccatgagcatggttgctaagtggagctgagcaaactgagagccataaaagccatcaccttttaagcttgctgaattcaaggtgagtcctgagcatgaaaatgctatatgcatacat

SEQ ID NO: 73372 - DNA, 420 bp, Oryza sativa
tgaaacaccactgctcgcatgcacccaggatatcttggatgcctcacacagagatatggctatcaatacaggaatcttacggaactgaaagccttaagaacagcgacaattcagtgattgatcatttctgcacatagttgagtcatgctgaaccacaacagcgcactgttgcattgcaacaacttgggaggatgactatgagcacaactaaagttgatcctgaatataccactcataagcaaaattcactctcatctggtccaacagtaacattccttatggtgactcatccctgggaccgacaacaacaatagctttctattattcttctatgtataaaggaagcagcactggcctgcttactgatacatgcattagtgaagaatcatcacagcctctctggatccacacagatcctta

SEQ ID NO: 73373 - DNA, 486 bp, Oryza sativa
  unsure (1)..(486): unsure at all n locations
tcactaaaacctatgcattgtgtaagagntatatgttcaatgttatgcagtctctgggaggaggcgcagaaacaaggaatacacgctaggtaactgccatcggaatagccatagcttgaatcttcctattttaatgcatcaccctttcattttgcacccttcaatttcctatgatgattntacattattcattcataccacttaagtgataaagtaccacatccttgtttgtggacttacagttatattgctctcttgactaaaatctaaatgaactggaatgctggattgatgcatttctgctcttttcatcctaaaatttcttgctgggtttgccattcgattctctttctaacaggtggataatccctctattggaactggtacttacacgtttatttagataatgaaataaactttatttacatatgaactatattttagggctcctgatattgantaaactctcattacatatgaactata

SEQ ID NO: 73374 - DNA, 441 bp, Oryza sativa
  unsure (1)..(441): unsure at all n locations
agcttctttcattttgtggatgctggtccagaatcgataactgaccggattactcaaccgtactgccattgaagcaaccgaatcaaggtatttcaaagcaaatatcgtagatgagacgacagtgaaggaaaagtaatagggcttaattntgtgggcgtcttgagtacgaaactccagtccagatacatcttgtgctagccaaaggattgatctgttgattgttgggatcaatctgcggttctaaccacgacaacgggatccatgtagacactagcgactacaacagttttgttcgtgggtagtgcttgcagtggcgtatctaaaatctaaggtatgggtggtccgacttataaaaaatttaaaacatctcgaattaataatgtaatatatanatataatataggtatagatccgttcttccgatctcgttagagatactct

SEQ ID NO: 73375 - DNA, 281 bp, Oryza sativa
gcgttctgttcatgtgcactgacggagaatttattaattattgcaaggatccatggaatgccaagagccttggcttcatccaagagaagtgaaagcgctggctgtggttgagaaatgttggactggtgatactgaggaattcgatgaacaaggttatgcacaacaataactaagtcagtctttctgctgagatcatgtatccctaactgcaattcttctttgaactgcctaacttctaaaggtaggtcctggtagaacaaaaacatactatgagcattttc

SEQ ID NO: 73376 - DNA, 441 bp, Oryza sativa
  unsure (1)..(441): unsure at all n locations
agcttcaatcttatgccaaattggtgtagagtgacataaatagtttcttcgcttgctgcttgtatatatagaagtgtatgcctacaattgttgtccatttgaaatccttgcatttacaaattctagtacacatcagatccaatcacatagaaatcaatcaatcatagtatcttcatttcagctcanatcatctaaacattaaattaaatagagaaacaggattggtgcaatgaaatgcttggagagttggaggggtaattacgaagatttacagcacatgataccaggacatacggatttttcaagtacagtaaccaataggcttattacttctctactctcaagtctaatctgccgctacaacatagagccaacattaagcacactaagcagtatgccaagagggcatgatacaacatagataagtacagtgatcagtga

SEQ ID NO: 73377 - DNA, 511 bp, Oryza sativa
  unsure (1)..(511): unsure at all n locations
gctgtgctgaatgtataaaagcaaataaacaanaatggagaaaagagatagaatttgaatcagatgaaaggatattatctagtagagtacgagttntagaaaacagaataaataaactagaagtggaactagagaatctaaaaattaactatgatattaaggcattaccagaaaataatgatatacaaaataccgaatgtaaagagcaagtgataacattaaaagacagtaatactgctaaaataattcaactaaaagatgccataactaattttggaaataaatatatagtaaaactgcctttcaaagaaattgtgggaataagaataccggtaaaagtaaaactatcacccaaggtatcatataaaattctagcactagtagacactgtgtgtacaaaanatattattcatgataagtacttcataaaatgtccagaaatagttcatacaattgatgataataaggcagaagtctctacagacatgtgcggaataaagaaaaatcatat

SEQ ID NO: 73378 - DNA, 439 bp, Oryza sativa
agcttgcaccatgtcaggagctagacgccgtcgtcgctcctcgatgatcctgtcagttaagctaaaagcagattccgatgatatagtagaaacaggaacagtcaaaacatccctagctaatatggaaagaataggataggtgtggctgtgctcatgccaccagtctatgatattgaagtcatcatcgtattggatgacagtgtcactgtcaagataggcaaacaactcacatgcattcatgttaacagtagaagaaacagactgaatcaaagcggtagcagaagttctcctacataatgcaccatcaccaagttcagatactgcactggcaccagcatcaccaagttcagaacctggactggcactagcaccaaatccagaacctggactggcaccagcgccaaatccacaacctggagctggactagcaccagcatta

SEQ ID NO: 73379 - DNA, 398 bp, Oryza sativa
cctcgagatcattattcattagtgccttcagcgttccatagaataatgaaagttgccaccagccgaccatcgtcgtccactcctgtccctctcgtcattaatcacgcattaagtagattcgtggttcttgatttgaataaatcgagctcaccatcatgttcctatccatccacatgtgaatagactagcataagaaacgacatgaatcctactccctgcgcccataataagcgttgttggaggttaatcgtctaacattaattatccgtcttatttaaaatattcttattgttattagatgataaaatataaatagtacgttatgagtgacttaacttttcaatttgtttcataatgtgtttaaataatatggacggttacacgttgggcatggaaac

SEQ ID NO: 73380 - DNA, 406 bp, Oryza sativa
  unsure (1)..(406): unsure at all n locations
agcttatactctataattagccaacgcattcactcgccgtcacatcttcagttcggttggtgcagtagctggaagtgagtgtagtgtgtgtatgtgtgtgtgtataggcaacatataatatgcacacaggccctcacgtgtacacacgtgcacaccaactaaaaaatgtcaccacaaaatctagaaaaaatcatacacatactttcaattgtattcacctagggttaaaatcttaacgtcaaattcattatattttagccgtaacaaaaaaacaaaatatctgacagttttaagattgcaattctgtcagaattttatcttttntgttattctctatgtagaatgaatctgaagatgcgactttgcacgtagatgtaatactattgaaaggacatgtatgaatttt

SEQ ID NO: 73381 - DNA, 452 bp, Oryza sativa
  unsure (1)..(452): unsure at all n locations
tccaacggatgcactcaatcttttgccagttttctccattttgtgcctggcagcttcttttcaagcactcgcagtactgtatttcaatatgctggatagaattanggaaatctggtagagatgataagttggggatcctgacaaatttgatcctctccatactggacaggttcttcaaactgcttggcatgtacatgactttataatccctgaactctagaaacttgatagatgtgtaaattgcagagctttgaaatgtaatggatggctcgtcgtattgttcaaaacagagtttctctgggagcatgaaatcctttatagagagcatgagactgagcatagcagagctactaatagcgagtgatttccatgcatgatgccgggaaaaagactctgcggtaagaattggaacattatcagatgtatgtcctggagatgtggcatgataacct

SEQ ID NO: 73382 - DNA, 401 bp, Oryza sativa
  unsure (1)..(401): unsure at all n locations
agcttgcatgcattcacgcatggcaaattggcaatcatcatgcaaacacaaaccanacactgtgattatcgatcacacgcatcgacacttttgacatgagttatatacctatcaatcaacaaaatgtttcagtattttcagagatggagttgtattttcagagatggagttgaactcaacagagataaggactcagcgaaaagatcgatgtattcattgtctctgaactgatcgtgtgtgttgtttctactgatccggtgctgatgggccacgccgtcggcgcgttggtncgcttcacgtccgcctcgtcggcgccgctgacgcgctgaacgggctcgtggctgccatccacagcctgtggacgaactccacgcgcgcggcgagtacagcgcctaccagtg

SEQ ID NO: 73383 - DNA, 444 bp, Oryza sativa
tatccatagttgcgtgtctggaaaagcaaactctgcgaattgttgcataacagtgtaatttccattctcaagtccaagcccataatatctcagtgaagatggtgacatccttgcagtctcgaacaattttgagtcgactgcagtctgaaaatgctcagagctatatattatgtccattctatccgtggcttggtaaaagtatccaacattgctgacaccccatcttatttgatcagtaacataatatgatgcatccccaatgtttgtagcatctgcttcatatatggtattatctgagcccctagtagatatatcactgccgcagtcaaccgcaaacgaataatctggaattaagatgtgcaaaattatagccagtattcaaaatcatagcatctgtgcataactataaccattatccgaaatccttcattctgtgactactca

SEQ ID NO: 73384 - DNA, 393 bp, Oryza sativa
agcttttcgtcgatcagtgcaatgggttccgtctgcggcatcaacgacctcgtcttcccacccgggcagacgtttcggttcggcagcctcgacttcgtcaccaacaacttcggcaagatctctctccttgactcggagtcagaccagtcgggagagaaccggatctcagtcccgtttggactcccaaacgcggctaaaagttacttcaagaccatctcaatcgagtcggcttcaaaccactcgggcgagatcgcatcttctccaacgacaccagatcaagatgatggggcttacccaccaatcctgatgaagctccccgacgattcagcggccggctccatcacgacagcgtctccatcccgtaggcctagacggaagtccgctcaacaccga

SEQ ID NO: 73385 - DNA, 378 bp, Oryza sativa
tcatcttacacatgtctttgacgggatcacttcgactggcgacactcgaaagcgaagagttcgaacattcccggaacgcttgatctctcaagcgtttctatgtctagaacgggtggcacccaaattcgccaacttgtataaatgtacataccattatgtaagcacttccggactatgtaaagcctttcggccataaatacaaaaaaaaagacgaaaatgaaataagatatataactggatgtaggctatatccatccggagcctgaccagataaatcttgtgtctttcgcttttaatgtggattgattatttgggaaaacctagactaccccgtgacgaaataccgggggggggggggtctaaattcccaaatatcac

SEQ ID NO: 73386 - DNA, 407 bp, Oryza sativa
  unsure (1)..(407): unsure at all n locations
agcttcttatacatggacgaaatttgcaatatggactatggagttcggattcaaatgatgtacgctgattccatagaaattcagtatcccacggaagaactttgaggttggaagagcaaatccaccatataagaaatgagagaagaccacgacctcgtgtgtatcgggggtcggaaaagcctcaccgcacgctggccgccacccgatgatctccttggcagggagaacgccgtgcgccaccatctccttcaggttctcctccgtcacgtcggacggcgcccattggccttcgaagctttctttctctttcgccatcgattttccccgaatgcgctgatttgattcgagggatggctngggagaggtgacgaattgacgcggtggatcaccggaaagaatttgatcac

SEQ ID NO: 73387 - DNA, 324 bp, Oryza sativa
tactaagcttgacaacaatggagaaatggttcacatttccggctgaagcataagatatgctcaagcggaatgcattccataagatgggcaaagcttggaagaattggaagtcgaagctcttcaccgagtttgtcaacccgtccggcaatcatacgtcgttcgatgagtaccctcaaataaccaaagcggtgtgggaggaattctgctctctcaagaacacccaagactttatggaatcaagcgaggcacatcgcctactgcaatagcggaatgagcacccgcatcggctgggcaccgcatggtacatcggcaatgaggcaatat

SEQ ID NO: 73388 - DNA, 331 bp, Oryza sativa
acttaatattctcttcgcccagaacttggatgatatgccgaatcctcgctccgagcttaaaccgagccatgggccttttcacggggtaattccaggaatattccgaacttcacttcggccagaatacccttcccgtcaccttttgcactccggaaaactttcgcacagagaatatcagctttgaagtcggcgatttcgagacagcataccatgccatactcggacgcccggccgtagtcaatttatggccgtccgcctacacttacatgatgatgaagatgcctgtcccgaggagtctatcctacgagcgaatcagcagccgtacatgcac

SEQ ID NO: 73389 - DNA, 404 bp, Oryza sativa
  unsure (1)..(404): unsure at all n locations
tgcttgatagagaacacacagatggagatcttggtatgcccatattatagtcaacgttattagcgcatcacgattntacataagaacgaagaacgaggtggtatgatcatgtttccagaaatttatcgaagtctgacatcgtttctcatgcgttcgattttgacccggatgcacatgtctgaactggagcaccatccaagcacacgcctatgatgagcgaaagtgtagacgcaataagatgatggcatttctgtcatttcccaactgaatgcaataaatataaaaacagatgatggcactttataaatggtgcatatagataccgaagcattggaaccgtttctactggttggaatacgcctttcgcatcgctcggcggtggtgaagccgtgaaaggaatgcga

SEQ ID NO: 73390 - DNA, 268 bp, Oryza sativa
  unsure (1)..(268): unsure at all n locations
agcttttaaacgtccaaaacatcattcgtaagagttgccagaagatcgctactctctagtatagtctcaaccattangcgttgttcagcactaagatttgtttctaaaacgagagaggacaaagaaacgattgctcgcataggagtccgcatttcatggctcattacagcaagaaaatcattacgggcacaaatagccatttctgccttccgacgtgctgcatcaagagcaatgttgctccatactagatcacgggccccatggactc

SEQ ID NO: 73391 - DNA, 367 bp, Oryza sativa
tagctgggtgatcaccaccactccacatctctgttccatctataatcaatcactcgctcgtcttctcctccattggagctctcgatcgagcttagctctgcgcttcgttcatccatggcgctcatcggcacggtggcggccgatgtgctcatcccgctcgcggcggtgatcggcatcctcttcgccgtgctccagtggtacatggtgtacattgtggtcgtcccgccgcacgacagcgtcggcggcgccgggaatgtggagagggagagcgacagcggcgaccgcgacagcgactgcgtttactacgatgaggacagcgtggactaccggtgcgtggatgctatgtgcgcagatatccatcacgcca

SEQ ID NO: 73392 - DNA, 373 bp, Oryza sativa
ttcttatttaagttgtgattataaataaatctaattagtaattagagattaatgctctgtagatataatgcacgtgtcggtgcatatatgcagtatgcatgcatgttggttcgtttgctaatagcatgattgactggagatttggtcggcattaatccagcaacacatgcatggattaatacgtggcagagatgacctcagttggatgccgcccgtctcgtcaccagtacatgcaaaaacagagagcagaacagagcaaattaatctgattagaaatcaatctaatgatgatagattggagtatccgaggatgccatcacggagagatcggtcttgcttgctcgcgacaccagcgcgaggtcaccacgagcac

SEQ ID NO: 73393 - DNA, 428 bp, Oryza sativa
  unsure (1)..(428): unsure at all n locations
ctaagctttgtcctatgtacacttgacgtggcttcattgctgtatggcgtcgattttctcggggttcgcttcgatgcctctntctgaaaccaggaaacccagcaacttgcccgcgcgaatgccgaagacacacttctcaggattcagttttatgcccgctgcgcgcaagttgtcgaatgtctcctacaggtcggacgcatgatcgaaagccttacggctttttacaacaatgtcgtcaatgtaagcttccacatttcgcccgaactgggtgtaaaggacactgtacactattctggcgaatgttgctccggcgttcctcatgccgaaaggcatcctgaggtgacagaatatgcccaacagggtgatgaatgctgttttcgggatgtcnggcgggttcatatggatctggtgatagctggaatatgcgt

SEQ ID NO: 73394 - DNA, 422 bp, Oryza sativa
agccttctaattatttcatgacgaattcgaaaaccacatttcttatgggctctttagttcgcacaacaaaattttcacctatcacatcgaatgtctggatacacgcatggagtgtaagtagtattaaatggataaaaaaccaatcacacaagtctgcatatagaatacgagacgaatcatttaagcctaatcttggctatgatttgacaatgtggtgctacaaacctacaggtaacatttgtaatgacagaataattagacttaataaatatcttctcgcacttcttaaacaaaactgtaaatcgttttgttattacgcgtaagttaatattttaaacctttatccatgtattccatgcgataactaaaccctaaattttctcaaacaaacccgggcttatttaaaaccacttccttacttt

SEQ ID NO: 73395 - DNA, 487 bp, Oryza sativa
  unsure (1)..(487): unsure at all n locations
actaagcttctanggtacttcgcatccaagctagcactattgacctgcatcttcttcattaattgcacgaattgcatgtntagtggatttgcaagattgaaaatcagttagccaagtttgggactaaattataagagcctaagaggtcatcagtgaccgatttaatttgtcagccacaccatcagttctaaattatttttgtggcgtccacaaatttggcctgcatacttttttaaaaaaatctgaattaatcaaccctgttatgccaaaaacggttgctgatgataacatttgatttgtgcgtacgtatctgctgacgataaattacgacagaagcaactgatactacgatatgatggtctgagaaacatcatatgccttaacggacgatcacattacagttgaattttctagttactactaaactaatgcttctctaatcgagtctccgccgtgcaactcgatcacatgacacatgcatggtcca

SEQ ID NO: 73396 - DNA, 412 bp, Oryza sativa
  unsure (1)..(412): unsure at all n locations
agcttagttattctaagtggntattcatcgtaaaatgtagtgattctaagtggttatttacgtgtaaactactaaactgtcaagcatagaaatatgtatatgataagcttccttcagacatgataaatggattatgttggattaatccaagaaaagcatgtactgcattactacatcatacctgctttaggatttctcctttttaacgaattaaagtgccgaggtcttcaagtacgtaatcactattttgtgcccgtattgctattggaatactggatcaccatatatatgcaagccacgtatgagacgtcaattctgatcagagctttcactttaccaagttcgtcaatgcatattattntgtattagtactagctttcagagtatatcaagtggagtctacaaaagcatg

SEQ ID NO: 73397 - DNA, 425 bp, Oryza sativa
  unsure (1)..(425): unsure at all n locations
attagtatcattaatatgtgaagctgtctagcacatagtatagagacttacatcctccgcgttagtcctgtacctctcattaactctaaggaattcgcaagtggtatacctgcaaatgaccgttcctcgcgggtgcttgtgacacttcatgacatnatcataaaaaataattaatatttgcaattagtgaaacaattggtatacattaagtgagtggagtattaccggccaataagtacgtactagcagcttctcccttgtttgggtctgttctccacccttgaacttgtagtactggtacgcactgtatggatgtcgtaccgtttcacattaaggaggatattgattataatacattcatattaaaatgcaagagtcataatcacttactactgatagatggttagaaaattcttgtatgactg

SEQ ID NO: 73398 - DNA, 424 bp, Oryza sativa
  unsure (1)..(424): unsure at all n locations
agcttctatttagtttgttaaaaaaaatgtacttatagaaccattcaaagctagatcaaccccctctccctttgaacctaaagaagatgcatgatgaatcatagcaatagattgctttacctgacggcgcanttgggcctcttcatccttcttctcaccatctggtcgactctcagacaacttctgcattaagtggtcagttgatgatgcttctctgatagtctgatgtggacataaagttgctgaggcctaataaaaagaggtatttaaagacaaacattgaccttatttatgttgacacttgtaggatagttcttcttgcgtgcttcaagccactggttaacttcgtttgcatcataaattatacgaggccgcctgcaggaacaaactcaattgacactaaaaacatcactacttcatgaat

SEQ ID NO: 73399 - DNA, 454 bp, Oryza sativa
  unsure (1)..(454): unsure at all n locations
agcttgtgaaatggtttacatcggccgatcctttggaagaagtagacataggtgatggaactaaaccaaggccgacttttgtaaacaaaaatatgagagccgattataaggttaagataatcgagctacttaaggagtatgttgattgctttgcatgggaatatcatgagatgccgggtctgagccgtgagcttgttgagcatcggcttccaattaaaccgggttttaggccttataagcaaccacctcgtcgttttaatcctttgctatatgaccgagtcaaagaggagattgatcggttgttgaaggcggngtttattangccatgtcgttatgcggagtgggtttctagcatagtcccggtggagaagaagaggagtggtaagattagagtttgcatagattctagagaattaaataaagcaactcncaaagatgagtatcctatgcctat

SEQ ID NO: 73400 - DNA, 367 bp, Oryza sativa
ctatctctgtctctttcctaccggcgatgtctcaggctggcactgtcggcctccttgaaccaccggtgccggagtgcttgcgccaccgtcatcctcttctccgggttgcacgtcagaagtccactcaacacctcgaacccatcctccgacaatggtggccggcggagcatcctggcgtctgccggagatgggaagaagccacgataaaagctgtccggcccgcattctcccatcatccgcttgcccttgtagcctcgccaccgcttgatgtcgttcacgccgaggacgtcgacgatctcgccgagctgctccctgtccgagctcccgcggaacagcggcttcctggcgaggagctccgccatgatgc

SEQ ID NO: 73401 - DNA, 431 bp, Oryza sativa
  unsure (1)..(431): unsure at all n locations
agcttgttattccattgaatggtgcangatctgcagacaaacatgatagagagatcaatggtgtaatgagggtgtctaagataaaactcttgcagcaaatgtaaagatttagcaccacatactagttgtcctgtgtcagacgagaacaaaagacacgttgattgagattatcttattaattgatacacagaaacgctgtaacattgggcatataagctaaaatagcttttcattcccagaagtatactcatgaacttcaagagctacatttctaactcagttgatgaatgtttcttcacctgaaatctactctagatgatcaatcgcaaatcgctcattcccagacgttaagcccatgagcttcaaaagctacattttaccaatcagacaagagtgcatgtcattctaaaaatctcttctatgaccaatca

SEQ ID NO: 73402 - DNA, 400 bp, Oryza sativa
tcgttcgtgctgcagcgtggttcccgcatatgccataatgtatgtcttgtaacaattgccttccttcttccaaagaaacacaacattgcaaaattcctgacggacttctcttgtacaaatcatcctcaatcatgaaataaagcctattgtgtcgagagatccgctcggcttcatatttgtcttgaggtaacttttgtttagtcaaaaatttgatgaagggctctctccagtcggcgtcaatcatgcttacttcttgggtacttgtcatctcgattacatctttccttggtactgtcggctcataaaggtgctcaacaaaaacatctgaatgagctgcttctcgcttataaccaaagttggccagtctgtcggccgcttcgttgtcgtgccgaatcacatg

SEQ ID NO: 73403 - DNA, 269 bp, Oryza sativa
tcctctacttttcccattggccgaccttccgactcccatcgctccgcgccggcaacacccgcgcggcgttttgctatttcggcgcgctgccgcggtggatcgccgcgacccgccgtcgcgccgcggttcgcgggtcagatcacctcggccgcccttcccgtcaggtcgcgccggacacccgctctgcgctcgggggttaaccctaccgcgctttggctgaatgcggcgcggggctattcctcttctaaccttttttcctcttaggcccc

SEQ ID NO: 73404 - DNA, 309 bp, Oryza sativa
gcgctatcctggaaaatactgaaggctgcgccgttgacatgcggaccccacatgtcatcaaaaatgaccgctgtataccgagtacacatagactgtccacgggtcgacagaagcggaccccgtgtgtcaaccgatgcgagtggccgacaaactgactccactatacaccacgctggctgcacacgtggaaaccatgctgctaccgagcgggcacactatcactgtcaccacacgcgcatgcgattgactaccgacaccggtacactggtaccggggtcgacaaccgcataacatgcacgggcgacaccg

SEQ ID NO: 73405 - DNA, 347 bp, Oryza sativa
cagctttactgtttgacaccttctaagatgcattgtaccgactcctataaaggtaagtaaccgcggaataaaaggatattaacgtattgcggtatcgcgcacttgatcactcgcactctgggctaagcaaaaagagcctaagtccctaatagaacgtgacaggccacacctgaaaacatgggttgcagacatattaagcctatgccacaaaatagtccttctacacaccttaaaggatgacgcatgttacatgctcccgagcaatcaatcttctgggtaatatagaccaagtgtggctcatatgaatagctccagatgcgaaagaggattcctcatgggatactccg

SEQ ID NO: 73406 - DNA, 436 bp, Oryza sativa
  unsure (1)..(436): unsure at all n locations
atcttctgatcatngcgacctacagcaccggtttcgcacggtacagttcagcccacatcttacttcatttttgtttcagcttttgcacgaatatgtcaccatgtattaactgcacgtttcctcatcgcaagacctcgtctgccttcgagcgcgttcgcaggcacgaccggcgcttacgcgagctccacaggggcgttcgccacctcttcgggcgcgttcgccagctcttcctctcacggagcgtcgatccctcgcccacaccgtacttntacttttattactactgttaaatacttgtacgaaactgatggtccttgtccagcacgatttgcacncngaatcttcngtactggagcctcttcgtctcacgccggtaggactggtcctactagccggtttacgacgacgacttgccggtgcacaccaccacgacgta

SEQ ID NO: 73407 - DNA, 359 bp, Oryza sativa
  unsure (1)..(359): unsure at all n locations
cttggataggtntaacgaagtatgttccaatatgtctttctatatataatgcatatgccaaaaatattttgaaatatatatagcccttagtaaattgatgttacttactcgatctgcagctgcttggcgaaagttctggcggacatatcttgtacaactattgtatttacgatagtgatatatatggatcgatccatgataaacgaaagattccaccatgtcctccaagagaatgtattgtaagtcagccttatgtattggcttcattcatatcactacaagtggctagataatcgttatatagagtgcattattgttaacttatcaaacatcccttgtaatttatgaatcataatctg

SEQ ID NO: 73408 - DNA, 360 bp, Oryza sativa
  unsure (1)..(360): unsure at all n locations
ntatagcctggcttactttcttgtgctttctctcaagcgcgcgagcacgccggcggcatgcgccaccaaagtatgggcggccggngatggtaggttctaaggtttccccaccgtccgtggacagcatcacgcatcctggaaaagcccaaaacagctatgtggcttgtgtgaggcggcatactatgtgcggacaccatggacgccggcccggtgacgatggcgaatgcatggtggatgcgaagttggagctctagggtggccatgggttcaccatgacatgcgcactaatgggcggtggtcggtgatggccggaatagctnttcccccaattgctcccatatcggcggcgaccggagttga

SEQ ID NO: 73409 - DNA, 447 bp, Oryza sativa
  unsure (1)..(447): unsure at all n locations
agcttcataaacaccttccttagaataggtgagtgcttgacgtattggcgtagaggctataaattattgtcaatgcaccattcacccaagcgcaatgttctaaaattcctgaacattggcccgctcctagattgttccgtgaatataaacttcatatgtgcaaagcaaaaaaaaagtcttctatgaataccgaaaatttgttgcagaaaggtgatactaaagatattaattctcctcctcagctcaagttattatatacgacattacacaaatatgtgtcgaggttaaaagtggcatatacattnttcgaanaggcaaagtggtatatacatttttttaataggcaaagtggtacgcacatttttttgaaaggcacagtgctatatgcatatcatccaaaattaatctttcatgccttncctgctatgagatatatactcactatac

SEQ ID NO: 73410 - DNA, 488 bp, Oryza sativa
  unsure (1)..(488): unsure at all n locations
ngcatctntaanataatcatgaaactcatgctccatntgtgaccatgtagaaattgaactaggagcaagcaaactataccatgtagatgcaaagtttgacaaagaaaggggaaacaacttcaacttaagcaaatcatcgctaccggccttaccacattgatcaataaagcagccgatatgctccattgtagtcatagcattctcacctgtgaatttcgtgaagttgggcacctcatatccttgcgggtatgggaccgaatctacatgttcatgatacggcctttgatatgtatgcatggctactttggattctatttcactattatcccgcaagacattgtcatcatcttttccaacatccacatgacacgattgtgactcggtcttatgtgacaatgctatttcactttcgcttataatacaatccgaatcgtcatttagttcggctatatcttcaatggcattattctctaagctagcaacacaat

SEQ ID NO: 73411 - DNA, 53 bp, Oryza sativa
ctctaccgacatacagtgggaccgggtcagactaaaatcagtattctattctt

SEQ ID NO: 73412 - DNA, 439 bp, Oryza sativa
  unsure (1)..(439): unsure at all n locations
agctatcttgttcttccaatggccgatgaccccaactctgctcgacatcactatgattactggattagatgtgacttcatcggctaatcctatgagcctgaacaccaaaaaccaatttgacttcaggaccaacagcatatgtggctggtctggctatgtagcagcatacatgggcaaaggatctgtcaccccccgagagcacactgcctttctcttgatgtggctcgagaagttattgttctgcggatcaagctgcggccttaccaccaactggcagttcttagctgaagcccttgaaaccaagagacaattcccattgngcaaaatccttctcgactatctatatcagatgttgagcaacgcatctgctaagatagttacaggctcagtattaagtgcaagtggaccatggaggctgctgctaacatggctcaaactt

SEQ ID NO: 73413 - DNA, 274 bp, Oryza sativa
atgttcctcttatctctctttcttttgtgacatatattgcactcatgagccttgagtttatttgggaagttggcatacactttcatgtcatttttatctgcttggcagaaattgacttctatggctttgtcatctcaaatgattggtttttcacggactgatgctttgtagtatagtctatagactagtattggtttctgaattcagaattgattacagtatgaaaggactgctttggacttatgcttatgttttggaagagatttcatgtctt

SEQ ID NO: 73414 - DNA, 428 bp, Oryza sativa
  unsure (1)..(428): unsure at all n locations
catgttgcangtttcgaggggcgttggtgttagctgcgttcaagaagtggtgctctggtgatttgcgctgatgttcaaagtggacaatcgatgtcttgcttgttttctgtgatgcatttggcaacgatgttgtgatagctgtggagtcgaagctgctgtgtcgctaggcgacaagcccggcaacgataacatttgcttcacgaagtcgaagcctttgtatcgcttacaacaagctctttatcgatagctgttttgggctccgccatttttcctttntccatggtgtcggtagcttaagttagagtgttgtggttttcgcccagttttcccctaattaactgtgcattgaagggttggtctcgtgttctcttaaatgagacacctctcttttataaatgtngcaatggctgaccgtcgaaaatgatcta

SEQ ID NO: 73415 - DNA, 488 bp, Oryza sativa
  unsure (1)..(488): unsure at all n locations
tgctctgctacttcgtggaccctgcggccatctacacgcatctgtatgccattatctgtcgtcttgccagatctttatgtcccattggtagacaagcatatctgtcttatgagtcgagatatccggttttgtagtttatggtcacggattaaatttcgacacttataatggtcacaatggaacttattccgacgttcctgctgtgcagaaccgagtccacatcatatatagtagtatgccggtaatagttatgggccaaccatcaatgcgatgcatttcgaactgaaataagtttactgtggatctctcatctctgtagaaaattgtatactcgatgttccagagtaatatagtgccgtatttggccaacgtgacatgttgactactgtcaccccgactgagtcatcatggaacccatatcgatcccaattaactcgtcacgttaactaaaatcagacaatatacttgcatangatctcgagtacacc

SEQ ID NO: 73416 - DNA, 421 bp, Oryza sativa
agcttgttctttaatttctggagggtagtctggtcaagacctccacttggtaaatatttgggatttttctcacgtgccgtttattggtttgaaaattcaaacaagttcactgttcttattttaatttgaatcaaaatttgtatgcttttatctttttaattgagatgcacaacttgtgagatttgtgaaaggttatttcaagtgtctaccacttattttaattagttcctttttgtttatatttattgcatgccaatgagttatgagatgcatggaaaatccaagaacaccaaaattaacttcaaatgacaaggacaagatcaaaatcaaatttttgctaagtttcttcattttgcttttttagcttcaagaatcctggatgtacaatacgtttgcacgactttattaattgaataaattt

SEQ ID NO: 73417 - DNA, 403 bp, Oryza sativa
  unsure (1)..(403): unsure at all n locations
atactcagctgactgtggtaggaagctggntatcgatgcctgccctgctaaaccaatggaatgggcttctctggcatatacccatggacaattcatggcatattgtccttgctctctacaatcatgacaaaaggggacatcctctcctggcattggaagctcattgacctgtgtggcaaatgctcgatcaaacacatactgattntggtcttgacttccaactaatggtagctgggaactaagcatcatgcttggaatggaccaacggtgtgccctggttaactctcttgatgccagtggtggatngagttgaaaacttgagttacttgaggcatacccgctgacattctttcctttttctcttgtaaacatctgttacacggattgaggtgagagaggaaac

SEQ ID NO: 73418 - DNA, 446 bp, Oryza sativa
  unsure (1)..(446): unsure at all n locations
agcttggttntaaattntactttttctttacaataagaatgaaatgaataattcaaatgttatcaatataatcacttttcaatatacatagatttctaaagctgggaataacctgttcttaagaaaaatctcagattaaaaactatctcaaacaggccgggccaatagataactcataataactgggtatggttgaatgaacacaatggcatgcagagcccaccaacgttaggtttggttggtgtggttgtaaggggggtacaatcacgcaattctgctacttccatagtgtctgtagatcgaaagatattcccctccctcttgtaattaagcctcttttctcacgtgtgtggtggtctctactggcgcaaacgattgaagcttcttttgtgggggagtgcatgtgactctcgctgactctgatcgcccacatacatgcatatgca

SEQ ID NO: 73419 - DNA, 466 bp, Oryza sativa
  unsure (1)..(466): unsure at all n locations
ntcgttacatttacacagcatacatgcatggatacacaccatgacaaaaatgttattattgcgaacaaatgaatcctcaaccaggatctcaaatttgtttgtgcaaaatatcagattcaatgttattttcagcacatttatttatgttaggaagcataattggcagacattaacctaacatcaacctcccacagacagaggatacaactaatcactttcgcaatcagagatgtgatagaatgaccaatcttactagggccctgtttgaaagattagcccagggctaattttgagagctaatgtatagtcatgaattagtaggctaaatattagctaaatattagcctatggtggcatgtttggatccaagggctaattcaaggctaataggtggagagagagagagtagtatgagaggagagagaatgacagatagagctgcttttaatggtcctacacaaatatc

SEQ ID NO: 73420 - DNA, 410 bp, Oryza sativa
  unsure (1)..(410): unsure at all n locations
agcttttgtttgatatattntacttgctttaatatcttaatatagagtggtatcggagtattagccaatacatgctagatctatctgatcggctatgctatgaacatatatagttctattattaacatatatttcgatctaagtgatttatactttctcggcatggcgtccgatctatcccaatcacttgatttaagtatatgtcaatatagggagtatatattgttaatatctacagccgatcgagtagatttagttgttccttatttattcatgattgccgatcgatgcatatatgacatcggctcanaggtaaatgatatgtcatcggcatctagccgatcgggctatcgttataggattaactgcgggttctttgtctctatttcttggtgatcgcaggatcaaat

SEQ ID NO: 73421 - DNA, 406 bp, Oryza sativa
gtgtcatgtacaagttttctctttcttatccctttggctatctgtaccttttctccttctatcaatataacgccagtcaattctgaccggccgttcgaaaatatatgtctctgcgtgcaaacaatgtcgtttacgttttggggggaattctctgaagatgttcctatatataaatgctgatggagttgggtctcttgtgacgcaatgaattgtttggcaaggtgacttgcacaagattctgagctccaacacttgtccctgaagaggacgaagacttgccatatcctacatactcctatattcatatcatacggcatgaactgtattgacatatatatctctagacttattacttgtagacgtgcatgcaatttcgtatctgaaactctgtaaaagaatatgcatt

SEQ ID NO: 73422 - DNA, 338 bp, Oryza sativa
agcttttctattatctcgcattggcagtacccgctccatgaacttatatgctcatgcactctatgcgatcatgtttttagcagtgagaggagttctggcgctcccggtaaagagaagtctcacacgcatattaaattatggttcaagttaagatatctctctcacacactgatggcagtcgtaccaatggcgacaccgatgtagggcacgcctctaggacctacatcaacggttatcccattgtagcgcatctgcctcactcaagggtgaaccatctatgcaaggatactgcctccgctcggatatcctatccgctaggtctatacccattcgagaag

SEQ ID NO: 73423 - DNA, 368 bp, Oryza sativa
  unsure (1)..(368): unsure at all n locations
actactggacccacagccggatatgatcgtataagatattagacaacgagcagaacgagcaaatgccatcgaactgaccaaaactaatagctatccatccatccatcgtactagtagagatcatacggttttaaggttccgtaagataatgcgagggtgatggacgaagactcaccggagaatatggggctgcggcgccgcctcgctgtgctccagtgtggaggtggtggtggtggctgcanggatggacngcggcgtggaggctcgcttttatacgctccgtgctcataaaccctatgtttgctcgggtctttatggacacttatggaccctgctctaatctgncttggcccatgtattactgaatg

SEQ ID NO: 73424 - DNA, 422 bp, Oryza sativa
  unsure (1)..(422): unsure at all n locations
agcttgtccatgcagcagccacctcgcctctgttcagaagccaccaagacaaagacctaaatcaaatccaccaacctcacatcaagtgctgcatcaatttttttcacaatctgtagcaattttgtttcctcattttatcactgattgaaccatacaactcgtttggttattaagctaagatttccaataaaaaccatatcaacctgaactgagatatcctgtaggcttagctatgttataccctcctgtactgattatgtggtaagcaatagcataacaatctgactatttaattgaactatttaattgaacttgcagggatcagactcgaaaaatgaagaattntctaagccgtctgtttcgtctgatagcacaccctcacatttgtcagttcattcctcaagtcaagataaggaagtgga

SEQ ID NO: 73425 - DNA, 448 bp, Oryza sativa
  unsure (1)..(448): unsure at all n locations
gtccaatggtatataattcactatttaataaaatatatgtataattattaataattaatatcaagatgatgtataatagttaacttaaaaatgtgctaatgatgaaattgatattgtacggtaaagtagatgtcaaataattgtctttaacatactttctcactataaacctatgtaaactaactaagagcattgtttcaaattaattaaatcataggaaatattagtgccatttattagtctatgtccaaatataactaaacctatgacttataaattatgtacataagtttagcctcatactttgtaactaaaatataaacacacttagatgaaccttcaacttgtctgatgagaataataactgagctagttgtaaatggaccacttaaagttagttggaataatgtcatgtgaagtggaatatatatnagtcggntgacatcca

SEQ ID NO: 73426 - DNA, 426 bp, Oryza sativa
  unsure (1)..(426): unsure at all n locations
tcatatcatagagagagaagatccaggtgtgaaaggactgtgttcgaccaatcatggattgataggataagtagaacaccacagtacatctttggactatggattgtaaattgatctttgtcatacaaagcacctaatgaacaaatacataaatggtgatttatctaatctagcctacaggagacacatttgaccaagaaattttactgaattctaagaaaattttagtgtgcttataccagttctctaaattggctaataggtgatgcaagctggtaagccacccaacttggagcctattgcctcaactgtacactggttnttcaatcggcagtaacatgaaacattggctctttttttcctattacactttaagtacantaatgatcactttacaatgaaggctatatgccaagcatcatgttg

SEQ ID NO: 73427 - DNA, 350 bp, Oryza sativa
  unsure (1)..(350): unsure at all n locations
agcttcactagatgagaatctgggggaacttctatttatgtttatgttttttcccttctttccatctttctttcggcattcctgctttcccacatttctacctttcctcatcggattggacttcgctaaagtttgctttccttcaccaatatcattgtacatcatggcatgtgatggaatgacatcttcctctcccatgtcngtctccctcacagttttgacctgctgctccaaatccatcaatgatgaagcatgatgattttcacagcgagaagtagataaagcagatgcacgaagaccaccttcaatcaatccaccaggacaagatggtgtttcatgcactataacat

SEQ ID NO: 73428 - DNA, 446 bp, Oryza sativa
  unsure (1)..(446): unsure at all n locations
taagatcatctaaattgtgtgtattgacatgaacagaatattatataaataacctgaagaanaacttacaatgttgtcaatctgtgaaatgatattggcatagtgcagcgagaggccatctgatcctaacgtctgacggctctctgaaggttgattcaattgtaaagctccatctacagaataaagggagaccaatagcatggagaagtccaaagtaatcagttggtaaccatactgaattagtgacttgatgattgaaaattctgagcaactatgcataccatatgtcccaaaagattcttgaatctctacatgtaaaaagtggacaatatccacaagtttatccatgacctacaaacagaatgaagattacatggttcagattaaccattaaacccagatgacagggttatctttctgtcattatacaaacatttcatctcatg

SEQ ID NO: 73429 - DNA, 388 bp, Oryza sativa
ctcagctcacggctcttattcttactgacccaccaagcatagcaaacgctaacgtatgaatgataatcaatctttgttctatatcgaaatgcttattgtaacaaagaaatattaccatactttatttcaatgtaaagatcattctttgtatattatggcacactagataataacaaagaagatctggtagtgtacaggccagagcagctgaaatttcatgaaccatcagaagaaaccggtctctaaatttcatgaatcaccaggggaacagaacgaagttattgatgaagctactactggtgttcttacagattttacataagttgggtttatttcaaatcttacagcaacaagatcatacagtcacatattgataaaaacagtcagc

SEQ ID NO: 73430 - DNA, 319 bp, Oryza sativa
  unsure (1)..(319): unsure at all n locations
agctngattgtgattagaaccggtgatgattcatcgggcacttgtgagactatatcngctacatctatgcctaagaccggaaatggtagtgatcctctccctgttagttctattgatgttgacaaaaagaaagtgaaaagtgttattattggggatcctcggcccaagaataagatcaaaaatgcgaaggccgaagattataaagttgtaaaggatgagtcatttagtttgcaaaggacgcaaaagccgaaattacttttgagatgcttatggctaagtacaagaaaggattatccggtcaacgatttgataaccaaac

SEQ ID NO: 73431 - DNA, 336 bp, Oryza sativa
  unsure (1)..(336): unsure at all n locations
gagaagatngtctggagctccacctgcaagatggaaaatcttgtgatcgacttccttcaaggactgaaagagaatgtgctcaaaggcgactgtgacctgaatcgcatcatgctatccgtcaaagcgaatccatgccatcctaaccttacacacactccaactctcaactctccaacaatccaacccggtgaggacactgcagctgcaaccagcacttcggcaacaaacaagtagatgtttttgcgtgcgcttctcttaattcctggctttcngcattgtgtggttatttgttctttgttcagagtgtgattacttggtgttttttggtattctgct

SEQ ID NO: 73432 - DNA, 419 bp, Oryza sativa
  unsure (1)..(419): unsure at all n locations
agcttanggcggccataataatcggtggatccaggccatggcagctgacggacccgcaggtgaggaggcaacagtttctaccgatggatctgttggctcgatgtgatctttgttgaattcaagttaatatacgatttgttgatttatggtgaattattttgttgtgagttgatgcatagttgtggataatatgttggcttgttatgaagatttgttgatacatagtagtggaggattatttgagttgatgtatatatagttgtaggttgcgttgtacgatgatgttgcttatctgntgaattgagtttaaatttaatgattctagttggtgtgtaatagctgttgcaagagaaaatttgctgaggcttgagcccatggctgtactcattttagaatggcatttctcangcagggtcagc

SEQ ID NO: 73433 - DNA, 355 bp, Oryza sativa
  unsure (1)..(355): unsure at all n locations
cacttatcggggttcagctttatgcgggcggagcggagacttttgaaagtttccgctagatccgagaataatgtctcttggntgcgcgtcttcacaaccaagtcatcaacatatgcctcaacattgcgtcctatctggctacccaaagaaattcgagtagtacgttgaaaagtatgacctgcattctttaacccgaaaggcattgtcgtataacaataagttcctatgggggtaatgaatgcaagtttttcctcatcctccctagccatgcgaatctgatgataaccatagtatgcatctataanacacataatgtcgcaccccgcggtggagtcgacaatctgatctatgcgtg

SEQ ID NO: 73434 - DNA, 426 bp, Oryza sativa
  unsure (1)..(426): unsure at all n locations
ctcagcttcgaggatgacaccgaanagttgaaaaccctcatcacatatgtaggtattgcctgcgccacgaacttgataagaatatccttcgctcccgacgacatgaacttttctgcccagctattcagtcttttgatcaagcgttccttgattgttttaaatttgtctgccgtcattctcccctctagagtatggagacccatataattactctcgaatgtagcagattcaacctgaaagatcagtttgatttcctcgatcacatcactatgacagtgagcacttgttatcaaagagcacttcgttgggctcataagctatccggtgcagcgctgaaacaacgacaaagcttgtttgaccacagtaacctgctgctggcatgctntgacaaacaacatgctatcatcagcaaagagtaaatgggaa

SEQ ID NO: 73435 - DNA, 486 bp, Oryza sativa
  unsure (1)..(486): unsure at all n locations
tatagctacaacataatgccactgagagattttattccactgttagaagatgcanggtatagaggtgaagtcaccagtatatgagaagaaagtggggaggccaaagaaaactatgataaaacaactccaagaactcgagggtgggactaaaatttcaaagcatggagtagagatgcattgcagctactgaaaaaatggtggtcacaacaagactagttgtaaacagaggaaggctgacttaaaagttcagaagcaacctatgcagcatatggcgacttcatcaattgttgcttcagaagagcctgtcatcactcgggtaattgttatacttttttgcttgtgtatttgtttatttccattgactattgaattcaaacacattgtatannttgttcaggaacctgtcatcactcatgtactatngatactcattntgcttgtgtatnatgttagctgcactaactanggaatttaaatagaacatat

SEQ ID NO: 73436 - DNA, 379 bp, Oryza sativa
  unsure (1)..(379): unsure at all n locations
tgtgcctggttggagagatcatcatanattattaaagtatgccgttcgcggtacataaaatactcagccagtgctgctcccgtataaggagcgaggtattgtaatgtagcatgggaatccgccatttcatctactacaatagtgtattccatggccccctcttcatggaaagtagttactacttgagctacggaggatgctctttgaccgatagctacataaacacatattacatcttgccacttttgattgagaattgtatctgtaactactgctgttttgccggtttgtctgtccccaataattaactctcgctgaccgcgcccaatatgaatcatcgaatcgatagcaataagccccgtttgaagggttcatatac

SEQ ID NO: 73437 - DNA, 344 bp, Oryza sativa
tggatgtctcccgacgtggcttatccccactgtctgtgtgacccgggttattaatgtcgtgtgggtaaagtgtaccccctctgcagatgttaacaaactgttcgaacagccgtgcccactgtcatgggcggatgtgaggtgattcctagcgtagttttgtttgactactgtttgtgaaattgctgttatggaaaaaggggttcgatgtttgaaaaatctgcagctgatgggatcagctaagcccgggtggccgtttgaaattgttggcccgggtggccgtttgaaaagctgttggccgggtgtcaatcttgtttcaattcaaaagactgatacattgcacatac

SEQ ID NO: 73438 - DNA, 331 bp, Oryza sativa
gcagagaaacaacaatattcgctgcatacgggatcgatttgatatgaacccgttctggatcgggatcaatcagtgctccatctttcttcgtgcaaagttgctgaacaagttctccgaccacgacatcgggtggtatggctggtgcgaaagcatcagcaggctcagccgaacaccaccccgtgtccgagccgagcacagtggcatgctacatactgcaccgggactcgttcgagtacctatgcctttgtaataactgtgtctaatctgagatgaacaacagagggtatttccctaatacgtcacgtgcatattgccacgcgtgcgagcatat

SEQ ID NO: 73439 - DNA, 367 bp, Oryza sativa
  unsure (1)..(367): unsure at all n locations
tgcctactcctctactctccgtcatgggatgcgtcgacctctgcggcgacggtcatggtgttccgcgtatagaggagaggtcgagagttgataggggaacagttgggaagctgcggaggagatgacggagaggcaacgcggcgactgtggaagacgtatggcagtcctgcgccggctgtcggtccgactccgccatgatggaatggcatctgcggcatacgcgcggccggctctgtcgccaacgtatgtaccttcgccactgccgtcacaatggaatggagggggcacgacggctgatccgccggcgtctggcgcctgatctgtccttcncccgtcgtcaccgtcgtcgtcaccacatgtggatgga

SEQ ID NO: 73440 - DNA, 60 bp, Oryza sativa
tcctggtcaaggttttctccttaagccaagtggatgggtggctctttttcttttttggtt

SEQ ID NO: 73441 - DNA, 431 bp, Oryza sativa
  unsure (1)..(431): unsure at all n locations
tcaccagctgatgcttctacgcactaagctaataatcgactgatatgctcaattgttggtatattgtcttgtcctataaatctagagaaatctggaaccctatcaaactacttatgatatgggcattgatacatatatgtttgatcgatcccaaactgttctctcatcatctctatcgggccactcattattccttacattgtccatgttatagtgatgcgacattgttccttgcatacaatgatacccttcaccatgcgtatactgatgaggttcttctggccaatattgatgtagttcttcatactgatgtcggtgcccaccaagctgaatacgtccataaaatatttgatgcactgctgtcatcattggcatcaacaacggcatatgtatatcaatgttngccgatgtctttaatacttgagcaattg

SEQ ID NO: 73442 - DNA, 442 bp, Oryza sativa
  unsure (1)..(442): unsure at all n locations
agctgctattttgtacttttttcctttgctggattgatgatcgcttttgtgtgggagaggttctaacgtgtccggaattttatcgcttctgaaggtcttttttttgttttttagatcctgatctcgtgttcgaggtttttggattttaccaatagtatatgcgtgctttacttgtgctatcctgatgtgatgacgccatttcgctgacgatttgtgccgtttttttaaaaaaaaatttattcgattccccaatcgaagaaatccacaggaaaccaatattatttggactcgcgtattaatcgcgagctagtaaccgcctgattggccgcatgcgccatcgagagaaaattgcggattattttntctaagtttttgttcaacactatcgaccctaattttcggttcgatattcgaaattttctcatccgaaattatctcttcc

SEQ ID NO: 73443 - DNA, 419 bp, Oryza sativa
  unsure (1)..(419): unsure at all n locations
acatattaatttccttaaccgaatatagaaggaatccaactattgtcgacgtgataattctcttaccggcttaccaaatttcactgttaacacccatttacacgaaacattgacaaaacagtaagaggggtggaatgtgtaagtgggcccgcccgtcgaatgggctggctacgtatttctgaaaggagggctgttacaactctctcatctctcctacgcatagttaccaagcaatacaagttttatttaagtttattgcaatacaagttttgattacacgacccaatctttgatctggtctctctctcctctctcatatatcttactactctctactctctcatctcttttactaggtaatacaagttntgattacacgacccaatctttgatctggcctctctactctcatctctctt

SEQ ID NO: 73444 - DNA, 417 bp, Oryza sativa
  unsure (1)..(417): unsure at all n locations
agctntgtttttgacagtggtttaatggacataataagaagcatacagggcttggaaaagcaccaagccaatcccttctttccaagtaacaactactccacaattatgcaaaattttagataatgacaattgtgcaaatcagactgactagaacatagtcactggagtagttggctggccaacaggaaatatgctgtcttgtcaatggaagcttaactaacgttgatttaataagcttatagtccagagaattcatatcgtagaaaagatttaagaacaattaaaggtctatatgcagtaacaccgttactgaactgaatctccgaatatgcttaagttagttagcttggtgtgacgctggcagctgttggaatggcagaagaaaggcttgatttatagatactgtgttgacaatgg

SEQ ID NO: 73445 - DNA, 416 bp, Oryza sativa
  unsure (1)..(416): unsure at all n locations
acaagtaccggtcgttcatgtacggcgagggagagaatgacaccgtgtggaggctcggatcccctccaaactacgacgtcgtcaacaagctcttcgaggaagagagaaccaaggtaattaatttcacgacgaacactactcgtcagaattcataactaaacgccgcagagatcgaatcaggtattgtgattaagttcaaagcattgttgtgcacttgtcactaattatgaatggccagaggggtctctggaggagaaggtccagaaggtgctgaagacctgtgagatggagctcatccacaatgtgcgacccgaggaccataagagcgtccactcgcataaattctgcgcgagcaccaacggtgagagctactccctncgttctgcatgtgtgcgcgtgtcttcgtattttaatat

SEQ ID NO: 73446 - DNA, 442 bp, Oryza sativa
agcttgactctttatgtgaaggcccaatcaagtctaacattgatcggcttgaggctcgcaagattgaactcttagcacaacttgaagaatgtaacgctgagctatatatggagcacagaaagctagccgatctcccgaagtctattgaggaacagaaagcaagactcacatcggcatcaagcatgttgctgatctaaccaagtctctgaaagatatccctggaaccgatgctcatgatgcccaagccatataagaagtatagcacattatgcagaacgctatatcggccatccagtgatacttatctcaataatctttatgtaataggacttagaattgtgtaatctgctgagacattctgatactatagaaattctgctcacatctcgcactatatttgatatatatatgcccaccctagttgtacaatgtcgaaagcatt

SEQ ID NO: 73447 - DNA, 212 bp, Oryza sativa
ttaaccgaatgtggcaagaatccgtcgtctgacatcttgacgactctcatcggctcatctcatgacttacaatccgatggtgactcttaaccgatgattactccgggcttaccaaatttcactgttgacaatgacgccgtcaactttttctcatatgctggaccatctgtcttattaataaaatgtacgaaattattatacactttgtcatg

SEQ ID NO: 73448 - DNA, 388 bp, Oryza sativa
gcttgtctgcgaatacgaaggatattttgcacgaatgcacccacacactccaatatgtccaaaatcatgttttggtgcttttgaactttctcattccggttaaaacatcgcacccacctatggcaatattggcattaattcacaaaagttcgccgcgcgaatcaccaaatgattttttgccacgaacgcacccaacacactccaatacgtccaaaaatcatgttttggtgcttctagaactttttcattccggtgaaaaacatcgcacccacgtgtgccaatatatggcaatattggcaataattgacaaaagattgccgcgcgaatacgaagggagttttaccacgaatgacccaacagcactccaatatgtcaacaatcatgtttc

SEQ ID NO: 73449 - DNA, 432 bp, Oryza sativa
tgcttatccggttcacttattactagcagccttaatcatttgagcattagaaaaatcatactcatcaaatttgttttctactgctagcatccaatttatgtatgcagcggaatcatactttccatcatagactggtaacttacatgcaacttgtgcaaaattataatcatgtacctcatatgcatcacgtgaagaagtcgtcatatctcgtcgaaggtgtagatgttgacgttgagcatgaccatcttgtttacccttgcgcaatcctgccatggttagcatcatacaagatacgtacactagaatatacacgctcctatcaactactatgtagtggcagctcatatctcacacacactcaagctttaaccaagctcttacaagatttaccaatgcaagtggaatggcgatgtacaccgactgaaccaagca

SEQ ID NO: 73450 - DNA, 447 bp, Oryza sativa
  unsure (1)..(447): unsure at all n locations
gcttatcttgttaggatggggcttaccgggtcatcgagcgcgacatgagaatcctcatctctttctttgcgaagaggcggctgaaccacttcgtgaacgtgagccccatctatccctactgctccaaaacaaaaattcagcatcacaggtgagtctcacctagcaacacagatcaccgcagacttcgcgccgatccgcacgcgcccatgctcacttgacagcacacanaactaagcggaaattgatgagcccaaggtacgagatccgggagatctaaacacccacatncccatagcgtgctgttcgatccatgagacgacggtgcgcaaagccgcggaatcgaatcagattcgncaacacccgaagcataaagcgaaaacgctcgaacagattccctccgccgtagtagcgtggagactacgcggcatgccgtcatcaccgaatcag

SEQ ID NO: 73451 - DNA, 463 bp, Oryza sativa
  unsure (1)..(463): unsure at all n locations
gtactcgctccggtcataattatttgatatttggagtaaattntgatcatattttcaaagcttcgagcctttgaccattaattttatgttatttaagttcataaaaatctaataggtttatgatattatgatagaactcttcaagtcaaatccactcactagcctcaaagaggaaatccttgtttggaagacagcatgagttttacaacctgcaatggcgatagtgaatatattgtaatgacacgtagcatgtaactttagtttactaggttggggactntcccatccatctcgacagccagcatgctgtcgttgtaagcttcaaatgtaatgaactacccttccctcttaatgaaattggtcaaccgaatctttcggctgacctggtataaaaaaagctaataattgagaaagatttatagttaagttatcttatcaatctatctttatatcaatagtatga

SEQ ID NO: 73452 - DNA, 450 bp, Oryza sativa
  unsure (1)..(450): unsure at all n locations
tactaagctattctatactcnttattaagttggatntgctagcatgattttattattacccgtaaataattgccatgtcatcgtcgtggtatgcgaattggagccgtctttgacggctacaaattaagggtcaaaacgattgtatgatattangagcgaaatggacagggagttatttctgtccatgaaaagaccagtatactccctattatagacagacatcgtgaagacgtgcgattggattagtagttcgcacaagatgccgctaatccatccggtttgagatgattntgtgggccctgtagtgaacatgagttgctgtcagtttttatgttttgctgccttgacatgtacgtcatggacctcgtaaaccatatttgtccaaagaaatgatctctgaggatgtataatcgctggtaaacanatgcagcagatcgaacatgaccactc

SEQ ID NO: 73453 - DNA, 350 bp, Oryza sativa
agcttgtgaatggcatgaacaaagcagtgatggagatcaggcgtccatctcaggcgaggcaccttcgatctgttgtactgcctcactccttcgatcctctccctcctcaccattgtccctctcaccatggccatctcaagatcaccaaccaatatatatatatatatataacctgtggttcagtcttcagtgttcttcagttcttcagagaaatagagagagaaagatgcacacgcatgcacacacaccttgtcaactcttgagagagagacatataggactgaacttatatatggctgcatccaaacactcgacaaaacaaggaggtgctcaataaatggactgttgat

SEQ ID NO: 73454 - DNA, 373 bp, Oryza sativa
  unsure (1)..(373): unsure at all n locations
gcagcttcgagaacggggatgacgatgaaatcgccggttgcaatggttgtggaagagacttnatcctctttccctctatctgatataaacatgatagttccctagttatattaaaaagcagatcatatctgtttcatgatcgaaacggtatatgaatatatataccggtatcgacggctacagaaagatatacctaagttttattacgatcccgaattccgataggatcatggttaattggctcacagccatgctattttactgctgcttgattacctcatcacctagtcttgtggcttgtgggaacctcgccggatacggagtgcaacacgccggcgtgggcggatggggtggtataatccgccggctattc

SEQ ID NO: 73455 - DNA, 399 bp, Oryza sativa
  unsure (1)..(399): unsure at all n locations
tatcttttcattgtgcgttgcctttgcaggtgtttagtttgtggtttgcattcttgtgtacttgtgttggttggaaattggaaagttctagagtctagacatcttaagatgtcagatctctccactatgttaaatgcattttggttttgtggaagacaggtgcttgtaacaaaggtgaacactttaattacctagttgatgcgccgacactgtgaactctgtgtagaatcattgatgactaaattctaatgctgacaatgtgagcactagcacaactgttttgtatcttgtactcaccattctcngctacctttgtggtgtagtttcgtcagagtggggccaggacacctcaatgtactntgcttggtgctttgactaaacctaacgatgaatatgaat

SEQ ID NO: 73456 - DNA, 411 bp, Oryza sativa
  unsure (1)..(411): unsure at all n locations
cttgacgatatatgtatcacatatgtccagcgtgatctgtgccacttcatctaccatgagtgctgtcatgtgaaagaagatttcttcgacccagagggtgccctatcggcaagtgacgaattcaatgatctccgggagtggaacactactatgccataatgtaactagatgacgttatttgaagtgacaatgtaaaaaaatattgtaatatatatattttggcaacacttttgagttatgcaatatatgtagatttctcagtaccaaatacttgataatcttccaatatatgtacataataatctacctgcaagaatttctattaaataatttaaaagtaatttacgggcaaattattattaaatttcaatattttctacctatcttcgcangcggaangttttttttttt

SEQ ID NO: 73457 - DNA, 473 bp, Oryza sativa
taaagtcatactctcaacataaatgaatgaatgcagttcgttgaaaaaaaatgaatggatgtactatattcacataaataaataaatgaaagcaattataatcagaaaccaacaaaatgtcactttgatctctaaataagaacataaaatcactttgtttttgggaacaaatattttgtgcttaccaatcgtgttggcatttgtcgagtctcttttggagaactcttctgctgagacggcaccatacgtgtcctttggccgctgccactcctgctccctcttcttctctgcatttgccgaaagaattcacgtcagaaatgaatcggaacaccaatgtgaaaataatactagcatgcaaaatttgcaaacaaacagaagtaagtaaacgtttgtgcttggactgatcgatgcaatctgttagtaaaaatggctgatcatgatcagtattaacaaagtatatcactgtattgatc

SEQ ID NO: 73458 - DNA, 365 bp, Oryza sativa
agctatattctcttatcaatggagctcagctcagctacctattggctgtgtgggtgtgtgcgattaatggaggccgggtagtaatagtagcagcagcaaacctaatctaggagaatggagtggacgagtgggggctcgggctttgacccatgagacaacggcttgacgagcgcacgtgagtgacccggcaaagggagcaggcagacgagatcgaatcataagggcaggattaaaaataaaactcactaaagacaacgaggcatagcatgggagagattggagctgcgtgtatatgcagatgcagatgtgtgtgcatatgcagcctgcgtgcagtgcagcaagccagcatgggccagctctactga

SEQ ID NO: 73459 - DNA, 473 bp, Oryza sativa
  unsure (1)..(473): unsure at all n locations
cttatcgtcacaaggaatctaatcagctgagcttagcttaattcgtaacttgcattatttccgttggctcacaggagtactagaaaagagtggaagattggagtacaatagtgcatttaggttttcatactgtagtgcagtagtagtaattattaagtaatttcatccaatcaatttcctgtataaaacaatgtgattattggatttcatgcttgtgtaagcacgttattacacgccctcatcagtcacttgctgataaaaggtactaataacaagcacttgaatttaagcatgcattttcatttttattgaatcatggaactacctgccgacaaatactatatgcatgacgcttaattacacaaaagtacaaaatttctaccacgactctctgaccatgtgctaacaaacactgcataanacttatagccggttctgatcacaatcaaatctttcatgactggaaaaacatg

SEQ ID NO: 73460 - DNA, 331 bp, Oryza sativa
  unsure (1)..(331): unsure at all n locations
agcttatctcttactctccaggaatggatcagtcagaacatcaccaaccggccgcctcgtctgccgccgactggtgctttcgcctgcacggctgacttattatgccgccgttgntgggcgtatacgtcttcaccgaccgacttgccttcaccgctgtcgactggagcttccggctgcacggctgacttattatgccgccgttgttgggcgtctacgtcttcaccgaccggcttgccttcgccgccgccgactggtagcttcgcctgcacggctgacttattatgccgccgtatgtgggcgtctacgtcttcaccgaccgtgttgccttcgc

SEQ ID NO: 73461 - DNA, 354 bp, Oryza sativa
  unsure (1)..(354): unsure at all n locations
atgaaatgagaatggtcatcttttgtgttaatggnntgcatttttcacaaccaaacagtttcatgagcctattatcatgtatgaagagccttgttaacaagtatgatgtcatgctatcaaagcatgatctatttatttattttaaaaaggaaaagcaatagcatcaaagtgaatacttgggcaaagtaaaacaacacataatgtttaaactgagctacaccaagctaaatatacatctatgtggggtaagcaattaatcacccataatctatttgagcaaactgtaaagctgaatgagaataaatagcacatggtagagggtccattangaagtaaatcgtagagaatttattt

SEQ ID NO: 73462 - DNA, 283 bp, Oryza sativa
agcctgttgtgttattatcatagctaactcacactcgttgcgcgtgcctcactggccgctgttcatcctgggaaactgcgtggcttctgcactcatgaatcggttctcgcgaactcgttgtgggcgtcccgttcgtgggcttctttaatgtgggcaacgatgatcagggtaattctgtcatgtctccgcgtagcaacacttgactatgcgcaacatccaggcagtaagcgccccgcataactcacgcagacactgtacacggatgattgcctcgcatcgactc

SEQ ID NO: 73463 - DNA, 408 bp, Oryza sativa
  unsure (1)..(408): unsure at all n locations
ctccgaatcgacccgttcaagtctcctaatgtttgttataacctaaaaaaccctgtgctttctttttatgtattggtattgcttccttataagcttgtaactttgcttgtgtgcttcgcgtaacttctgtcgttccggatgattccgaaacagggttcgcggtcgtcgccgaatgttcggaatgccgttctctctgatcaatgcaagtcacatcatctttgaacatattgaatcccacnttgtaaaatgatgttgattaaattattgcattaccgctctatttaaatcccgcgtattactgtttattatccatgccattacctttgtatgacctaatattgtattgcattatttcttggcacccagaataataaaacccactagttgtactctattctggtcactata

SEQ ID NO: 73464 - DNA, 444 bp, Oryza sativa
agcttatttatattattatcaatgacttgaccatctgtattatttggatctgcaactacattctcaacgtccattgaatctgagacaagcacatttccagaagaaagatgagcatctccaccagaagctagaatagcggagtaacggagaagcccaacagcgccatttctcttgtacacaacaccagcatcgatccattcaagcaaccttgttggagcatctttcctatttgaaccaggagaagatgaatgcaaagccttatggagatcaatagcaaatccaatccatgatttaagtgatgaagcagttgaatctgcaaccagaacttcaagaatttccgcagtcgaatggaagatggcatgggccaaaggagaaccctcctgataccggtaagtcaacatggagatgtaagctatattcaaacttcataaatgaaatgtctag

SEQ ID NO: 73465 - DNA, 471 bp, Oryza sativa
  unsure (1)..(471): unsure at all n locations
actcagctttaccttaaaagatggtgaatggttcaagttntgcataaagctaattttattgagcaagtaataagttgatagcttagaatttgtaaaatagcacaatctgaaatctttgaacagcaagcatgttaatctgaaattgaatcacatattatcacaaccagtgctctcatcaccatcatgggttaccttttgtcacgcccataaattctcttcctgaatgtcatgcagaatgcgtgttaaaatctctgtccaggaccatccagagtatacaaacgataaattgataaacagatccacgtcttataaaaataataaataattcttacaaacacagcggaaataaacaaataaactagacttaatattcacgaccaatagcgtataatcctgcatataaccacaggcattctcagcgccaaaacaagctcaatcctatataactaccaactgaccattctctgctct

SEQ ID NO: 73466 - DNA, 443 bp, Oryza sativa
agctttttattttcttgagtaagattaacatgaataatctacaggaatgtaacagtagtaatactcagtttcttgaaggtcctgcgaaggaataaatgcaagttcatgaaacccaaacctgattgccattgtatctgatgacgatgttcttgtgagtgaaaaggaaatatttgttatcgctatttctgtctgcctcttcaacaaaacctgttaagttataagttattagactatatataagatctttgagagacaatagtaatgataaaagaggatacataccccatagaggcaaatcatctctgatagtggcatagaatttcccagaagtgtgcagaacaggataataagtaaatcaataagtcacagtgcgtaaaaatgttatgcgtactgaaaatggcatgtaacacaccagccgatcaagatcgaaccagaacagctac

SEQ ID NO: 73467 - DNA, 421 bp, Oryza sativa
  unsure (1)..(421): unsure at all n locations
tagtagaggatgtcctcatcagattntacctaagtataaacgacagttctgttccgttgaattaactatttgaaaagagaaccgcatgtcggcaactgcctggacaaatgctgacgtgacgtcactcagaataattaactcttaacctcgtttatatgtcctgcaatatgtgtgcactacagatgatccgtccatagcacacatacagtccaacacatacattcccagaacacacaaacagtcctgcaatcctctattgtggcaagcgatgtgtccatagcacaagtgataaatattcagtacaaaaatttgttgtttattcaccatatcgtctagcaccatataagtccatgttcccatgcaacaaatgtagccatggctctggggtgaagtcaaaatataanngtggttgtactatctc

SEQ ID NO: 73468 - DNA, 349 bp, Oryza sativa
  unsure (1)..(349): unsure at all n locations
agcttatttatgtgcagtgcgtcaccggctgcatggccgccctaagtcgggtcatatcgaggctgggagagaaggcgctatccctatntaagctcctcaaacgctccgggccgtttacctggacggaggaggctgagcaggccttcactcagttgaaggcgtaccctcagtctctcccagtcctggtcgccccggagccagatgagccgttgctactctacctggcggcaaccccgcaggtggtcagcgcggcgttggtcgtggagcgcaacgaggacaaccctcactccgcgcatccccaccctgtgtcgactcgacccgggagagagcanggaggagaggcccccga

SEQ ID NO: 73469 - DNA, 384 bp, Oryza sativa
tcacacttcaccgacattatgtactcgtattatgtactctgtcggtgcccttcatctaattaaactagagaatgatgtaagattggacgatcttatacatattctctgtgctctgtccgtgtgtcggggcatgattcaaaagtttatttagagtatttaattatcattttggaaagatagcgtctcaatggttatataaaatgcattcactgcagacagctgacagtatgaacacaatcgagatgccatctgctatggaacaaaaaagaaaagcgtgctctcatatatatgattaaaaccaaaatacaatgtttaaaaaaacaaaatacataataaccacgtactactaagtactctggatccattacaaaataaatttatttc

SEQ ID NO: 73470 - DNA, 423 bp, Oryza sativa
  unsure (1)..(423): unsure at all n locations
agctttattaatatactcagtcaattacacaaagacaatacaaccgcatcgggcccaccccggcctctgcatatgatgcacacagccaaaagaaccaaaaacatccttcccaagcacaaaagaataaccaaaacatagggattagtggctatcaatccgtagactagatcgccacccatgctcctggataaaaaaactccgtgtcacctggtccaactatcgtgatactaccgcaatagtatcccgaagtcccggtttgtggaggacagcctangtacgtagccaccgggtgactaatgtaataacctgcaaaggagaagacaccatcttgttatcaaaccattgatttatggtctcaactntgtatantgttacaatttaacttaccttattgtgcgtccaggatgcaattaaaactgctct

SEQ ID NO: 73471 - DNA, 389 bp, Oryza sativa
cagataaacaccctggacattcaacctcttttgtgaacccatatataatatacccatattgacaacgatgaaatccgagatgtgaaggaacgcttatctgcatgacgtgcatatgaattttcaaccgacgaaaaagatgttctatggtataaaaagaagaattacgtacccgaacagggtggactgaggggattaattttaaaggaagctcacgaatcggcatattcattgcaccccggaagtacgaagatgtaccaagatctgaaggaaggatactggtggcccaacatgaagagagatgtggcggaatacgtatcactctgtgacgtgtgccaaaatgtgaatgctgagcatcatcgaccgtgatgcttgctgcaaccccttggatc

SEQ ID NO: 73472 - DNA, 435 bp, Oryza sativa
  unsure (1)..(435): unsure at all n locations
agcttgtcaatgtagagagcgccttgtactgcctccagaagcgccggcagagagctgatacaacggcaagcttcgcaaactggaaacattctttcattggtcaggagacttagcatattttataccataaatcatgtaaacctgactgagcagttcatccaatctatatatagaatcactgcaaatgttcatcaaatttatatatagaatcactgcaaatttgcacatttaatcattctttgtgcgcatttgctacttcacaataatctgaatagagtggagtgaatcctgcatactaatcttgtattgtcaggaagctgccctcctccctcggcgtgcatctctcgntgagccacgcgagaatgtcagcgcggacgcgctcgatgttctcgtcaagcttcccgaagagcatggagtgcatcatcgcgtcgtata

SEQ ID NO: 73473 - DNA, 381 bp, Oryza sativa
  unsure (1)..(381): unsure at all n locations
ntcataccttantgttcggcgaggccttcgtcttcttgggtccgcttctttcttgtggtgggcgacatgctcttcggttgtttctactgatgaagtcgaagctactcgctgatggggtgcggcaacgctcggcaacgatgacatgttgcagtctcttccaatgagttctggtgttggccgtgtgaaagaagttgctcctcggtagcttggctgatgtccattattggatgtcggagctacttttcgctgtggcgactttcgtggcttcagtatcgctgcggttgtggagtcggtgctgctatgtcgcttgggcggcttactcggcaacgataacacatcttctgcgatgtgggggctgttgtgttgcttttgtgtttaatt

SEQ ID NO: 73474 - DNA, 454 bp, Oryza sativa
agcttgtatattatgatagtatgaagtaacagttctggtatcttgttttaaacattgcagtttgttgaacaaaatgtcagcataatacatgggaacataaacatctctgaaatattgtttcaggtctttccaagattgtggtattttgttatgcctacaacgatatttccaatcattagaagcatgtttaattaaaacactataggcacacataaccttttgtttctccgacaagacatgcttttgaaattcactatcaaccgctagctcccaattaatgtaagcacgaggatcatcagtctcctcgaaataaggcagtgcagatttgatcttacctagaacatcatcacttacctcataatggtcatgttgatccctcctcatgtctcgacgaagatgtcgatgttgagcacagctatccccaattatcttgcatatccctgccattgttagt

SEQ ID NO: 73475 - DNA, 469 bp, Oryza sativa
  unsure (1)..(469): unsure at all n locations
tataanagagaagaggaaagctgctgaagccatacccgatctcttctgatagcttacggactcctgacttctattctatttctattccatcagctagatactactaaactaaacttgagagaaatgagagagctattgtttgaggtgtgtgttgaagtgaagagagtgaactccttaaatatgaatgtaatgccggttatggcggttggaaatgtctgttataacctccaaccgccatangaagtgaatctctaccattccctcaaaaccctgcatccatctgcttcacatgaggttcggccgataccatggccatcccaaccagcccacattgttgctggtggactctacgctgctcacttcgtaaactgtgaatttggctgatcatcgtgtaagtctgcgtcttgcacattatacacattctgttctgacatctacgatgattatcgttgagttatgtcattttctc

SEQ ID NO: 73476 - DNA, 445 bp, Oryza sativa
  unsure (1)..(445): unsure at all n locations
agtctttatacattgcagcggcagtttcttgatcaacattccaagtcaggttaagccattttgcaagaagtaaagcaatattagtagcttcctaagctttagtttcagtttctttatcagtggtagaatgctgaccatgatgccggggacggcaggggggatccttttgtggaggagcttgacggtgtagtcagatacttgctcangggtggccctgtccttgcactcggcaccgggtgtcaccatgcttggcttgaggaggatgccctcgaacatcacattgttctcggccatgtagaagaaggtctnctgccacaccttctgcgccacctcgaaggtcctgtcgatgccatgctcaccgtcgaggaggatctcangctcgacaatcggcaccagcccggttgtctagtattattcacgaaaaatgtcatgcttgcagcatcat

SEQ ID NO: 73477 - DNA, 381 bp, Oryza sativa
ctgctctcctatggttgaagtatggtttcaattttattggccacatgttaggcatgttacctaaataaagtatggcaagctctggcaatgtgggtatgccaaccaaacaaccccttagtgctctactgctatttctcactgaggaaaattggaatgaaattccaaaatctttgagagcatctccaacaacatctctaaattcaactctccaaatgcctatttatccagcttgccaaagagttggagaatcaaatttgtatttcactccaacagtctctctattaccttctctaattgtaatagtgggtcccacatgtcaatctctgccattcttcatctctcatcacgtctttccctttccccacccactctctggtgaat

SEQ ID NO: 73478 - DNA, 353 bp, Oryza sativa
  unsure (1)..(353): unsure at all n locations
aaatcccgaaaaactagccttttatgattatattggtaataatccggccaaggggggattattcaaagcacgctcaatggacaatggggatggaatagctgttggatggttaagacatcctatctttagagataaaaaatggcgcgaactttntgtacgcccgcatgcctactctttttgaaacattctccgttgttctggcagatgaagagggaatngtgagagcggacgttccttttagaagagcagaatccagatataatgttgaacaagtatgcgtaacggtggagttctatggtggcgaacttaatggagtaagttattctgatcctgctacttgacaaaaatatgcg

SEQ ID NO: 73479 - DNA, 330 bp, Oryza sativa
tctgatatactgagattatcttctaacccatcactaactcttcgatatatttgctgctgaaagtatccctgatcccactgataacgagtatgcccaaacaattcaattgtggtagttgctgacccataccacatatttccggcaactacgaaagctgcaaaataaacatcagcgatactactggaaagtacagtttcaatattgtccatacgtaatcctttgtataaacgttgatgtggacggacactaagatggaatatgcccgctaatatgcccaatgtacccgcagcaatatgatgagaagctattgcccccggaacataatgatca

SEQ ID NO: 73480 - DNA, 270 bp, Oryza sativa
tgaacttccttcagtttgctgggtgaacactgtggtaaactctgaaatatatccgtaatgtttccatattctagcctacaatcaatgtctagaacttccaaattgcatagattcttcaagtttgctttcatggtgcccatattgacatttttcgacacgctcatgcgcatgctatctttatgatcatcaaatgagaaatcaagaacttggagggacagcatgtttcctatcgctcgcggaatatcaccgtacaaactaatcgagctaaaa

SEQ ID NO: 73481 - DNA, 357 bp, Oryza sativa
tacgccttaactacttcgcatcggcacatcacttgcggttgttgcacgcatgtgaacaacattacccgcgctgttgcgcgatgggctcgctaacgtggcatatgcgcgtgtggattacattacgcggtgctcgtgtgcgagtggactcgttaacggtggcatatacgcgtgtggggttactattaccgcggctgctcgtgcgcgatgggctcgctaacgtggcatatgcgcgtgtggggttacacttaccgcggctgctcgtgcgcgatgggctcgctaacgtggcatatgcgcgtgtggcgttacattacgcgctgctcgcgcgcatgggctcgctaacgtggcattgcgcgtgtg

SEQ ID NO: 73482 - DNA, 448 bp, Oryza sativa
agctttacttttgtgctatagatactgcacggcgattctaacattgcaaccagtcgtattcactagcaaaactcctatacacgatatatccggaatagacaacttccacccgactgagtacgagaactgtacaacatatgacgatgctcataatatccgctcgaatcacgatcagtatactatatatgataccacactataccgatcgataacatgatactaattatcactacgcttatggcaaatcaggcggtggtcggatacaatccgccgaagtacaaattcaacgaaccactgcacctgtaggctgacagcttatactgcatctaccacaacgatattatgagtgtgcttcaactatatcaactgtactagaactgctggataatcatagtcgacgataacatcacagtttccaccgctattacaaaaccgtacatgatacctt

SEQ ID NO: 73483 - DNA, 99 bp, Oryza sativa
cccctgttctagcgcacttcgatatctatgtattaccctgctctaaccactgtcatgcgtctaccatatcacgatctggcattcgcttacactggacat

SEQ ID NO: 73484 - DNA, 458 bp, Oryza sativa
  unsure (1)..(458): unsure at all n locations
agctntacactttctaaatcgtggcacggcattgcaaacagaacagaattgaaaagcctagctagttttccagaactatacaaccaaactaacggaattatggacaaggtggggagccccaactgaaagaatgaaccattcaaatgctacctacttgccagcttgctagaatacagttatagctctgaaagaatcgcaggaatatagtgtgaaagctcagctgtgagcgactgaaagccattgactagttgagtgtggaattcctggtcttcttcccctatcaatctaaaatgcacaccgattgcgcgcttgcagacgggcatgaattccagcaatgcagcgatgagctgctgcagttcttgagatcggagcctagttgcgggctcaccagataagaatgcagtgcacacacttaatacaccactatttacctgcatcgtcagggttttgtaaagtta

SEQ ID NO: 73485 - DNA, 476 bp, Oryza sativa
  unsure (1)..(476): unsure at all n locations
gcgggtgacgaccgtgcatgcgccatgccactggaggaagttcagctgttctaaactatgcaagtcgtagtacgtgcgtgctctaattaagtactgtactactggttcgtgacagtccaaggaaaaccaatgctgacacggcatagtgatggaaactctaaaaattatgggctgttcactttgatgctattttcaaccttaccaaattttagtaaagttaaaaaaaagttgctacatttagtttgttatcaaaatttggtaactatataagaaatcctgtcaaaattgtggtaaacattataccaaaattttaacaatcctatactctgtccgttcaaaanaaaacttaatctaaaaaagaatacgacctcttaagataatataattggacaaaagcgtatcggcgatgatgcgaaatgcttcgtaacatcgcgatgaaaccatggagatggagctaggaacagcttggatttggt

SEQ ID NO: 73486 - DNA, 366 bp, Oryza sativa
agcttggtttgaacagcaattaaatcatggacggctgagggagttaacaacttcaacaccaacatgtcgtgtatacattttttgtcgtgtatacattttttttctttttgccctgtttccgctgattggagttgcgtttagtcgtcgtactctcttcattattggttattctgtcttggtttttctcccttcccttagcataaaccggtttagctgattgcgttgtgtaaacaaactctctttctttctaatatattgatgtgcaatccttttacgcgttcgtggaacaagtgtacaaatttttcaatgagagtttgaaatccaattccaggaggaaaaaataactctgaaccagtactgatctat

SEQ ID NO: 73487 - DNA, 375 bp, Oryza sativa
  unsure (1)..(375): unsure at all n locations
agcttgttcttatcaccaaaccgcatccacatccatactacatccaatggctgaacaacagtggtaaggcgaatgtaacaaaactggtgcacattaattctgcaattggaaattaccatgatgttgttgaatgtgatgttgtgcccatgcaagcttgtnatattctgctaggtagaccatggcaatctgatagggattctatgcattatggtagggcaaaccagtactcttttctgaccatgatagaaaatgtgttgcatccatgtctcctgagatatttgcggatgaagtgttaaggtgccaattcaatgtagatgataaaagcccaattgttgcagaaactggacattaattggacccaaagcttactgtact

SEQ ID NO: 73488 - DNA, 320 bp, Oryza sativa
  unsure (1)..(320): unsure at all n locations
atactagcacatgtgggtgtactgtatacgaaatgaattgacgctgagtgaagtccttatgtcggtttgggcacactctccccctatcagtacacaactaaacacaatatgtgtaccacatgcggcccaaacctaaaatccacattttccaacattttatttaacaaatatcacattttatcattttaatccagatcataaaataaatcatttaatatatgtaattgagcccaaatggtaagtaaactcatcactaagcatggctgagcattnttatagactngctatctcaaacatcattcttaatgtgacacaatgga

SEQ ID NO: 73489 - DNA, 449 bp, Oryza sativa
agcttatttaataatatatcaatattttcaacatagaaccaacatatcatcaaaatatatttaatgctacgtttaatgaaactaatttagtgacataagtatttctcaattctgtatataaactcaatcaaacttaaataagtttgactagaataaataatcaaaacaccttactacttacgttccattttataagtcgtttgacattcttttctacacaaatttctttgaatttgatcaagcttatagaaaagtatagtaatattttcaatacaaaataaacatattatcaaaatatatgtgatgttatatttaatgaaactaatctaatatcttaaatgttattaaatttctctataatcttaattaaacttaataaagtgtgactagaacaatcaaatacattataatatgagacggatggagtatatctgaacattcgacatcgt

SEQ ID NO: 73490 - DNA, 344 bp, Oryza sativa
caccgtattactcatctcgccatatctagcactgtgttggaatactcagagtagcgtgcaaccagacagagagaaccgtcgctggatcgacgaactcatcattgaccgcccaacacgccaaatcgagctgtgcggcaccggatagagcacctggtcatggagctccagcgcaaccgccgaatcaaggtactcgtcgttcgctgactgagcgtctcaccattgagctcatgccagcaacaccgatgacacgaaatgtctgagattggtgccacatcgccgccgccaagatcaacagatccagtggctctggatctatcgccgtctctagatcaaagagagagaga

SEQ ID NO: 73491 - DNA, 405 bp, Oryza sativa
  unsure (1)..(405): unsure at all n locations
agcttctttctgactaattgcaccatcaatccatcagtaacacatacattcgttcaaaagaaaaatcaatcatcaacacgatcgagctagcattagcaatacctgcatgccctctatcaatacagttggataaaaatcaacttcagctagacagtagttctaagtacagaatatttactcccttccatccaaagtttaacaataaacacttttagaatgccgattccaatacatggaaagtcaagcattttcagtcaatcaagtacttcaatgggacataaaagcaattcaaaaatcgaaatttaacaatgagagaaatcttacatattatccttaatctttactaaggacctataattacttacatttagatcacggttcattnttgcttaaaatnntttaaaa

SEQ ID NO: 73492 - DNA, 406 bp, Oryza sativa
  unsure (1)..(406): unsure at all n locations
tactaagcttagcatatcatctgaagttcaggattnagtgaattgtttgtttgttgtacttggacatatgcatgtacctctttgtgttcaaaaccttgttttcctgtaatcttctctgtagcctgtatactttttacacgaaaaatgtgaatataagttgggagttctgtacacagcaaccaaaatgcattttcatatccactgtttgtctgtgttgaaacccggtctcctatccaaacatttcaagacttcccccccaatccactgttctgttgccaaaaagacacgaatattatggaatgacctaatattaaataactataaggggtgaggcttcgaacccaaattgtctatctcaccaccttgtggagctagctggaagatccctcggcgtttctcactgttc

SEQ ID NO: 73493 - DNA, 320 bp, Oryza sativa
tagcttgttatggaggtaatgtactgcgagactggtaccgcagcaatcagcgtgcctctggtattggagagtacggaacaggggtcacttcaagaatcaatgcagagaccatcttcttccacaatgaacattgagcaagagtcaatgccgagaccattttctcgcacaattggcactgacacaagttccccagagatggctcctgctggatctgagaactgataagtatcatggttgccgctgccccctcctacaccacttggcgaatcaatgccctccttgccaggcgcagctgcctccaatgctttattggtgatgcc

SEQ ID NO: 73494 - DNA, 403 bp, Oryza sativa
  unsure (1)..(403): unsure at all n locations
tatggctcaaccattattgatgaattgcatattaccttcgtcgtgttggggtcatgcagttctgcacgctgctgaccttgtccaactacgaccaactgcatatcatgaaactttcccaatgcagttagtacgtgaaaatcctccaagtatttcccatttgcgtaagttcggttgtgctgtatacataccgatctcaccaccacagcgtaccgctatgggcccacacaggaaagtagggatctatgtgggattcanatctctgtcgatcataaagtatttagaacccttaacaggtgatctatttactgcccggttcgctgactctatcattgatgaggaacatttcccggcattatggggagacttcaagtaccagaaagaatgccaggaaattgattgggat

SEQ ID NO: 73495 - DNA, 333 bp, Oryza sativa
  unsure (1)..(333): unsure at all n locations
atcttgttgggagaatctctccnccactgagtgacttgatcacattgcatatttccctttccaattgcatcttatataacttaaaaaaaacaacatacaaatttgctaaatagaaaatgcccaaaagatatgataggtctgagtcatgctaagtaagacaagctagttctcttcggtgaaacgatgaatagntgctctgattcatatctctgatatatgggttcttggtgaatactctctcaaaggttaaatatcagtacccaacaatcatcctggaacctgaggtatatgggctgcacttgctgatctaactctacgttgttgcgacatatg

SEQ ID NO: 73496 - DNA, 413 bp, Oryza sativa
  unsure (1)..(413): unsure at all n locations
catatagtactagtaagtacctaaatagaaagagaacatatgcatagcaaatcaaaacaattgagttatacaagccaagacatgtgaaacatatccatagtaatgtatgcctactgcaagcagataccctcccccttccctctatgacaaaacatactgaattgcaactcaattggctgtgtacgtagtgctttatcgacaaattttcagccattataacagtaaagtgtggatgataaaaaaaaatcatatatggtgaccacatattatgaagctactatggactatgttttcgggtcagattacnaaggtagtacatggatctgatttcangagaacccaaacatgataccatggccaaatttttatgctctattattatatnggatatgtgctaggaagatttctgggat

SEQ ID NO: 73497 - DNA, 381 bp, Oryza sativa
gttcatacaaccagcagtccttctagagtactatcagttcacattttaacaatgcggccgacagctgttttatataagtgtacagccattccctaaacaccatgaatctgatatattccagaaaaatattggccataccctgtatactcagaagacactgaagcctgacttgagaaccttaagccactagagagaatgttttcaattatatggggcatattggacacagagatattttagccataccttaactctctcagataaaactaagctggtatcaattgatataataacaaagggataaattctcctgttttagcgataggaagacagagccggattacttcactaagcagaccatgagttgaaagccctacatgt

SEQ ID NO: 73498 - DNA, 419 bp, Oryza sativa
cacaacaccactgggttatctacaagttaatctgttcacttgcaactattttcatgtgcttccagggactttgaatgttgaactgctggaaacagatgtatcaaaaaccaatgcttggaaacattggtcatgtaaaaaaaaagggccatattattagttagccctaaaatacaaagacacattggatggtgcgaacaaaatggtaccatgaagtatcatcacccactgaacggcgataagataaaaatcgcattgtattggtttatgcaagaatagtgcttttagagtaacaaatatgagttgtttactaaagaaccaaatttatatcgacatgtttgtatacaatgaacttaattatgagcaaacacatttagaaatcattatcatacgtgtattaacaatggtgatgtacacatgtg

SEQ ID NO: 73499 - DNA, 387 bp, Oryza sativa
  unsure (1)..(387): unsure at all n locations
tcgatgctaccctgngttacttcagcacttactcatgaagagcaaaacatgatgctggatacatggaaacatgccactaagaatacaatgtttggcgagtggcttaacgagtggtggaatggagctccgacatcatctgattcttcaaaaaagcatcctctgctccagaanggtagtgcagttgggttctaatctggttatcttattgctactccctccgtttcaggttataagatgttttgactntggtcaaagtcaaactgctttaagtttgatcaagtttgtagaanaatataataatattttcaactcaacacaaatttattatgaaaatatattcaattattgatgtaatgaaactaatgtgatattggaaatattactata

SEQ ID NO: 73500 - DNA, 496 bp, Oryza sativa
  unsure (1)..(496): unsure at all n locations
cttatgtgatatttacataaaaataactaatgcgcttatgaagtgcatacacaaatgcagactcttatgtttatggggtatctgaaatttcctgcggaactttggatatccaagtaaggattcttcaaccagtattaatatttgaactagaattattatactgagaaatatatttttgtgctccagtgtctaacagtgtgacttcatttctttagctaatgaaaactcaactttatacttctgccctacctattaaagtgtgtacggtgtaacttcatgaatcatgattactacagcctagctatattctagaatcatcaattaatcacagagcagcaaaattaaatgcaactcanaatagtatgctcaaattccatttattaatactcacctcagcagtgttgaaagtatgtagcaaagaatgtgattctgataacaaatttccgtctactatacttctcatgtgattcaagcttctcataagtttggatgcaat

SEQ ID NO: 73501 - DNA, 467 bp, Oryza sativa
  unsure (1)..(467): unsure at all n locations
catattacaaccatttgcttaacatcttaataggtattgccggtcaatacatttatatatttcagtaccctgataaccacaagaatcaacaaagctgaaacttcatctgaagatttaataatatcaaccttttctactctagtacaagaagaaatgaagaaatgaagatttaataatatcaaccttgcaacttttccatcatattaaaactttgctacacacacaaacttccaacttttcagtcacatcgttccaatttcaatcaaacttctaattttggcgtgaactaaacacactcaatgccttctatcattcttcttcgtgagtggattggattngacaaacaaatganatttctatagaanaacatgcatctactggtagccttgtgcagtaaatttatatagagtgggttttttggagatggcatccgcgagtggattggattcgacanatcatcaattaat

SEQ ID NO: 73502 - DNA, 369 bp, Oryza sativa
ttcatgacaaggcatttccaaagccgacacatgcttaccatattccgacgagaggggtcccataccaacaacatgttattgtccataccatactgtgccatgaagcccataggggtcctcttcgacaccaccccggcaaatacacatgtctctcggcatcatggctcccctgataagctatttactcatccaagggtgtcccattccacccatgtggtcgtacttgtcttatgttcggatgaaatttcaaagaatcggtccttaagtgcgggagcgggaataccgtacacccggtacgttccccggtccgcgggtgtggaaattcatttagttcgcaagcaccgacccatgcgtcgggttttccaagtc

SEQ ID NO: 73503 - DNA, 455 bp, Oryza sativa
  unsure (1)..(455): unsure at all n locations
ggctgctatcgccatagccgatattaatcatcatattgctcttcagcgtgctgcccgtataaaatgcgtcgtccacgtgttgacggtcaaagcccgacatcgggccggtatccagtcccagcgcccggcatgcgacgatcagataggccgcctgcatggaactgttgcgaaacgactgttcttcggcaagttgtgggctggaggtaaaccaactgcgggcatcaccgtggggaaacagtagtggtaaccgttcataaaattcactgtcccatgcgacgatagcggtgacgggcgcggtcagggttttttgcagaatggccgctggaaagtgccgggcgcatacgttcttttccttctgccgtgcgggtaaacacgatccgtgccggagaacagttagctgatgtcggcccccatttcatcatggcataaatcntccgtaacgtctcatcgctgac

SEQ ID NO: 73504 - DNA, 485 bp, Oryza sativa
  unsure (1)..(485): unsure at all n locations
tatcagtaaacgacctgaaagattcaaatgtgcttgatttattatcctgtgatggcatttctttnttacgaacggcaaaaataaaacctgtgataacataatcaagcaattttacaatctcaaacacccatacacaccatagattaccatattttcatgatacataatgggcatcacaaacatgtgggttggtaacagaaataactacagaaacatttggtgcacaggcgcagaatngatactacaaaaataaaatgctaccaaatcaattgatagaacatgcatgggtacttccccactcttatttaattcattgcagctagcattttccctatatgaacttgcagaggctatcttttctagcaagagatatgctccttggtccttgcttcagcttgtctgcaataactgtattcttgtccaaccattccagtannagtgaaagtgcaatatatatatcagatatttatcgtacatcatatact

SEQ ID NO: 73505 - DNA, 433 bp, Oryza sativa
  unsure (1)..(433): unsure at all n locations
tcgatagcctactctgctgccgntgatgggctacttcgtcatcatatccggctatctctgttgccgctaatcatcattaccgtcggatgcgtttgccattgccgactattttcttcatcttcataattggtggatttcgccatcaccgttgatgcgcgtctacgtcttcatcatcggtttgcttttgtcaccaccgactgctctgtcgttgttgttgggggccttcattntcattgatggctgacctgactgctgccgactggtttcatcgtctccacggctgtgcaacttcatcacttttgattagtatcactatcttcactaccactaatatntgtgtcacctctagtgggcaatattatctctatattggtcgtcttgtctctatgccaactgcgtcagctactatcaatggacaattgtgactacgaca

SEQ ID NO: 73506 - DNA, 306 bp, Oryza sativa
  unsure (1)..(306): unsure at all n locations
accaccattctttcgcactatgagaagcatgaactgttttggacttcttatgaaatggttatgtaatcgatatactaacacatgttgtatatgaaacgcatgtgatgctctatattaagttatacatcgagcacattgccaaacggacccatgatgtgtattccttantatcagggcatcctgtatagctatccttttactgttacttctatcgtgccagctattcgtgcctatgccaggactttgatcctcgcatacgatcgctactcgagttcatatggataacctgcgtgtactcttcctgcg

SEQ ID NO: 73507 - DNA, 410 bp, Oryza sativa
  unsure (1)..(410): unsure at all n locations
tctacactagaatgtggctttccacacaaatatcattcaaattaactcctacaatgaactatgctttcttttcttgggaaagttcatggcaaaaagaaaatgagaaaaggagggaaaggcatggctatgaataataagaaaaaaaagaaagaagaagatggaaataaagcttgtcctataaacattgagcaaagttgaaaagaatatatagccatgccccttccatgatcatgccaagagaaccaatttggagagaaagaatagganataggagaatcatttctttattccagcattccacaacatatttccattgtcaaccacaaataaagacccttgatctangagtatgacggatgatcttcttgagtccatatttctgaccttgcaatatatatgatgcaagtatg

SEQ ID NO: 73508 - DNA, 286 bp, Oryza sativa
  unsure (1)..(286): unsure at all n locations
tctcctacttccactgtatgtgttctgaatgttcaatcatgtgtatatacttcctatntggaaacaatgaaagttcatagctacttgtgccttctttggttggtttatagtaatttactgtttgcgcatcatttagttatgctcattatgtcacctccggaaattcaatagcaatttcatcactaatttgcacatacaattaatcatcgtccaaccatcaactgatgtatacacaaatcgataattcaatatagatccaagataataaaaacattaaattcttata

SEQ ID NO: 73509 - DNA, 248 bp, Oryza sativa
  unsure (1)..(248): unsure at all n locations
ttctaccgtcaaaccgcgcacatgcggctatatatcgcgcgcgcgtgtgatctcccggtttatgtctggttatgctacccgttctcccgttgccgttccacgatgttaatactaaaccaaatacatattttatataaacgcagtgctgctacgatgacaacgtatcggctatcgccatcactcgnggtgttactgacttgccacttgactgtgtactgaggagtgtgtgtggggggttgtgacttgtg

SEQ ID NO: 73510 - DNA, 388 bp, Oryza sativa
  unsure (1)..(388): unsure at all n locations
atggtgtctatcctcagacaagccagtatacagcatctttgtgctgttctatttaaaaatctcacatgcttttcaaattcatattatttctaaatatggaagtgttctaatatatattatctttaaatatggaaggagctaaattatgtatgcggtatttatagcttaatagatggtataaaattacatctttcatttgttttcaccctctattttgctacataattatgtatgcagtattgatcctaaaaggaaaaaaaagaaaaataagaagttacggtgttcgaacccttgatctctttgtatgagaggcagcccttcaccaccangatagacctttcataaagctagaatgacatgcatactatntatancactataccatgga

SEQ ID NO: 73511 - DNA, 313 bp, Oryza sativa
  unsure (1)..(313): unsure at all n locations
agacaaatagtgaagtctctgttgctgcaattggctttggccaatangagtacaactattacctgctagttagggggggtgtccaaacttgtataaaaatccttgtcacccatctatttttaccgtaatctcgcgtatgtcctgatactaacgatctccatactctacaaataccgtagacaaggcataactcgtcaataatggntttttattggntctaggtatatcattagtggagattgtctgcgatactatcaaccacttctattgtagatgcaatactgcagatgatccgtgttcatatatcaaaact

SEQ ID NO: 73512 - DNA, 398 bp, Oryza sativa
  unsure (1)..(398): unsure at all n locations
agcctaagtcttatggtacaatcgaaaagtacaaggcaaggcttgttgcccaaggttatacccaaaaagaaagcgaagacttctttcacacatactcaccagttgctcgcttgaccaccattcgagtactacttgctctggcagcctctcatggtcttctcggccatcagatggacattaagatagctcttctatacggagagctggatgaggagaactatatggatcacccagacgggtatgtactataaggtcaagagggaatggtgtgtaaacttgtgaaatccttgtatggcctcaaacaagcacctaagcaatggcatgagaagtttgacaccacgcttacatctgcaagctnntgtgtgaacgaagctgacaaatgtgtatactatcgctat

SEQ ID NO: 73513 - DNA, 401 bp, Oryza sativa
aagaactgctagtacccgtttattagggattgtcttatgtactcttgttcggatatttggctgtgtacaccccacaaaggtgtagaggccgggtttgataatcctttatctaaaaaaaagaactgctagtgctaagcttgtcgtgcgcgtccccatggctgtgcctatctttgctagtgattgcacgactgatttgattgttcctctgggtgagtttgtgattcaattcctctctgaatttgtggtggatttggaggaattgcactattgcaatgtttgattcaattcaattatctgatgattgtggaaggggaagttctcctctttattttctctccctcattcgttctctctctcttctatttcttcaagcaagccccatggagagggagagcacccgc

SEQ ID NO: 73514 - DNA, 416 bp, Oryza sativa
agcttgtttggtgttatgtcaatttaatacatggtccgcttgtctctcttacagaggttctgggtttttttatccaagccgggtgtaagattacagcctgcttctcctctcttctttcctacacctcaacatttagccgacttatagcctattattatactctaatacacgcgacacaataagttgcatgatccattccttcttgctttcagtttcagacattcggcacgaggagctacgaagagtggccggggaggagcaaaggagcaccatgataacggcgtgtggcgattgtcactgcaaatctcatctctccatgcaccagtgaaccttttgccccacagaagagaattctcggcacacaacacacatactgacgacccatcgttgcgtgcaaatattgcaagaaaataatt

SEQ ID NO: 73515 - DNA, 433 bp, Oryza sativa
cttctctggctatctcttacttccgctagcataagccagtctggctgattgcgtcgcgtaactaaaactctctgtcttttaatatattgacgagtgatccttttgcgcattcgcgaaaaaaagcagatcaataagaaattatgacatcgggattttaataaagtgctggggtgggattatagcattcttgttaattagtatgtgtgaggtaccgaaaagttaaatttattttgagacagggacagtgattatttcacgaaactgtgcgaggtgggatatatagccggagcttagaggcaacacgtgcaagctagctcaatgtaatttttcctcgcccggccgaggctaagcggcgagcgtcaatgtcgcatatcctacataactcgccggtcatagaaccagtcactgtatcgatcggtccgtcacacgccgt

SEQ ID NO: 73516 - DNA, 375 bp, Oryza sativa
agcttgatctctttatggatggcgcaaggcaaaagtataatgtagctaaaaatgttttcttagtcttttcccggtcttggtgtttggtgtagatcggatttgctagataggcgccgtactatcaagagggttctatgaagcgagcttgtggatgatcttgtgccatattagttcatatgcatgtaggtgcattttttgggcttgtctaaccaagtgtgattatgtttctcaagtcctaaaccaagagagaagtggacatgtccaatatgagtgagtgacatcttgtgggtatgtccggtggatatcctttggagtgtgagcccattatccttgacttaagttgtgtttcttggatggatttttcatggcgtggat

SEQ ID NO: 73517 - DNA, 461 bp, Oryza sativa
  unsure (1)..(461): unsure at all n locations
actaagcttgcaatttcacccgacgttcgtactccatccaagcatgaatgaactgtgtggtcggntcaggttacgttatcggcccgccactggaagtaactctgactgtgtcaatccattgtacgaattgacatttccttacatcctcctatgtacatccattgtggggatagttaagttaatgatagtacagaggagtgatgaaaagaatagttgtaattaccacgaaatcatcgtcgacaatgtttggacacacgaaacacctttgtcctcgagttcggtgccttacggaccttatgacctgacaacggtcaccacaacgacactccggacactcacgctacgtggggagtcctangggatntacctgccattctaaagcctcagcagcaattcggcgttcatgctcatccttccgccttatgtagtccgatcttgtttcactacatgggtatgcacgt

SEQ ID NO: 73518 - DNA, 438 bp, Oryza sativa
  unsure (1)..(438): unsure at all n locations
cagctttattctgatttcaatctcaagtgaagtggactataagacacagaaggatataaatgcagagtcatacactctccatctagctatgcaagaaaataaaaggggtgataaagaggagtgtacctactatatgtggaagcagaagtttgtggtcaaaccagagtgcagagataagaaaagaatggaggtagataaatgggtgattaccttagcatttcctcatggacaacgactaagcagaggagcacggtcacctggtgtctatgcattcctgccaacagagatggttactaattagcccttcattattcaagctgatttccttcttgcttcatcccgtgagtccatcctgcttgacagccaatggaatcgtggtatacttgatagcgtaccttatgctttngtcagtgcatttgaaggctctttgaaatcatc

SEQ ID NO: 73519 - DNA, 406 bp, Oryza sativa
tcgcagaaccctcattgatggcggcagtgcactcaatattctcttcgccaagaacttggatgatatgcagatccctcgctccgagctgaaaccgagcaatgcgccttttcatggagtaattccaggattatccgccactccactcggccagatcacccttccggtcacttttggcactcgggaaaacttccgcacagagaatatcagctttgaagttgccgatttcgagacagcataccatgccatactcggacgcccggcgttagccaagttcatggccgtcccgcactacacgtacatgatgatgaagatgcctggtccccgaggagtcctaaccctacggagcgacatcaagcaagctgtcacatgcgacaaggagagttgcgacatgggccaaacccgcgag

SEQ ID NO: 73520 - DNA, 119 bp, Oryza sativa
aatagcttccgttttacggaaatgagcactctgttataccctacagacactatgttggacgctggtactatcacgcattgtgtgatctcaggcatgcctaccgagcttactcggaacaa

SEQ ID NO: 73521 - DNA, 455 bp, Oryza sativa
  unsure (1)..(455): unsure at all n locations
cttgcttcaatgcgctatgaggagcactagaattngctacacagaatgtccctcgcanaactggtgaatctgtattagttgtggccatgtcttcaaatgtaaggctgtacacagtagttgcattggggaacatgatgccccaattnttctctgagacaggtccagcccgaagatcctcattgaacaactcaaatatgaatgtgcttacttgattgtttggctggccaggagtaccagaattatttaatacatggcgtatgaggtttgtattgtaggccaaagcattatccacattagcagccttctcattntgcccaccatgcgatggccacccagaagctgtgaccataacagggatcccagtgaaattcattgcttgcattgagttgtatgtagcatcaaccatagcatcaaacatattggtatagaacaaatttgtgttgggatctgaaatt

SEQ ID NO: 73522 - DNA, 428 bp, Oryza sativa
  unsure (1)..(428): unsure at all n locations
agcttgttctaagtgcatttgagaaattatctggcttaaagattaatttccataagagtgagttattttgctatggcaaggcaaaagatgtggagcatgagtacgtcaaattatttgggtgtgataccggggattacccttttaaatacttagggattccaatgcatcacaagagaatcaacaataatgattggcagggtgtggaggagaggattcaaaagaaactgagtagttggaaaggaaaatttctcttggtaggaggaaggttggtccttatcaattcagtgttaagtagtttagcgatgttcatgttgtccttctttgagatccctaagggtattctcacaaagctagactattatagatctagattnttctggcaatgtgatgaacataagaagaagtatatgttagcaagatggagtgta

SEQ ID NO: 73523 - DNA, 451 bp, Oryza sativa
  unsure (1)..(451): unsure at all n locations
ntgatgtatgactggccatacaacactggggacgtgtttattctcttgcgtgcacgctgaggaggttatattcttcgctgcaaagaagtctccagacgcaagacaccagcatgttccccagcagcagcagcctgcatatccaaacaaaaagaagaggatattctgttatcaggctcctgagagagatgctgatggtttgttcatccacgagaacaaagccgatgcttgttcacagcgacagcatcggagcccagaggacgggtacgccaccatcaaggagacgaatccatgctcgcggcaaatccagatcgtgccaagaggttatnttccatcctgattgtgttgataaccgtctcgaaaatgatgtaatttatgtcgtgatgtactgatgttctcctgcagcagatgtctcattgctggtgaagaatgcgtctcttgttagcttcctgga

SEQ ID NO: 73524 - DNA, 244 bp, Oryza sativa
taactcgaccgggaccttaagcgactgagctctatttattgttaatctgcggtgcaagacctgtttatcggacaatcactgatgcaaccaagtctaacactggaacctcctacaaggattctttgtgccatcttcggtgccagcgccagctgtgagaaacagcagcagcccttggaatgcgcacagcagtgccctgaattcaagaatacggactttccaagagacataaatcctggcaccatca

SEQ ID NO: 73525 - DNA, 335 bp, Oryza sativa
tctctctttggataccactgtggttcaaggctataccctattgtcagatcaaactcagtccatttgagtatggatgcacttaaatggcgttgaagtctctctttgcattcaactttgctctaaggttatattttgttttcagaattcctcttctttcttggtttggccaattggccgcgtaactcttgaccagccctcaataagatggttataaggtagagtctctctacctttcagcgtcaaaaaaatatctaagtgcttgttcaaccttgccattccgggcagtgcagatgcttcgacttgtctagtttgccaagtcatatgcaatcactaca

SEQ ID NO: 73526 - DNA, 267 bp, Oryza sativa
cactgcgagttgacaattgatcttgcctgatgttagggtgctaaaacctccataatccacataagatagattttacacgatgggtagatactaccaactacctttgattctgcaaccctgaaggatagcatgcccattcccctttgtgatctttgacctattcttctttacatacattgggttgcaaggattgatgtactatgatgaagccttagctattcagtaattttagtctacacggatgcatggctgtttctttaagattca

SEQ ID NO: 73527 - DNA, 312 bp, Oryza sativa
tagcaagtgtgagttctagttgtccgaagtcaagttcttattgcacgtgatatctgccaaaggagttgctgtggatcccgaaacagtgaccgccgtcactgattggaagcaacccaagacggtcactcaagtccgcagctttttgggtttggccgggtactatcggaggttcatctagaacttctctcaaatcgctcgacccatgacacaggtgttgattaaagaatacaaacttgtgtggattccctaatgtgagacagcatctcagaatcatcaaaaaaagctggttttcttgccattcgttatcttacc

SEQ ID NO: 73528 - DNA, 153 bp, Oryza sativa
  unsure (1)..(153): unsure at all n locations
agctntgatcatcaactactacttatgtactccctccgtcctcaaaaaaaaaggcatcctgtattttcgtggccaacgnttgaccgnctgacttatatgaaatgttgtataattaaaattttcattggtggtagaagataaaacaagattaat

SEQ ID NO: 73529 - DNA, 314 bp, Oryza sativa
tgcccaaggggataaaaccgggggatatatatagatatgctcgtatcatatttgggcatattctttccgatattaaaacaaataccgattgctctgatcagaaacaatacggattatctcaattccaacaaaaatcgaatttgattcggcacgatatcggaaacatttttttcttagaacactaaaaaccaactcaaccttttatataaataaatatcaacatatataattagctcacttatataaaatgaagtgtaatttattatgtcttacaaaaattcattaagtttgttatatcgatgtattgctattaa

SEQ ID NO: 73530 - DNA, 416 bp, Oryza sativa
  unsure (1)..(416): unsure at all n locations
agcttatgtattgtaaaaanttgttgatggtatgcagcttgtgctattatacgaatgaaaatattttctcctttgcattcataatcatgtgtaaaagttggctatgttcctttcgttcaaatagttgcatttattttctgttctgcccttggaaaacaacaatttccttcattatcggtacggataaagtttcatactgtgatacctctagtcagatgggttggttctcttttactttgttaatttaattctaatttttaattcaattcttgcagaagaattcatttagctggaaagaatatgcaatttctgtagcattatcggctggattaatcactggcgcaccaacgttaggatggccagcacatgcttctcctcttgaaccagtgatcccagatgtttcagttttgatctct

SEQ ID NO: 73531 - DNA, 504 bp, Oryza sativa
  unsure (1)..(504): unsure at all n locations
actaagcttctcggacagtgccatgctagtagtaatacaggtgtggtgtatatttaaatgggcaatgcgaattcgctacaccaaaatctcatgtcgcgtcgatgatactagcactaaaataaatactcgtctggctatggcccgcgagtgctgaaaaaaattcatcaacttatatatgcgcgctacatataaaaaaaatagcgtcacagtgccaaaacaagaaagctatatacaagtctactatcatacacacagagacattaaaaaccaacaaattaatgggtacctaaaatactttgacgcccacaataaaataaaaatattgatgaaaagcgatgaacaattctacggctgcgacatcaggagctttaggatagattttcctttttagctctatagtgggcatgtaagtttcctcttttacggtggaaattctaatcanggggtttctctatggagatgtatttaacagaagttctatgtgaatgtatgaattctggaagt

SEQ ID NO: 73532 - DNA, 413 bp, Oryza sativa
  unsure (1)..(413): unsure at all n locations
agcttgtccattcctagcttgtatatcggggattcacggactttctaagcatagaagaatcatcatacacacaggagtagggtattacgcttcatagcggcccgaacctgtataagcctcttttgtctcatcgtcttggaggggcctaaccccctcaagatcacatagcttcgctcaccgagccctcgaatctcacccgctgcccccggccgaactcacaaaggggcgcctcatggttccctagtggaggagttcattctccgacatctggcgcgccaggtagggggcgcgttcgtgattnttgaggttctttcgagcgctggcgtgataagcgccgcgccgccgatgcggtgtaaggcacagcctcctcaagagtgtcgcgcgaccccaggcagggggctaggcccccgaca

SEQ ID NO: 73533 - DNA, 485 bp, Oryza sativa
  unsure (1)..(485): unsure at all n locations
tattcaggatgctactgtaatgagaattctctatatttatcaggcagctccagttctcgagttgaacggtctaccacgtcggaacctgaactgaaccattctaacaaacaggcttctggcacagacaaccttaaaagttcgagaggtttgccatctgtgtcaactgttggcacaatttcttctattcatggatcagagaaagaagctgctatgccaaataatcggtcattggtaaagaatattcccaggcaacaagcagctgcaaaagttgtgaggcattatccatcggaaatggtaaataaaactggaagctcttttaatcattaacatatatcattacactaaaattacctaatggttgtctcnaattttcagacactttttccgtatgaacattttgtcaagctctacaatnttgacaaggtggagctgctgccctttggtcttgtgaaccttgggaataggtaaatcaaataatgaacctg

SEQ ID NO: 73534 - DNA, 442 bp, Oryza sativa
agcttctctggttctaaactgcatgatcagctccactcataggcagtgcaatcccatcctgacttttacagcttgaccaccttcggccatccaatctgctcaaagcttccaaatctaattctccaaagatggtcgaaacttcatcacttgctgaatcaaatgatgaataagcaaaatgacaactatcatctaagagtggcgtgctttgggaagacttcgtaagatatgcacatttactggagccagatgatctcttccttctgtgcattgtctgacccccacacaacaggctgctcccttttcttctgagtgtatcagagagcgaaagagaaaaacttctttcagatcctttatgtttattcctctttgaccaattacaaagaataccgcacctctgacttctcaataattcaaggtggttaacccatcttcatctagtgaa

SEQ ID NO: 73535 - DNA, 456 bp, Oryza sativa
  unsure (1)..(456): unsure at all n locations
ngatgcaattcacggggcacgagcgacgtagcatcttaaccgatgatgattaatntcagaattataaagggtttattgtctttggcctttacattctttgcttaggtgatgatcaaatcaggataaagggagtagtaggctatgttcggatgtatggttcctaactctaattccttgttttccacgcgcacatttttatactcggtgcatttttataagaaaaaaatataggaaagctaattttaaaaaaatcatatgaatccatctttcaagttatctttagctctgcgccatgaacacaatagatccaacctagtgctcgctgcatttggcctcggaggcaatggtagctcaagcgtcggatctggcttcctctacttcctcggctagttggatcctattgaagctcaatggtggtggcaacagatgctttgcgtcgtgatcacaaccttccta

SEQ ID NO: 73536 - DNA, 411 bp, Oryza sativa
  unsure (1)..(411): unsure at all n locations
acgaagatataccagactgggtttctgagttcccttcggccatcccagctataaacaacaggttccagttcatgctcccaanttgatccaaattatattttccattctactcatgtatggtcattacaataataacaattctggtaggctggaatgtgcctttcacgtgctctactacatgcgaaactgggatggaactcgccttgtgaaccccccaaaatctgtgagttctatgtacacactaggttcaacttaagtttcattgaagtagcttccttttataataaatattcttctatattaacaacacgatcaacgagatcttcgaaaggaatttctgccaacttattgtcattcaaggcaacgaagctattctgcggacttcgtcgtcactagctgaagtatctaaca

SEQ ID NO: 73537 - DNA, 392 bp, Oryza sativa
  unsure (1)..(392): unsure at all n locations
cattatatgctagatctatctgatcggctatgctatgaacatatataatcctgttattaatgtatatttcgatctaagtgatttatacggtctcggcatggcgaccgaatctatcccaatcacttgatttaagtatgtatcgatataaaaaatatatattggtaatatctacagccgatcgaatagatttagttctttattacctatttgcaaccgccgatcgattacatatgacatcggctcaaagataaatgatacgtcatcggcacttagccgatcggctatcatttatagggttaaactgccggttctctatatttatttcttggtgattgcaggatcaaatcaactggcacgctagcatacccgaagacgattntggacctacactg

SEQ ID NO: 73538 - DNA, 407 bp, Oryza sativa
cacctaagttcccgtgacttgcttgagtctattagtctcacccttgctctatataaatatatatatagttccccggccctgaagagaagataaagtgaagtgaagattatggtttcgtcctggttcccagccgtcgcctgtggtgttgggtgttagaccgttgtcaaatatttctgacaggaggaagtatcaatttatttcatgtcttatattaattgatgttttttagtatactagtttcaattaatttgttatcagataaattaaatgtcaatggtggatccttaattcatcatctataatgcttcctagaattaatggacatccatttacaatttaagtttgttgagaatagtcagtttcatgtacatatgtagtggtatctattcttgctgaaatttgtattg

SEQ ID NO: 73539 - DNA, 313 bp, Oryza sativa
  unsure (1)..(313): unsure at all n locations
ntgcgacgctcgccaactggcttacatcctttggaataacaatgacagcaaacttgatgcttagctggagtgctggaggtacatacttctacttctctgatctctctttcctgcagtggaattgttcttttcgttgagcgagactagagtagaattctgaatatccaacctgacgctcatgctatcttcttaaacatcaacagggacctttgtgtcctacatggtcgtgagtgctttcaccctcgtgttcgtcatcctttgggtgccagagacaaaaggaagaactctcgaagagatacaatggtcccttccg

SEQ ID NO: 73540 - DNA, 472 bp, Oryza sativa
cgtgacactatgaaactcagcttgcaacctctcatctgtgtacagacctgagattctcttgtcagcctgcgcgttgctgatctggagtgctatatgtacatgcatctacttgaatgacccttccttcctgcagtgggcatgaaccactgctttaccgataataaaaggcaactctgaatatcaacctgccgctcatagctatattgtcagagcataacatggacctttgtgtactacatggaactgagtgctctcatcctaacgttcatactcctacgggtgcccaacactaccagaacatctctctaatagatacaatactctctctcactgagactcgtgagctatagaggtgtgtgcgagtcttcaacatcaatccgtaggagaggaactcacgtgtgctaatgttgtatggactatggcgcgagtcaagtatactggacaaaaagcaaagtattctttctgtcatata

SEQ ID NO: 73541 - DNA, 323 bp, Oryza sativa
agcttattatagtggaataaagcagagagagaaatcaaagctagatagagagagaagaagcgaggcatgagtcaagaccatcttccatggccagtggtgatagtagtagtagtagtagtactataaaaggggagcgcgccacggcttgccaatccgccgcgctggtgtgatgctgcgatcgacgcatccgccggccagtagcccgagcagcagcagcagcggcggcggcgggggcggagggtcgtcggcgtcgtcgagctcggagaagacgatggtgggcggcggtggaggaggttctcttttttttcttctcttttctctca

SEQ ID NO: 73542 - DNA, 458 bp, Oryza sativa
  unsure (1)..(458): unsure at all n locations
gtacaattggatcggatgatagttcgatacaaatattttctaatagttagacaaatagtgaagtctcntttgctgcaattggctntggccaataggagtacaactattacctgctagttagggggggtgtccaaacttgtataaaaatccttgtcacccatctatttttaccgtaatctcgcgtatgtcctgatactaacgatctccatactctacaaataccgtagacaaggcataactcgtcaataatggttttttattggttctaggtatatcattagtggagattgtctgcgatactatcaaccacttctattgtagatgcaatactgcagatgatccgtgttcatatatcaaaactttcggttgcccgatcaaaactttcgcgccaaccgtcatcaacaccagagttcggaagcctcagaaactactttttctccttaccatcgagagtttgg

SEQ ID NO: 73543 - DNA, 422 bp, Oryza sativa
agctttgtgcatagaagagagaggcaagatattgcaaatctgtgtgtgctggtaggggcatttggcaagtgtccgcatttggtaatcaatatgtagtggatttgaacaagcacacttgtgggtgtagaaaatgggatttaactggaatcccatgtttgcatgttgtttcagctattcaagggttcaagcaaaggccagagagctatgttgatgacatattgacaaaggatgcatatgcgaggacatattgtgggatgatttatcccgttcctgatgagacacagtgggaaaaaactccatttccagatgtagacccacctgtggctaggacacaaccagtgaggccaaaaacaaagagaactatagcatctgatgaacctatggttcaaggaaggtcggttgcaaagacaacaattagatgt

SEQ ID NO: 73544 - DNA, 432 bp, Oryza sativa
  unsure (1)..(432): unsure at all n locations
ntgacttctcactagcttgactactggagatccagcatgatcctcagatttcagaaagagagagatgagccgggtgtgcgtcaccggagccgccggctacattgcgacatggctcgtcaagaagctcctcggcagaggctgcgtcgtccatgcaaccctgcgagatctcgngaactctctctctctctctctctctcttttccatgattaattccatcgacctcgatctcgatctcagctgctaagatcgccaaatccatcattcagaatctgtggattaattgctgatctgaagaaatcgtacgtacaggggatgagaagaagaccgcgctgctgaggaggatgccctgcgccgcggagcggctggtgctgttctaggcggacatgtacgacgcccgcaccttcgagccccgcatcggcggctgcgagttc

SEQ ID NO: 73545 - DNA, 389 bp, Oryza sativa
  unsure (1)..(389): unsure at all n locations
tgctttatcagtngatgcaaacttgcaatgcatatctgtgttattgtgcctaaatcgaaagttaggactcccaagagaattcctcatgaagctaaaagagagtatggattctgaccaaaagggctaagtccaagtgggagaagtagtgccaaactctattttctgatggctctagttcatggaacttgatccctccatgtacatttcaatggcaagaaaaaagaggtcagattttgcatttacaagaattcattctttgatccaacaccggccaactttttcgacagtgtttccacattgctgtcaataaaaactatattcgagcttatcactagaagaatcatgtgccattcaagaccacattatatattgctagtacagtaatactt

SEQ ID NO: 73546 - DNA, 438 bp, Oryza sativa
tgtgtgtaactccaatctttgctattggtgtagaaacatataaagcagcactattcagttttgggtcttttggcaagtccaacctgaaaggcgaaggaagcatttcttcctagtaagtttgaagaggcttctgcaaggatgcatcacatcactcagcactcagcgggcctcaacacttgcctctcatgctacattggagtactacatataaggcacaagatgcgtaggatatgctactgcctcacaaactgcatttgtacgctgtcttgcttgttctgaaagaagccgtcatcagcggtaagcatctcacactgctgtaatgtgactgtccatgcatttgacttcatctacatcttctgccacaatacttaaattattaagagtattaattatgcagcatcaagaaattggaaataatctcttgttgacttgcattcc

SEQ ID NO: 73547 - DNA, 421 bp, Oryza sativa
  unsure (1)..(421): unsure at all n locations
agcttaatacttacaatcttgnncgaacttttagcatgctaaagatgatttcacatcagggtcatcaaacttattgatttcacaatcagcatgtattatcaagcatttaagatgatttcactatcagtatgtgcgtgtaactgtgtatcaaacatgatgatcaacaaacgtatagtacggatcaacatgcacaaggtacaacaacagtaccattggttagacgactcaccataactgctcagcacaagacatggatgaagagagaagctggggtacaagatccttgcatngtgaatggtcatgtttttattctttntatttcctccaaatgaaccttctaaaagttcacgagcaaaggaaatgtgaatgtgaggctagcatcctgacacttccgattagctcatagcacanagcacagaat

SEQ ID NO: 73548 - DNA, 428 bp, Oryza sativa
  unsure (1)..(428): unsure at all n locations
tccttatgccctaatacttacaaggccttactcaatacatgaaccatctcacacccatttaactgctcttctttctcccactttcttggagctcaaacatcaaatcttcctgtgtgagagatcaagagagaggaagtgatagattctttgtacctgacctagctcgttgatacttcgatttgttaatttcttgtgcatttgctgtttgtgatcccgtgctgtgatcgatgtgcccctgaacgatgtccacgacgtcgttggagttggcgccagcgagccggctaatatggatcagccgcgcgcggtggagctgatgctgcttgccctcttctcgcagagaacgcgcatggtgctcgtggtgggaaccacaacgccgtctgctatgtatccgctaactccgcgtcgtcgcgtntctcctcttttatccc

SEQ ID NO: 73549 - DNA, 441 bp, Oryza sativa
  unsure (1)..(441): unsure at all n locations
agcttcatgtttatctggttgactcaagcgaaagaagagaatgatccaaagcctctaccaacgagagtagcacgtcacttctgtaaggtacatgttctgttcatccgttttgctagtgctgatcataacaatttcatgcttaagtacattactcttcgaaatgataatacatatcatcatgagttattgctcttctgcttatgntaatttctatgtgaattgtttgatctgattgagtgaactatgacatccattatatctgcagtatttttaacctttgaacactatgggttgtggtaattggtgaaattcgtcatcattggtggcctataaaatntattttcaatctgaatgtgtttggtttgacatcagccaagctgagcatattgtacttatcataccatttaccagtcgattgatctagttgatttactaataaat

SEQ ID NO: 73550 - DNA, 501 bp, Oryza sativa
  unsure (1)..(501): unsure at all n locations
tactaagctacgacagcgcgcatgaagatgatcaatagatccacattctattcttctattggaccacctttttctaaacctgacattgttcatagctcgagcaatacggttagcaaccaaagccaaattcttctcctcgatctgttcgagttgatcatcagatgtggcattaaataaagctagaaaagaagactttgatgaagaagcatcaacatccaaagttgaggaagaaaccaaagcactcgacttagaatcaactttacgagaaagaatattcatcccatgtgttttcagttntgtgtaaagcgaatccaaagacgaagtagtcatatcaatagattccagaatagatgtaactttcatctcccatatagacctgtcaagattattcataaaagtggcgagaaatctcagactgtgtgtaattaacatcatatgaataatctaagatctaatatactcagaattttatgaatcctaaaagatagtcatccaagcttt

SEQ ID NO: 73551 - DNA, 317 bp, Oryza sativa
ctgacttgctctgacctggccgacggagcacattgggaggcggcgcttatggagctctccgcggcagcaacggcactgctcgagctcgcagatgaacagcgaacgatgaccactactcaccgaggcaccccacggtcgacgccaactcaaacaaaacagacgctaacttcgaatagactgacaccacataggaaaccgcgagtcgctctcccaatagatagggaccagcatgaccccaccgaccgatagaaaacccaagaatcagaccacaaggcggagcggagaggacaggagccacacacacgagaccacggaag

SEQ ID NO: 73552 - DNA, 452 bp, Oryza sativa
  unsure (1)..(452): unsure at all n locations
ctatgacttcttgtttgacttgnngcatggcttatgtcaatagaatctgacttctgcagagatttttggtatacatgctttgtatgcacttatgttgcttacataacttaatgggcacttcacattttatccttatttatctgatacctaaatttctatgctnttgacgatcactcaatggactaaattgatggagcttcttttgttaaaaaatgaaaactaaactagctggttacattttactgactcaagcaatgaacaatgacacttctctaatatgttgatacagatatgagaaggaagcaatgcatccatttaaaggtctttccagtggaaaattaacatgtgcattgtctattcaggttcttccccttctatctctatttaggatgcactcagttcaagttaacctgcattctttctaacattctgatcctaataattcagattga

SEQ ID NO: 73553 - DNA, 420 bp, Oryza sativa
  unsure (1)..(420): unsure at all n locations
agcttctgatgtgcatcgactacaccgaccttaacaaggcatgtcctaaagatccttaccccctgcctcgcatagatcagatcgtcgactccactgcggggtgcgaccttttgtggtttctagatgcatactctggttatcatcagattcgcatggctagggaggatgaggaaaaaactgcgttcattacccccgtaggaacctattggtatacatcaatgcccttcgggttaaagaatgcaggtcctacttttcagcgtactactcgaatttctttgggtagccaaataggacgtaatggtgaggcgtatgtcgatgacttggttgtaaaaacgcgcaaccaagaaactntactttcagatctagcgganacctttgagaacctccgctccgcccgcataaagctgaaccccgataagt

SEQ ID NO: 73554 - DNA, 396 bp, Oryza sativa
  unsure (1)..(396): unsure at all n locations
tatacccaaaaagaaggcgaggacttcttcgacacatactcaccagttgctcgcttgaccacgattcgagtactacttgctctggcaacctctcatggtcttctcgtccatcagatggacgttaagacagctttcctaaacggagagctggaggaggagatctatatggatcaaccagacgggtatgtactagaaggtcangaggtaatggtgtgtaaactattgaaatccttatatggcctcaagcaagcacctaagcaatggcatgagaagtttgacaccacgcttacatctgcaggctntgttgtgaacgaagctgacaaatgtgtatactatcgctatggtggnggagaaggggtgatcttgtgcttatatgtcgatgacatacttgatctt

SEQ ID NO: 73555 - DNA, 424 bp, Oryza sativa
  unsure (1)..(424): unsure at all n locations
tactaagcttatttcagctntattaactaaccacatcattgttctgctgcttataacaacaaaggtgagtggtttatgattattcactttaatacaccaggtgaattccttctgccatgcaggcagggttggacagaaaacacgcgaaggaattaaaatgcctggaacgggaaaaatgaaacatgtcagtttgactctgcaggttgagaacgacctgaaacatcagcttagtattggcgcattaaaacctggcgcacgcctgattactaaaaatctggcggagcaattatgtatgagtattacacctgtgcgtgaagcattattacgtctggtttcggtgaatgcgctntctgtcgcacctgcacaagcatttacagttccggaagtggggaaacgtcaattagacgaaatcaatcggatccgc

SEQ ID NO: 73556 - DNA, 296 bp, Oryza sativa
agaccaatatatgagacatcatcagacaacaggcagacatatgtctaagtccaaccaataccattcaaccacttaatctaaatgcacaaaggaaacaacactagcattcgatcacctcagaaggatccaaaaagcccttaagacatgaatggttgctatattcctacaggaacaatcgttataaatacgaccggaaactaaacagcggcattaaacgttacatcaagatcttgcattaggcagccagaacttacgactatgccaccgccaaagaggcacagccaatggccacaagc

SEQ ID NO: 73557 - DNA, 467 bp, Oryza sativa
  unsure (1)..(467): unsure at all n locations
actagcgataggaactcactgagcaaggtgtgatcttgttggtccctcggaaccacaggaaacccacgtggttgcttggaggctaaagacctcctcccattggccaactcggcgacgcacagcgtcaatagatacccgactctatggagctcctcaaccgagagcacaatccgtgcagaccgacttcaggaaaaaaatctctgtctccccctggttaggtacctcatgcatgacgacacatagctgcaatatatgtgatccgcacttgctccgcggtaggctctcctgtaatcacataaatactatctgtgaagggccangaagaacaaattccaacccaacaaaacactactggacacaagctccgaagagtagccatcctccataatggctgacacttgtaggacaagccgccactcgattaacaccgcaatgggaaattcaaaatccacgctatcccccccccc

SEQ ID NO: 73558 - DNA, 427 bp, Oryza sativa
  unsure (1)..(427): unsure at all n locations
ctcgctgatggttgtgccaaacagcaatttgttattccagaanggacagacaatcggcacttaaaaccattgtatacaaatggctatgtcaacgggaagccgatgtccaagatgatgcgtgatggtggggctacggtgcatttgatgcaatatgctacattcaagaagctgggcagaaatgcaaaagatctcatcaaaacaaacatggttcttaaagactttggtggcaatccatcggagaataaaggagtgctgaatgtggagctgacaattggcagcaaaaccgtccctacaacaatttttgtcatcgatgggaagggttcttatagctctgtgcttggaagggattggattcatgctcattgntgtattccttcgaccatgcaccaatgcatgattcaatggctaggcgacaagattgaaattg

SEQ ID NO: 73559 - DNA, 395 bp, Oryza sativa
  unsure (1)..(395): unsure at all n locations
agcttatgtagtctactttcagatgattttggttccacatcaaaattcctaccgagctgccgggaatatgcaaaacaagccacacacctcatccagtccgaatctgattttggttttgggccttgtaattgtgtcatgggcttaagccaaaggggtgtgcgccctanggcaaccctaagacgttcctaatcatatttattcagtagcctgtttagattaatctgtcaagaacagttttgccgctatatcggtttgtggaactccaaatttgtgtgcttaatcattcatatgcaactgtgttgtaatatatcttgttctagcttgtgttcttcgattcatattcagggattagccttctcggaaggtcaactgggtttcggcacagctgataacta

SEQ ID NO: 73560 - DNA, 463 bp, Oryza sativa
  unsure (1)..(463): unsure at all n locations
ttctcaaccagggggtcgaatattctccagccctcttgtcatataattggcagaagataacaatgtagttgttttttcgtgttacctatctaggctattaatnggtagattntattgaatcatacttaataaacacaaaacaggttccactgtcaagcgtaatgggaactggtcctgatgggcgaattttgaaggcggacattgaagattacttgggtatgccctttctcttgtcccctccaccccccttctctctctctttctcctcccttaatgatgaaatctgcgtggaaaaatgcaattaactagttttatatatttaccaatgactatagattaatttattttcaactatatcacttcctagtttttttagagaaaccgctggggaagccctcattntgtagctagtcatgtgtgctcctggacatctcatgctaattctgaatggtggactcataat

SEQ ID NO: 73561 - DNA, 442 bp, Oryza sativa
  unsure (1)..(442): unsure at all n locations
agcttgattttatcatatgaactgtctattgagctcccctggttggtcatctangtgcggttgtttccgcctaggtcgtaaagtagttgggatcttgggctggcatgtttcatggctggttgtcaaactgtcaaaactatctccttcttaatacaaagatgcacaaatcttttgtgcattccttcaaaaaaaactatgtctattgaaaatatgcctcagacagtgtgcaagtctggagctacctattcattaatcaattacacaacttatgtgtgccctagatatgttatcaatttatcacttatttatttcgagcaattagttggtgtaaactgtaattttcttatgtgcgctccaattcgacgatagtttgtgtagctgaaagaaattctctttctggtatctgtgcctcacttgcaatatcacagatgaatcctcattg

SEQ ID NO: 73562 - DNA, 461 bp, Oryza sativa
  unsure (1)..(461): unsure at all n locations
ntatctntntatgaccaccatgagatatgatttcattatttatgcccnctccataaaaaaaagaccccaatcctaactacgaacctgtacatatacgtgtcaggttcgtaagctagggtttatcttaaaagtctaagttatagtataaagcactggtctggtggtggtccatactgaagccgatgtgctactaccgcacaatatatggggaaagtttcgggtggtgaaccccctctttcaatgaaacaacggaacctcgattgtgggccgtccgattcgaaatgttcgatccagatcattcgttcttcctagccaatatattttgcagcttactccccgcctccgcagtgcattttgtacgttaccccgcttctagtctaaaattcccatcctttctcctccctgtcataccctccatagctccatccaaaatcccattccctggtcccccatcctccaaa

SEQ ID NO: 73563 - DNA, 439 bp, Oryza sativa
  unsure (1)..(439): unsure at all n locations
agcttatctgataagggcaaatcttggttattgcttcccatggctaaatgagcaaacatgcatgtttagttaagttagcaaacaggggagcctttagaatttactgcagtctgtatatgatgaaaactctggtggtgcttgttacttgtactgtccagtgtgatgcttagaaatgttattaccttttaggcgttttcttatgtaatattcagcggtgaattcacctcccgggcagctgcctangcttaacgccattgaaccatttagcctagtgataaaacaacaccgatttgattagattccctggcaagttaattagttgtaggtgccaggtagcaagctgcaggcctgtttggctgtgtcccacagcatgaaagtagcaaccggtggcccaaggtcatccttgcctaatttagttaccttcaggtaatcatgttga

SEQ ID NO: 73564 - DNA, 417 bp, Oryza sativa
  unsure (1)..(417): unsure at all n locations
ctcagcttatcaccttccttgctcacacgttcttgctgctgccggtgtttgtggcatatctcccaatgtgtacgtctcatattatttcaggaaagaagcaatctttcatacatggagtgaggagatatatgggttcgggatctcaggatcttacacaacgctgagtgcccaagttttttatattccagatccatctaagtttanggtgaaaaagggtcgacgccaaactagacgcatcagaaatgatatggatgagtcagaagcaggtgggaggactttacgctgcagcaagtgtgatctgcgcggccatacttacaagacatgcccgaagaatgcagaagttccaagcggcgcagatgctagtccatctggacaggcaagtgatggtaggcgaccacctggtgaatgaacaacaag

SEQ ID NO: 73565 - DNA, 372 bp, Oryza sativa
  unsure (1)..(372): unsure at all n locations
tgcccgcaggtacaccaaacacacacttatctgtgttcatctttatgcgggcggagcggaggttctcaaaagtttccgctagatctgaaagtaaagnttcttggttgcgcgtttttacaaccaagtcatcgacataagcctcaacattacgtcctatttggctacccaaggaaattcgagtagtacgctgaaaagtaggtcctgcattctttaacccgaagggcattgatgtataacaataggttcctaccggggtaatgaacgcagtttttttctcattcttcctaaccatgcgaatctgatggtaaccagagtacgcatctagaaaacacaagaggtcgcaccccgcagtggagtcgacgatctgatcta

SEQ ID NO: 73566 - DNA, 352 bp, Oryza sativa
ttcttagttgctagttgtccgtgaatatttatacataataattacctatcacatggtcacagtgacttatagtctgcattaacccttctcccctttacagagtaccaagccaaaaataagacatatgtatgcatttgtatttcatagaaactatacaaggagaaaaaagaagaggggatacagaagcaaggagagcggcatggttgttttgcttgcgatatatacatacgtacaccatatgtatacgtacctagggggaggaggagaggtaagtgggaccgaagttgtagtgtccggtttgctctaagattaatctaatctaacggtttataataatgggacccaccaattt

SEQ ID NO: 73567 - DNA, 394 bp, Oryza sativa
  unsure (1)..(394): unsure at all n locations
tcatcttccgcttctaactaattatatatcngctatggtgtgtaccaaccgngctcagcaagccaccacagctatgatgcacatgacagaggaattcaaaggatggctatggttcgtttgcgcaaagcaaggtatgttattcttttcacaagcctaagacctagcatatactgatcaagttttaataccattgttcatattaaacaatgacagttttgtccaccatccattgtgatcccaacgatagctttccgccatagagtcgttatgattttctgaggacgtccatattcccccctctcacgagtggctccatgagcataaaaatcatcatgccataattcatcccacacaagttaagaatttagagtctatccaagtgtaatacatgtcc

SEQ ID NO: 73568 - DNA, 328 bp, Oryza sativa
gatgaggtaacaacgaccagcggagtggggcatctacgtggggtagtggtggctcgagttggcgacagtttttgcgggagagtgggggaagaggggcgagagatgtacatgagtggaggggactcggtgctatgtgatttggacgaagatgtgggcggcagcgcgcgtgaagggcattgacgtgggcgtcgaccatgtgacggtgtgacgggaggtagaagaagaagctgacaggtggggcccacagcgagattgctatttggctatcagtcacgcgcagtgagggggcggcggacgcgccacgtgggaggaggagggaggagcgggt

SEQ ID NO: 73569 - DNA, 414 bp, Oryza sativa
  unsure (1)..(414): unsure at all n locations
tcttctagggatgatgttcgtgagcaggtatccttattatcttctgactngnctntgngctttctgtactttctttgatatatttcgattgagcgcattgttggagttattaatgtctttacctcttgaaaaanaattgaaggctgtatgggcattgggcaatgttgctggtgattcccctaagtgccgagaccttgttcttgccaatggtgcattgctgcctctgctagcacagttgaatgagcacactaaactctctatgctaaggaatgcaacttggactttatcgaacttctgcagaggagaaccacagccatcatttgaacacggttggaacaaagttctttgtactctactgtagctagtaaggaaagacagattcttaacatgatgattattgggtgtcaatatact

SEQ ID NO: 73570 - DNA, 425 bp, Oryza sativa
  unsure (1)..(425): unsure at all n locations
atatatagacttaaaactactcgagccacaacagcagtcaagcgctgctcgcaaacttacacgagaagagtcaagggcataaaaatctctccgttaaaccaaaactcgaagaaagaacaaaaataatactagcaaaatggttcaaaattcagaggactttgctcaaagatatcctccacccaacaatatataaactactgagaaggaaaattaactgaaaacatcaccaatgacccggagagcggtggcaagcaaagaaccttttagatccgtacaatactccgccgcctccggccgtacctatacgccttgtatatacgggacgaacgcacacacgcacgtagccttcttctcgatctcccttcgcatcctctcatcgntggtagtagacagtagtacaactacaagtaacgcctggctccatc

SEQ ID NO: 73571 - DNA, 425 bp, Oryza sativa
  unsure (1)..(425): unsure at all n locations
catgctcgaaatctattgatttcttcttccaatagggctgaaatgaccgtgcgtggactcgcaattaagcagaggcggccatgcatggcctctgcctctctgatctctgatccctgatccctggtcgttggcggagagatcatgtcaccactactttagcccagctactcgctgtgatgcgaaatgggagctaacacgtacagcccccgaattaaattacaccaaggtgaggtgcctgcctgctcatcgctcgatcgatcgatcgaacaatgtacccagctagtacatactgtacgtactagctcggatcatgtgcagaaaagtaaggacaattataccgntgtagttgtacgtgcatttgcatcgcacagggatgttctgttgtcaagtcagattgtttgatcgtccggatttctttcttcctg

SEQ ID NO: 73572 - DNA, 431 bp, Oryza sativa
  unsure (1)..(431): unsure at all n locations
agcttaatgtatgaatcccttttatgcatatctggatctggatcctgcagaacaaacatataggatgagtagtatctgatataaatataatactcgagaaaaaatcaagtattttaaaatatttataaatatgtatttctcctcttgtcaattttgatttccccgagcagatgattcattacgtttaaacgctctgtccgactagtcatagcccccaagcaccgggagtcggcctatgcacttcccagacatgcatatgagtgacatgagttcgccattaatggaacaaagtttcacgaatcagaatttactactcgggtacttttgcaattattaagagcagaaaatgaatntatcttatctctatgcttttggattattccgaataatacttagcaccttgcgttactcggtccatccaacgaagcccc

SEQ ID NO: 73573 - DNA, 447 bp, Oryza sativa
tcggatgtgcatcgactacaccgaccttaacaaggcatgttctatgatccttaccccctgcctcgcatagatcagatcgtcgactccactgcggggtgcgaccttttgtgctttctagatgcatactctggttaccatcagattcgcatggctagggaggatgaggagaaaactgcgttcattacccccgtaggaacttattgttatacatcaatgcccttcgggttaaagaatgcaggtcctacttttcaacgaactactcgaatttctttgggtagccaaataggacgtaatgttgaggcttatgtcgatgacttggttgtaaaaacgcgcaaccaagaaactttactttcagatctagcggaaacttttgagaacctccgctccgcccgcataaagctgaaccccgataagtgtgtggttggtgtacctgcgggcaagcttctc

SEQ ID NO: 73574 - DNA, 428 bp, Oryza sativa
agctttagtttcttgtggccacgaaattctgaccattttcttgttcatgttctcttcttgtgtattgtagatatatagacaggctcagcaaaaataaatgtccgtttcctctcaatggcgaatgaaaatcgcttactacctatccatcgctctcaagcgtacgtgcagcatgggcataaataaatcaacgaaatcaatgctccaacagatattgatatcaatggaatcaagcatccaacagaggttgatattatcataggggttttacttattcaagaggagttattgattccagtacgggtaacaaggataaaagacagagagagtagcacattccaactgtttctgaccactgaaaacgaccacacatccaacgttggacaggatcaggattaacccctcccccctcacctggacacatgtgtgtc

SEQ ID NO: 73575 - DNA, 418 bp, Oryza sativa
  unsure (1)..(418): unsure at all n locations
gctattggttcgcgttcagagttgctatttattaagangggtctgcacggccttgaataataattccatatctcagtattcaggatagcaatgtatccaacatttcaaagctggaatgtctttacaatcaacataagttggctgtgaacactcctacctcttctgcacttggacgatctttgggatcaaaagcaagaatgcgttcaagcaaatggagagccataggatccacacctggaaattttttagtaaaaggaacccgaggctttttcctcatgttgctcaagtatcgtcgagctttctcattccgtatctgcaacccattcaataaatgaatgtaaagcacatcaatatgcattatttctacaatttacacctcgtctttttacaacaaatacatggaagaaaatagagtctg

SEQ ID NO: 73576 - DNA, 441 bp, Oryza sativa
agcttagattactactgttgctaaaacaaaactccaaacagcgggaaggggccgagccacgctacactccaaacaagtccccaaaaacggcaacgcctgctaaagactacagatggtcctccgagtggatagactccagaaccactgagattgaagagagtgcagagtcgaaaaccctagagtttcgttccttccacaattgccaagagaatatgagcactaaggggttgaagccggcacggagatgcttatgtaagcaagccctggagggcagccaccaatcctggaaccgattgccacaggggtgagagagggtagcctatccaggaagcgacagaacacagagccaaacctgccaagcaaacacgtagtcgaagagcatgtggttcgccgtctcaagatcctgagcgcaaaaggggcagaccgagtgattatcgatgc

SEQ ID NO: 73577 - DNA, 374 bp, Oryza sativa
tccgtctacgactgggccggcctggcgcggtggtcaccatcgtccggtgcttctacttgccgctgggggtagtaggagtagctagcgttgtttgattgttcgtatgtcccgcccctgcaacagatgtttgttgcgtcgttaggttggggtcgcaattaaacttttctcggggacgggactgtgttcccgctattaattctatcagctttgcttttatcgggtcgcctatctaatctaatctacgtagcccgaaaccccccaacattgccagcgcccagtgggccacatcacgtgtgtgggttgcgtgggttgggctggcaaatactacaccgtgggcttccacctttgcagagcactactggtctatgggttct

SEQ ID NO: 73578 - DNA, 419 bp, Oryza sativa
agcttctttttgcgtacgtaatgagagggctttccttcgctccgctactagttctcctgggccaagattgatttggggcatcatgttcaattgtgagttggacagttcgttccggatctgcatagtcagaaaatctcgttccaaccggtcatgaaagttagtggaagtgtatgactgctttctttgttaggtgattgatagagtttcgttttccataactctcgagctcattcatcgtagaaagcgtgcattgtgctcttcctatcgtcgtataaagaaaggtgtctgttttttcagatagagagcaaagctgccagaatagtagaatgccgtgaacaagggtgggttaaaatcgtgcgtgaaccccaatttccactcaatgctgataaagcggaggcctctctctccgggctagaaac

SEQ ID NO: 73579 - DNA, 373 bp, Oryza sativa
  unsure (1)..(373): unsure at all n locations
attgagcacttgatcacgcgcactntggcctaagaaaaaagtgcctaagtccctaaaagaacgtgacaggccacacctganaatatgggctgcagacatattaggcctatgccaaaaaatatgccttcgacaccctttaaaggatgacgcatgtaacatgctcccgagtaataaatcttctgggtaatatagatcaatcgtagctcatatgaatagcttctgatctgagtgattatcccttatgggatactccaaaatagatataaaaattgaatcctgactggcgcaagtattcggttgataacccttacggggaataataaatagtccagtcttcgagcatagaanatagacccatgaatcatgaatcatg

SEQ ID NO: 73580 - DNA, 370 bp, Oryza sativa
  unsure (1)..(370): unsure at all n locations
agcttctttatatcagaattggatccacggatcgattcatcgaactgggcggccgtcctgaatcaatcaatcaatcaacacaaagtgaatacaggacgaattagtgaatccctgtagcactttggatcccaaaacaggacagaggtggagcaaatccaacaaattctgaagctttgtggtactacctcaaagttgagcagaaccagtttgttgtctgcaacagtgaagctatcgatattgggttccagggaaagatgccatccaattgatctgcaaaagagaccaatgaacaaagaaatacggaagagaagatagcaatcgatggatggatgnggagaattgtcacctggagaggagaggagaggagatg

SEQ ID NO: 73581 - DNA, 488 bp, Oryza sativa
  unsure (1)..(488): unsure at all n locations
tgcattctgaagatgcagagattcttgctccacacatagtctattggctggctggggacacatcacatagacaaggaataaaggagccatgtaatttagctagctcaaagctatagctttgttggcaagttaattaaaattaacaacaaatgaaagcaagttcctaagcatgcaacaaacgaaaataattaatggtacctcccgttcaaagaaaaagagtaacctcgggccctttcgtggtgcacacttcatcatgcatcgattattcttttgagcaccaataattcgacatggaaattaaatacccaacagaaaaaaataaatgcaattacaatttatactttactcgtgtgtaaaacttcaagctaaaaaaaatcaaggaaacactacgtacataaatcaaggtactatatatccgtaggacanttatcacgtcgttttaattcgagttggataacagaattgtgcatttacacctaattaataaa

SEQ ID NO: 73582 - DNA, 433 bp, Oryza sativa
gaatcactcgacccgggaccttagagcgactgaagctgcagcttctattattgtcttttgacagaggaagtcaggctgggcattactttagagaagttacaagaatactactaagaaaaccaccttaaagaccgatatctctatatatgggtggacagagtatacataatcgctggttctaacaacttgaaagtgacggagctcttggcttcctcaaaccaaaaaagcataatctccaaaactagcgggcaatcctttgtcaatcgaaatttgcatccatcaccatttgcaaactgacgtcaaaccaaagcggaagaaaacattagagaatatctaacctatgaattagtcactagcctaaatcttaccaccaccattgccatcgaacgcaatccaacaagtacaccaccaacaatgaacctccaatgtgacg

SEQ ID NO: 73583 - DNA, 447 bp, Oryza sativa
  unsure (1)..(447): unsure at all n locations
tctggtcatattatntaccataagagttacatgagctatattatggtangatacaaaattctattggtgcaattgtgtaaagcaaacgtaagtttgatggatataataaataggcaacatatcatatgcacacaagcttcatgtgcactcatggtcacaccaacatatgccaccaaaattccaaaaaaatgatctacatgtacttctaatcttactatacacatatataaaattttaagtccagattgattatacataaatcacagcaaaatagaaaattctgaaaattccttatacatagaagttggaagttagcaaagtttgtactttgtactaaaataaattacctggtagcagcctccacagattccagtttaagataggcaaaacccttgcatataggatcacgagtcttcttgttggcagaaaccgctggctcaatattta

SEQ ID NO: 73584 - DNA, 408 bp, Oryza sativa
agcttcttctatgccttgcatgcctagcaagatgaactgaaccatcgacatggatgcgcagaaaaggaccataaacgaagacgtcgctgctgcagtctgcaaatcaaggatggtaatgctactgcatgaatcatggactcgacagaaaactactgatcataccttggtaaccataggttcataagaccatagtttcagtagcttaagaatctgtagtgtgtgtaccactgtacctgcggtggtattccaatctgaagaagaacagggttcagaagtaggcctcccccaatgccaaagaggccgctcagagcaccggtgacaaaagcagccagtgggaatagaagcgtgggcaaagtatcccatttagtgctctccggaattgcctacatgaaccatgtatggttcatg

SEQ ID NO: 73585 - DNA, 469 bp, Oryza sativa
  unsure (1)..(469): unsure at all n locations
tggtccgctaattttcagtcgattagcagacttacaaaagtatgcatagtgcatctttcgaagtatatgactcatctgaacaacttgcaaggatcctagttgaaactttgaaagtctgcactatgcggtatgcatatcactgaagtggaacgatacactacatcctactcaccactccacaaacatgcccatcgatgtggtaggctgtaggaagatcagaacaaatcagatccaatctcgtttgtcagattggctagctgtacagtactaacatcctcctaaaataacctcgctatgaaggtatgtggcgccaatgagactgtcacttttatccccactcccactccggcacttcaccagttcaccaccgtggcactccctgggactgaagtggaacgaactagtccaagactcggagtcgtctccttcctccgtcagcgcttncatcttccactccacatcacgatcg

SEQ ID NO: 73586 - DNA, 405 bp, Oryza sativa
  unsure (1)..(405): unsure at all n locations
agctttattctttttgccctcgcgcatacgcgcaccggcatacatgtatgtccaaatacaggcgtatttaaaatttaaatgcctatagtaaaattaaatgaagaaataatgtattattttactggctattgatataaacaccatatttcatgtgaaatacatcttatttaaataaagaaacaatatgttaaaatcactataaaaaatatagttgccggtgacttggctgtgatccgatgcangaagatgaactgtcccgctagcttctctctttgcatgaatctcgaatgcaatctaatgcacaaaaccacatcaggctcaagttgcgttgtctaactttttctttctacaaaataggtgtgctttgaacatgtgaagaaaacttaacgatggaaactactcctt

SEQ ID NO: 73587 - DNA, 265 bp, Oryza sativa
  unsure (1)..(265): unsure at all n locations
aatgtacattattatccactaacaatatttcttataccatccactaataattactctctccgttccatgatataaggcacaactatcttttttggatgttccataatataaggcatatatgcctgtattaaattaatcatgacctcttctccattaaattattactctttaaatcctccaccctcaagatctctaattctattggatgcatgcattatatttattanggtgattcaaactacgatatgattattattattttttg

SEQ ID NO: 73588 - DNA, 457 bp, Oryza sativa
  unsure (1)..(457): unsure at all n locations
cttgccaccttacttacgatctcttcacgctgaggattgctctggtcttccatcacgaacacgtggcgtgttccgcgtatctctattgagctacagccaggcatcttcttgcttccagaatcnttcattagctttctaacttgtctgactttgtcccatttctttgtagcagcatagagatttgagaccaacgcaagaacgccaacatcgtcaggttgcaattcaaggatattgtctgctatactttctccaagctccagcttcttgttattcagacagcctgaaagtagagcaacccacatggcaacggttggctcagctctcattgatgtgagcaggtcactggcttcttccacaagaccggaacgtgctaaaagatcaactagacagacatagtgtttctcagcaagtgtgatcttgaagtgataaccatgcgacaaaccatagttcccttcct

SEQ ID NO: 73589 - DNA, 425 bp, Oryza sativa
  unsure (1)..(425): unsure at all n locations
tttcttgtatgtgaagatttgaaaattttcgcattaatatttaaaanttcaagtcagatttaaaaattttcaaataaggatttttaacttttaactcaagatttaaaactttcaaatcaaattcgataacttttaaccatgatttgaaaaaaaataaatctatatttgaaaatttcaactcagaattgaaactttcatttcaaaatttaaaactttcaactcaaattcaaaacttccaaatgaaattgaagatgaaagattcaatttctaaaataaaaaattcgcaaaaaaatagccaaaaaaaagcgcatgagggcgccgcgtaagctttcctttccgttcactcccaggctctcggcgcatggtcgcccattcncgatcccctccctcgcgagaaaaatgcatatgtaccactcgtaaaaact

SEQ ID NO: 73590 - DNA, 476 bp, Oryza sativa
tgactacatgggcaacatgaggttcctgagttggaacggtttctcatcgtcctggacagtcatctctcaacagccagcggccgctggtgactgcaatctctacgcctcatgtggcccattcggctactgcgacttcacattggccatccccagatgccagtgccttgatggattcgagccaagtgatttcaactcttcgagaggatgtcgaagaaagcaacagttgggatgcggaggtaggaaccatttcgtgaccatgtctggaatgaagctccctgacaagttcttgcaagtccagaacagaagcttcgaggagtgcatggccaagtgcagccacaactgctcatgcatggcctacgattatgcttatggcaacttgaccaaagccgacaccatgtccgatcagtcaaagtgcttgctctggactggggatcttgctgacatggcgagggcaagccttggtgacaacctatacc

SEQ ID NO: 73591 - DNA, 417 bp, Oryza sativa
  unsure (1)..(417): unsure at all n locations
taagcttgtagggtatgatgattgtgacgacctttggacgatctatattatcatatgagataaaaaanaatcagaagggggaggggggatccatttatgccattgagttgtccaatctatagacgcacatgatacgggagccacatgttatcctcacagtgagtatcatattatggatttatcctataaatatggtgctcacaagatttaaatagaccagcttgctaatggagaagtcctatcttgattcaaagaaagaggtttgattcgagacctatcatatttacatagccgtaagcatgtttggttgccaattgtcctcctgaatgcagcacttattttgagatcattattgttctcacatttatgaagaggatgataactacgaacgaagatgctgagatttcaacttcataa

SEQ ID NO: 73592 - DNA, 385 bp, Oryza sativa
agccttttttactttataggggaaagaatgagccagaatgagtacaaccacagtactcagcaagccacaccggagatgcataattaatgcaagggagtacaaagggataataatatacgggttgagtttgcagtaaacagcattaaaaagcacttaattgcccaaagccactttataaagacgatcctagagctacacaatattattaaacaaagccgtgaaccctcacgaacctgccttaacccaaaggctacgatgattcagaccgaactggcaacccgaccctgggtcccagcttcgtccaagccaacccaggccaaccattccacattttagttgttgagcaaattctaagaaattgaaacactgacttgggtacattgct

SEQ ID NO: 73593 - DNA, 417 bp, Oryza sativa
  unsure (1)..(417): unsure at all n locations
atttcatccatgtntgtgaagccttcttgggaattaaaccccacttcgctctatttcgccgaatcttctttttcaaaccccaaccgaacaagagtaagccatgtgtagtcggaagggccggatttcagctgaggggaactctgagccagaagtacttctcgatgcccttcaagacttcaaacaaaggatggcatgcgaactggttttatgttcagaaccctgagcctgctcttcccgagtactcttgtcttcctccggtgtaccaagatacttggaactctcttccgatcggtgatgaagctgctgtcacgcccagaaattcacgaaccagaatttctaagctgaatgtgcattatacccctgtccaggatcagccatggtacacaaacgacaatggtngacataccagatcacgtc

SEQ ID NO: 73594 - DNA, 425 bp, Oryza sativa
  unsure (1)..(425): unsure at all n locations
agcttgctttttacacctaagttcccgtgacttgctgagtacgaaagtactcatccttgctctatataaatatatatatagttcctccgccctgaagctgaagatgaagtgaagtgaagattanggtttcgtcctggttcccagccatcgcctgtggtgttgggtgttagttcgttggttccgctgctgctgctgttgctggtgttttctcgtcagtgtcttcggttgtattctcaagctgtcctgagctgcaacctaagttaaggtaaataagtcctctatttattttaaggattttgcaatgaatcatatttgtcaccgtgggtaccagcactatgtcctgngactggtactgtgatcgcggtttcgtaagaagcggntcgcgccgtttttcctgcgacacgcttctatcaagtgcctgtgta

SEQ ID NO: 73595 - DNA, 468 bp, Oryza sativa
  unsure (1)..(468): unsure at all n locations
tggagagaagaagtatctgtnctttgctttgcgttgctcttgccttgggagacgaagctggcaggggaaggagttggtgtataaataagggagaccagccatggatggaagctggtaatctgcggggtgcagcagaggttgaagaatcctatggaagaaggcagatggaagcttgtggagtttgctactgtgacagtgtacctcttcctctggtgaccgttggcttggagcctctggcccaacggtcggatgcaaagcaaagcaaggaagcttgacttctactacttgaaaataatagtattttcgtgtgtttttcttagagaaattttttttttgtgtgtgtntttctttaagggaaagagaactttggttgggaaatgacggtggacaaaatggattaaccttgcagtcaaaagttcagggtggacacttcaagatctccaagcagtaaacagttttttttgtttt

SEQ ID NO: 73596 - DNA, 407 bp, Oryza sativa
  unsure (1)..(407): unsure at all n locations
agcttagtttgtgttagttctggntgtccgagtcaaattcttatgacacgtgatatctgctaaaggagtcgctgtggaccccgaaacagtgaccgccgtcactgattggaagcaaccaaagacagtcactcaaattcgcagcttcttgggtttggcaggatactaccggaggttcatcgtgaacttctccaaaatcgctcgacccatgacacagttgttgaagaaagaagagaaatttgtgtggagcccgcaatgcgagaaagcgttccaaactctcaaagaaaagctgagttcctcgccagtgttaatcttaccggatactcgcaaggacttcatggtgtattgtgacgcttcgcgccaaggattggggtgcgtgctcatgcangaaggtcatgtggtagcctatg

SEQ ID NO: 73597 - DNA, 480 bp, Oryza sativa
tactcagcttacaatgactcaagaactcttactctgcctctgtgccattatattatgtgatttgaaggtatgtgacagcaccatgtctagattcgtactgctagaaaatgtcacatccctccaaattctttatataatgggataaagagagtaacattcataaaagatggataggaaaaaggaaatatagggagtaaaataagtaattcttttggtgcatcaatagctaaagcatttgtagtttcaaattctataatctatgtgatgtgtattgacttgtccgtgtcaaactctatctttaaacatgtcataagaatacgatgtagtggttaaataatatctaaattaactacttagtattgatttagcgaaaaacataatacatgatcaagccaaagcaaccgttaggatactcctgttagtattgactttcccgatatgtagaaatgtaactacaattcatatttgacataacctaaa

SEQ ID NO: 73598 - DNA, 442 bp, Oryza sativa
agcttgatcatgttatatgttagatctagcaactgcattccattgtagatgttgggggaggagactaagtttatgttcttctccattcgagtttgaggacattttgcgtagtgtccggccggtgcttcattcatgatgtaatttaatactttggaaacaaacatccaaaggaaactttgtgtatccattttgttaagaacgacatgggggcttcagttccaggtccattcatcagaaactaaagttattaccgtcaacgacgaaaagcattcaaaattttgacaaattgacttgtttataaaaaattattttaaaaataaaacgtataaaaataatttcagaaatagatcatgacctcaacgacacatttgtgctgagctatatgtctcaactccaccactatttgatgtgagatctcatgatcttgtccgacgtgacataa

SEQ ID NO: 73599 - DNA, 416 bp, Oryza sativa
  unsure (1)..(416): unsure at all n locations
tcggatgtgcatcgactacaccgaccttaacaaggcatgttctatatatccttaccccctgcctcgcatagatcagatcgtcgactccactgcggggtgcgaccttttgcgttttctagatgcatactctggttaccatcagattcgcatggctagggaggatgaggaaaaaactgcgttcattacccccgtaggaacctattgttatacatcaatgcccttcgggttaaagaatgcaggtcctacttttcaacgtactactcgaatttctttgggtagccaaataggacgtaatgttgaggcttatgtcgatgacttggttgtaaaaacgcgcaaccaagaaactttacttttagatctagcgganacttttgagaacctccgctccgcccgcatatagctgaaccccgataagt

SEQ ID NO: 73600 - DNA, 442 bp, Oryza sativa
  unsure (1)..(442): unsure at all n locations
tctcgggttcttggtctctgcccgaggcattgaggcctatctttagaagattcgagctatcgagcggatgcgccctcctagcaaacttatggatgtgcaatgcgtcaccggttgcatggccgccctaagtctgttcatatcaaggctgggagagaaggcgctacccttgtttaagctcctcaagcgctcggtgccgttcacttggacggaggaagctgaaaatgccctcgcccagttgaaggcgtatctcagctctcctccggttctagtcgccccggagccaaatgagtccctgctactttacttagcagcgaccccccaagtagttagtgcagcgttggttgtggagcgcgatgaggacaatcctcattctgcgcacccccactctgtgccgacttgtcccaggagcangcatggaggagaggcccccgagtcaaacggt

SEQ ID NO: 73601 - DNA, 380 bp, Oryza sativa
  unsure (1)..(380): unsure at all n locations
agcttgtttcttatgtacaccaaacacgcacttatcggggttcagttttatgcgggcggagcggagattttcaaaagtttccgctagatctgagagtaaagtgtcttggttgcgcgtctttacaaccaagtcatcgacataagcctcaacattacgccctatttggctacccaaagaaattcgagtagtacgttgaaaagtaggacctgcattctttaacccgaagggcattgatgtataacaataggttcctacggnggtaatgaacgcagttttttcctcatcctccctagccatgcgaatctgatggtaaccagagtatgcatctagaanacacanaaggtcgcaccccgcggtggagtcgacaatctgatctatgc

SEQ ID NO: 73602 - DNA, 477 bp, Oryza sativa
  unsure (1)..(477): unsure at all n locations
gctcgtcccgagtgaaggacgaaaggaaacttatacttggttgttgatcaagagttgctactatgctgcatatctcaaagatacaggtgcaaggtatatgtactctctctcaaattaaataattattggcacggtggcttacccttaccccgattcccacgagacactgcttctacttgccttgggcggttgaaagacagaacagcaattagagcaccaattcacccaatgtttattcaactcttattccggaagttttcaaatgatgttagaacagaagaccaagttcctccattgattcactcagtctctctaagtgtatcatcttgaattcctcactaaatgttgccttgatgattcctactctaaagtctatatgtggagtctggtanggatcaagcatggcatactngcattcacatttgtcactaagttaaaatctatactacagcagatatctaaacatactcaagaatc

SEQ ID NO: 73603 - DNA, 435 bp, Oryza sativa
  unsure (1)..(435): unsure at all n locations
agctttttttatcagcagaaacaatatggaatgccacttggtaagtcaaccacgtcaaaccatggctattatggcaatttggcttttggcatgggcatggcataccctggaagccctttgggaagtcctgttgcttctccatctggtcctggcagtccacttagactcagtgagcggaatatgagatttccttctaacttgagaaacttgggtggctggaattctgatccaagtggctatatgaatgataacttcccatcttcactattggatgaattcaaaagtaataaagccagaagctttgaacttgctgagaatgccagtcatgtggttgagttcaggtatacctagtcgtgtacttctgcaatactgatatgagtntgaatcatactacaacccatgaaaaacatccaattacaataggatgaaatggtc

SEQ ID NO: 73604 - DNA, 440 bp, Oryza sativa
  unsure (1)..(440): unsure at all n locations
cttcggaatttggataaagcttagccgttcttacgactttttgggccataaggcctagtcnggttacatttcgttacgtgatgatgggcctctctgtggccagatgaactgggcctgaaaaaacagaatcttggaaaagctactggctgtctaaggaaaaagtacaccggagatccctcgtcttgtaaccgaattataaatcgtccctaaaaaaaaacccagttacaactcatccatcaacttacaaaaacagtgcaaatgaggtcctccggtggtattgtccccagttntgattgacgtgacacctacgtagcttcttttactagttcttcatcccacgtgagattgacgtggggcttacgtggcagtttctggggaaataataaaataataaaaggtaggacccgcatgttagatccctctttctctcttcttcctct

SEQ ID NO: 73605 - DNA, 431 bp, Oryza sativa
  unsure (1)..(431): unsure at all n locations
agcttgtttctantccatactagcacatgtggttgtactgtatacgaaatgaactgacattgagtgaagtccttaagtcagtttgggatcacactccccctatcggtacacaactaatcaccttatgtgtaccacatgaggcccaaacctaaaatccatgtttttcatcattttatttgtcagatacttcatttattcatctctgtccagaatcttaataaaatcatttttcatgttaatatgagcccaagtgataagtaaaacaattctaagcatggctaagcaatatagtaaactagtgacaatgtaactcatattccaagtagtattacgatatgattcctaaagttaggaatgagggatatggatatatgtggcgttaagttaataatgcanataatacgaaattgctaacaagtttaacaaatttt

SEQ ID NO: 73606 - DNA, 429 bp, Oryza sativa
  unsure (1)..(429): unsure at all n locations
tactaagctcaattttccagtgtggattatttaatgtgttgctatattctcttcctctcctctatttatgctaagaattagtggaagacggaatntacagttggttgtcaacgagtgatactcgtagaccggatgagttgggcattggagtacgttggtacgaggatctacgtgatacgacatcaagcaaacagaagacaaggattatactggntcaggccccttatcaggtaatagccctagtccagtttatatggaattaatatggaaaaaaaccatagaatacaataggagtagatgaatccgacgataccgacgagatcatagtcgatgaactcgacgagatcccccggtgacttggctccgtgtgctccggcttcgtaaactattgtgggtatgttggtaatgagattcgatgcgcttgtaccc

SEQ ID NO: 73607 - DNA, 432 bp, Oryza sativa
agcttgttcttaagtcatactaccgtggcagtagaggttagataggactattgcttagtctctcatcctcagcttgaagactcgaccataccattgaacatactctggcggtccatacggtccagtggttccaagtggaggataagcagtcctgacatcgacgcgcgaaggtgggcttctttcaaaatacattccaacaggtggtggtatatcttctgctggtgcaagcatggcatcctcaccaaacatgaactccgatgtataatgtccctggcgataccttggcataatgcttctttctaaagtggctaccctggtgcggacgcgttgcagctcagcaaaggttgagcgataaagcatatctagtgagcgcacaaagtttgcaagttggaggtatggagtatgtagtcctacacctatttcagctaaccc

SEQ ID NO: 73608 - DNA, 381 bp, Oryza sativa
tacaaaagagaagagaaaagcttctagagccgtaccctaattctttcgaactaggatcccaactagtctgtattcctattccactagctagatactactaaactaaacttgagagaaatgagagagttattgcttgaggtgtgtgagtgaagtgagaagaggagctcattttatatgcaggtaatgacagttgtgaccggtaggctttatttttctctccatgaatctttactgtggttatctatattaatataaaatgatgttttggtttgacgagatctttgtagttcattcttttaatatcttttattatttttaacatttattttattgcgttagtgttttttttatcatttgctacctttttattttaaatttatg

SEQ ID NO: 73609 - DNA, 395 bp, Oryza sativa
tatcttgttctgtatacatctgggagttgtggtccagtatctgctgtgtttatgaaaggacaccgtttgaagatgctgcctgaaccattatccagctgcgaaaaggcgttgatatggtcttgggatcaatctgtggtgggtggattatgaggaaagttcgaagggaatttagtaaagggaagccttctgctgcattacctgaactcaatgacaaagcattctgctgttatagtgcagccattgagcttaaatgatcttgatgaaactggaaaccttgtcacccgtgatgtcccgttacccctgaaaaatgctgatgggtcaattgcattcacagtagccagcatggatttacctgaggagaaaatattaaatttgtcttcgctattatataatct

SEQ ID NO: 73610 - DNA, 448 bp, Oryza sativa
  unsure (1)..(448): unsure at all n locations
nggcgcacacganagaggacgagggcttagaaagacacactcgccccctacctggcgcgccagatgacggagcgtggggctcctcaccgggagaccgcgcaggcccccctttgccggttcggccgggggcgctaagtgaggttcttcgccctcgatcgatctggagaatgttcgcgagagagcaagtgcacgagacacgggcgatgtagacaggttcgggccgctgagaagcgtaataccctactcctgtgttctggtggatctgtgtgtgaaggagttacagagagccggagagccagagagttcaggctccagaacccctctagcctcctttttttctttctcccncctttttggtgggcaaggtcctccttntatatctcaaggggataccacatgcaccacttctacctacttttcttctgggtggggacctaccctatcttga

SEQ ID NO: 73611 - DNA, 425 bp, Oryza sativa
tatctttttaacagaagcaaaaccaagccgtgttttgcttgaacacatgttatactgcatgttctgaactctgatgttccaagaaaattgaaacggaaatcttggagagtcctattccaagcagccagcaactgacatccggcagagagaacaaaaaataaaaactgcacttatgtcatcttgtggtcaaattggttgcaagacggttatggacagtacagtacaccggctggattgggctaccagctgactaaatttcagtacacatgtcttgatatgagccgttgagccatgggattctttggcagcttgttgttcggaggtagttggctttgaacaattccaacataagtactacatgagcttcgtcaacggcctctttgcgtctccaatggttggttcgcaacggatgtcgtatctgatat

SEQ ID NO: 73612 - DNA, 477 bp, Oryza sativa
  unsure (1)..(477): unsure at all n locations
ntgaagaattatgtagntcaaggaaggatgatcaactctgtatctgtatgtcaactacaccgtctgcatcacaatactgtagtgtggacctctgacgctgaccttttttcacaatttattaattattgaagccaaatggccaataaattgatcgaaattttgtgtcaagctaactacaatgctctagagaaaaggtgaacaatctagacagacagccattcggcaagaagaaaaaacagaaagggatagtcaatctgcctgaaaagatcagataaatatgttgaacagttaaactgcacaagctagtattgaccttaatttagctccatttttttcaataaagtgcatgcctttgtgtaaaacatggtgcatgcctgctgcaagtactagcaggcacaatcagttcatggaattttcagatgattcagactctgcacgtatgtcctcctctctttgcaggggcagtactgaccttga

SEQ ID NO: 73613 - DNA, 445 bp, Oryza sativa
  unsure (1)..(445): unsure at all n locations
agctntaatttcttatagagcagaatcaagagaaattccttaccctcatcaaacatctaattcaaatgtacactgaagaaaatatagaacttgttatctatcacaaaacacttacatcacgagcataaatggtttccccaacctgtcgcctcacctccttcacattaccctgcaaatcatccaattnttagaataaaaaacaaacttcaagtacaacaaacacaaaggcaagcaagtatgtcctagcaagactgtatattgtaagtttcatgtggccagctaaaatgatgatgattattatttactgtagtcacaatgttagaaaatcataatgcacccgctgcagtaactcagaaaggcagaaagccccagaatcatacctctgatacaccttgagggtgatgaatcattactctagcatttggcatggcataacgcattccct

SEQ ID NO: 73614 - DNA, 467 bp, Oryza sativa
  unsure (1)..(467): unsure at all n locations
tttgagagtcttgtatntgtgtagccctcgactctttggttagttgggaaacaactgaacatagagtcgagatctgtagcttcttgtcgtcgagtactcattgcttgagtaaagatgcatgttgaagatgtccgggtagaaatattgaagattgtaacacctcttgttgtaataaaataacacggcatcatatttggtgacgcatgccgagatgtcgaagctcttgtagacgtcgtggttggtgaagtagcaaaacttgcgaagcagcggcaatagagtttgtcggtgccgaagataatgaagatgaagtcgctccaccatgatgacaaagttgcatagccgcgatgaagtgaatacaagtcggtggcaacataaacaaaccggtagcgaaaacgcgtagttgtgaagaataaaacaccagtcggcggtggcataaccagtcggcgatggaagaagtagaatgatga

SEQ ID NO: 73615 - DNA, 424 bp, Oryza sativa
agcttgatgtattattatcacaagcctaattattgcataatttgatttttttttgagaaaaaaatgccctcttttagaatatgcatgagatttggccatctttttttattaagatgtgggggaagatacgtgtatttcatattatgcaataatcaggcttatgattcagtgcatccgaggagtttatcatggtgacgatctactacaagtacagaagaaaaatgagaacaagacttgtaatgtttgtattcatacttccatagcgttgacgccatcatgagttcataagcctctgaatttgtcaaatgaattaagtacgttgcatgtgtaatcctcagtataaattactctgtttcaaacctaatccattctgaagagtcattacagatttataacgaagacatttgtgcagcaacttgacaac

SEQ ID NO: 73616 - DNA, 312 bp, Oryza sativa
tgcacggctggcctttatgccgccgttgttgggcgtctacgtcttcaccgaccggcttgccttcgccgctgccgactggtgtttccgcctgcacagctggcctttatgccgccgttgttgggcgtctacgtcttcaccgaccggcttgccttcgccgccgccgactggtgtttccgcctgcacggctggcctattatgccgccgttgttgggcgtctacgtcttcaccgaccggcttgccttcgccgccgccgactggtgtttccgcctgcacagctggcctttatgaccgccgtgttgggcgtctacgtct

SEQ ID NO: 73617 - DNA, 427 bp, Oryza sativa
  unsure (1)..(427): unsure at all n locations
ctggtcgntcttgcattgcttgtgtgctccttcgcctgcccgtacgcctgaatcgtcggtgctgggttcaactttcaagtgcacatgaacaatcggcaacaaaaagaagcttaatctgctagttagtctaatctcctctcacatggaaaatcgataagggcattcttttgcagccagcaaattatcaatttgaacagcaattatattctgttgcaggaaggaaataaacatttcaaaaaagagtttggtgatcgatggggtgctagctagcaagaggtgcacgctgtcgactgacggatgatgtcgccagattgctgttggttggaagaggggctcatgctatgcatggacgcatgagccgtgtngatagggcaaggttgctggagacgtatgtgctgctgatggactgggtggcggcaacagcatg

SEQ ID NO: 73618 - DNA, 366 bp, Oryza sativa
  unsure (1)..(366): unsure at all n locations
agcttcttcttttcttacggctttctagatgtatatgacgatctctagacagatggatcttatatgaatcgtatgatgaagtaccacatgagtggatatataggaaaggaatccaaatctgccgaatcgctcatgttatgatcttctacatcctaagtctccgcgttccgtcatctggcttatgttcttcatgtagcattcagatcgaatgactctatgaaattacgtcgatacttctacatattatgggtaacgtaagagacatccctantttcctccgagggtcttaattaccactgcttagctntcaattcgcctctgaccatcaaattaaatgtgaataacccgtcctcctctctttgaaac

SEQ ID NO: 73619 - DNA, 471 bp, Oryza sativa
  unsure (1)..(471): unsure at all n locations
tttgagagaaaagaagaatctatcttcaaccgatatgcccttaggcacggccatacataacatagaaatcacacgtggaaggggtgggcaattagctagagcagcaggtgctgtagcgaaactgattgcaaaagaaggtaaatcggccactttaagattaccatctggggaggtccgtttggtatcccaaaactgcttagcaacagtcggacaagtgggtaatgttggggtgaaccaaaaaagtttgggtagagccgggtctaagtgttggctaggtaaacgccccgtagtaagaggggtagttatgaaccctgtggaccaccctcatggnggcggtgaagggaaagcccccattggtagaaaaaaacccacaaccccttgtggttatcctgcgctcggaagaagaactangaaaagganaanatatagtgatagttntattcttcgtcgccgtaagtaaatacgtaacta

SEQ ID NO: 73620 - DNA, 427 bp, Oryza sativa
agcttcttgtttatttagtttgaaaaccagcaaagcttttggagttttttccaccgagattgggatccatcatacaaagctgatacttataggtatgatctggtgtgcgagagtttgaaagatttgaagttggcgcatcttgtaacaaagccagaaagcccagaaatcggacttcgttttctgttgggcaagtgcaaagcgttagagaggctgtgcctggagtatgtcagtggtcttattgacagtgacatgattgcactattccagacctgcaagaatcttaaaagcatctcactttggctgaatcccgaacactacaatgttggtgatgatatagtcttcagacatcaatatgaatgtgagaaatgctagaatgacttacatcgtgaaacggaggaagtagcacttaattcctgtggtcagctct

SEQ ID NO: 73621 - DNA, 382 bp, Oryza sativa
cttttgtagcatactcctccggtggttcatgttgtgttgttgacaatggttgcaccaatcatatgactggagagaggagtatgtttacaagtcttgataaggagaatggaactcgtgagaatattgtgtttggagatgatggtaaaaggaaggtaattggtctatgtaaaattgccatcttcaataatcaatctctctctaatgttcttcttgtcaattcattaagctacaatatattatccatttctcaattatgtaagttgggttacaattgcttgtttaccgatgaggatgtgaccgtctttagaaaggatgactcctccgtagcattcaaaggcaagttaaagggtgatctctatcttgtcgatttcgatgtggatag

SEQ ID NO: 73622 - DNA, 426 bp, Oryza sativa
  unsure (1)..(426): unsure at all n locations
acttgttttcttctatctcagctcagaagttagtagtatcgatctatcaggacgtacgtggaattcgtcagaggcgtctgcctgattcagcctgaagacatatatatgtagctttctggggggaaataattagcggaggtttatttttctcgaaatatcattacaaaggacggtttgtgtaattgtattcatttcagaaccagngaaccaggacactagaaaatacagagtccaaacgtatggcgcccatctgattgacagcatgtccaatgtgatatctctccatgttttttgcatttagtttaacggtcaaagacgggcaatctgaattaagcagcatgcaatgatattttgagagcangactgtcaaganaatgttattatcagcatgaaagtacacgagttcattgcctcaccccgcacagc

SEQ ID NO: 73623 - DNA, 477 bp, Oryza sativa
  unsure (1)..(477): unsure at all n locations
tgggctccttccaatggaggcgggagcccttgcccttcatattttattntatagtccaacagtcgggaacctacatgtacatagatagggatgcaatagagaccccctggatctttcacagctaacactaagtagggtttactattttggttcgtaaatttctatcggggggatcaggaatttcggaatggaatgattcaacatttgatcacaattccaaattgaataaatttgctaagttcacaaaaataaataaattttaatgttttttgaactntntctatccggtggaaatagtatcatgccatggcccatgggttgccctataaaccgtgttggaggccatgcagaggatgtccacatagactggtcggcgaggggttacaagtttatgatggaggcggttaattaacgaggctaacggttagaatgataagatgagagtgcctgtcaccgaagtaagtgtggataagtgac

SEQ ID NO: 73624 - DNA, 403 bp, Oryza sativa
  unsure (1)..(403): unsure at all n locations
acttctttatagccgnctcttcaccaacctcttgatcttgaagacatcatcctgcttgccaacgttcgccagcgcactcgagagcaagaggcaactcgccgcattgtctggctcgactgcaagcaagcgcgacgccgcaagctccgcgagctcgatggttccatggcttcggcacgctcccagcagcgcgccccagacgaagcggtcgggctccaggggcatcgccctgatgaaaccgtacgcctcgtcgagcctcccggcgcggccaagcaagtggaccatgcaggcgtagtgctccagcctcggctcgacgccgtactccacctgcatggctcggtacaggatcttcccgacctcgaccatgccgccgtagctgcaagctgtcaagacggcggtgaacgtc

SEQ ID NO: 73625 - DNA, 477 bp, Oryza sativa
  unsure (1)..(477): unsure at all n locations
tgtgaaatctggtgacactntgtatagagcaaatggtaattatatatagcttagtcaggttcagaaacaagaagatggcaaccttgatgcaagtacagttgtatgtagcctgaataccgtatcctgacaattagttgaatacttgactacatgttctgacttaaaatgacaagtatccaaacatgataaatcaggatggttgataagcaaaagctttactccttcggtaagtgaagtcctgatataccacggngcaatagagttggatcgtatgttgtctctcgcccattcgcatgctaggttcttggttaattggttgattgcacctaaacaataccaataactgtttagaanagctcaagaaattgaatgcacattcactggtgagctaaaacagttaccttttgtcatagcatagagagaaccactaaatacagctaccaatccacagactgatgatatgaaaacaatgctccc

SEQ ID NO: 73626 - DNA, 407 bp, Oryza sativa
  unsure (1)..(407): unsure at all n locations
agcttcttttttcctcttgggcctcacgaagccgatagttgtaaataaagcccaggaaggaagtgaaaggaaaaaaaaaaacagatggctgttctgcctttctcaacagccagatcgccccccacctctccaactccagtatcttctataaacctctagaagtttcttcccgagacaaaagtcttaaaaaaaaaattatcttccgagggagaangcgccgccgcggcgtgatgtcctccgggctccggctgtacctgacgacgcgcggatcggagaggcactggcccctggcctggttggcctgatcgcttaagtacattttgggtttgttcatggtttgatgagtgcaccttgggattatacatagagactttagtttgaatcttggggcaatttcctaaatctct

SEQ ID NO: 73627 - DNA, 415 bp, Oryza sativa
  unsure (1)..(415): unsure at all n locations
nnctttgcatctttgcgtgctntctgggcagaagctttatgtttatctatagctcctcatcagcttcacattctctttttctaatatcgcattatttgaacattcacgagagcatgatatatcgacaatacaatttcagaggtacagcggctgacaaagatgatcagtttagctgatcttgtggagacatgtcgatcggtgaggtgacagtgtgtgcaggaatctaatttccgttttgttattctttctgcagcgcgctgggcgcagtcaatcagtccatgaaagcgagccctcacaccaccgatgggaaccgcccggcgccgtcttgcgggccgctnttgggcggcagccacctcctcttcagatgctgcggcggcgactgcttcgccgcgacgacgacgcacgagcacgacac

SEQ ID NO: 73628 - DNA, 435 bp, Oryza sativa
  unsure (1)..(435): unsure at all n locations
agcttgctgtgtcaatctcctagatctaatggttggcacagcaagtatataacacatattttggtttgttcacctagatctgctttcctttactgttccatgtcaatattgatccttgtggaacatagaatataaggggcagcacagatcttgttaaattacatagtgtgcttgatctgtggtaccagtttgattntttctgatacatgggaatctcatactaaatgccaacgttacttttcctttccaaaaatcttgctggttcaggtattatttacatatcaagtgcacttaacatgcatgtacgcttgatctaccaaagatgtcttcagcaagtttattaccatctatcataaaaaataagtatattacaagatgcaacaaagcaaaggtgccactatactgcatatggaaccttaagtgaagtcacctcac

SEQ ID NO: 73629 - DNA, 230 bp, Oryza sativa
cgctctcgctggttgtctgaccttatctacagtgaggtttctttactgcatacaaacattcatcagtgtcgggtcatactatgtgagagcttacctgaggcgaattccaaaaatacatgtgacgactgctctgtcaatttcactcggctgagctgcaccaccacttgtacgtgcctgttagatactattggacctactataacaggatcgcattaagcatggtgtttgct

SEQ ID NO: 73630 - DNA, 116 bp, Oryza sativa
  unsure (1)..(116): unsure at all n locations
tttctngatatgttagagagaccccccgcaaattggtgggcggacactatagatgccatgcaatgaccactacctgactataatggaacccttttttgcatatgcattcctatgta

SEQ ID NO: 73631 - DNA, 495 bp, Oryza sativa
  unsure (1)..(495): unsure at all n locations
ctattacggacctataaaactcagcttatatggtntgggcatacagagtcaccgagatacatactattttgcattgngactttctcaaaagacatatagaaaaggtgccgaagatattgaacatgaacagatgcagtgctacacctgctcctattgtccaaggggaaaagtatggagcatcgcaatgtcccacaaatcaatatgagctcaatgagatgaaaacaaagccatatgcgtcagctgtatgaagcctacagtacacgtaagtgtgcacacgacctgactaggcatttgttatcatgttacttggcagatgtcagagtaatccaagcccatagcactgagaatgggtaaagaaagtattgcgttatttgcaaggaataaaaggcctcatgctgtcttacagaagatcagaatcgctctagatagtgtggcattcagattctgtatttgccaaagataatacatagtcaacagtcgggatatgtagtcacc

SEQ ID NO: 73632 - DNA, 420 bp, Oryza sativa
  unsure (1)..(420): unsure at all n locations
agcttggtcattaactatgccatgaaattatcatacatgctgtgaagttcatacatgacaccggaattccaatgtacctatgtcaagtaaatctgtcaagacactagtgttctgaaactatcaaattttggtagaattccattggtaaagatcatggttaatttgttaccttaacgaaatttggtaacacaaaaaattggtaggattgaacgtggcaataaagtgaacatgcccttcatttccgtacgtgttccacattggtgcgtctacgtatcatgccatatatacgtatgttgaacanagttaaagagccttatctctcttgtggcaaattacagggacaacattaagaatggcatttggagagtggccactcgagttgcaaaaagttaaattttccctcanatgcaatacgtgtca

SEQ ID NO: 73633 - DNA, 470 bp, Oryza sativa
  unsure (1)..(470): unsure at all n locations
agtattgggcatactctatgcgcacactgctttaacagatgtgcttaagtccctagaagacacatggttccaccacacctagaaatatatggcatatgtggtataaaatccgagtaaataaactcataaaggatttaccaaccgcctgaaagatgaccacaatatataatcagcctaagccataatattggtcaataaaaatgcacacttacgtggcaaaaagcaacgatattgtatccaatcaattgcttaaaaacccaaacagcaccatgactatattaaaaagtcagcggggcagctatataaagctttactgtttgacaccttttaagatgcattgtaccaactcctaaaaagttgagtaactgcggtataaaaggattttaaagtattgggcacttgatcacgcgcactttggcctaangcaaaagtgcctaagtccctaaaagaacgtgacaggccacacctga

SEQ ID NO: 73634 - DNA, 421 bp, Oryza sativa
  unsure (1)..(421): unsure at all n locations
ctggatttgagcatccatttcttcaagctgttcaactgacaatgccttcgaatttaatttcttaaagaactgggatagcttcacatgtggttcataaatattttcagggagcagtccacgcagagcaagagggagtatatgatttaaaataacatgacagtcgtggctcttcaatcctgacattntccgctctttcatattaacgcaacgacttatatttgaagaaaatccatcaagaactttcaattctttaaaaaaactaagcagtgctnttttttggtctggaaataacgtgtaaggcgcaagtggcaaaaccacctttcctccatcatctactggatgcaagtctggcctcaagttcatgagttntaagtcactacgggtattaatattgtccttggtcttcccttngacattcatt

SEQ ID NO: 73635 - DNA, 417 bp, Oryza sativa
  unsure (1)..(417): unsure at all n locations
acagcctatgtgcccaagtgctctatgctaaatactttccgcatgggtctctgactgatacaacttttagtgcaaatgcttctcctacttggcatggcattgaatatggtttggatttattgaaaaagggaatcatctggagaattgggaatggtaattcagtcagaatatggcgcgatccctggatcccgaaagatttgtcacgaaggccggtatcaagtaaagcaaactgtagactgaaatgggtgtcagatctaattgcagaagatggaacttgggattcagccaagatcaatcagtattttctgaaaatagatgcagacatcattcagaagatctgtatttctgctcgcttggaggaggattntatagcatggcatccggacaaaactggcagatttctgttcaagtgcttac

SEQ ID NO: 73636 - DNA, 403 bp, Oryza sativa
  unsure (1)..(403): unsure at all n locations
agcttctttttatcttccaatccgaananagnnnttcttgattcaaagaaagttcacgttcatgaatttttatgatgcttccataataaatagatttgctcggtaattgcatgtgactttgaggtgtttacattggcttgaaaagttcaagcatacgaccaaagcaacacactatgacaattgcatctctttaagatttcacattccttctcttttttacccagaaaaacttcctttgttgtaattaggttcagaaaaagggaaactctgtcagcaaggctttagatgagctnttatctccatgcatgtttatgactntatgntaaaattcctcttcccttccacctttctggctagtaagtacatattttaggcttgtatatctgcaattgatgcccgtcta

SEQ ID NO: 73637 - DNA, 401 bp, Oryza sativa
acaggtggccggggtagagctcttcactgcgaagccgaggaaggtggcggcgctgaccggcgactgccggggcgactgcgaatggcggctggagcggccgccggaggtggagagagagggagagcgtttcctgcgactgcggaatactggacttgaggggatgagtagaggacaactagggggtcctttatatagccatgggaggccgggatcgagcccacaacgacgggaaaaactctggaaagtttagatcttcgcgcggaaaaggaaaggttgaaccgcgaaattggaagggattccatataaacttttggggatttcttgcgtacaacgaagaggagattgagagggatccattcccgcaaccaattcggaaataagagcaacggagaggttggatt

SEQ ID NO: 73638 - DNA, 445 bp, Oryza sativa
agctttgcttatacatagaaaatgatgcacaatggctaaatcatgtttgcacacatgtactaattaatgctatgttgacagagaactcacgtacggaaagtacaaataaaaaacaaaatttgagaatgaagagcataaaaggaaaaatccaattttaccatgataaaatgagagaatcgatcaactttataaacaaataaagaattttttcccaaggatcagtcatatagctatgtgagacaggacatgtcaattttcattaacacgtttctcacattgctaaacgatatattttgcgcaaaaacttgctttaaaaatatataatgaatctattttctaagtttataataattaaaattcaattaattatacaacatatcatatgtagtaaagcctaaaccaattaattatgcaccacatcaattccacatcatatatacatatg

SEQ ID NO: 73639 - DNA, 481 bp, Oryza sativa
  unsure (1)..(481): unsure at all n locations
tatgaaaagtgatggttngacaatctatcatgttaagagtcatctgcangttctntttttaatctttctaaatgtcatatttgctgaaaggagacttcagttttgactttctttatctgcacttatttttactgcagaagtaccgcacagctcgctacaagccaaacctatcagaaggtttatatcaattgggttcctctctgacttgcattttatttatacatattcttacatacgggaactcatttttcatggcaataactttttttttagaacttcatggcaataacttaagtacaattttcatgataatggcaagggctgtgaatttatttgtaaaagcatattttcatgatgaaatattaaatacttagtgtaagatcccttgttgcaaaatagcacgcatgcaaccatattctagtttatgtgagtttgtaagacaactctgaccttttcttaactcatcatgcangtaaaacac

SEQ ID NO: 73640 - DNA, 438 bp, Oryza sativa
agctttcattattaacatttgctccaatctgccaaacaaatttgaagtaattctgaagtgtgaggaagcaaaaataaaaaataaaaattgagctgcgtgtgaagaagcaatgttgatggataataaaattggttacctgtgccaaaattatggtaagacaaacttgacgcaaaagagttgattttccacccatatttgggccagtaagaacaataaagctggcatttccaggcccacccatcttaatgtcattgggtacaaaagatccacttgctaaagaatcacttcggagggtggggtgccctaaatttcttgcatggagagtaggagtatcatctggaccatatgattctttgataattggacagcaagttggtccctcaaaaaaatcactggcaatagcaagactaattcaaacatcaagctctgcatgttaaa

SEQ ID NO: 73641 - DNA, 410 bp, Oryza sativa
tccctttatgcatatctggatctggatcctgtttaacaaacatataggatgagtagtatctgatataaatataatactcgagaaaaaatcaagtattttaaaatatttatgaatatgtatttctcctcttgtcaattttgatttccccgagcagatgactctgtacgtttaaacactctgtctgactagtcatagcccccaagcatcgggagtcggcctaggcattttccaaacatggatatgagtgacatgagttcgtcattaatggaacaaagtttcacggatcagaatttactactcaggtacttttgcaattattaagagcagagaataaattatattatctctatgcttttgatttcttccgagtaatacttagcacctttgcgtactcggtccatccaacgagc

SEQ ID NO: 73642 - DNA, 351 bp, Oryza sativa
tgggacaaccaaccgaacacccgaaacaattaaccaaccaaacaaacctagagaggtaacccaagtggccttgtgcaggactgcagggtagtcgggaataagtgagcctacctcctattcatattataaatcagatcaacgtgtcttttaagccaaaccttataagctcgataaaatttataaaaaatactaatggttttaacatataactatcaaaatatattcaatgtagatgcaatgaaactaaatcgatagcgtaaaatatgattatatggtcctataaatcagattaaacttctacaaaaattgaaaaaagaaaattcaaaacgactcataatataaaatagaaag

SEQ ID NO: 73643 - DNA, 320 bp, Oryza sativa
taattcggttcaaatactggtctaaagattgatcttagtctctgtggtaacaccaccatgattaagatggagccatctgtagtcctgttgatgtactcacaggacaaaaatcttaattttttatgacctttatatgtttataataaaagtgctttcactcatactaaacatcccattaattaacttccatttcccgatatataattctctttctctaatagttatttctttgaataacttgaaataattcataaatgttctataatttctcaatgcattatattgcattctactattgattttcttgttacataatattt

SEQ ID NO: 73644 - DNA, 438 bp, Oryza sativa
  unsure (1)..(438): unsure at all n locations
agcttattgttgtaatggctggatagacaaaagtttcacacaactacttggatgtcacctttgaacctttggctgattgaaatactccattggtaaaataatggtgatgtctttatagccataaatgatagttagtgttaaaattttttatcacaaatattcacttttttggcgatgttgcatgtgaggagtaacaaaattccatcacaagaacttaaactcctaggaccaaagtttttttttcatgacgacaactattctaacaaaatgtaatatttttgtgcaacaccatcactaagaaatattttgaactcaattaagcccaatttgggaacaataatattcaaatatttattccgttagtattctctcaagttggagcttataagtcatactccaggcctttcatgagtatctagagatcacccanatctcata

SEQ ID NO: 73645 - DNA, 476 bp, Oryza sativa
  unsure (1)..(476): unsure at all n locations
actcaagctgtatggtttagtcgactataactgctctctgattagtatttgatcaggaaccatatccgatggaagaaagcaagatgttaacatatgacatgagcatgtttatcgttttatttggctattaaaatggtggttatagaggcaaacaatttaatagagatgtatcaccaacttattaaaaaatcactatcttactggttntactaggtttttagtcttttaattggtgcgaaccgacaagtattgtgctgtcgcttgatacttccaaaataacactaatgctcatccatctaatccaaaacatatgaaattcataaaaggctttagtcgctcattatataatcatgttgtttattgggacctangtgaaatgcacaggttggcaaaacattcacgagtcactgatacaaaagaaaaactgtacgaaacacatccttttccctttattcctggcctcaacaactaactac

SEQ ID NO: 73646 - DNA, 396 bp, Oryza sativa
agcttttgtttggtgtgttctgatgcaagataggaaggtggttgcctatgcaactcgttagttaccctactcatgatcttgagttaaccgcagtggttcatgcgttgaagaattggtgtcactatctttttggtactcgtacggaggtgtatacggatcacaaaagtttgaagtatatcttcacccagccggatctgaacatgagacaacggaaatggttggaattgattaaggattatgatatgggaattcattatcacccaggaaaggctaatgttgtagcagatgctctcagtaggaaaggctatagtaatgctacggaaggacgacagttgccgttggagttatgcaagggaattgaaagaataaattcgggaattatcagtagagggttcg

SEQ ID NO: 73647 - DNA, 486 bp, Oryza sativa
tgtcgcttaagcctttggttttggcaggcccggccgattgttcttcgtggtatacctccaactcccatcaaggaaacagaagaagtatagatttgccagctgttccaacatttcgtcaccgaagggtagcgggaaatgatcctttttcgtagccttgttaagcttcctgtagtcaatgcacattctccatccggttatggttcgttgcggaataagttcattttgagaatttgcaacgaccgtcattcctcccttctttggcacaacctggactgggctaacccactcactatacggtatgggataaataatcccggcattgtcacgccctaaaaatcgcctaatttaaaaatgcattgcttaaattatttttagaaattaaattaaaagcctacaagctaaactctaataatctaggaagaatttcaacatataaatgaactagataaaattttattaaatactattcttgtcctctattttcta

SEQ ID NO: 73648 - DNA, 420 bp, Oryza sativa
  unsure (1)..(420): unsure at all n locations
agctntctttcttagcgtcaagccgcgagtcgttgctccgtataaaactctaccaacagagaaaccaggcggaccaacgccaccaactttcaagaatatggccagcaagaaactcgtgagatcgttgctccctctactgacaatatggcccgccggccgcacgtcaacatatgagatatggattttgacttgtagttcagcctcatcacgatggcgcagactaactcgttctgtggcaagcctaatgaggatgccaacgctcatctgcaacaattcctggagatatgtagcacgtacaccatcaaagaagtcagtcctgacgccgtcaggctgcgactgtttccttcttcctcctccggagagcgaagcaatggttctatgccaactgtgctgctatcaacacttgagaataatgctcta

SEQ ID NO: 73649 - DNA, 181 bp, Oryza sativa
attctacaatcggtaagtaacagatagacagctgttactaatgtggactcttgttttggtacaagcacttactctctcaaagtgaaccaatatgttcaacgaattttaatatttattatatcaacaataataagcaagtgccacgcacagattgttgactagtttacttgctcgaatcaaa

SEQ ID NO: 73650 - DNA, 396 bp, Oryza sativa
  unsure (1)..(396): unsure at all n locations
agcttctctggttcttggtctctgcccgaggcatcgaggctaaccccgagaagatacgagctttagagcggatgcgcccccccagcaagcttaaggatgtgcaatgcgtcaccggctgcatggccgctcaaagtcggttcatatcgaggctgggagagaaggcgctacccctatttaagctcctcaaacgctccgggccgtttacctggacggaggaggcagagcgggcctttactcagttgaaggcgtacctcagttctcccccagtcctagtcgccccgtagccagatgagccgttgctactctacctggcggcaaccccgcaagtggtcaacgcggctgtggtcgtggagtgcgacgaggacaatcctcacctcgcgtatccncaccctatgt

SEQ ID NO: 73651 - DNA, 477 bp, Oryza sativa
  unsure (1)..(477): unsure at all n locations
tggtggttaaagccaaaactaacagtactgtttctcactatctatgcagaagaaccgcttgaatacagtggtgcctcctcgtagctattggcaacagaagcgctggaggcatcatggtctgatgaggcaaaagcagagtcggtgatgaaattataatggccaggcaacggtgcattacgctccatgacatccattgcttgctgcatggtcggccgatctttagtctcaaaggcagagcaccagagccctaagatgatgacacgctccatctccctcctttcaaagtcaccaccaatctctagctttgtgtttgctgcctcaacgacatcacctttgcttcagtacaagccgcagatctgctccctggacttgcctgtgcacgtgatctctagcagaacaatgccgaagctgtacacatctgangggcagttgaacctgaccgtgccatctntcttgcactgtggatctatgtaccct

SEQ ID NO: 73652 - DNA, 415 bp, Oryza sativa
  unsure (1)..(415): unsure at all n locations
ttgtttatattntaattttacaactcggaagtacatatcttgttgatcctatagaacttgagtttactcaaaaatgagttgaaatgaattttatataaacctctaaagttcagcttatctaaatctcaatatttttaaagataatagttttagaggcatttggtgtaaagtatatgcttttatttcccctatatatagtgttggtgaatctgtagaacttaagtttgttcaaaaataagttgagatgaattctggttgcattttataagtttgggtatgttttgtgtatgatttatcttggataaattttagtggcaaaccttgtacagtgtgtgtcaataaaataaagttcataactttgtgaatctgtagcaactggaatcatctcanaatgagctcactttcatttaatatg

SEQ ID NO: 73653 - DNA, 450 bp, Oryza sativa
  unsure (1)..(450): unsure at all n locations
taaattccacggccgaataggcccagtaaccacccatcgattccaaaaggcgaccaacaaaagaattcgcgagcacatctctgctacctgaaaaactgcagaaacgaagggtgggaggattaatgttggtcataacaacgatagaaggcccatgatcttagtgtcgtttgttaagtgagatgtgatcatggacagaacgcaatttangacgagatatgataatgcagcttttgcataaaaactagcatcggtgagcaccaaacataatctctntcgtcttttccatagatcgcagtgatcttctgtgtttcttttctccatcaaaagacatatgaagtgagctcagtaactcgtctgcatctatattatcttcaaaacaaagcaacagggaagtttatcattcaaaacanaaactattttgaggaatatctccctagctaccaccttata

SEQ ID NO: 73654 - DNA, 397 bp, Oryza sativa
  unsure (1)..(397): unsure at all n locations
gcttgtttggttgtacctgaagaggagtcngtgtatgagcctgatgaggagatggtggagccggaagagatggtgcacgagatgccgcttgtcacccaaagaggatgatgtacctcttgcgccatagtataatggcgtggtttgtctctcgtagatgcgtctcaccgtctcctccagggtagtccaactcgaggtcctcgtacgcggcttccaccagctcaacttcgaccctcgagtatcctgctggaatcgacctgcagtggtaagtccctgaaaggtccgttgggatggccattcccgacgccaccttcacgtgataagagggtatctattagtaatcaacctaagcagcaacttgcgaaatgtacaagtcanaaatcataaaacaacgagcata

SEQ ID NO: 73655 - DNA, 474 bp, Oryza sativa
  unsure (1)..(474): unsure at all n locations
tatgttacaggaatggatcagtcagaacattaccatctgcttgccgtcgtcgccgccgactggcgtccttgcctatatggttgggtggtcacaccgcccgtgttgggcatcgttttcttcaccgactggccgcctcgtccgccgtcgaactggtgtttcgcctatacagntggttggtcacaccacagttgttgggcgtctacgtcttcgccgccggcttgccttcgctgccgccgactggtgtctcgcctaaatggttggcatattatgccgccattgttgggcgtctacgtcttcaccgaccggctcgccttcgccgacgctgactggtgtctcgcctgcacggctggcatattatgccggcatttgtgggcgtctacgtcttcaccgaccggctcgtcttcacctgcgccgaattgtgtctaccgctgcatggctggcctattatgccgccgtttgtgggcgactatgtct

SEQ ID NO: 73656 - DNA, 327 bp, Oryza sativa
agcttggtcatttgtccaaagactgtcgacagccacgacgcggccaggcccacgtcgcacgggtggaggaggaagagccggctctgctcctaactcacgcaagcatcgagctacctccagcggcaccggccgcagcggctttcctccaccttgatgagccgaaagtactcgtctccctctgcgacggctccagcaacgacaaggctgatgggtggtacctcgacacctgcgccacccatcacatgaccggccgacgggagttcttcaccgagttcgacttcagcgttcgatgcttcgtcaagttcggggacacctccagcgtggaga

SEQ ID NO: 73657 - DNA, 418 bp, Oryza sativa
  unsure (1)..(418): unsure at all n locations
ctatgnttatgtgaggatgtgattcttctatgnggcatgacgtcaccctgagtcggctgggaaaaggctttgttgcgaacctccgataccgacgggtgttcggaataagttcgtatcttgtgggtaaagtgtacccctctgcagaggttaactaactgttcgaacagccgtgcccacagtcatgggcggatgtgaggtggttcccgttgcgtagatttgtttgcctgtgctttgtgaaaagttgttgtggtgtgggaatcgtaaccagaatcagcctatgtggcagatggacgacctgagtggtcagaaacgaatctgtgtgattcgggatgtctgcgggcatcatagactatgcttcccgagtggaagcggattgttgtgctgcttggcaactggacttctggagtccgaganaatg

SEQ ID NO: 73658 - DNA, 361 bp, Oryza sativa
aatttagttaccagggcaatcataggactcactttaggatactacatatacatatccaactttcatgtatatttcgctttggcggttgaaatgctcgactaaaatgaaattaccatattttgaaggattgttgccggacttcatgagcattcatgagtcttacacttggctatttaaataatgtacccatacacgcatggtcctcttatcaccgagttccataacttctttgaattcaatataaacacttagttgatttattgtcttaaccatggcacaatatgtcaaaatgcaccacgcacatagtattaactaccaacactaccttgtgcctagaagaacaatagatcgtggcatcaga

SEQ ID NO: 73659 - DNA, 477 bp, Oryza sativa
  unsure (1)..(477): unsure at all n locations
agaganaacccgccatagaagaaatgagaaaatacctctacctcatgtgtgtcaggggtagggaatgcttctccgcatgctggacgccacccaatgatctcttttgccggaagaacactgtgcgccaccatctccttcaggttctcctccgttacatcggagggcgcccactgactctcaaagctctctctctctctctctctcttccgccatggatgcgatctggatgatatgatttggtttggagtgtggctgggactaaatgggagattgatgcggtggttgcatgggagatattcgtggagttttggaggatggattggagtgaatcggtgaaccctagtttcgtcggtgcggtttcgtactgtatcagagaatggggaaagtggcgagagtttctgtggggaagatgaaacgacgctcgaccttcggtgttgtgtcattaagatatcgggagtactaatgggcctgggccta

SEQ ID NO: 73660 - DNA, 434 bp, Oryza sativa
  unsure (1)..(434): unsure at all n locations
agcttagcttgttttatgttggcaaataaaatgggacagtgattaaagttagtgcaaacgacgatgacatgtagtacttcattttacaggttgaggcataagtgttttttttttttggcaaaaatacctgtgtcatatagctggttttggacaccaattctgtggttgtatgtgtttaatagtgtgcccgtgcattgcaacgggaaaactaatcattaatcagggttcagttttcgtgatatgaaggggatattttcatctttgtctttatataggagaaaaanatgcccatgatttatntatctcaattgcatcatgcacatcatggcaagaaataatgtctacctggaagctgcnacatggcagtcttattatagtactaaccctaaaattatataaagatcacataagtaggcgtcacccgaaaatgatct

SEQ ID NO: 73661 - DNA, 467 bp, Oryza sativa
  unsure (1)..(467): unsure at all n locations
tgttgtatagctatgtagggtatatgacatcacagtaaaaagtaggtatgatataagacacgttgaatagtaactaacaacaaaattgcgaactttttgtaggacatacctcatcaagtattagaataggagagtntttcagaagagcacgagcaatagcaattctctgcaaaacaacaaaataattgtaaagtagtaatgataacaaacaatgaatgtattttctaaaacaaatccaacaatactgtttntgtattgtgagtttatatattttaacatatacccagggacaatattttgaaaccttgagcatatggaccccaagtgaacatatatggtcaaagagagtgtttacatgttaaggtatcctcaagtcacaaagtgagtgatatntgggacactgacatagtgcccaagaaaactacaaacttccactgttatatatctacatagagtaatanattaca

SEQ ID NO: 73662 - DNA, 347 bp, Oryza sativa
  unsure (1)..(347): unsure at all n locations
agtttattctacccatgattaactcaagcacacgcactagctagtacagtacaccctttccaaaataagatcatttataaatttctgtctccaacgcttgaccgctcgtctttgatatttttcatgaatatttttattggtattagatgataaaatatgaataatattttatgtgtgacttattttttataaactcttttaaataaaacggacgggtaaacgttggaaaaaaaaccagaaacgaatttattttgggacgggggtgcaggactatagatggcttgaaatcttaattaatntgacggcatcacacaagttaattatttggtcaacccgtcacgcaagcg

SEQ ID NO: 73663 - DNA, 243 bp, Oryza sativa
tatgttttggaaatgatagatatgtttgctttccattcagcttatgtagatgcaaggtatgctctgtattctcacgatgattagtatttcttgagctaccgcgaaccacgcgggagatacttggtggctttatggttatggcctataattaaacgaaagaaaaagaattggcttcgtaccatcataaagtggcctatactggaacagtgtgtgtctgcggatgaaatgactgataaattggct

SEQ ID NO: 73664 - DNA, 306 bp, Oryza sativa
  unsure (1)..(306): unsure at all n locations
aaccgctcagctcagagacggacnctagaagctctgcgatccgatctctaaagtcatgttcattcttcctagcaagctttttggcttcacgcagctggactctggttgcttcaagggttccaaagtggggaactaattttccaagagctgcagtcttcgcctcattcctgacacggattctctgcaccacacatttatccgtatttaatcatggtggccgacatgatgattgaagccatatatatggagacttacatttacaaagtgagtagcttggccgagtgcttttttagcacacatacttcc

SEQ ID NO: 73665 - DNA, 229 bp, Oryza sativa
agctttatacttctggggagaaaccatctttcgtcggtcggccgatttccacaatagtcccggatgcaataaaaaccggggctaaagatgatctttagtcccggttcaaaagggtaacgggcatatttgatctttagtcccggtttgtgttaccaaccgggactaaagatcatctttagtcccggttcgaatgctgtcaggacctgtcaggcccccccgggatctttag

SEQ ID NO: 73666 - DNA, 481 bp, Oryza sativa
  unsure (1)..(481): unsure at all n locations
agcttggtcctatagtcttctcgaagtttcatgtatatctntatgtacttactactttactcgtggtgtaagactatagatgaattaatagaattatcttctttatttatttatgctcatagnttatatatttatctatcgaatatatgttctatgagtagatatataaaggtcaatagataaatacataggttgctacggtaacggtccaatgacctttatatataagttgctctagctctaacttgttcatccgtaggggagagtcctagggagttagcgatattgcataagcatggtacttagattagttaaatgtcgttggatgtggctatgcctcacggaaagtgaggtaggcggcaggtggtgatagcactgtccgtcctttgtattccttccaagtcgggtattacgtaagagagcgtaaataccagaaccacgctggcagaccaatagagagtggtctctcagtagtacttgg

SEQ ID NO: 73667 - DNA, 428 bp, Oryza sativa
  unsure (1)..(428): unsure at all n locations
agcttttattatttctttgcatggccttaccctgcttggattcactgattcacagataaaagcaagtggcaggcaaatggtcgtggagaatatatatgccaccagcttagcagccgctgctttacatcaagcaaacagcagccgccagttttgtgggcaaggtgacatcgattntatggtttgatttgcgcattaagaaaccaaccactgtttgctacactggaagctacactggaagaagcattctctaacaataaacatagttgtttaggctgataaatatatgctactagcctattaaggtattgctgttagaaactggatgttgtcatggtgtgttcatgtgatcgagcacgagaaatcggtgccgggtaagagtacgttgccgataaagacacggtatgtatactactaccaggtcatgaagt

SEQ ID NO: 73668 - DNA, 437 bp, Oryza sativa
tatacacaatgctactggacagcagctcctttgtagattatcttctttcctccatgctgtaaatgatgtattttcgtcatggagttgacttatggttgaatagtatcatatgttcctttgagaagggcaaaatggtggtttccacttagcaattttgatggtacgtttcagttacaaataaattaagttcaacacactctccgcaccactaatgcttatgtaatgtttgattctttagcaggtcagaggacaaaagtgttaattagtgtgctaaccaagaaatcagccagtggtgtctctttttcagtgccacttctggataaagttcaagcaggtaccttcactgatactatagtaccttagtacattcaaaccttgcacctcatgatagtgcggaataaaatgacttcttgaatgaattggtctcatgctattct

SEQ ID NO: 73669 - DNA, 436 bp, Oryza sativa
  unsure (1)..(436): unsure at all n locations
agcttaatggctgtacagattccacacgacattcacttggtggaccatattaagttgaaaaaaccagtcagctttgttcttgttgttgaaaaactatcaatatttaacatgcttgtcaatcttaactttcatgtcacacacaattgcataatcatcactggatgtggaaaacctgatatggcaacaagaggtgcagtttttaaacttaattattgcttgccagtcaaagtttatatccttgctgatcttgacttggatgggctccagatatacttataaacttggcagcaaagtaagggctnttgagaactntgtgttgcatctagagatcttatatggctgggtgctagaccagaagattctctacttttacaagaacccaatgaatntaccagagtgcagcagaaatctcttactgatcttcgtgattctcttc

SEQ ID NO: 73670 - DNA, 395 bp, Oryza sativa
  unsure (1)..(395): unsure at all n locations
agcttgtaccgggttttcaatgtggtgcttttgttacagtcagtcggattaatcctaacatgaacagaatcttcagggatattctttattatcttgacaagaaaaagtttaccaactcatacacactgatgttggatgaaaagcagcttatcaacgaactacaggaattcctccagaacaagaggtacacatgctagtcatcaaactgccgtggttagcaactctaggcattaacccatgcattntgcatgggctatttatgtcatcattatctgcataattatataaatagtaaattacaaatctggtgcaaacagtttgttgtgaacgtggtgcagcacacatcagatcagagatagtcatgttcaaggaaaaaaaaaagcgtctctggtaac

SEQ ID NO: 73671 - DNA, 450 bp, Oryza sativa
  unsure (1)..(450): unsure at all n locations
actaagcttacacgacaactntctcgttctacgtgagtacgttttccatatctctaaacagtgtgtttcatataaaanatttctatatataaatttctttgaaaaattcaagtcgatctttttttttcaattttataataattaaatactcgattaatcatatgttaacggctctatcgtgaaaaaaaaacactcccgtaatttacctttgattacatttgtacaaattttatcttcttctaatataattaatatgcaaagctgttacgggttcgaaaaaaactcggtgttttacctttgacaaatgcttatcaacctttgagaaatatatcttgacatgagccgtatatacgtttgtattcgcatccattgagtatgtgtactctcatggagaaatcccatcagccttggtggtatgcgcagttcatatatgtaccgattatntttttt

SEQ ID NO: 73672 - DNA, 434 bp, Oryza sativa
  unsure (1)..(434): unsure at all n locations
atctttatctttgctcttcaaggctagagcttcttctttctaagtaagatcagtgcaagtgtaagcagtaatttagcttaagatatctcttggttctattctttctttaaattccctttgcttctcccaactctctctcatggagtttggattctgctggtttctgtcaagcaaaagagaggaaaataagaagattttgttactactgttctgatgaatccaaaagtgagatttgtttggagaatgattcactcttttggggagaaaaggttcaacctttctgttatccatcttgccaattagtggatggatgagagagagcctangcatgacactgtatggacagcaattcatatcttgacataagtggcacgttggaccacatcataattcaaacatatgccagtacagtgagatcacctaactctggtgtt

SEQ ID NO: 73673 - DNA, 460 bp, Oryza sativa
ctttaatagcggaacacccttcatcgaactcgttctactctttgaataggctctgggtgcaggcaggtaagacaagattgcttactccctcgacgaagggaataagatccgcccgggtctcgaaatcaccaggggcgaagtggggcaccacgagggagtactccgaggcagatgtttcgacggcagcccccttccccttcgcctttactagcggtgaaacaaccggctgacgcagagggcttccgaaaaccctcgccgcagccatcacgatccggtcagcggaggttgaagccccagcggcggcgctaccacctgccccactagcgtctagcggaagaatgggagcggtcgaaaggtacaagctgtggccagcgggcgaagtcggagtctcgtcagaagactcgtcgtcgcttgaaacgcgagcgacatcgacgagtcctttctttttggagaatctttt

SEQ ID NO: 73674 - DNA, 426 bp, Oryza sativa
  unsure (1)..(426): unsure at all n locations
gcgcttgagccgctcaccgagtcgaccggccacgtatttatccgcttctttttacctcgggagtagtgcagacttcagaagtgcatagctcttgccgtaggtactactccatggtatgtcgagaagactatgtgttgacatataacctccgtctagtcataacatgcggggctacaggacacctgatcaatgatcacgatctattacgtaatgtacatgcactatctatgctagcctaaatacacgacttactaaatacaagacacggcgtctactcttatgtgtacccttgttgcttaaaatgatgtatgaagaccctgtatcgtgatgagtaaaaaatcactcggctttcacatattacatggataaagcctctttcgaagcatgcaccaccgacgctatgtacaagcttgngatataatgata

SEQ ID NO: 73675 - DNA, 434 bp, Oryza sativa
  unsure (1)..(434): unsure at all n locations
tatacatactcnaagcttcctgctaccttgaatataatgngagagcgagtacaataatctgattcattctgtctgcaacaatnctagatcattcaaatcctaattggaagggagagaatcgcgtggagagaaagaagccgacgactattctatcgctagcgatagcacgcatacatatgtaggtacaggtcctggtgccaatagaaaatacattttgtgggcccaaccatcacttcgtacgaacccctgtgcgctttcctctttctctccgttgtatgccggacaagatcttcgccgctctgtctgacgccatcgatcgccaatcttaatctccagtaatgatactccaataccgcttgcctgcttcttgctaggcttctctcgcccatggtccatggcgtataaactcgacccgataggtgcacaatcgctcg

SEQ ID NO: 73676 - DNA, 250 bp, Oryza sativa
cattcaccgggatcttatatcaccgcagctgcaacagtgttttttaaactatcctcgcagaagacgcagatcctccttgggatctaactaccctctggagataccgtgaggcattctgttctgataaatcaaaccgatctcttgatcgaataacaccaagctttagaacaacactgaaaaaaggatctaattaatcataccacaaaactaagaaagctaactcattgaaactaactattattctataaca

SEQ ID NO: 73677 - DNA, 263 bp, Oryza sativa
atccctatctcatattacaaagcccatatatcatacatctacatttaactatgcaacatgcttatttatagtttatattagactttaaacaacatgtaatatatcaacatatcatatagtcaaacaatttatatgttataaattatgccaatatttctcttttcttaaagcaatacatcatgtttacttaatataattacgctacatacctacttttttataagctacacactttattgaaatatctctctataatattatat

SEQ ID NO: 73678 - DNA, 299 bp, Oryza sativa
gaggaactgatctgaacaactgagctaatcatgggtgatgggtgtgcatgccaagaacaactgtttggatggagaggaattaaagaagaaaagagggctagatgcctggattggatgatggatgattggatgaagccaatcatcaaccaaaggttgaacatgattccctgaataatactcttgtttgaaaaaagtcgaaatgtcttgaattgtgaaacggacgaacgacaacagaatccagtcaagatattaattatagaatgagaacaagacggaccattcaataattaatatcttta

SEQ ID NO: 73679 - DNA, 421 bp, Oryza sativa
  unsure (1)..(421): unsure at all n locations
agcttatctatttaatatgaagtaattntccttaagtattcctgcacgttagttctagacaagtgtttatgctaaggaccctataggagaaacctcttcggtttgttctcgtttttagcctgcatcttgcataggcgtctggagaatcggtatccgtagagaagtgttcccttcggttggaactgcctgnggagacgataaactcttagctagaacaagtgtgacttggaatatctttntaagttgcttctaaaaagacagataggtgaggcatacggtgagtaccgagtaggactntacatcatctgaaacaagcttctgaggctgtctaagtaggattcgccaccctgcanagatcctaaagttaaaatatctctcgaagtgaacaatattgaacagtaatttgaacagtaaactgaat

SEQ ID NO: 73680 - DNA, 440 bp, Oryza sativa
  unsure (1)..(440): unsure at all n locations
tgatcattattgtcgataaacactacacatactaattaaatttatataatttctctcttatttcacacaaatatatatttgaagaaaacaattgaacatgtgaaaaacacaaaataatagcttcaaataattgctgatatgtttgcactactaaaccaagcatgtgtgcactactaaaccaagcaattgtgtaggtgattngtgccctaacataaaaagcctttaattctttaaaagtgtggaaaaatatgaacattttgaacttctacgaatggaagaacaatgcaacccgtaatctatcccttaattggttgttactaaatcatgcatcttcatgaggcgattcaatcacaataacctntaaattcttactatntatagtaatattgtacagcatgtgttcagatggtatacatattatntacttactatntacttac

SEQ ID NO: 73681 - DNA, 381 bp, Oryza sativa
  unsure (1)..(381): unsure at all n locations
agcttcgcttgatccanactactactaaaattactcctacatttatatgtagacaacataatgcccgaaattcccatgcataaaggtgtgctcacctggcacgcatcgggatcctcccgccaaaccctgngatcaaatcatctaacccagccgatgaagcggccggctcaagctttctcttctcctccggcagcaccttcttcacctacggcttgctcccaaatcccccaagcagatcatcgtacgcacgtggcggcggcgcgtggctgccaccgaatacatcgtcaaaccgcgccgaggagctgctcttcaccccgggaacctcatcgaagatgtcgtcatcgtagaccggcttgtcatacaccggcatggacgagtgct

SEQ ID NO: 73682 - DNA, 269 bp, Oryza sativa
  unsure (1)..(269): unsure at all n locations
agcttgttcttgttcacccacctgcaccccacanggttacacccataaggtcgctctgtcacctccctagttccgttagcgataaaggaatccatcttactaccgacagcctccttttagtagtccgaatacgagatgcatatgcctctgaaattgacttatgagtgttatccacgaagtacacagcgaaaacatcactaatggacttaaccggaccttatctcttactccttcaaagagctcaccgacatactcctcacgtgtatgat

SEQ ID NO: 73683 - DNA, 308 bp, Oryza sativa
  unsure (1)..(308): unsure at all n locations
atgccttatatacagatacacatgatggtgatagaacttatagntntgctcacaagaccactaaatcaatcctctatttcatgaaggctttatttatttggacaattgcgagcgagtattatggcccaccattgaaacatattaaccatgttgtcaacttataatcttaatcgtatatgagataaaatatatctatttgagtagtggcccaaaaatgtaagtctcttctaaatgcattaattctaaattaaaatgtaaggattttcatagaaattggttcaatattcatatagaaccacattcctaag

SEQ ID NO: 73684 - DNA, 481 bp, Oryza sativa
  unsure (1)..(481): unsure at all n locations
actcagcttctggtccagctgcattgcagtggcacagtgtcattctctatatattcgaggtacaggctgggacatggtggccgataattgtacgtaatatgggatttagtagtactgctttaaataactgaattcaaacttcaaggtctgtagggttaaccacggaccctgtctcagtgttttagtgaaattcaaatcataccctcatttggacattttgttctagatctacgatctaacttttgattactntactaagcccttcttatttgggcttataagctagcttatgaactgacaagccttttctgtctaaacgtgcaggtgtttgtttttctattggcttttcgaatgtgcactttcctaacttcacctcgctcgtttgtcatgcaaacgctttctaaactgctaaatggttatgatttttgagaaacatatataggataggtgttttaaaaaacacataaatccattctcgcat

SEQ ID NO: 73685 - DNA, 393 bp, Oryza sativa
tagcttgcccctacggggacatgccactggatgtgagtgacccgactgtccttaccttgggatacttgggatggacggaacatatactatgcctctatgttgttgaacgtcacaacacgctgtagctgttccactgcatagatcactatgatgttggatgtgtctgtgatgcctacttgtatcatctaaagcctgttactgctgattctgatgcactgcataatatacctccgactgcggtggagaggacagattaaacaaaaccaaatgagcaaaaggattatttacattggtggataagataaacaaaagaaggaaccaattgaatgctagtaataagctgagaatttagtgccatatagtatgtgttgcttgcctccatgtatgtaatta

SEQ ID NO: 73686 - DNA, 443 bp, Oryza sativa
  unsure (1)..(443): unsure at all n locations
ctgctntcttggtgtccctggctagccataccttcatgtattgtacacctgtcatagtctacagccaaatgtcatcaaatctaattcccttcatcttcctgctctgacgatgcttgttgtgtccatcactacatatacttaatccagaactgcatatccatcatattctaggtgttccaatatgaacagatgtttcaacacctatggtttaaagatatactgatatgcaactgtgcatccgttcaacagtttttgttatgttcccttttcccggtgcttcttcatgttctaatctattggtttttgattgaccaaagtacatagggtaaatggtgtagctnttgttctcatttctgcatttatttgaatntaactactactgcctgaatctgtaatatnggtaaaatanggtatacgccaattaataagtcacatcaaatgta

SEQ ID NO: 73687 - DNA, 416 bp, Oryza sativa
agcttccaattatcatactggagtctggttggttccggtttggtttattgatgctgtttccgagtcttttgtttccataaaatatgtagactcatattaaatcacaaccattaatctagatctattttaatccaatggctaatatttttctctttttctctgattaatgtgggaatttctagcccccacagtgaacgtggagcctccttttaaagctgttttaataatataatagatagatttattagtaatgcccatattagatttcacattaatttagaacaatcttaaccagaattcgaatgttggcttatattggtaacaagtgacactaccaaaaaaaaattggcatcgtagcaatccaaataagccccaagtttgcggagcggcgggccgtggacgctgtcgcgcaagta

SEQ ID NO: 73688 - DNA, 385 bp, Oryza sativa
  unsure (1)..(385): unsure at all n locations
ctttgctcccttatatgaaccagcagtgctcatgagtgctgtggagcatgcccaatccttctcatnttctcgaaggagcttcactcccctttgtcctttctctggatggtctttgatgtatcgcctgcatgttggtgggggcaattatagcttgaattatagnttgtatacatcactgtgaggcagcgtattgttgtgttggaccacatggtccacatgtatttgttatagatacattacgaaggagaattctccattgcatgtggcggtatgcatataaattgttttcttcaacatgaattacagtaagtatttgtatttcaatatgtgcctcgatggctgcccatattgcgttagcaactaaatggttggacatggattttcc

SEQ ID NO: 73689 - DNA, 421 bp, Oryza sativa
agcctggtttacttatttacttaccttttactttgattttctaactttattcaaattaaaaacttgtgctattaattggataaatgtcttaactccctcctttcacttgtctttagatgccgcgctacaagcctgagtacttgtttggtgttgagggatttgtccaggagttgcgtacgatgtcctttgccataggatttgggactgcccctttttatgcccagattcctcatgatcgccacgaagagaagtgccgagtcaaagtcaccttgaacagtaatagtgaagatatcccctcagtgatgttcgaagctggaggaagaaactacatccatgcatgtcacgaggtggcaaggatcgccatacgagagctccgcgatcgctattgtgatcagttggccgacactgagtatcgctacca

SEQ ID NO: 73690 - DNA, 378 bp, Oryza sativa
agtgtccgataaagactctatcttttccttttatctatacgataggttctttcttgtctgacaaggactttgatcaacccatgggtataaatatgtacactccggggtctatgtaattatcttcacgatcaatacaattcggcgcatctgcacccttcttacttctacttttggttttacgttccggcggaacttggcacccgacgcagtgctgcatccgctttctatctccagcgaatggataagtccaatgtctcatcggtccactcatattgattcgctacttcggcgtcgttcagagctgatcagacattccacctcgtgattgctctggtttgatgatatatttcctactatttatatatgtcctgttatcta

SEQ ID NO: 73691 - DNA, 416 bp, Oryza sativa
  unsure (1)..(416): unsure at all n locations
tactaaccatggaccttaataccttatcatcttgntgattatctaagagttgtggaaacggctgaactcgttgataatcctctcggcatgggagatttataagcactgcagtgaccgtgtgtttaatggtgctagccctaatgtcatggtggtttcacaggcaatagtgaatgatggtagcttatggtgtttagccggagcccatgctctacataagtttcttgtgaggtcgcttgccccaggtgattagttggtcttttcttggggctttggtcgtgcgtcctttgtatgcgacagggagggtcctcttggtccctgctatttaagttctgttctttcctttcttaatgaaatgaacgcaattgtcctgtgttttttanggaaagaaacttatcatcaaggtccgaacattttct

SEQ ID NO: 73692 - DNA, 388 bp, Oryza sativa
agcttatcatggtctgtatcatgccagttaatgggaaatgtaacacaatatcaaggaaaacaaatcatacctttgtgggctcaaggctcaccaggccgcaagctcgtgctgctacgccactgcaattgtgcgaaacaacgatgattccaatggaatccggaccaagcttgtatcaaatattcatttcagttgatttgaacaaaacaaacatgaatggaaagagagaatcaacatactgcacagttttcttgtacaacgaatacattaccttcatcccaaccatttgcacccattcgacagcagttcctgtcgccttcgacatgaactctgccaaggtctcctcagcaatagcgagaagacttgcgcaaaaaaatcatctcaaccatct

SEQ ID NO: 73693 - DNA, 421 bp, Oryza sativa
  unsure (1)..(421): unsure at all n locations
gctaattaaactaatcacagagtgtgtgcatatgcatcagcactgcatttcttgttntctaagcccaagaaaccagcaagaatctcaagagataactaagctaattcaacaatgaagctgattaacttgtcatcagacagacagggcgctgctcgctgaaattaaatcaatagtattaagagggggacagtggcagaggcccgatcacctaagaaccctacagccgctaagcaaagcatcgccaatgtctcgagctgaactggaaccctaattaaggaacgaatcttgtgttgctcagctngagctttctcctcttctgctgtgcttatgcttgattaaattaattaattaatctgggtggttaagacacattcagagcgagcttgcttgcttgcctggccagctatngacatgctcacat

SEQ ID NO: 73694 - DNA, 354 bp, Oryza sativa
tcaagtgacatgtacccctctgtgagcttgtttattctagagctcctcctacgatcagtgtccacaataaccaatagtttaccttttttctttttgcttttcttcaagaaggccgacaagaggaccaattctgctgaaaagggtcaagggcagatctgagacatgttacacaggggggacacagctaatgggctcaattatttcagcatcttcaaaatgatgggcctccaaatcttcctggcccaacatggtctgttgagtctcactgtcttcaaccccaaccaccagcaggactgctgctagaagagcaaactgaacaatatgaataacatgcaaagagaatggcacaatctg

SEQ ID NO: 73695 - DNA, 420 bp, Oryza sativa
  unsure (1)..(420): unsure at all n locations
agcttcttcttgaacacccacttgcaccccacaggtttacacccatatggtcgctctgtcacctcccaagtcccgttagcgataatggaatccatttcactacggacagcctccttctagtagtctgcatcaagagatgcatatgcttctgaaattgacttangagtgtcatccacgaggtacacagtgaaatcatcactaatggacttagccgtcctttatctcttactccttcaaggagcttcaccgacatcctcctcaggtgtatgttcagtttgttctggtggtgtgactgaactgggaattatttcagagggttggctcgaaccactatgtgtatccttcattgggaaaaatgctctcaaagaaggtagcatcacgagactccataattgtaccaacatgcatgtcaggtacctc

SEQ ID NO: 73696 - DNA, 291 bp, Oryza sativa
gagcaagaacacaaagcgcatacaaatcgaccatagacacctacaacttactggcaaagaaaagaaatcctttcatctcaacacatacgaaccctactaactgtccataaaacataagcgatactgaagtcatatgatcctaggcgttaacatctcctctcccccaaagaatcacgatacagattactcttgcatcacgcaacaacctaagccccgatccgttaagaatagtgtgctgcattgcattgccactatctcacgaatcaagactcactcttgtagtgacattaa

SEQ ID NO: 73697 - DNA, 305 bp, Oryza sativa
agcttttatttcagttaacagtggccaatcaacttagtcttattctatattctgatcttttcattacacaaaaaagaattataaaattttactactacacatactccctctcatattaacacaacggcaggaaacagcaatccatgttcaacatccgcgtgagcatacgagaagaccatgcatgcagccatgctcggtatctgatcaaatacgggtttcacaagtacgtatggcatgcatagaacaagaaggactgtccatacttgccaatcactccacaggctgcaggctacagcgcgcctgca

SEQ ID NO: 73698 - DNA, 442 bp, Oryza sativa
  unsure (1)..(442): unsure at all n locations
nttgcctataatcntactgcatgctcgagtctagtctcctgttggacatagaagccaccaccaaccacactccttctacgcgtagccactgcaccaatgccccatcgtcggtcggccatcaagtatgtgctcgatatccgacatgctctaatccatccacgtaattaggctggagagggagagggtgagagagaataatgattccctctcttccgcactagcctgccaacgtggccatcttgtatcggcaaggagccaccacaagaggactagagtctggataaggacctatcgtangcctaccacacccacctcacagcaacactgacgtccccgcctcggccgggctaaccatgccggcagaggctgcccgtctgcattgctatcagctcatccgtactgcacctnncagctctgcccacgccatgccatggcactcacg

SEQ ID NO: 73699 - DNA, 331 bp, Oryza sativa
ttgacgttccggagcttgccgccgcactttctgccggacctgtcttgttctcggccgcacggcgagacggtgctcaatcacctccctgtggaccccgggcatgtccgctggtctccatgcgaaaacgtcaacgtttgcccgcatgaaggagactagcgcgtcttcctatttgccatccatataaccaccgattcgtgtggtcttggatgggccgttgcccaaggcaacctccttgaccgggacctcgtcgcaagtggccatccgctgcctcagggctgtgggggcagataggccaagcctctcgtcaccaccctcgggcttggacgcagca

SEQ ID NO: 73700 - DNA, 413 bp, Oryza sativa
  unsure (1)..(413): unsure at all n locations
agcttgagattagctcaaatctggatgcatacaagattggcatacattttttactgggaatcttggcagtattcaattaaatccagactagaccactggtattaaaaatgttttgtattattcacaaggcaatcttaagtaacatgcttatatttctaaagtccaatgatctcagaagtttagagatatttggacacttatnttgcgagatgtgtggatanttataaagattattcagattaagctatatccacacataggggagcaataaccatggaaaagctccaaaataatctcttactgcatagttgacgatgcagttagaatttaaagcatgttatgattaatcatatttcccagaactaagagtggtaaatagcgctcatataccactcaaaaggtgtaaaccactc

SEQ ID NO: 73701 - DNA, 404 bp, Oryza sativa
agctatcctttggaactagagcagccagatgcatcaaagtagtgcattcgctcctcctcctcgattatgggtcaagcttgacaccgtgatatataccaggcgatcgctcaagctcaaacttgatctactggtgttgaccctgcactgctctaacttagcttgctggcaacaaccccccaattgctcaagccccaagctcggctgctgcatcggtccctagcttgagctccggcgatgctgagctctgcacttgaactagcaccagcttcgctactcgagagcttgcatccgctcatgctagctggaccctcttgctcgagctccaccttcacccgcagttctaggcccccacgctgacttcttaatttgttggactggtcgagcagtcgctgccagactctagc

SEQ ID NO: 73702 - DNA, 444 bp, Oryza sativa
  unsure (1)..(444): unsure at all n locations
cataaatctcagctcagggaagcagtcataagtctatcatattgttttctatgntctcaacaacttaaaggcccctctgaatcataggaatgaaaaaacggatgaatangaaatacatatgattctgacacgaatgtaagtgtaaaacatacgattgcaaaacacatgacaaacatatgaatgaccggttgattggaccacacgaaaaacacacgaatttgaggagagatagagactcaaatgatntcctccatgaggttctactctttgttaagattcctccaaaacttctatgggaagaggcattacatatgaagttcataggattccatacgcgttattcctctgattcagagggctctgtatgaaaaaattcctatatgaataaatcctctatatctccatgaattatctctgaatctagtgggcctaagtgtgtgcttt

SEQ ID NO: 73703 - DNA, 384 bp, Oryza sativa
  unsure (1)..(384): unsure at all n locations
agcttgccacaaatggttccctgtctctggttnttcagttacccgtctatctttaccttgtaatccttgggatggagggaagagaaagcatgccactatcttctgaagtgtaagagcacccgatggtgatgccagtgcggagatcagtaggatgttttatatgtttggactgaatttttttatgaactanacaaggttacttgtattntcatagcagtgaataatatacatcgcacttgttatgaaaagttcagtttaaacaaaaccaaatgagcaaaaggattatttacattggtggataagataaacaaaagaaggaaccaattgaatgctagtnataagctgagaatttagtgccatatagtattgtttgctttcctccat

SEQ ID NO: 73704 - DNA, 442 bp, Oryza sativa
  unsure (1)..(442): unsure at all n locations
ntatcgaccaaaatgcgcgaggccgagtgggccctgcattctccctcatgggcgtcagcgatgagctcgatgccttgctcccgagagatacacttcaagaggactccgttggcaccgcacctgtagagggtcccttatactagcacatagcgcttggagatgcgcacgagctttttggcttccgcgtgatccttatgaagagtgcgattgtcgaggtatgcccagatgtcggccatctatgcgacctgacgtggggggtcggtgttgaccccctcgggccccgaggactatggctcgcgaggcgtctggtggtgaattcggcatcatgcaccctcggagaatccgagcgcgccgacggctgcgtgagcctatcttcaaatgctcctggggagagtggagctcgctctgacacnagacacgatagctcatcaacgactgcgtt

SEQ ID NO: 73705 - DNA, 394 bp, Oryza sativa
agcttatcatttaaacgatgagaagaacatcgctttcgcaacgaggcacgcatgcgtgtgacatctgaataacaatgatctctcccattatagaattataccaatcaaatgaaaatctttttcttgaaaagaattagcctgaaaattctttatgcagtgtatcacaatttggtgagaaatgctagctcaacgacggcaagttgctgcttattcaggtatccctactcagatagcaccgagacaatgcacatttagcttggcacaagtaagcccagctttgcctctctttttttctgcctaaaaaatataaaaattgtgactgtgagagttggggtttgcaactttaaattggcaattgacgtcttgcagattcagttgaaatgggagagaaaac

SEQ ID NO: 73706 - DNA, 441 bp, Oryza sativa
ctcttcacttctggatgtgtcacgcttaagctactctggcttttagctcatataatgcatggactgcagagacaccctatagatcaaatcacagcacatcttatcacatggctattcggcaccaaaaacacacccagaagtatggaaagatttacatcattaagaaggtagcaccaacctggatagtccctttgcccttgatactgtcccccatttctagagtcagttcacccttagctaatttctgcccataccatgcattacgactcttcatgcatgttacataggtatcggctaataaaggcccggctagtttctcagggtcttctgctaggagatgggtgatgtatatcatttcagacttgcaaagtgaaaagttaaccgacttgctggtcgcactctcattgtgtagtgcagccaccatacctacaagataacaag

SEQ ID NO: 73707 - DNA, 389 bp, Oryza sativa
agcttgcttgttttttttgttccgtgatactgcgctgagaagtggaacgttgaccattgcgtgttggtctctaggcccaactgtctgacattgagattgtgcctgttctatcatgctccaatgcttacctcaacaaactcatagttgctagatgtattctgcatagaacgttagacaactattagaataacctactgttatttcctactcgagtaagccttgctttaatcttcatcattgaaaactgataataataagtaatatcatccttgtcaatttgtccccgattattccagtatggaacattccaatacaagttctttctagagatgtatacaataataaatctctgaaatatattattagtgctaagctaccataagctgtct

SEQ ID NO: 73708 - DNA, 387 bp, Oryza sativa
  unsure (1)..(387): unsure at all n locations
aaacatggcccacagtgcaactcactctaaacttattcttgctatatatganactagatcgaggatatatgtttagaatcatagctagaaactacagtactactatatggngataatgagatctaccatgtatctacacacatactaagtgggctcgcattggggtgctcttgtactcttatgcatgccttgagcggggcggttattcgggctttggactgacatccattaacatgtatatgagactatagatggccatatggcccgaggcccatggcccggcccatagcccgcaattttggcccggcccaagcatggcacgagccgactggtgtcgtgcccgtgcttgcccgacaaccgggccgtgcctgagttgcaccctttcac

SEQ ID NO: 73709 - DNA, 364 bp, Oryza sativa
actcgtcccgggatacttagagcaacctgcaagcatgagacttcaactatattgaagatgctcttagtttatttccgagcggttttattatggtcttaagctgaacacgataaaattctattatagtgctgaactcatcatgttgaaaatcttaaatctgggacgactggtctgaaatacatgccatgtgggaagaatggtgctgaagtacttacctgtttagcatgttttggctgcataaggcattgttcctttctacttgtatgatgatatacttatctgacatcaagatgagacttttacacatttatttatatacatgtgcattaagtataataattaaattatattattatgaaagtat

SEQ ID NO: 73710 - DNA, 447 bp, Oryza sativa
aagccttggaggaaaacatgtgtgatcagtaatataggggacaatgttccactttttatgttagcatccaaacatagcagcgaagatctagagctaacgacctattaaatggtcagatttacgaaaaagaattgccataaatgaattaatagcatgcatgctaatggccaactgcttcacatctcaagaaggaagcactgattaaacttatttatttatcatgatgttgcatctaaccaaaacaggagaaaacaaatctataataaatgtactgcttcattacccagatttctacgaaagagttgatattaaaagacttaatagcatgcatggtacttgccaattaattcatatatgaagaaggaattagttaaaaaatggttatctatcatgaggctttattgggacttataattaatggaatccctaattacctagatctctatc

SEQ ID NO: 73711 - DNA, 414 bp, Oryza sativa
  unsure (1)..(414): unsure at all n locations
agcctgactacttttctatggttgaattgagagagaattgccacttcatttatganaatcggttatttctctttctactatgaacatcgacttcttaatggcaaccacctccaaggttaatattcccttgtatacgatcccatgtcctccaccaccaacctcgcgagttctatcaaaattatttgtggccttntctagcactggtaatgttaggatcatcctctcactaatgtgcgcactttgtgagatcagtcgctgtaatagcaacccgtgggtttggttgaaaaatgtctgtctcatccttttcagcttgcgtaccttcattntccttgataggaagggagcaccaactgcaatgagcataagaattgtgccactgccaaccccaagcccaatgaatagacctaagtctcg

SEQ ID NO: 73712 - DNA, 401 bp, Oryza sativa
tactcaagcttctcgatgtaaggagttcaagatgggcataacttaagataatccatctgttccatctggtgcccgccgatgcaccaacaagatgtagatcttgtaagtctggactctctttttgacaccttgaagatctatatctcttgtaggtctcgacactcttcgtgagaccttgaatatgtagatcgccctctggggataggcccggaggagcccatatcgccccgagcactcctacggtagttcttgtggtctcgacactggtcttaagaccttgaagatgcagatattgtatggcttggtggggcctgtagtgccctatgcacccaagggggagggaaacccctgttccatttctcaacaactatcaagaactgtatgcgcacgatactgctggt

SEQ ID NO: 73713 - DNA, 409 bp, Oryza sativa
agcttcggctagaggcgtgagctctagcccccccgtcgagcgtggcgacggtcccctgaggtatctggaaatccagatcctcaccgtcttcaccatcatcggcggggcccttgtccttggcctcccctcgccggtcaccggttgaggtcgcggtggctttgccctcccgtcgaccctgccagtattcctcatcagcctttcagaaccgctcggccaaattcttgaccgagcggcagtcggcgagactgtggcggtaagtgttgtgtaccgagcaccacttatccgccgaccggccctcgccggagggaacagcggtgctcggcttatcgccggtggcctttcctttgcgcggagcccgcgtgggcccgtctgctgcaaggacatggtcctcgtcatcggagcgggctgg

SEQ ID NO: 73714 - DNA, 353 bp, Oryza sativa
  unsure (1)..(353): unsure at all n locations
actcaagctctgctaggtcatggccatagttcagagtcttcttataattgcttctctcatacactactctgnggatagtgatgttgcttggtatgataagattagctccttgcttgttattgtcataatgtggccactacctctcttttcacatacttttcccatgcaggtataccgttaatttagtcggattcttcgtggacaacaaactcccaggttatatgtttgtcaccattggtgccttacgcctttacatggatttggatggcaaacactttgtaacaagctcttgtgagatatttacagaaatgccggatcgtacaaatggagtacctttgcttccattgagtacc

SEQ ID NO: 73715 - DNA, 221 bp, Oryza sativa
agcaacgaccaacgaaataccaacgaggtgcaagcacacggttagtgatgctaccaagaagattcactttcattgaatcggacggcgcctttaccatgtggaccgaattcataagggggtcggcggccacacaagaggaagatggcgtcgatctcatgactggaggctcctcaacttcacgtgctaaggccgctatattgtggtgatgtggcgacgacact

SEQ ID NO: 73716 - DNA, 414 bp, Oryza sativa
agcttttagtcttgtaattactaagaattcctatggaaggtgggatgtgaccactgaacagattgttatccatatacagaatagtgagactcctaagttaccaatctccgagggaattgtcccataaattttgttttgcttgagccacaaccactcaagctgtggggcaagattaccaaccgagctatgcaaactttcttcgagactgttaccatccaagcataattttttcagttgggtgcagtttgcaagggatgagaggaagctccagtcacctgcttcaagatggttgtatgccagatcaagatctctcaagtttggcaataacccataggactgcactaccccggtgagcccactagcaacaagataaatcatttctagcttagacatattagcaagagaagctgggat

SEQ ID NO: 73717 - DNA, 448 bp, Oryza sativa
  unsure (1)..(448): unsure at all n locations
ntanagtccatagagaagaaccgaaaatatatactntgtaactgaataaataaaattgaaagtaacaaattgaatctcaaggaaaaaaaaccatcacgctagaaaccaaacaaaatatttaaggtccaaatagcttgtcaaaagcatgaatacaagagaacattcgaaaataaagaaatccagttgaaaccatatagttntaacaaaaggacgataagagaagcgtcaagggaaaaacctagaaacgtttcacatggaaacttgctatttcataaaagcttcaaggtgcaaaaaaaatgcatcggtccagctcataacaaagttatttgttttcaataaagagggagatccaactctacaactcaattataagttcaaaattaatagttgaaagtccaaatagcatgtcagaagcattaatacaatagaactttcgaaaataaagaaa

SEQ ID NO: 73718 - DNA, 420 bp, Oryza sativa
  unsure (1)..(420): unsure at all n locations
taccaacttcattctatcacgtcaccaatgggcttataagttttcatgagatgggatcaattgcagtctacagaacacagtacacactcggtcttctatatttcgctggacgatagcagttaagcatgtaccaagccatccatatacatgtgtcatgcaataaagtagcttggtctctaaacaaacaaatacagagaacatatcaccaatataactatcgtgaattaaaataacataatcatctctatcatgcaggtgcagcttgggcatgatgttggcttcagctataaatagacgcgtcgcactctccaatcagatgcacaaccacaagaccaaggaagcagnagcctttcagccctcttgctttagtttngtgatccccgacctaatctcattggagaacaagctatatagcatgga

SEQ ID NO: 73719 - DNA, 416 bp, Oryza sativa
agcttaatcttttgtaccaaatgagcatacagggccatactatccgactggttgtaatcttcgacatcaacgactctcgtcactcccaagatctcttgttctcctgatggaactattttctttcttcaaatttgtagggtctgtcacataaaacacctgcgccatgcgattgtcgagtacccaagggtcatccttgtgacccacatttctaaggtcaacaacagtaagaccaaactcgtcactatgacaccggttgggtatcttacccactggcacttaaatatggggaattgcactatgagtccatagtcaatttcgcagatttcttcaattaacccacatatgatagttcttctcctaaggaatcaatttcctccacacgtacacctgctgtattgagtgactgtcctactatc

SEQ ID NO: 73720 - DNA, 366 bp, Oryza sativa
ctggagcacttttgttcaatgattatgtggaaatcctagtacatcaccaggtaatccttattttcaatggtaatcctagtacatcaccaaaatggttggccgaaagttactaaccatccgattccaaagaatgggaaactgcaccaatgttgcatactttctattgaaaccaacatgtaaaagtgcaaatcgatatggaactgtggccgtgccatgacgattgtgtatccttaggcctcctatgacgtacacactgctcgataacatgtaatcaccttcggttgccttcacagaaatgacattattggagggttggtgctgaactgtaaatattggtgtgggtttcaccaagctcaataagaattc

SEQ ID NO: 73721 - DNA, 324 bp, Oryza sativa
  unsure (1)..(324): unsure at all n locations
acagacattatttctttcttttctattattnaagagaatcctggcctgttcactgaggaagggccccatgttttagccaaactatggcatttaaaaatccgtatatgcttaagtttggtgagggaatgctaaccctcttgatcagacagtcttacacatttcttaatgatcaaagtttcttaagatctgctataatgaataacaagggatgctaactcttgactgttagatattgcacatatagataacgaggtgaggttcttgagcatgaaatgttgctatcttattttgcacatgaataaccattacgtcatgtattaatgg

SEQ ID NO: 73722 - DNA, 468 bp, Oryza sativa
  unsure (1)..(468): unsure at all n locations
acatctacgtgacacaattaanaccactcanagtattatgttaaactgctgattctcttaagatagcacttggatatgtcactttgagcaccgtcaataatcaaggtacaattctgcattcctcttgacaggacataattcctaaactcaaatgcaattagaaaaataactataccaatgagaacacatgtactgtcatggttatggataccaaatacctaatagtagtngattatgcacggctggacccaccacatatcaagtcttatacggaattangcctcacttacagaaggtattccggataaggaaggacaagtaaagatctatatggaaactataaggactacttggattgtatccatattggtctccctagttctagttggataaagggacacctataggcatatatagactccctaggatgagagggagataagccacaagacatacatatcgacacac

SEQ ID NO: 73723 - DNA, 396 bp, Oryza sativa
  unsure (1)..(396): unsure at all n locations
agcttgttgggtcaatattgccatcctttggccgtctagtgaagcttcatgtgctggacttgggctttaacaatttttctgggccaattcctgatgagttatcaaatatgtcgagcttggaagtactggatttagctcacaatgatctcagtgggagcataccatcatctctaacgaagctgaactttctgtccaagtttgatgtttcgtacaacaatttgtctggagatgtcccggcaggaggccaattctccacgttcacagaagaggagttcgcgggcaatcctgcgctgtgtcgtagtcagagccagtcatgctacaagcgggcggtcacgactgatatgagttctgagacacgttntacttttgggctctttttgaccgtggaagctggat

SEQ ID NO: 73724 - DNA, 446 bp, Oryza sativa
  unsure (1)..(446): unsure at all n locations
tgcccgcatgtacaccgaacacgctcttatcggngttcagttttatgcgggcggagcggagactctcataagattccgctagatctgagagtaaagtctcttggttgcgcgtctttacaaccaagtcatcgacataagcctcaacattacgtcctatttggctacccaaagaaattcgagtagtacgttgaaaagtatgacctgcattctntaacccgaagggcattgtcgtataacaataggttcctatgggggtaatgaacgcagttttttcctcatcctccctagccatgcgaatctgttggtaaccagagtatgcatctagaagacacaaaaggtcgcaccccgctgtggagtcgacaatctgatctatgcgaggcatggggtaaggatccttatgacatgcctctgtaatgtccgtgtatttcatgcacatacgaagcttg

SEQ ID NO: 73725 - DNA, 429 bp, Oryza sativa
  unsure (1)..(429): unsure at all n locations
agctggtcttgtttttacctaattaagatttaactatggtagaactttcatgctcaaagtaagataaagtatggcaaacctatcaaattttcgtaagacaacaaatcaaataatttttaaaatcataccagaaactggtaactcaaagccaactagaatttgatagggtcttaaaccaaacatctatacaatatgttacagttaaaactggcattactaaaattcggtcagtttttttttcacgttgtttctcaaaataaaataaaaaaaagcatgctcataggttactcaatatttagtactcccatctgaacacatatttatctcataactaanaatggtcatattttgggacggaggtagtagctaacaacaaaaggatatactcccttcgccacataatattagggatgttagagggatgtgaca

SEQ ID NO: 73726 - DNA, 492 bp, Oryza sativa
  unsure (1)..(492): unsure at all n locations
catatacttgtacttacatacataccaacaaanataatgtataaccagatgtgcattcagtgatgggggcagtgtatgagtctagttctaactgtataagttgcctatangaataatagtaaacatgaacatcacaagaaaaattacctgcttggtggtcaatacaatcaccatcaccaagtccgttttgatctttgtactggatgaataaactctacataaactatcatgacacactgaatgagaacatgaataggaagagaggaaattcgttgtaccttgtacggggtggaacagagaggatgggggccagcttaccccaaccgccaaagaagatgcaacccaactgccaatgctgcatatgtctatgcaattaacccttttctccctatgatctatgacggttagttgatattcagtgacnaccagtgaattttaagcctcctgtatacttgcatagctattctactattcctaataaagctatataca

SEQ ID NO: 73727 - DNA, 362 bp, Oryza sativa
cactcgacccgggaccttagagcacctgcagcatgaagctgacttattttttttcatgacgacgccttggttggtgaccttacccatgggtcttcataacctatcgcaattgatctattcttgcacgactataggaaacattagtccaacaaatccgtggaccctccactgggaccaaccgtgctataaagaatgaatatgttatgagatcattaacatctagtgcatatctattgcagctcaggcaaatcgatttatataggacacatggatctaaacatgccataatgatagattgtccctatattgcatcaagaaatacaaaacatgttctaataaaaaacaggggtatctgacactaa

SEQ ID NO: 73728 - DNA, 481 bp, Oryza sativa
  unsure (1)..(481): unsure at all n locations
ctcagcttgaccaggaaaacaacatgccacttgtgcttctccttgtataatgtcgccggcgatgtcgctgtcgctgtaaccaatcagccgctgctcctctttctcccttttgtaatgaagtccgtactccatcgtgccagcgacatagcgtagaatgcgcttcacggccaccatgtgctcctcagttggccgctccatgaagcgactcacgaacccaacagcaaatgctatgtctggccgtgtgtgcacaagatagcgaaggctaccaaccagccgtcgatattntgttgcatcaacgggaggtgccgtgctatcacggctcagcttgagcctttcttccattggagtggcgcaggggttgcagtccttgaggccagccgactccacaatgcgctgagcatagcgcccctggttcagggagattacatcatctccttggttacctcattccaggtagaaagagagcagccaagacactcat

SEQ ID NO: 73729 - DNA, 117 bp, Oryza sativa
tacgcccgcctgcctcatgagactgtgaattataacatttgcgcatgaaccattcacggatgagtaccgatcgcgcggatagcccttgccctgcgatatattgccagggaaacgggc

SEQ ID NO: 73730 - DNA, 282 bp, Oryza sativa
  unsure (1)..(282): unsure at all n locations
aaaagaaattaacatctacgttcgattaaaaatgattaagcccaaaaaatgtgtagttagtaccggtggaaaaaaccacggtctaatgtaccaatttgtataatataaaatataatattacataatatacagaagtacatgcatgntaactagatctataatatagatatcaaatatcanatcaacggtctctaaatattatcttttaattattttaattggatatccaattatgatcatttattcanttaatatataaagaatgatgataaaagtatatat

SEQ ID NO: 73731 - DNA, 463 bp, Oryza sativa
gctctagataagtatatagattcaagattcagaccatattacgcttcttctcgattgatcaccacctctagcaaacactgtattattcaattgcaaagggaaaataatgaaaaagtccaaatacccctctaaactatggataaaagtccatctaccaccctaaactttaaaaccgggtatctaactccctgaactctgtaaaatcgttcatagtacccctaaggtggttctgcatatattgtaatcgtaaacgaacaacgtttaataaataatataacttaattgtataccatcaattgtaagtcatcaatttatacttatacagtgatagtgtgctattactatgtgggaactatgttctaagcgagagctaacaagttgattacaagatagactgaagtggagattctaatatatatgttcaaagtgtatgcacgtgaacaacatcttcaagttattacaa

SEQ ID NO: 73732 - DNA, 416 bp, Oryza sativa
  unsure (1)..(416): unsure at all n locations
agctngctgttcttttccatatccacaaactatatgatgggtgtgtttcttgaattaatccttgtcatctaactatctttgcagttcaactgatatctggagtgtcggatgcactgtaattgaaatggcaactggtaaaactccatggaatcaggaaattcaagaggtaaattttggcatcagcatttaacaagaaacttataaacatagcttattcttgacaatcactatttcaggtttctcttctgtattatgttgggacaacaaagtcacacccaccgataccagagcatctntccncagaagccaaggagttttctgtgaaatgcttacagaagtatgactacaatcacacttttgaatagatgttgatattgcagcacattgcaatgggacnataaaagttaaagttaact

SEQ ID NO: 73733 - DNA, 357 bp, Oryza sativa
  unsure (1)..(357): unsure at all n locations
agcttgccttctatcaagataaaatgttgtatagctatgtagggtataagacatcacagtaaaaagtatgtatgatataagacacgttgaatagtaactaacaacaaaattgcgaactttntgtaggacatacctcatcaagtattagaataggagagtttttcagaagagcacgagcaatagcaattctctgcaaaacaacaaaataattgtaaagtagtaatgataacaaacaatgaatgtattttctaaaacaaatccaacaatactggttttgtattgtgagtttatatattttaacatatacccagggacaatattttgaaaccttgagcatatggaccccaagtgaacata

SEQ ID NO: 73734 - DNA, 391 bp, Oryza sativa
  unsure (1)..(391): unsure at all n locations
ttcatcaaccacttctgcaccttcatgttgtgtntcagaatgttctatatacagtagcatggtgtgtgttgaaaaacagcagtagcaagcaagatgaacaatctatcttgactgaattgttggcgtcggtgccgagcttgacggcgagcccgcccctttggccaatgaagaagaggggatcggcaacaagctcgacagagaccgcacctttggccaagctcatgagaatacatgccggcggtgagcttgccctccttcgctgagctcgaggaagcatgcgagagctctggcctctgagtctccgacgagttctcctagaaaaatattggagggagaaggtatagganaggaggnggaaaggaagatagagagggagaggattgaagaagat

SEQ ID NO: 73735 - DNA, 207 bp, Oryza sativa
ggcaaacgcacacaaaccaacccggggcaagaacaaaaccactacgcgacatcacacacccccacggtcgcaacaagccactcctggcgaacgggacgaaagcaatcaacaacagggagcacacggacctagaaaagcaaggggaaactcgcctggagaagcccgaaaaaaacgagaacccgcaaagcggaagaaaaaccagacgag

SEQ ID NO: 73736 - DNA, 188 bp, Oryza sativa
  unsure (1)..(188): unsure at all n locations
agcttggttactacgttctatgntgggctccgtcaatggtttcagttgctagtgagttctggcgtgtgctgtgcagctgttcaaccagccggtggttgttttttcttttcttgtaacccgtctagggtttttacttctgcttattgaaaaattatttggcagtcttcttgccggttagtttcaaaaaa

SEQ ID NO: 73737 - DNA, 381 bp, Oryza sativa
tgacgccctctcggcctgcttgtctgagcgcactttatctggctccagaagaactccaccgagcagttgtagtcctgtgcatgtttgagtcacatatgtaatcaaaactttagaaaggtcctgcttgtcattcgatgtacggattgataactaaacgaacactggttagttgatacatagcccaaagttttttttttcagactttcaactgtccatcacatcagatctttcatacacacacaacttttcagtcacatcgtctctaatgttaaccaaattctaaactttgggccgaactaaacacagcctatctcaaatatatagcgtttaaattgccacctaaaagttagggccaagttgggtttgtgctatactaaaatc

SEQ ID NO: 73738 - DNA, 411 bp, Oryza sativa
tgcttattcctgtttacccgcgcaagaggacatcttctgctttcagctgcaggcacatataagagaaactaaatgttaaatgaacagcgaagtttcacaatttacaattccagatattgggaaataagttcttgtaaaaaccttttgaagccacttttttatgcgagtgtggtgtgcaagatcctctttgggccttttttgttgttcttaatgtcacatattgtctcgagcataaattccatctgcacagtaagatataacagataccaaactcaaaaactattggttacatgtaatgttccttaaatagccataaaacaggcaacctactcttttgctatgcatctctgcttgtccattatcttgaccagctgggtgcgctctcagtttcaactggtttacagagttctg

SEQ ID NO: 73739 - DNA, 358 bp, Oryza sativa
  unsure (1)..(358): unsure at all n locations
tcaactatntatcacanaggtggatgctcttaatgaaatcatatagtaatcctggaaacaaagaattcatgttntnttatgcatattattagctgcaagcttcttcaacaccaggtacctatcgatctcttgcgagatgcgccgcaagtttcgctcggcaccttcgagcgtctgcttgcggatgctgacactgagagcctcaatgcagacattatcgatgttgtgcgcctcgtcgaagacgacgacgcactccttctgcatctccctggacacaatgctggccaccttgggatcaatcaagtactggtagctgtagaccacgacattggcgtacttgaccatcttgctcgcgaggaag

SEQ ID NO: 73740 - DNA, 300 bp, Oryza sativa
tattcttctcttcatgaacaaccaaaatggtagagagacaaagaacatctcgactccaagctcgaaagatagacacaggagaccaatgatgccaatgaagaactctaaatctctgagagagagaacgaatatctctacacaaatcttgagacaaagagggacgagaacaagcgcctctatgaggataacaagaaattgcagcgaaaaatcaacgatctacaggaaatgcagaatgttttcggctggtgctaaacactcgatttggactgaaatggacagaagatatcggttagaaatttc

SEQ ID NO: 73741 - DNA, 373 bp, Oryza sativa
  unsure (1)..(373): unsure at all n locations
ttggagacttactgtagcaaggcgaaaggggaaaggggagaagatcaaccgttgttcctctcctccaatcctctctctcttcccagaggacacgggacacgaaattgtgtgggcctagagcagtagttttgacgaggaacaagtagcatantttggctttccgtgtttggtgaatcaaccaaatgtgctgatgtggaggggaatctacgagttggccggttgaggctgaatgatacctcagtgcactgtgaatggcctaacagcaaagagagaacatatgctacatgaaagagagaagcacgctagctatcgcacgctgcacgtgttgttacagtagaatagagactagagagtagagtatgagagcgttcga

SEQ ID NO: 73742 - DNA, 395 bp, Oryza sativa
  unsure (1)..(395): unsure at all n locations
tgcttcaatctcataannccagagacaaagcccagcatatgctccaagcttatataatactatcatgtagcttcagctaagttttctccattcagatgaagatttttacggtacaatctactggcagtatacaactagttttgttttctgaaggaaaaaaaaaaaacctactcctggaggctggaactatcaagattcagtctatgtctatctgcaggaagctagggttggtaatctgacttaagcgtacccaggttttaacagaattcgattgctctgaaatacattagtattaactggacaatgggatgacaaatctgctacctgctaatcagcatgtattaaacgtctaacagcgccgaatggcaaaaaagatcatgtgtctttctgtgata

SEQ ID NO: 73743 - DNA, 439 bp, Oryza sativa
  unsure (1)..(439): unsure at all n locations
ttcttcttttaatcgattacacactgtgtgatttggtcattttctntgnggngttaatttgacagggtctaagatcccatatagctctctgcatattcaaagatggctataccttcgcatagagctgccaagctgaattaaattaacaacctgaatagcaatttcttctgaaatttctctcacaacaaactaataattaagcttaagcaaatggaaaattggatcttgcttgtgtggcacaaacactcaagtatttgtttagtcaacatttgacaagacttgtttgtccaggccctatctaaaataatggcacaatcagtgtattgtttagacgtttctaatcctctaggctcagcaattatagtttaatctgaatatataactatttggtgggctggatgatgacatggtagagacaacaataatctatactagtaca

SEQ ID NO: 73744 - DNA, 423 bp, Oryza sativa
  unsure (1)..(423): unsure at all n locations
agcttgaacctttgctcgttccgagtaaaggatgaatggaacaaagacttggttgttgattaggagtttctactatgttgtatatctcaaaggtacaagtgcaaggtatatatactctgtctctgattaaataatctttggcacggtggcttacccttacccctgattcccacgagacactgcttctcctttccttngggcggtgaaagatagaacagcaactagagcacaaatcacccaatctttattcaacttttattccagaagttttcaaatgattttgcaaaagaaagccaagttcctcatatgattaactcagtctctccaagtgtatcaatatgaattcctcaccatttttgcccttttgaattctactctaaggttngatatgtggagctcggtagggatcanacatggcatact

SEQ ID NO: 73745 - DNA, 347 bp, Oryza sativa
  unsure (1)..(347): unsure at all n locations
atggttgaagcactgcacaatattctctctgtattggtctagatgcatttgcactagaacttcctctagtggtgttcatagttgatggatttctaataaaaaacttgtccattatctntcctataaaatcatgagaaggttgattagatagagcacatgaggagggagacctatggctagggatccatccactataactattcacagggaagaggagtacttaccatggatggaggcagagatgacagcgagcagagcaccgctcatgtgctgacgatgaagagcgatcgatgaatgaacgaagtatcgatggcggtgaagatgaaccaatgcggcggaagcgcgat

SEQ ID NO: 73746 - DNA, 162 bp, Oryza sativa
gctggattatatttattgtgggaataccaagctcacaagtcacaggtcaaaccggggagtgacgcgatctccaactccaacccgtcgttctctcgcgccggcaccgtgaatgcctgaagcgagggcaaccggtgtgtggactgtggagtgggaagtgtgtgg

SEQ ID NO: 73747 - DNA, 389 bp, Oryza sativa
  unsure (1)..(389): unsure at all n locations
tcaagatgggcattcaagacttgtacagaaaaaatattatggatactcaagacttgtacagaaaaaaaaattatatggatgctcaagacttgtccacaanatcaatgctaccttggaagccacattgaggaaaaaaaaagaaagagagaaattcaattgagacaaaggaggcaaatggcaatattgaacccatgacgtgtagattgagtgatccatttactaaccaacaatataatcttagcttgttgcacaacatggaaaatattttttggtattgacatgcatgaacatccatgaatgaatgacgatgtgcatccgccactccatcagcaagtagctgataatatagcagtcttggagaatacaagatcccataatttggtgttctt

SEQ ID NO: 73748 - DNA, 345 bp, Oryza sativa
  unsure (1)..(345): unsure at all n locations
actcagctggatgtctccacgtggtgtcccacggctggtgtttcttgtttgttatgtcgngtgggtaaagtgtaccccctctgcagatgtttactaactgttcgataagccttgcccacgttcattggcggatgtgaggagattcctagcgtagttatatttgactactgcgtgtgaaatagctgttgtggaatagggttcgatgtatggataatctgctactagttgggatcagctacacccttgtggtcgtttggaatttgttggcccaggtggtcgtttgaaatgcctgttgccaggtgccaaccttgtttataatctaatgactatacattggtcatctcc

SEQ ID NO: 73749 - DNA, 395 bp, Oryza sativa
agcttcgcatttatctttatcgacggtggcagcgcactcaatatcctcttcgccaagaccttggatgatatgcagattcctcgctctgagctaaaaccaagcaatgcgccttttcacggagtaattccaggattatccgcaactccactcggccagatcactctcccgatcacttttggcactcgggaaaactttcgcacagagaatatcagctttgaagtcgccgatttcgagacagcataccatgccatactcggacgcccggcgttagccaaattcatggccgtcccgcactacacttacatgatgatgaagatgcctggtccccgaggagtcctatccctacggagcgacatcaagcaagccgtcacatgcgacaaggagaagtgcgacat

SEQ ID NO: 73750 - DNA, 434 bp, Oryza sativa
tgtgcgctggcatgccgaagaacggaaagtcgatactatgctgttgcacctatcatattcagggcagtggaggacaatcgataggatttaccaggaattctcaaatgacccaagaaacatgcgtttcgcaatgtgtacggacggcattaatccttttggtgatttgagcagtcgtcacagtacatggccagttctgcttgttaactataaccttcctccctggttgtgtttcaaaagagagtacattatgcttgccatgctcattcaaggaccgagacaacctggcaacgatatcgatgtgttccttgaaccgataatcgatgacttcgaaaggctatggaatgagggcacacgaacatgggacgcatatgcacaagagtatttcaacctccatgcgatagctgtttgtaccatcaacgattatccggcccttg

SEQ ID NO: 73751 - DNA, 168 bp, Oryza sativa
agctgtgcttttttgttgtttgaacactgaagaccaaattattagcgtgcgtaaggaaaactcgccgtaaaaattgcaacttgtggctttcttcaagctcgtctgtgatctttaatggatagaagcgcgcgcccaagagcatcctattcgtatcaactatctttaccc

SEQ ID NO: 73752 - DNA, 333 bp, Oryza sativa
tcgacatctgccttgctctcacgtacttgcagcagcaagtgttttctgctttcttcccgacgagtacgtgtgaccttatttcaagatagaagcaatctctcatacttggagtgaggagatatatgggttctggatctcaagatctaacacaactcatatgtcccaaggttttttcattcccgatccatcaaagttaatggtgaaaaatgggcggcgtcggactagacgcatcagatatgacatggacgagtcggaagctggtgggaggactctacgctgcagcaagtgtgaccaacgccgtcgtacttacaagaaatgccttgagactgcaca

SEQ ID NO: 73753 - DNA, 366 bp, Oryza sativa
  unsure (1)..(366): unsure at all n locations
agcttattttttcgtcccgccgcgacagacagacagacccgcatctgaaaacaactgttgagagctcatcatgacagacggcgcaaaaatttgaacagtgaacaatttggaagatagcaatattataattcgatatcatgcgatatagtctgatcatagattgttttttgtctgcattgttatcatagaacggnggctgattgggaagcttctggcgtggaacatggatatgctattttctccagttctttaacatttcagatgtactagataatagatatattgtcagtgcactttccggtcgtaaaagaaacatttgatcgctctaaacatctaaaacattcacctgacctccaatttaaaaaa

SEQ ID NO: 73754 - DNA, 380 bp, Oryza sativa
  unsure (1)..(380): unsure at all n locations
ttgccatgctnggttgcaggctgccgaaactatggcgtcattctttatgctagctatagcctagccacctctggaatctttcagaagcaagcaaccaaagcattcaattcgaaaaaataaacaaaaattcgatacatttcacaggcagcgtgtacaaaaaacctcttgcaagccgaccgatcgctgcgtgtcatcgattgtttgaaaaccataactcaaactttgtacaaattcttctttttctcggtccattccacgcgcaagtggcaaaaggagaaaactaaattaaccaaaaaaagtgaaagcaaacaccctacgagaagaaaatatttacagataggtccgtccatccatccgtgcgttcccgattcctctagcgc

SEQ ID NO: 73755 - DNA, 410 bp, Oryza sativa
  unsure (1)..(410): unsure at all n locations
agtttcgttttcatgtcgtacgccgccgccggcggatgcccgcgaggttagtcgcggccgctgcttgcatctgtgagcttcgtttccggcccaagccatccgcaagcttcgtcgccgcgatgtcatcatgcgtcagccttgtccatgaagttcgtcgtccccgttgccggttgtccgtgaagtacgttcgttgcaccaccggcagtcactggcatggttaatgggtaatttggttcaatctattcttaattatatgcttacgcgttagttctaccattttcgaggttgagtgtaagcaatttctcttggtggtgaagacctcatgatgagagttcctcgttgatcctcctactgatncaattgaagatcacacaatcacggcacaatgcttcatcaaatccaagaacatg

SEQ ID NO: 73756 - DNA, 360 bp, Oryza sativa
  unsure (1)..(360): unsure at all n locations
gagagggggcccagaccaacaacaggttaggtcccataccatactgtgctatgaagcccgagggtcctcctcgacaccaccccggcgaatccacatgtctctcggcatcaaggctcccctgataagctagttactcagccaggggtgttccattccacccatgtggtcgtacttgtcttatgttcggatgaaattctaacgaaacggttcttaagtgcaagagcgagaaaccgtacacccggtacgttccccggtccgcggntttgaaaaaattcatatatttcgcaagcaccgacccaggtgttgggttttcaagtctcttgtaagaccaagtttaccaagaagttttttttctattta

SEQ ID NO: 73757 - DNA, 384 bp, Oryza sativa
agctttattttctctcttaattggttactctgtacatatacaagcatattggtacatgggtctcttgggccacaacacacatacaacctttatgaaatggtacaagattccatggttttgtctttttaagagcctctagttcatctagcatagcttgatgccaccttggatcttgttttgcttctctccaatcgtttggactttgcattggatctagtgatgctacaaagggcctatatgtagatgataaagagtcataagaaacatagttggatatgttattctcatcatcacccttatcttgagcttcaaaaccataccttagtggaggtttccctgtattgcttctacaccctttctgacggatattggtaagtaaattct

SEQ ID NO: 73758 - DNA, 371 bp, Oryza sativa
  unsure (1)..(371): unsure at all n locations
tgcccgcaggtacaccaaacacacacttattgtgtgttagttttatcgggcagagcggaggttctcaaaagtttccgctagatctgaaagtaaagtatcttggttgcgcgtatttacaaccaaggcatcgacataagcctcaacattacgtcctatttggctacccaaagaaattcgagtagtacgttgaatagtatgacctgcattctttaacccgaagggcattgatgtataacaataggttcctacggnggtaatgaacgcagtgttttcctcatcctccctagccatgcgaatctgatggtaaccagagtatgcatctagaaaacacaaaaggtcgcaccccgcagtggagtcgacgatctgatcta

SEQ ID NO: 73759 - DNA, 401 bp, Oryza sativa
agcttgcagtgtattcatggccagagtggtatgtttgcatggagttcccaagaagatagtgtcagatagaggtagtcagtttacctcaaaattctggcagaaactacaagtagagatgggtacccgtttgaatttcagtaccgcttatcaccctcaaacagatggtcagaccgagagagtaaatcaaattttataagacatgttgagagcctgtgttctagattttggtggaagttgggataagaatttgccatacgcggaattcccatataacaacatgtatcaagctagtttgcaaatggctccgtatgaagcattatatggccgaaagtgtcgtacgccgctcctgtgggatcaaaccggtgagcatcaagtttttgggacagacatattgcgagagc

SEQ ID NO: 73760 - DNA, 438 bp, Oryza sativa
  unsure (1)..(438): unsure at all n locations
acacataaaactcagctntctnttagaacgccattagagacgcatgataggtaacgtttgatattcgtcacacgaatgtcatagatttcacaacatggtgaatcatctatatatgggcctatttgtcgtctaaatacctgcaaacaaccttggtgaatcatctctttgatcgtaaattatattntcaaagagacaaagaaagagagagagagggagttaaagtccaatcttgtcacaccctgaanatcccaaatatataaattgttggttaattagaattattagaaataattttaaaagcctagaagagaagatctaattttaaataaanaattccaatataagagtgggccagataacattttattaaatacttctcttgatctatagtgctagattttcagggatttattgagccaagaactagtttaataatgg

SEQ ID NO: 73761 - DNA, 413 bp, Oryza sativa
ttcttataattattcacattaaacggagtaagacaaaatactttgatcggcctttctagtaggcccagactagaatgatgtagaccgatttaaagatacgttgaaagttgtatatgaaattcggatcttcttttaaaaagtattgtacatataataagctaagagttgcatatggaaaaataaaaaaatcaaatccaattatttaaaaatatagctccacacaaaattgcacgggaaatccactaattacaatgcacagtagctagtgaattataaaagaacgatacagtgcttctctcacaaattcttacaatccaataacgtgcagatgaagggtgacaatcacgcatgggctggagttcagaattcaaaaagttttctttcgcgtaaaatgcatattatgcatatatttg

SEQ ID NO: 73762 - DNA, 364 bp, Oryza sativa
  unsure (1)..(364): unsure at all n locations
atctttgggtcatggttatactntaatgcatgcttgntattntatagatggattcatcttctttttattgcaacacatgacatgatatgctatatgtatgttaagctcttatactttaataaacataattcctatgcttgatgaaatcattgtcaaaagggggagaagagataagttttggggagaagagatcgagtttgggagaagaaaagagtttttgagaagagcacgtttttgattcaattgggaatttctttcttttaaaaagggggagaagttttcttttgaatttttgagcacgatgtgtacatttgtacgaagtgtgctgntnnttattttccaacacaccaaaacattttaatgg

SEQ ID NO: 73763 - DNA, 412 bp, Oryza sativa
  unsure (1)..(412): unsure at all n locations
agcttgtggacgatggctgnggttatacttgtcaatattcatctggccatggatatccaacgttgggtgcttataacccatcttgctgtatggggctctatagctgcaacatttttgtgcatggtgttaatagattctattccaatattccctaactatgggtaaagttttcccagnggcctccctcaaaccatcatatatatatatttctaaatgacaacatttgaagtctatcatcttattactggcaggacaatatacaatatggctgcttcaagaacttattggcttagtgtttgccttataatagtcctaggcttgcttcctcggnttctttgcaaagtaatctatcagaccttntggccatctgatattcanatagcaagagaagctgagttattaaaaaagctac

SEQ ID NO: 73764 - DNA, 489 bp, Oryza sativa
  unsure (1)..(489): unsure at all n locations
tctgagcaccatagcgaanagcagtccgaatacgattaattctggctgcacaaaagtaaaatgtctacataaacttagtagaagtgaaataatgtacagaagacccctactatgtgcaagttcaaccgcatgctgattatggtttatatgcacataggaagcatctcagcacatgctatgatatgcatgcccatacatctttgtagaaattcttttgaaatataatttagaggaagaaaacagacaggtgcctttagtttcagacctttgttcacacttctgccaagattggtgtgttcctttagtggatcaattatgttcagatattctgaacggaactcagtattgcatgcattagaatcttgtttttgcaccgaggtatagatgaactctttgtcaaacagcaaatcactggcangtgtatttagtgcttcgacttgaagacatacaaagtttatggtaaaacagaataatgtatagttggtacag

SEQ ID NO: 73765 - DNA, 400 bp, Oryza sativa
  unsure (1)..(400): unsure at all n locations
agcttgtcttattatttttgttgcgcactgaacgattgagaaattcttttcttgttagaaatataatacaaacgcagacatccacaatgcgcgtacactcacccctatgagcacgcgcgtataacctacctctaagcacttctggaagattggattagcatatcttgagattaacanagtcaccacgaaccggcgcctcattgtcgcctattactgatagaacaattagccataaatacgagcacccgtggtaaatctaaaatttaactctggtgagctaagttcaccacaagaaacctaaccagttaagatacgctcacttcgtgaaaactaaataaatttgtgcgtcgtggatatagtttcacctaaaatattgtttctttgagcggaatttgtcata

SEQ ID NO: 73766 - DNA, 464 bp, Oryza sativa
  unsure (1)..(464): unsure at all n locations
ttactgnngccgtcttgngaacatgataatgattctacacactatggtttgagtaataaatacactttggtgcataatgtgaagaaaattactttgctacctctgacccctgctggagattgtaaagctgataaagagcgagctgcttgtttgaaacttgatgaatctgaaaatcaacaagatggctaaatcttgttttacacctataaaggataagctttcacctagttctaaggctgagggaattaaattgaagggtggtgttatgcttgcaacgaaatgtgacattgctgaatttcagatgatgatatgtgctatttcttgatatgcatacaagccttggtttcttagatacattgctagttcgatacctttggaagatcggaaccctatacacatcatatagtatgaatatctttaatgtgtcaaattactaccatttccgagatatatacatgtttcaa

SEQ ID NO: 73767 - DNA, 423 bp, Oryza sativa
  unsure (1)..(423): unsure at all n locations
agcttaatagtttgttttttgcaacacaaattaaaatgaaagtgggtgaaatcttcaaggcattcttctatccgtgtcacttccaagggtgaccaggccagatggagctcaagcaattgctgccaccacccccaccttccttgcaccacctaagctactcatcagaggtccagacggctgcaagataacaaaggtgggactatnttcttctcccctcatgtgcactaaagtggtcacggtgaggtgttcgagacgagcggtggtcatggcagtgcctagatccatgcctctgtagctagatatagggtatttccttagtggagactatgaagaactatgtatgtacccaacgaatggcatagtttcttttattntattcaatggtcccatttagttgattacatggcccaattacataccatg

SEQ ID NO: 73768 - DNA, 415 bp, Oryza sativa
tactgatgctatctctcagaggagaccagctaagcgggatgatctccactcagatcacatcaatgaacaacctccaagaactcaatctctccaacaacaccttgtctggcgccatcccagcagaaatcactggattaacaagtctagttaagctgaatcttgctaacaatcaacttgtcagtcctattccaaggaccatcggtagcctaaaccagttacaagatgtggtattgtcccaaaactcgttgtcttcaacaataccaattagattggggcatcttcagaaacttattgagcttgatttatcacagaactctatgagtgggtctctacctgctgatgttggaaaactgacagcgattactaagatggatctatcaagaaaccagctatcaggtgagataccactttcttt

SEQ ID NO: 73769 - DNA, 407 bp, Oryza sativa
  unsure (1)..(407): unsure at all n locations
agctttggataagaagtcctaaatggactcctagcctataccccagttgagcgcctgtgaagatggagcccgtagcccgctaattcgctgctggtatatttttgattgtcatgccctaagagtctttgtaataatgtaaatattatcgatataataaagatgtgccttttgaatcatgtttggtggtgtacctcggcttttcctgggagcgggaataatacactaccgtttgggaaaaggtaattnttccggtcgcgacatggccagagtaaaactattcgaatattcggcccgcggtatgggcgggtctaaattgtttagttcataccttcaccaattaatgatgatgataataacttgttagctcctggtttgaatggatattcctggtcgaggtaaactgtgac

SEQ ID NO: 73770 - DNA, 376 bp, Oryza sativa
  unsure (1)..(376): unsure at all n locations
ctcaagctataagggatattagaatnccttgataacaacaacaatatttacatttcttctttctatcctacagccagagatgttggcggcatctcagcattctttgagattcctatctcaagttattctaaatagtggcgttagcgcattagcgtttctacaaaaaggtttcttggaagttttattattgctgtctagcatattttgaagcacatatatggaaagatatttcggaatgagcgaccttcctttgaaggctggagaattttgttcaagaaagttcttctgcactatatgtgcaaaatgaaagatcctcttaagaaaatagatttttattgattataacctgttgaatcttttcagtgctctccttgta

SEQ ID NO: 73771 - DNA, 402 bp, Oryza sativa
  unsure (1)..(402): unsure at all n locations
agcttctacactggaagctggcttcccacaaagatttcattcaaataaactcctacattagactatgctttcttctcctagaaaagttcttggcaaaaaggaaaatgagaaaaggagggaaaggcatggctatgaaagaaaagagagaaaaggaaataaaacttgctctcaaaatatttgagcatgatgaaaagaaaatatagccatgccccttgcatattcatgccaagaaaacaaaatggaggagaaggtatagganaaaggggagaaatcattctttattccatcattccacanaatattntacttttccattttccaccacanataaagaccctngatctangagtatgactgatgatcttcttgagtccatatttttggcttcgcgatatatatgat

SEQ ID NO: 73772 - DNA, 379 bp, Oryza sativa
  unsure (1)..(379): unsure at all n locations
ctaagcttncttagcaactcaaccaaccccactacatttcaagtactatcccatcttctcatccggaggggaatacaagtcatggtgcgcctaattggttgccaccaattcagccgggcctgggagtttcgccgtggaatcaaggaccgcaattcgacttcgtcaacgctgctcatgcaccgaccgttcgacagcaagctccaactccagtcttcggaacaaaccatgcaccaatccaagctgccatgatgtggtcgcagccaatttttgactcatccatggcggctcagcaagtacctccagttggagccgggcagtcgaatgccacggcccaacctcacgcacaagctgcgattttgcccttcgccacaccgtaccc

SEQ ID NO: 73773 - DNA, 369 bp, Oryza sativa
agctttactcttagcttttaacccatgagaaggaagttctccatcggaaaggcctcaaacactcgatggctttggtagctgatccctctggaagtacttcttctaatgactcaacttttgtgtgtggtggcttctctcttgccgctctacactcagtcactgaggagcaattacagaagatcccttgagatatcttgctcttttagctagaaaaatctcaagagcttactataatgtgagagagagagaaaggagaaaaaccaatgaaccatctgtgtgttttgagtgtggagagcctaaccacataagagtgaattgtcccaagttgaagaagaagagatgcaagacgaccaataagcccgatggaca

SEQ ID NO: 73774 - DNA, 249 bp, Oryza sativa
  unsure (1)..(249): unsure at all n locations
gaaaccagagaagctgtgcaaacttgcagactctcantcacatccacaggatgagcatcccatggcttgggacaaatatgggcttaaattgcacttacgcgcccgccattagccgtactaatgcttgcgtattatgcagaacactcccttctcctaatgccagcgcgcacacccgcctgctcgttattatcgtcccatccgcgagtcgcgcctattcgtttctgccgttccatccacgagtcgcacgtg

SEQ ID NO: 73775 - DNA, 412 bp, Oryza sativa
gtcttgtctttttttaaaaaagaacatagcaatcatagaaaaatcctgccagaactgcaaatcataacaagcatacaatgagacctcacgtattctatggattttcaatgataagattaaactatttatcagaaacattgctaatcctggagaattagactactcagagctattaaagtaaatcgacgaatgacaatccacaagcacttaacgagaaaatggactgttataaagacaacaaggaaagataattgccagtgctctcttacagcacacaaaaccatgatcagagtcattcatcaagtaagtaaagatgaataaagcgtcacatcaatccaccaaggaaagaaagatcgccaaagcattcaagtactgccaagccattttccaagcgagaatatgtcatgccaaa

SEQ ID NO: 73776 - DNA, 275 bp, Oryza sativa
agcttaactattgttgcttagtgtgagagcacgactatgcccaccagcccaccatgagctcaatggcaacaacttgagctcaaggaaggctcgcttgaggaagaacatataagccaagaaatagaaaaggagaatgaatgacagaataaaaagaagaaaaaagggtaaaataaagcgtgtgtgtgccatacttgttatgccgcatttagtatcccccatattcgcaactgtgcatcacatcatatcacataaagaacttttctacacacaataac

SEQ ID NO: 73777 - DNA, 255 bp, Oryza sativa
ggcaacccctgagagccatgcagcgccaccccgaacgcatacccccaacaaggtggacacctccaacacccgcgcggcaacagacgctgcggggaagaagacccccacaactccgcagccggagaggccacccctgctcacgaagagaggagctcccgccaaggcgaaggccccgagagaagctgggcgcccaccaacgacaccgtaggcgaccaacgcctactcggcgacaacgggagaagccagagagatcga

SEQ ID NO: 73778 - DNA, 258 bp, Oryza sativa
  unsure (1)..(258): unsure at all n locations
agcttcttttattggtgcacaatgtgccattgcaattcaacaagaacaaaagtgttctaacgatgaaatngatttcactgcatgattacctgcacanacaccccatcgcagtagatatctccgacgcatctaccataccggtcctcatcatacacatagaccttcaagctctttccttgcacattttcagaagcgcttcttttgcctcttgccgtacggcatggcgctctccggcgcataatccccctgcatttcatt

SEQ ID NO: 73779 - DNA, 470 bp, Oryza sativa
  unsure (1)..(470): unsure at all n locations
cttggctatgtcgaaacgaagaggcgngngggttatatactgtatgccatgnactaacgngcggacatgtagatggaaattaactgtcttgattctggatgaagatcacattttatttcttgttattcgattctgacaatatataatgattagcccgcgaaagaaatgctagcatgtaatcattgatctgtaaggcaatttgaatagaagaaatcgcatgctcatgatctgcctggtgattagttaagagttcgtagtattcatgaggaagatacgcacgtttgtcggaacgtgcagtccttaacggcactgaaataccangttctccaccctggcagatgaattntgccgatagagctacaatatttatgtcagtactctgaanaggagtanggcatgtcaatttctactcctaccgtcccatatanaacgaatttatgacgggatgttcatattctatatgatgatct

SEQ ID NO: 73780 - DNA, 228 bp, Oryza sativa
  unsure (1)..(228): unsure at all n locations
agcttaaatctctgcatgcacaataataagctgagtgaataaaanaaatcctttttttttttgccgggaactgacagaatgccatcgacggtggaagaagaaccaaccacccaaggaaaaactacccccaacctctataggaggctactcggcattagttgtaaacagccctgcttcctttcaaaatgtatttcttcttgatcttctcaataaaaaaaatgatttatt

SEQ ID NO: 73781 - DNA, 378 bp, Oryza sativa
acggacctaaaaactcaacttcgataactgctctatggaccttgtggtttttggttttgaagcaactgtttatgtaagatccgtcgtatcaagtccgagctgcttatcttattgtaagcctgataaacaatcgataaataaagcatgtgacaacaacaaacgatgtctaacaaacataaatgtgcttatggatgtcgctcatcatcttctagctacgccttgacgaagagggtgtactccacgatggtctcgccggacttgaaaccggagtctacggtgcgggcctcagcgtaccccctcgccatgcggaacttgccggagccgccgacgacgctcatcttcctcaccggcgacatcaccttgttccgccccatgatc

SEQ ID NO: 73782 - DNA, 334 bp, Oryza sativa
  unsure (1)..(334): unsure at all n locations
atcactcgncccgggatccttagagcacctgcagatgcaactggtttttattaaagaaatccactcgcccttggatttaatcactagttaagaatattgctgctctttaaatgctttgaacataagaggtgtaccaatgcaaaggatatatggggtgctaatgtgctgattgcattgtactgccccaaatctgcgagtatgctaagtatcaccgttacgcgccagttaccagagacatgacagaaacaagggagtgaatatcctattccaatagaacaatggcgacaccacactaactactagtgcaactaaacctaaatggcgccaaaccgac

SEQ ID NO: 73783 - DNA, 436 bp, Oryza sativa
tactaagcttcttcgcggcacctcggtgcccgcgtgccctcttctgtccttcttatggttgacttccactagcctcctcctcctggtgtccctgcacatacctttccacgtgcccctcctggttcccctccgcattcctctccacgttcccttcctacgtcaaatactggtttggatcctcgttcccctcttcttcgttccaatactggctgcttccctccgcgaatgtatcgtacaaaatctgatcctcatcgcgatcagccatctgttcatacaggaaacatctgctaagtcatgagacatttatgtgttaacaatcctatagtaagactcagatacatacggcatgatttaaaattaataaaaagtggaatcatcatatatacttagcataggattatattaaattaattgggtaaaactctattaacatatg

SEQ ID NO: 73784 - DNA, 437 bp, Oryza sativa
  unsure (1)..(437): unsure at all n locations
gcattgcaagctttttatctttttgctagaannactcttctcttatacatattatgcgtatctggaaatatatttctcgagctatatagtaatgtcaactcttatattatagttcatgcttatacctgattatgctcgctactcatctggcgagatgcnatcagtatccggtattagtgtttgcttatgcaattactctatgtcataacgatgatattagagtagtatctggtagtttaggcgtggtgtctagactacgggatatcattatttggggttatatgctgtggatgagaggtgggccgctgatggtgacagctcattacgggtattcctccgcacgtgtatatagtcctaagttaatttcctgtggagggtactactccgtatttatccacggttgtatggtcatgatgggctgtcgtaaggaactcggc

SEQ ID NO: 73785 - DNA, 393 bp, Oryza sativa
gagcacccagtagagttttgttatctgcgaggacaatatacgaattggctaaatggaataatatccaactctactcgagccaaaccagactttctcgtccttatagataagcacatacaaaatattatatcatcatcaaatatccagcgatatctacttgcgtgttgcacgtacctataagaataagtcagtagatgttgtttgtaccacctttagtcatcacctactatattattgatgcactagtcatcaatatcatcatgtcgatatgcgaccaaccaaccaaattcaacatgcctactaacttaagttataaaagtaataaatataggttgcgatacctctctctgtgttatattacacatggtgtttaggctagtccacatatacata

SEQ ID NO: 73786 - DNA, 405 bp, Oryza sativa
  unsure (1)..(405): unsure at all n locations
agctttatatatgatggatgcgtatagatntcccgttgtcgagactacgctggccggcggcggcgcccacggaactgctagttccattgacgctgccggccggcgccagcaccagcgagagagacatggattaattggttgttcacggcgcatgagcgcagtggcgtagcggactcgacgtcctcgatgtgctgctcgtatagtggcacgatgcgcacctcttcggccgcagtgtgatactacgagagaagcgccaacgcgatcgagatatagctcgcgactcgtgcatgtacgtaatgtgggaggaagtcggaatatgaagtcgtgatatcccgttttgatgaatcccgggcttagcagctctcataccatatacctctgggtataaccatggttccatccttc

SEQ ID NO: 73787 - DNA, 451 bp, Oryza sativa
  unsure (1)..(451): unsure at all n locations
ntgccgtgacgcgtctcatgtgttgtgacgaggctcatgtgttgggcagtcgcggagtgtgggtaaagtgtacatccactgcagtgtgagtaaaccaaatctattcgaatagccgtgctcgcggttactgagcaccgggacgtgtattacacttggttagactctaaattcttaacttgtgtgggatgggatattgcatgatgatttttatgctggtggagccatttcctgtgaggcgggaaggtggacgtcctcagaaaaccatgacgactcaatggcgggaagctatccttgggattacaatggatggtggacagaaccatcgttatttaaatgtgaacactggtactaatatttgatcagtcaatgctaggtcttaggcttatgataagaatacaaaactgactttgcgcaagaaacatatgcatcctttgatacccctatatgtgca

SEQ ID NO: 73788 - DNA, 420 bp, Oryza sativa
  unsure (1)..(420): unsure at all n locations
agcttntatgaaaatcttcgttcatatttggctgcattttattgatttgctgaaaatcataattcccttgtaccgaacgatattttggtttctccattgacgtttcatttttcatccataagtttatgttttgtacgtttagttggattcttttattttcaaacgttcctcttgcatcgattcttctaatatcccttttggagtttccaaaattntcggttatcaccattcatcttccttaagttggtttgaactttgatatctagtttataaaaactttactttggtttctcgcgtgacgttgctttttcatcattgagtttcaacctggtacttntagttggatctcttcaattattaaagttatctttttcgaacttctctttggacttgaaatctttattntagttctgaaatctc

SEQ ID NO: 73789 - DNA, 417 bp, Oryza sativa
attgaaagaagaagacctattcatgttgtgtctctatttcaaccaaatgtttgtccatacctgtttcgcgagagggcaatccatgaagagatgtgtcgctgtttctgggtctgtcccacagagggagcaagttggactgttgtcccaacctttgatttggagtttgtcatacgtgagaacttctctttggaccatgagccatccaaagaacttgcatttgtcttctgtgtttgctcgccgaatgaagttaacacgattgtcctgaatgctcccagtgaattgaattttgtacgccgagttggctgagtagattccattcgcattccatttccacattaggttgctctccctgttttcataccgttgtacctcgttgatcaagtgccagagcaagataaatctctaacctctgtcgtc

SEQ ID NO: 73790 - DNA, 415 bp, Oryza sativa
gcttaaattttctttttgtgactgcgatgcattcttgtttactgaaaagttagagcttgatcttctgatgcgtttgatttgtgctttattgacaaggctttcactatgtaatgaaaaagcatatgattggcatgtttatgaaattacaggctgtatgcatttttacccaacaaatgcggacactctaacaagtaaacgacactctagagtagaaaatgagtagctctttctcatacagcgtggcatgctaacaataacaagcacacacattagagctcttataagaactttctccataccacttggaattataaatcgaagaacatacccataacgttctcatcggagttactttatctgcagtactcagagcatgttatgatcaggtttggttattgtgctgctctgtgaaatg

SEQ ID NO: 73791 - DNA, 479 bp, Oryza sativa
  unsure (1)..(479): unsure at all n locations
gcttcttctgaacacncacttgcaccccacaggtatacacccatatggtcgctctgtcacctcccaagacccgatagcgataatggaatccatttcgctacagatagcctccttccagtagtctgcatcaagagatgcatatgcttctgaaattgacttatgagtgtcatccacgaggtacacagtgaaatcatcaccaaaagacttatccgtcctttgtctcttactccttcgatgagcttcactgacatcctcctcagagacaagttcatgtgtatgttcagtttgttctgatggtgtgattgaactgggaattatttcatagggttggttcgaaccactatgtgtatccttcattgtgaaaaagctctcaaagaaggtagcatcacgagactccataattgtaccaacatgcatgtctggtacctcggatataactatcagaaatctataggcaatgctttgatgagcaatatcca

SEQ ID NO: 73792 - DNA, 422 bp, Oryza sativa
  unsure (1)..(422): unsure at all n locations
agcctatagaatgtattttgtaattaggggatgtntaatactacaaattagtgtccaaacatccgatgtgacagggacttaaaataagtccctggaaaccaaacagcccctagttgcacttggttcacatctggagcatcatcaagatcttatacattctccaacacagagcgcattttatgccggagcacttttctctagcgagcaataatagtgcaagtagtataaaaagttgggaaactattttaagccatcaaggatgtttcttgtattcagtataaataattaataaaaaaacataaaaaataattactgtagataaatcgataagtgtgttaaatgttctacacaaacctgaactattcaaatttatctacaaataaaaggaaaaaacatcacatttgattatgaaaagtagagtc

SEQ ID NO: 73793 - DNA, 404 bp, Oryza sativa
  unsure (1)..(404): unsure at all n locations
gctgagcgtagagattttcctccaaatcagctgacgccgagcggagctgatttgttgtttttatncagggactcccttctgtcaaattatttgagggtgattatccgagttcaattttctcgacgtcgactatttttctctatagtgagtataacactatccatccccaaaagaatgtatttttagcaattaacatggacaactagaacctaaataatgaatattatccaaattcatagctaaaatagtattgtctatctacttgtttgaacctagatacctaattatatcttggttgaacctagacactattcatagtaaaaaaaacattcttttagggcggagggagtacctttntaaactatgctatcaattataggagaatgctagtatatgtgtacaat

SEQ ID NO: 73794 - DNA, 338 bp, Oryza sativa
agcttccctgtatctgtgtaatttctctttcacggcattgggatcgtttgatcgatttccttgatcgctacttatgggcgtgcgctcaaaggatacaaacagggattcgcaaacaaaaaggggaattcgtagtcactttttcctgtcgcgtaaaaaaaaggctttacgcgagagcaatataaggtgggatacatctatctcttctgagcaacctcttttggattcttaagaccacccttgcagtaagataccgtctgctttgggttctttattatattatctccttccagggatctttaggatcgttcacgctatatttagtctattttggcttttac

SEQ ID NO: 73795 - DNA, 443 bp, Oryza sativa
  unsure (1)..(443): unsure at all n locations
ctcaatgctgtgatttagtttntgatgcagcaagtcagggaaaaagcttcttaattgtttgttctcaaaaaagagcagcggatctagtagcatcatctgcaataaaggctcgttgtcattatgttaataaaaagaggttcagtggtatgttaacgaattggtcgattactaaaactagactttcttaatttagagacttatgagctgaagataagatggtaaaattccaccatctcccaaaaagagatgtggcaatctctaagagaaaattatctaccttgcaaagatatctcggcgggatcaaatatatgacgatgttgcctgacattgtgatcgtcctcgatcagcanaaagagtatatagctcttcgggaatgtgccattttggagattcctactatgtctttagccgatacaaatagtgacccagatcttgcgaatata

SEQ ID NO: 73796 - DNA, 412 bp, Oryza sativa
  unsure (1)..(412): unsure at all n locations
agcttagtgtttagnttgaacagcaagagcaatagtataattgaagcgtgtagcagccttgacaggcaagggcaacgagctgcctgcctgcctgcctgatcaggttctgatggagcttatgacgaacacaagaggccagagagaaaaaaaaaacgactgtcactgagactgccacgtatcactcgctcgtcttgtgtttgtttcacttgcagtttggcagtgatcgagcaaaaccaacacaaagctgatcgatttattactgcttctccatggattcatcacaactcaaatacagtctctctctttcatgcaattcatcaaatggaaggatggagataggagtaagtttggtcagagtggttggtgtagttgccagccaggctataaacaaacagtagattggtgagttggc

SEQ ID NO: 73797 - DNA, 222 bp, Oryza sativa
caaggaaatatatgcatcaaaaaatatgagtgccactagtaagacctcctcaagaactgagcacagcataatgctcgactgaatagcgcaagatgtggaagctggtgcagatcacctccataattcttgcaccgaccttgtatatcctgaagcacgggacgatgcgcacattcatcgcgctagctacataggacgctcatcaacatctacctaaccagattc

SEQ ID NO: 73798 - DNA, 414 bp, Oryza sativa
agctttagtgttatacaaatcaacgtaccaaatctctactaatataaaaattaaagatatttttactaatattttgatatgtcattcgtatttgagtcgatttttaatttctttcgtttttggaaatacataactgtcagggttatagataccacatacctaatagtagttgactaaatctcggtaggatccaccacataccatttcttatacggaaactgacctcgagggagttccggataagtaaagacaaccagagttctacatggaaacaacaatgactactcggattgtatccatattggtttccctagttctatttggacaaggggacacctatgggtataaatacaagcccccctatgaggagagaggacacgagagaatcaacacccaccatggaggatcaacacc

SEQ ID NO: 73799 - DNA, 440 bp, Oryza sativa
  unsure (1)..(440): unsure at all n locations
tcatgcttcagtaactacataatgccagatattctttattatgatcattagataataggcatgtcttatgtgttactagcacagacaatgtcagctcccacaagcatgagcacatatttggctgtaacaagcatgagtacaactcttaacttgtggtctgtggaagtgagatttttgttgccacacatgccgggtatatgtgaaagtttgcagaaactactcatatcaacacatatatttgcaagagctactttcgatcgtcgtgtcatgtatgctcacaaactgaattgaagcattgttgatgcaactttggttatctgcaaggtttaactagctgtttgctgctatagatgngtggtccaatggttcatctttgatcagagtgcattgtgtatggctgtgtgctgtgcatggaatcatattgtcatagctgataacat

SEQ ID NO: 73800 - DNA, 359 bp, Oryza sativa
tacttgtctttatagcataacacctttctgtcaggtacctttataatttgcattgcaccaatttctaagaattatatgacctgataaaaaggaattgatcagcatgtgggcagacacttgtgtgcgcataataatgccgaagccaaatatgcctaagtccctaaggaacacaatgggccacgcgtgtacaaatattgtgctgaagtactgttcaggcctaagcccattaacacctccgatacccttaactgacaaatcctatatccaagcgacgcttcgtcttgcccgccggaactctcgccattgttcccactccctgctacagtgcacagctgcgccggcgaactatggttcacaac

SEQ ID NO: 73801 - DNA, 430 bp, Oryza sativa
ttcaagtcactctctgaagcgcttttcgattgtttgtataccaccacaaatacgtacttcatctttctacgattccatctgtagtatgatctcgatgcacagatctcttgaatgcaactgatctcgcaacttgctaatgctatttgctagctactgaattggtggcccgtggtttcaacaatgactgctaattgctcgatcgccgtcttgccttgcctgcagatcactgcatctggttgggggcacgtcggtttcaagggagcatgccgccatgtcgttcaactagtgatgccaaaggagctctttggatccaccttctagctagttcgagcgaggcatcctgtcttccgcttgtttatcaaacaatcgattgggtcgtgagctcggctctggctgatgctaggcgctgctactttttggagtttgtgag

SEQ ID NO: 73802 - DNA, 410 bp, Oryza sativa
agcttatgatgttaataaagtcttgacaaaggatggccaagacctcggcataaacatgattcaaccgaatggtcacaagtgttgatcttggttcaagcattgaccccaagttggatggtgcaaggcaaaggtataatcgagccaagaatgttttcttagtcttttttcccgctcttggtgtttggtgtagaccggatttgttagataggcatcgtactatctggaggggtctatgaagcgaacatgtggatgatcttgtgccatattagttcatatgcatgtaggtgaattcggtgggattgtctagccaagtgtgaagtgtgatgagttttctcatgtcccaaacaaagagagaagtgggcatgtctaatatgagtgagtggcatcttgtgggtatgtccggtggatat

SEQ ID NO: 73803 - DNA, 432 bp, Oryza sativa
  unsure (1)..(432): unsure at all n locations
gacctataaaactcagctttaacggtcgattatatgatgttacttatagttgttattttgaaacgaactttataacagttaatgtgtattcgtttgtacctcatattaattgtcataaatatcggatactatatcagcttcctttattttcttaaaaaaggtcagatgaaaaagaacttgcgtcttggccaataagtgtgtgtactcgcgtttagtatgagcgctagcacaacacccactggaatctcacatagcaggagacaaaggaagagcacacacctncaggctcgctcaaccagcagagtggacatgactgcacacaatggacattctcgaacagggcaaaaatcgttgggagcggcacggccaagtgacaacaatggcttaagagtgtcgcccacttcaaaggcccagggatgatgatgattgatg

SEQ ID NO: 73804 - DNA, 397 bp, Oryza sativa
  unsure (1)..(397): unsure at all n locations
agcttatattattacaataataaaaaacacaaaatcaactctaanaattaaatttaaaaatataatntttgttacgtttgatatggcatacccgccacggcaggttccctcccaaggacctagtagaccatcgtgaattcgtgattgagtcggagtcccagcatcctatgggccagtagcagttgccactcncttccgacgatgacccaaagcccgaccgaccacgcctctgagctcattgcttaacccccggtatcgattcngctgcgccctgagttcncctccacattttaattttaatggcatccttaattttccgngaccatatttgactatatatcttattcgtaaagcatttgaaaatgtgaaaaacatatgtcacatatacagtactcac

SEQ ID NO: 73805 - DNA, 353 bp, Oryza sativa
  unsure (1)..(353): unsure at all n locations
tagagtcatgcanagaactggccaagttacgtggtaaagatctatcgacatgcaaccttagttcattaattgggatcattttctaaacatgggtatgatcaatacacaaaggtttgaacctcaccatacaacttttataccaaaactgatgccaatttttatgttatcgtgacggttagatagcaagccacagaattatcacaactcttggatctagaaaacgtcaaattagatctgactactgatacatatcatgattcaattagatcactaaacaagtactatagcatcgagcagggtatccaatattcataaattatcatcgatgtcaaacactgcaatcaacttctcat

SEQ ID NO: 73806 - DNA, 346 bp, Oryza sativa
acccactaaatctatccacaacatattcatccatcactagcaacaaatccatagacttgccaagtcaacacaatgctgtgcacatcgttagacttatattacgtgataaactatgcatcctccatacaatccaaagaaggggggaagtacatagtttgcttacccgctgtgcgtctctatggcctccatctggcggagtacaatccagatgcagaatgtgagcatgtgaccagatgcaaacgctggcccgacatatgaggtgatgccgatgatgagcacctcatcccagcgtgcatatggcgcggcgaatgcaatgggtgccgtgactcatggcggacacggtgga

SEQ ID NO: 73807 - DNA, 400 bp, Oryza sativa
  unsure (1)..(400): unsure at all n locations
tatcttgaacctttgcttgncccgagtgaaggacgaaaggaaacaaagacttggttgttgatcaggagttactactatgctgcatatctcaaagatacaggtgcaaggtatatgtattctctctcagattaaataatctttggcacggtggcttacccttacccctgattcccacgagacactgcttctccttgccttgtgcggttgaaagacagaacaacaactagagcaccaatcacccgatctttattcaactcttattccggaagttttcaaatgattttggaaaagaaaaccaagttcctcaattgattcacttagtccctctaagtgtantcaattgaattcctcaccaaatgaatgccttttgattcctactctaaggttatatgtggagctc

SEQ ID NO: 73808 - DNA, 398 bp, Oryza sativa
  unsure (1)..(398): unsure at all n locations
ctatctcttacgatccaggaatggatcagtcagatcttcctttctgctngctttcgccgccgccgactggtgtcaccgcctgcacggctggcctattatgccgctgttgttcggtgtcaacgtcttcaccgaccggtcgtcttgtccaccgccgactggtgtcaccgcctcaacggctggcttattatgccgccgctgttgggcgtcgtacgtttcaccgaccggccgactcatccgccgccgactggtgtctccgcctaaacggctggaatattatgccgccgttgttgggcgtctacgtcttcaccgaccaggcggctcgtccgccgtcgacttgtgttttcacctgcacagctggcatattatgccgccgttgttgggcgtctacgtcttcaccg

SEQ ID NO: 73809 - DNA, 186 bp, Oryza sativa
  unsure (1)..(186): unsure at all n locations
caagctgcttttatttttcttgattttctactcaaaacccaaaatgatgatgttcgcctgaactgtattggttggtatattcttattattcttcaatatagatgttgatttctaacaaaataaatacattacattcgcatgcatgttatggacagagaataggtactccctccgtccnctaatata

SEQ ID NO: 73810 - DNA, 454 bp, Oryza sativa
  unsure (1)..(454): unsure at all n locations
tgatgtncactctcacaggcagctcaactgagatctaagctcttcgtcttcttcttctggatcattattcttcaactgaagtttgacgattatcgcaagaatgagcatatgacatactcaacaagccacatatcaaatatgcaagtgcacatggataccaaaagatggcataatataggctcatttgcgaaagcatgctttagcaaagagttgagaatttgtaaaacagtagagtgattaatcatcaatattaatcaacactgaatagcacacccatgctgcacatgcccaaccaaacctgtacaaccaaccccggtcgtacagatcaaacctccataccaggaattatccattccaaaccaggagtctaattaattatcacattattaacattaatgagtattgtgggactaatcacgaaaaacattgctcaactcgcccattaccatgggca

SEQ ID NO: 73811 - DNA, 391 bp, Oryza sativa
agcttgaagacaaattcttggtttggagttaactcatgtgcttatgaataacaatgaagcaattgacagatcggctaactttggatctaaaagggaagcatcacattctgatgtttctattaagcatctttatgagccgattgcaccgacgaagaataagatggaggatgaataggccaaggaagttggaatgattgacgccgactggagagagccattattaaattttggactcaccagaaacttccttaacacaagaatgaagcgtaacgtatttctcgacgtagcacactttatgttatggttgaagctgagttatacaagaaaagcccgtctggtatttacaacattgtgtttctctcgatgaagatagacaatcgctacaacacat

SEQ ID NO: 73812 - DNA, 382 bp, Oryza sativa
  unsure (1)..(382): unsure at all n locations
ctcagctgatctctttgtggcatactccttcggtggctcaagttttgttgtggactttgtcttgcccaatcatatgacgggagagaggagtatgtttacaagtcttgatgaagatggtggaagtcgtgataatattgtctttggagatgatggtaaaggaaaggttatgggtctcggtaagattgccatttccaagaatcaatctctttctaatgtcctccttgtcaattctctaagctaccatttattatccgtgtctcaattgtgtaagttaggatttaattgcttgtttaccgatgtggatgtgacccgttttatgcgagatgactcttccatagcattncaaggtgtgttaaagggtgatctctatctcgttgatttc

SEQ ID NO: 73813 - DNA, 309 bp, Oryza sativa
agctagagtttgtttattataggctctattggactatattgcatactagaataggaagagagtctagctcaagaagtcggaagaatttcggagatgtcgggaatcttctctcatttcttttattatgtgtattactctgaattcaatataatattatttctgagtaatttagatatatcttgtgagaattatctcttcgttagtcctctctgtccgggtacatagcagagcgacatctatgaacagcgggttgccagtgcctgaagtttgtgttatgattaaacttaagtgctaaacgcggtggtggct

SEQ ID NO: 73814 - DNA, 377 bp, Oryza sativa
  unsure (1)..(377): unsure at all n locations
tcttacaagatcttaccaatgcaagaggaatggtgatgttctccgactcaaccaagcaccgcaatagatgttggatatatcgatgcctcggcaaacacttgctgtacggctgcaatcaaatctgtggagctctgggtatgcttaaacatgtatcaaaggaataacacatgctcaaatcagagaacgctaagttgaataattgttcagagtcaagtaccgtgctggtcctaggctagaacgtactatagacgcgagcctatacacaaacggtaccacaaaatagcaccagaaacaactcaagcacactctgatgtatgaagttcagctcaaacaaaacaatanttgctcctttctctctatcatcgttcttcattact

SEQ ID NO: 73815 - DNA, 422 bp, Oryza sativa
  unsure (1)..(422): unsure at all n locations
agctttgaactttagaaaaggaccagacaaacccaagtgcgaataacattttcctgaaagcactaaagcactcccactaatatgattatctgaatcggatttaagataacttaataaaattagtagtactatcacattaattttaaggtttggaggttgcttcagggtgagatcaaccgcatttctaactggtaacatgacgagctacgtaatggaagtggttgtgtgatcgactaacgacagaggccaaactaaggcacataatnttataattatctagaaaacctacaggatgatattagagggttcttcctagcacgacttcttgtagctagaacttaggggtaatttctcattcttaaaaaggtatcaggaggtgtcatattttctatgataaaatctggtacctttagatactacat

SEQ ID NO: 73816 - DNA, 429 bp, Oryza sativa
catcgacgaaagccttcaacacgcggtcactgctcctgcgccacatcgccagccaatcatcgttgaggagctcgaccccggctcgctccagctccatccatgcaattgggttggatgaagagagggtgagagagaagaattgatcccctctcccgcacactagcctgcctgacgtgaccatcttttgttggcaaaggcgctgtcgcaagaggacaaaagtctggattgaagcccgtcaaagaaccgcagttcccccctgacaatgcaactgccgactccgccatgatcctgttgcccgcgtcatcctcaagccacaagaccgtctctgccgtcggcttggcatcctctacgccatgccgatgacaccctccgtcacagtgcttgcggcactggaacgttcgccgaagcacgacgctctctgctcaaatc

SEQ ID NO: 73817 - DNA, 369 bp, Oryza sativa
agcttccattccacaccagcacgggatggagagccaaacattgcatacaggatgatcaatatagtgatggagagaacggcccaaatcactgcatactgtattggcatatcaccaggaatttggctaatgtagtatgggagtaaagaaacaagtacttgccaaaattggatgataagtagtactcttgcagatttaagccatttccacgatccaccctccatttgcaggtcatcagcattaccctttgttttacattcatcctccaatttccccttggttttactaccaccagcaagagcagcagcaactattgggaggggtgccaggagtaatgcaaacggaatcatatatacaccaactgaaatgaac

SEQ ID NO: 73818 - DNA, 324 bp, Oryza sativa
acgcagcgccaaagtcttttgagaccgtagacatggtctcaatgcaagagctgtgctttggggatgttgtgatgtcgaaattcaaagactttttacaatatgtaaccttctaatatcattcttttcttttctttttaattttgagaaagagaggtagccctctcccgtttccattatagaaacgaaaccttatagatagttcaggagaaaaatataaaaagggctacatgatgagaatatctgggatgccaccacaagatgccatcttcaagccgagcgaagtgatactagagcaatgatagagcttgccaagcttaaacgaca

SEQ ID NO: 73819 - DNA, 412 bp, Oryza sativa
  unsure (1)..(412): unsure at all n locations
agcttggtattgtttagagtcttaaagntctcctctcctcaagatatgtaagggaccttgctactctagtgagtgcatatggcatcagtatcaaccttgtggaggtcacatggaaatcgaagctcaaagcacaggtaactttctcagctttgtttgtttcatcttcagattaatttgtcaaacagatgttctaattaagtatttctttcttcatcatggcagttccctagtccaaatgagtattcatctttcatgggtgatttctcaaccgctactggcattgctactttcacaatgatgctgttaggccggatcatactccgaaaattcggctggcgagtggctgcaatgatcacccccacagtnttgttgctgactggcgtcggtttcttcttcctgattctatttgggc

SEQ ID NO: 73820 - DNA, 404 bp, Oryza sativa
  unsure (1)..(404): unsure at all n locations
gagtatcttctggactatatatgcatgcctcagaacaagatataaagtgaattgattggaacttctcatagtattatgttctgtctctgtaatcagtcgaagtatttgctgttctgtttagtgcaatcatgacccattcttcaatcccctaatctgatttgtttcaccatttttcttgtgcaccttatgntttagtgttatggcatttctaatctgtagttcagtagtttatattcgagaaataaagcccagtaccttttgcaattaaattttctactaattagaccacaaatntcaaggcgtgatagctagcatactttgcttccttacaggccacatagttatatttntatatagtgcaatttcatccacatgagtaatgatcctacagatcagcacaacta

SEQ ID NO: 73821 - DNA, 432 bp, Oryza sativa
cctaccaaaaaccagcaggtacaatcagaagaacctttggatctgcaaaataagtgctcctcggaacatagtgaatcttgcactatttccgatgaagactgttcatggcatgagatcttgaaggtgggacctgaagaaaggaacgctgctcggaaggaaaacaagaagaaagtagagcagataagagagaagctcgcatagataagatcccaaaggctgagaagaagaagaggaagaaaatggcaaaagccaagtgcaagcggtagtccatctgtgtgtcgcaccaacaatggtcaatatcatcaaagcttaattagctattaaaatctactaaagctatcatatactgttcaagtaaataccaatgtgagatggcccttatgaatgtatgcaattggaagatgaattttatattgagtataatcccttgca

SEQ ID NO: 73822 - DNA, 403 bp, Oryza sativa
agcttgacataaccaaagcttttgattcggttagatgggattacttaatcgacctcctccagagaaaaggcttcacatctcggtggactaactgggtctcaaacatcctatcctcgtcgacaacaagggtcctcctcaatggatgcccaggatcgcctataaagcatggaagaggcctccggcagggtgaccccctctcgccgctgctatttattttagccatcgacccactccaccaccttctagagaaagcaacaaaattaggacacatgtcccctcttcgcggaagagctcccagattccgaacctccctctatgcagatgatgcggccatattcgtgaacccaagtgtccaagacatgacaaatctcactagctttctaagcgaatttgggcaagtgac

SEQ ID NO: 73823 - DNA, 489 bp, Oryza sativa
  unsure (1)..(489): unsure at all n locations
tcactgagaaacaagctaaagcggcagaaatatgaacagttatcttcacatttctggccgccacttcatcacaaacatgaaccagtcaccatctgaaagatgcaaatgaagtttgctaatagttgcttaagtagtacgcgagctgctcacactctcgcatccagacattcaatcggtgaacatctccaagtgattgtcttgatggagaattaaagaatgccaccgcgtactatacttatgttntgggagggaatgagagcattgacgagatggggacagcaattctcttctaattttcttctacgtttgttcgtgcaagatagagaccggtacagcaatgtgtgctccaaaatccttnggaggtaaaagtggagcaatcagaacctctaaatgtgacagtgggatcaacacaattcgggaatctactagagattaattgggtgaacgagcttctgctnctctcgtcgatcggctactttcatttcttaa

SEQ ID NO: 73824 - DNA, 391 bp, Oryza sativa
agcttgtgattatcttctttggcctacactggtaaagcacgtggctaactggctatgttacactacgaggatattatcaactgcaggcgtgcgcattaaacaggagatatcaacctacaaaaatctatagcacagttgaggaactttacagttttggatgccgacggccttcaagatggcgatcgatagcattgtgagtttcctgtaagcttgggaatggcccacccagatcaggatatgtgtggacagatcctgcagatcgaccctgatgtaaaatgtgagtccccattgacacatcagccgggaccaaatgcgtgagataggagacaatgaaaggcagcgccttgatggttcggagaactcaatgagatcctgagctactgctacttgc

SEQ ID NO: 73825 - DNA, 274 bp, Oryza sativa
agcttcatcgtcatcactcgcctggatttttcacattatggtccttctgaataacccatttcgggaatacactggtcaaaaaactatctccatacatggtcctgaaccgggcgacacactggttgcagctgttgttcaaagcgtagaggaccgctcagagttcctgtatgacatacgctaccgtctgaaacaagcttatgccatactaaacaattatacaacaagtcccatcctgcattgaccatcagggtggggactgggttcttctgttctt

SEQ ID NO: 73826 - DNA, 127 bp, Oryza sativa
tagttggtatagtggtttagcccgagaggctatttttcgctgatagtgtttcttttgactctgttgtgttcacggtgaaggattgattcatgctacaagaacgaatttgtctcaaggtggagtttgt

SEQ ID NO: 73827 - DNA, 398 bp, Oryza sativa
  unsure (1)..(398): unsure at all n locations
agcttctggtattctttatcgagaaaacaagttccatctgaaagtgtttcacggtttactaccccgttgacaccacctcctatgccctggggtcctccaaggccggctaacatggcgcgtcattcttcaagccctaaacactntggatatgccccaaacagtggcgtacttccagcgccggccattggagcgcatcacattcctccatcagatggaatgcagccactctttgtagcacctgctccagttgctgctgcagccatgcctttcccatcacctgttcctttgccaaactcaacaacagcttggatggcagaaactgctccaaagtctgctccacaacgactcccagttcctggcacggnggtcttccttccttctggatcgggtcacgcact
